United States Patent Application Publication US 2006/0134663 A1 - sequence listing, part 56

SEQ ID NO: 132994 - DNA, 838 bp, Homo Sapiens
  misc_feature (101)..(126): n is a, c, g, or t
gaatgagatgctatgagcccctgagcgacccacaggaaagtacttatcaaaagctttgtgtcatgagaagatgcggctgtggaaggaggttcaaagcttgnnnnnnnnnnnnnnnnnnnnnnnnnntgatttggcttccataaagctcgagtagaatattaaatattgagtactgagtttttaattgtaaacttaagatctcatccttaactttacatatacatagataacagggtggtcatgaaaagcactttaacatcaggacagatgttaagttctgaggttctgttttcaactgctctacatacaaaatgccctacaagcaaagaaaggcttaaataaatagatggggatgaacatgatgcacgccgtggtgacatgagtggtgtgcaggggtcggacagtgcggaacccgggtgggcaggagcacattgtggagacacaagtggtggcatctctgggatgtaggggaggatgtggggggctccttcaaggtggagctagcagaggccatggctcgggaggaagacaggacagggacagtttgtgggccagtgccacacgctctcctattggcttcatgggcctgggggcagccctgggtagcaaaggacagggccaggctctccccctggagacccagagatggcggtggtcctcttaggacaaaccctcaccagccccgccctctgaccagcctgtcactggtgctgatgtcaggtggtggccagtgaggaagggggttattgacagccctgcctgtggctaaggcacacccagcctgggagccccgagcagctgacctgagcaatccagcgtctctttagtcacagacgcc

SEQ ID NO: 132995 - DNA, 541 bp, Homo Sapiens
  misc_feature (83)..(108): n is a, c, g, or t
ccctgagcgacccacaggaaagtacttatcaaaagctttgtgtcatgagaagatgcggctgtggaaggaggttcaaagcttgnnnnnnnnnnnnnnnnnnnnnnnnnntgatttggcttccataaagctcgagtagaatattaaatattgagtactgagtttttaattgtaaacttaagatctcatccttaactttacatatacatagataacagggtggtcatgaaaagcactttaacatcaggacagatgttaagttctgaggttctgttttcaactgctctacatacaaaatgccctacaagcaaagaaaggcttaaataaatagatggggatgaacatgatgcacgccgtggtgacatgagtggtgtgcaggggtcggacagtgcggaacccgggtgggcaggagcacattgtggagacacaagtggtggcatctctgggatgtaggggaggatgtggggggctccttcaaggtggagctagcagaggccatggctcgggaggaagacaggacagggacagttgagcccaggagatt

SEQ ID NO: 132996 - DNA, 1171 bp, Homo Sapiens
  misc_feature (807)..(820): n is a, c, g, or t
ataactgataattctttattactaaaggtttatttacatagtgtttaaagcataataaaaaataaattacaatacaaaagtgctctttaggaaggagacactaaacaacaggcccatattaccccttgactatttagccaagacataagctacaaattttgccggaaaaactgtccatacatttttaactacttcttcattattcttatggaccatcatccaggacatctgtttgaagaaatatccagttataatattttcaaaggttagaattgtgaagaaaaaatataaaatgtgattaaaggatatatagccttcagatgtaatttacagttttaaaattgcactttaaaactttgcttttttagacagtataaaaggcagaatgagacagatatgtaatgaatttcagaactgaggttcatatgtaaatcatacaattttttaaaaaatagtattggaaaaatatcaaggtctatacatttaaatacagataatctgtttgaaaattccagtttgttaaaagaaaaaacatctgcagtccagtcgattaaaaactgaaaatatcaatctgtaaagattgatcttgagcctaaacttttagatgctttctatcctttgaacaaatgcttctgtatcttaagcttgtaacttttctttcatagcccacttataaagtttgctttatctaccagtatgggggaaaaaaaagaataaagttggttttattccatttaaagtagttttggtatttctttgctccataccaagtcttcctcccccaaataaacaagtgaattagaattnnnnnnnnnnnnnngttaataatttcttctagttctcagagttttatataaaactgtacaaaattatcatcatttagagttgatttttttcaccagccctgaattttcaaacttgtaatatgctgtttcacaatctttttattaaattacttaatgattccagtctgcaaatgagcatagactttgctctgttgttatagatcattggattggggggtcaacatagtaagctatactatccgtcactcgctcatgaaagacccacattgttgtttatttttcccagcacagaagaaaagtgacaagtgattcatccccggccgtaatggccgaattcccgggcatatgtccggtaccgtcgactg

SEQ ID NO: 132997 - DNA, 1737 bp, Homo Sapiens
acttacaaaattaattttattttgcaaaactcaacaaatacatgttcagatctggtttctcttcaaaacatgtgtttgtttttttaacaaacatgcaagttaatttggcatgccaaacatctttctctctagctcgccttggaaaaatttttttcataacacaaacaagggtgcaaatattgtccaaacctatttacatttttaccctctagaattacatacattaatatttattgggaggaaagcaaaactgcaaaacgtagtctttggcattcacatttgcttcagcagtataattaaaacccttatatttgttttaaaagataaacagtttgaaggaaatttaataaatcttgttttggctctgcaaaggagcccctatatcaaagcatttaactggagctgttgagttcctgctggtagaatattacttccagcctatttattagcttgtcttccggtggcccaatacatgcttttttccctctacactgaatgaaagtacaaaaagaaaaccatttcttttctctttttcccccagcatcatgcaaggcaaggcaacaccacaaatacaataactgaatttactttgattatactttagtttcttacacttaaaattattttgtattataatacttccttggttatctaaaatcaacattgttgattttaaacggttataaagccagactttaagaagcatttaaaacaattcatgaactctgtatgaaaggaaataattgcctccagcttattcttttgcatttgaagtaaaagaatttccagtatcatcagtttactagaaaataagacttagggggtccatataatttattcacatctttttatacatcgtaaacaaggataggatacttctgacagtagcctataaagattttttaaaattttatccttcagtatagaataagtgtcaagggagcactttaagcatgattctggtaggtctgttaggagtctattttccagaaaaattttgtaggaaattgttctgattttaaataaactaaattcatagatttgtgttgacagaatatgatttgtgaggtaaagtcactgtattatctccggtctaaagcacaatgtagcatgtgcaaaagaaactaaagagacatgtatttcaaactccaggcagaaaggcagaatataagagtgcatagagaagagagtgcttttcaggtcagatagtgaaggaagacacaatagttacctaaatcaataagctgtaagcaacatataaatatgcaatgccatttcactgaatgtgaacaggatcaattagaaattgtactgtgatatccacatatttttgagaaaaattcccaagccaggcgaatgtggattggaataaagacataggcagtgtataccaccatagcaataatggttagtaagatggtgttaaacatagatcgctcccagggctctaaaacagcacagcagctaatgatttggtattgatagtagagccaggagaaatattccttcacacgcctcaaatccatggttggctccttcaagctgcagtaagtttgtcctaagaaagtccaggtctggttcttcagccttgctccttcgcgaaatgatcctgtgtgggttagttctcctctctgggttgctgtttcctcatctcccagttgggtgtatctccctgcggcttaggtgagcgccgaggctttggctcctccccagctgctgcgagcttcccactgcccc

SEQ ID NO: 132998 - DNA, 874 bp, Homo Sapiens
catctggtaagttttacattaaccattacaagctggacagtgtaagaatgtggcttttttttggctcaaaaagtctgagtcttggtgtggaaacgagtacttggctgtcccaccacagctttctcgtagtgggactgtcagggaagtcttgactggggagtatgatttgtttacctatcaggcgtaaacttccaggcactcagttcattttgggcttgttccagtttgtctttagtctgttccagttcacctttcatttttaggaaaaacaagttgatcgctgggtctaccattgttgatctcagttgggcaacgctcggctgctggacttgcttgaggtactggatttgagtagtacactcttgcatctcttgttccttggttgctagtcgcattacaaggatgttttccctgcgtgcagactcctgctgttgttgctttagtttttcttcagactctcttaggccagttacatcattagagttaagatctgtgtacttgccctccaaagcttgtacatatgcttcatattgtttccatcttagaattaactcatctcttgccataactttgaagtctgtttcactcaatcgaaccttcttgggaagaggttcttcgttggtcatcttgaatcaggagagtcgcctttcaggcgtggccgcagtcactcgcccgccgccgaaccccgccaggagaggaaaggtgaagggagggaggccgtcggcctagcccgatcggggcctcgaggcacaatggagcagctgctccccggtaacactccccgtcctttcccaggagcctggcgcgagctccgcgggccccggagctccctcgtgccgaattcaccacgccagcctcgctacctagccctatt

SEQ ID NO: 132999 - DNA, 1052 bp, Homo Sapiens
  misc_feature (1038)..(1038): n is a, c, g, or t
aaacggatgaatcggttaggtacgaggctgggtgttgaattcggcacgagggtcgcctttcaggcgtggccgcagtcactcgcccgccgccgaaccccgccaggagaggaaaggtgaagggagggaggccgtcggcctagcccgatcggggcctcgaggcacaatggagcagctgctccccggtaacactccccgtcctttcccaggagcctggcgcgagctccgcgggccccggagctcagcaagctcagtaagggaagcggccgaggggaggggcgggccagcgaggtcggaggtcagccccagggcatcacgggaagggaaggtggaagtactcgccggggccacctgcggctgcggggctgcctcgtgcggagggatctgggcgaaggcggcgcgtgattggccgctctgtgttcgtgacgctcatccgtgatgcttccgcgtgtcggaggaccaggtgccacctcaagagagaggccgtgggcggcgagccgcgggcgtttactcttagcagaagctcacctgtaagttttgagaacttagaaaccgatgccttccctctcatcagtcgtgaggcgcagtctcctggccgctgggttcgttcctccttgacatctctggagacgcatcgaggagctattgttctctggcgtcggaggttgcgctgtgtccgcggcgttgagggccccttgctaactggaacacggggaaggcggccctgtgaggtttagtgaactcaatcaaagaggtcctgcaagtggagtagactccctgaagcaagactgccatctggaccgccgagtaatggcggtgttacctggagaacgtgaaacagtctctaaacacttactagaagagcacgtaattcttttgattggtctgtccttagccggctttatcgaacctgttcatccccaaaaggagtgtcttgtagtaaggtgatttattaggataagattaaagtacattccaagatgggtcgtagtatatttccagtgaatcagatcggtctggagaaaatctttgcaactcggnatcacaagagctct

SEQ ID NO: 133000 - DNA, 924 bp, Homo Sapiens
  misc_feature (390)..(390): n is a, c, g, or t
cgtgtcccgaggagaagagtttctttgtacctgggggggagagtaaatggaaatttggtttctaccttatctaccaagggcgtgataagattttttccacgggccacccccaagtttcaatttttgggggccttgtctcccccagtttggttcttttaggtttgtgtttcccagtctcaccccttttccatttttttgggaaacaccaaagttggttccgcggggttttcccattggttgatcctcagttgggccaaccgctcgggttgctgggacttgcctgagggtactggatttgaagtagtaccctcctggcatctcttgttccttggttgctagtcgcatttacaaggatgttttccctgcgtgcagactcctgctgttgtgctntagtttttcttcagactctcttaggccagtgtacatcagttagagttaagatctgtgtagcttgccctccgaagcttgtacatatgcttcatattgttgtcgcatcgttaggaggttagctcatctctgtgccataactttgaagtctgtttcactcaatcgaaccttcttgggaagaggttcttcgttggtcatcttgaatcaggagagtcgcctttcaggcgtggccgcagtcactcgcccgccgccgaaccccgccaggagaggaaaggtgaagggagggaggccgtcggcctagcccgatcggggcctcgaggcacaatggagcagctgctccccggtaacactccccgtcctttcccaggagcctggcgcgagctccgcgggccccggagctcagcaagctcagtaagggaagcggccgaggggaggggcgggccagcgaggtcggaggtcagccccagggcatcacgggaagggaaggtggaagtactcgccggggccacctgcggctgcggggctgcctcgtgcccc

SEQ ID NO: 133001 - DNA, 1013 bp, Homo Sapiens
tagtgacgaacgcgcaacccaaaagtctggagaaggctgtcgcgccgtttgagaaacccgggcgcaaatgagtttgtcgccgccgtcttccctgcccctggtctaaaagactgaccaacacctgggttcttctcttaaggattgagaaattagtcccggggatcaaaacaatctgtgccaacccttcgtcccacgttgaaaacaggacacccttctctcttaccagcaatgtccttgagctggcttcatttcgaccctccagaggggacaatgcccttttctcggccagcctttaatttccagcttccatgcagcttcttttcttctgatcaatgtctttattatcgtctctcttccgtttttttgctttaacaggctcatcttcattaatttcttccattaattcttgttcctctttaattgcactcatagagaattgccacttttcggatcgacagcattgtcggagttgggtgccttagtttcttcaattcctccattccttttttatgagggggctcctgaataattttgtcaacatctgccctgccaatcagatcatcaggtcggtcccacatagaaagacgagtggtgggattataaaagaagacccgctcatcaccagtccaaacgacacaccatggagtaccaggaataggagcagtagcaactggctttgccttctgggcagccttttcttcttcagtcatctcctcttctttgggctcctcctttatctcctttataggctcttctttaggatcctcctcctccgtctccattggcagaggctcttcagagggttctttaattggctctttaatcttctcttctaacttttctttttcctttagttcttggggtttttcccaggttgattctaatgttctattattataataatatgtcttcccatctgctgttttatatcgacgcgtgggtcgacgatatcccgggaattccgaccgtaccagcctgctttttttaacacgagctgtctatagtaccatagc

SEQ ID NO: 133002 - DNA, 842 bp, Homo Sapiens
  misc_feature (730)..(764): n is a, c, g, or t
cggcttccacacctgctttgccagaagcacttgttactgacaaccctgaaccagtctcagcatagatagtagtaatagaaagaaatgctgctcctttctgtgctttaattagttgttttccaatttctagtgtcacgaaggctgtgccatttagaactatgtcagttatggttttccaagcattaggagaaagtctttcagtaggagaaataaaattccctgctgcattgtttatcacaatattaggatgtcctgcaactttgactcagttctgacacagtgttttgaaccatatcaggatccctcacatcacactgaattgcatgaaccttatttccagtttgagaagaaatttgttctgcggtagctttcacaacatccatcttccggctggctatcacgcactgagcacctaggctggacagaagagttgtcattcctttaccaaggccagtacctcccccagtaatgaatgccacttttccttgaaaactattaggtggtagcatcgctttttgaagaggtgaaaagaatttagattgcaaagcttcagtgttttgatataatatttttgtcccataactgaaaaacctccgaggagcgaggccacagggacagccgggaccccagagtaaagaaaacctggccggtagcttcatgttgagtctccagaactcacccggaccgtaatggccgaattcccgggcatatgtccggtaccgtcgactgnnnnnnnnnnnnnnnnnnnnnnnnnnnnnnnnnnncggccgcttcctcgctcactacttcgctgcgctcggtcgttcgctctgaaggagggcgcccatagtgatctatagacc

SEQ ID NO: 133003 - DNA, 1957 bp, Homo Sapiens
  misc_feature (261)..(261): n is a, c, g, or t
  misc_feature (449)..(449): n is a, c, g, or t
  misc_feature (458)..(458): n is a, c, g, or t
  misc_feature (516)..(516): n is a, c, g, or t
  misc_feature (627)..(710): n is a, c, g, or t
acagggggacggaagaggtgaggggacgcgttgttcccgcgaagtactctgtttggattatctgcatggccggaccggtgttgtggtatcactcaccgtcttggttccggagtacgcgatcacgccgggccgggtgcactgggggcgcgtgttacatacacgggaggtgccgtgagcggtggaaacaagttgagtcgggctagagaaaagagggagcatcgccatggtgtcactggccggctccccaccgcgaggcatgangggttttgttgcggtgtcagattcgggggtcgcgatagaggtcacggagttggccgccccgaccgtctttccatcctcgatggacagggcgtaccgcgggggggtggctgcattcactcgtgatgggcgggggcacgcggacgggggcgggtcgctggcgcgcacagatgatggcgtagcttcacggnggaccatgnagcggggggggagaaacgcgcgccggcggggggcatttggtggggcgcatattcacgnggcggttcgtagcctataaagatgatattgtgtttagagagagagtgataggggcgaggggtgcggcctctgttcgaagcggtatcatcgcacgggcgggtagttccattnnnnnnnnnnnnnnnnnnnnnnnnnnnnnnnnnnnnnnnnnnnnnnnnnnnnnnnnnnnnnnnnnnnnnnnnnnnnnnnnnnnnctgggccttgcctgcggacgggggggcaggcagtccggggagggcatacgcgttaattaagaatttattagacttgaaatagtcaaaagatgagagataatttgtttcatttctattcccttttctgtaaccaagatgaaggccaaagtggtcttaggaaccttttgtcttcctgatgagttcttctatggtgtcccactgctccttggtgacctttctcaggtcgttgaattcccctgaaataagtacttcctctccaccgtcaaatttaatgactgctccattaatccaagaagcataatcactacaaaggaaagcagcaagatttgcgagttcttctacagtccccaggcgaccacagggaattctgccaatcatttctttctcaaatgttccagttgggtccagacggctaaaggcacctttggtttttataggccctggttgaatcacattgaatcgcattccatatttaccccattcagctgcaagagacttgctcatggcttccacacctgctttggcagaagcacttggtactacaaaacctgaaccagtctcagcatagatagtagtaatagaaagaaatgctgctcctttctgtgctttaattagttgttttccaatttctagtgtcacgaaggctgtgccatttagaactatgtcagttatggttttccaagcattaggagaaagtctttcagtaggagaaataaaattccctgctgcattgtttatcacaatattaggatgtcctgcaactttgatcagttctgacacagtgttttgaaccatatcaggatccctcacatcacactgaattgcatgaaccttatttccagtttgagaagaaatttgttctgcggtagctttcaaaacatccatcttccggctggctatcacgcactgagcacctaggctggacagaagagttgtcattcctttaccaaggccagtacctcccccagtaatgaatgccacttttccttgaaaactattaggtggtagcatcgctttttgaagaggtgaaaagaatttagattgcaaagcttcagtgttttgatataatatttttgtcccataactgaaaaacctccgaggagcgaggccacagggcagccgggaccccagagtaaagaaaacctggccggtagcttcatgttgagtctcccggacgcgtgggtcgacgatatcccggggaattccggaccgtacagcctgctttttgacccactgttcatagcaca

SEQ ID NO: 133004 - DNA, 697 bp, Homo Sapiens
  misc_feature (642)..(642): n is a, c, g, or t
tttattttaggctcaaggaaacttccctgctagtgaaacttcactctcaacaccactcaatgatctaacagcttcctaaatccaacttcattctttttgcagtttaagcccagtttcaaataaggcatcactgggatggataaagaaaacactgagatgggggatagaaacattaaaaagcagaaaaactaagcaaaatctaaatcctgtcaattggatgtttaccatttcacactgaaatctttccctgaatagaccagggacatcactgcctcctgctcagatctcaaagcttcaacatgctccacaaagcacctccctaagtaccctagtgtgttccctgggagagttgctacacagcccatctactggatttagtaccatagtcccagcacttggcccagggtcctagactgctgggtaggtcctcagaggtatctgaagtcatgtctacattgatacaaagaaacgtatggctcatctgtaacaatacgtagagaaacacaattaagaacaataaggatcacagaactcgaatggatcattataacttcaagactcagtttaagttaccaagaaatgcactgtagcccttttctcacttttatattcagatcagggctgaacctaacatgttcttanatgacacttatggtcatttacgtggtcaatgggaatattgcagcagagaactgct

SEQ ID NO: 133005 - DNA, 1744 bp, Homo Sapiens
  misc_feature (170)..(190): n is a, c, g, or t
  misc_feature (342)..(374): n is a, c, g, or t
ggctcttttgtaattttaattgaagcaatcctattttttttaactctctcttataagcaccaaattttaatatctaagtcaatttttggggaaagaaacaccatcaagatcttccctccagcaaaacaacgatgttcactcctccaaatatccaaattgaagatctaccnnnnnnnnnnnnnnnnnnnnngcccacagagaaataaaaaggaacaaaaatcacattctaatggggggggtcagtgcatttagcagtcttcgctgtgctgtctaaccatccttcagctgactttcaaaaaacaccctaagctcatcaaaatatacattttccatttgcttttnnnnnnnnnnnnnnnnnnnnnnnnnnnnnnnnnctttaaggaattcacaatcaattgcctgactcattttgatgtcatgtacagcatatggaggtcaggaaggctatttgcagcacatgtgattaggggctactgatcttcagggtttagctttcttccaaacagtgtaaaatacccacaattccaagtatgaagggacacagacgatctcctttgaaaattccacaggacaatacaggcgccccagctgttcttcatagagcgacagtgcttctgtcagattgacacagttcccctgtgtaaaatatttcccatcctgtttcaacactttcattgagaggtcaagaatcagtctgagaaactcccatgtggaatcttcttctggagacgtggagattggaacagctgtcaaatcattaatcacataatcaaattctctcccttctttggcgtacctcttcagtaccgggatacagtcttctattagaacctgatagcagtctcctttaagattgtctaagacatcgccacacgtttttcgcatgtatttcttacacccatcaatcaccatttggtcaatctctaccatagtgaccatctttggttttagtttgactatttcacacaatatgcctccgtctccacctcccagaatgagtacatctttgccagtgtaatcttctttgccactgcccatgatggcccgggtatatgccaaatcactctctgccaaattaacatccccactaaggatgagaatatttccaaactgcttcgagtgtagaatttttatattttgataaggtgaatcttcgtcatataccacttcatctatgtcatattcaaccaggcgcccgtcggcggtgggccagtatctgtcgatggctcctcctcgcactatgggtggtaatcgtttcacccgcccagtactgtcctgactcaattctttcattctttcctctactttgttcaaaatactgtcgatctcttctttgccttgcgcatcaccatcataactctgaaggtccagcaacaccaatccatgtgggtaaattctcaaattggcaaagctgccgttcttgtttgtgtaggttgctaaatagccatggtcctgccaggtgtgcaccgactccgccatcccctgctcctggaaaatggactggaggccttttagaatggtctcaccatcagctttggcgccgagcatgaagtcgagcgtgctgtgccgtgctgctgccatagtgaggcgaggccctgtgccatgcctgggggagcagccgcgggagactggggggccgcgcggcgtgtcaggctgcggccggctgggagtgtgctgcgcccggcctcgtgccgaattcgccacccaggcctcgctaccttaggaccgttatagttactgccgg

SEQ ID NO: 133006 - DNA, 665 bp, Homo Sapiens
aaagtctaacaactttggtgtttatttttgctttaatcttgtcatgggtaaatttttagctgttcatttttatacaacaccacaggatcagagatagcatgaacacattagtctctacaaggctaattctacccgagcacccatcaaagcgacccaaatgacacgccatgcatcttgagtgaccgtgcactgccatatactctgagctctactacaggtaatgttacaccaaattgacattgtaactgtgtttcaaatgtctcttagagacaaatacagatcagtaggtataataacctctgaagacttccaagagtaatgaggtttcgccaagccttgttgtatttatcatggatggttttcaggaaataacttacgagaaagcctgattgattttacagtcattttgacctgtgatttatttattaagtacaatttgaagattcctaaaataaagtattgccaataaattatagatcctgtatctctttattaacaaataatcccttgtgatttttaaagttgcaagaaaatgctgatggaaaaattttcatgatgttgaaataggtataaataaaagcttatacaaagccactgtctcagcatcagcaggataagagagaagaactctgagacattatactgttccccataaaaacactact

SEQ ID NO: 133007 - DNA, 551 bp, Homo Sapiens
  misc_feature (395)..(504): n is a, c, g, or t
ttttttttagttagaaattacaagtttatttttatattttgaaaaaggcataatagaaaacaaaaataaacaaccaggcatatcaatatttgtgacatacacatacacacaaaaatgaatatgaggaaataacacgaagtaaaaagcatagtatgttttgaaaccaacgtggggtatgaacagatttttgatgaaatacaactaaaggttttaagtgtctatgtaatgttcgagatattacgatcactcttatcctactagcaaaaattagcaaactaggctttaaaacatgattcctgttgttttagcaggatttattttggtaatgatcctgcttccttataaacaactacttatcattgttgaagtcttcttgtgttaaggagtacaatgannnnnnnnnnnnnnnnnnnnnnnnnnnnnnnnnnnnnnnnnnnnnnnnnnnnnnnnnnnnnnnnnnnnnnnnnnnnnnnnnnnnnnnnnnnnnnnnnnnnnnnnnnnnnnaccacactctcagcaacctgggtgacagagtgagatcctgtctttac

SEQ ID NO: 133008 - DNA, 633 bp, Homo Sapiens
  misc_feature (152)..(207): n is a, c, g, or t
aattttaataatgttttatttaactcaacatattatcattccaacatgaaatcaatttaaaaaattactgagtttacatttttttggtactaggtctttaaaaatcagtgtatatttcaaacttagatgatatttcaatttggattggcctnnnnnnnnnnnnnnnnnnnnnnnnnnnnnnnnnnnnnnnnnnnnnnnnnnnnnnnngtaaataaagtgatgagatccatggaatttgatgcatgtttcagggtttggataagaaggaacaaaaatagactcttagaaatatccatggaaagatgggctgagaaagcatctccaaatgggacactatttgaagtctttacctcataatatatagcgccagaataatgaaagtagcaaattatttgagagataggaactgaatgaatagagcctctctccctctgtcttctactttggccaggagaccaagtgataccagggagcttcccaggggctaaatcctggcgggaatgagtcagtggaaggagacccacctagttacaatgagcatagaagaaaacctattgcttaagtcacagaaaatatagtttttattaacttccctcctgtctcaaggtttaatttacagaaactcctcgtgcc

SEQ ID NO: 133009 - DNA, 1534 bp, Homo Sapiens
  misc_feature (178)..(271): n is a, c, g, or t
  misc_feature (324)..(396): n is a, c, g, or t
  misc_feature (443)..(481): n is a, c, g, or t
  misc_feature (490)..(507): n is a, c, g, or t
  misc_feature (1274)..(1274): n is a, c, g, or t
  misc_feature (1309)..(1309): n is a, c, g, or t
  misc_feature (1333)..(1333): n is a, c, g, or t
  misc_feature (1465)..(1465): n is a, c, g, or t
gagcccaggaggccgagggttttgttatggggcggttgtttcaagaagtttctggaaaggtggggggcctaaaacttcggggctacccttagaaagaaacagttatttggttatttggcgctctggcggaaagccaagttacccttggggaaaaaagaatttggtagcttcttgatcnnnnnnnnnnnnnnnnnnnnnnnnnnnnnnnnnnnnnnnnnnnnnnnnnnnnnnnnnnnnnnnnnnnnnnnnnnnnnnnnnnnnnnnnnnnnnngatcacaaaaaaaagcccgctcattaggcgggttaaattcccgggtactgcannnnnnnnnnnnnnnnnnnnnnnnnnnnnnnnnnnnnnnnnnnnnnnnnnnnnnnnnnnnnnnnnnnnnnnnnaccactttgtacaagaaagctgggtcaggaaacagctatgaccatgnnnnnnnnnnnnnnnnnnnnnnnnnnnnnnnnnnnnnnngcctcgagnnnnnnnnnnnnnnnnnnctggtcccacagctgagtttattatacttgttttcttttacaaaattaaaaacatctaaaaccaggcccaagtggcagcttgagtccctccatttctggaaactgagaaggctccacctggcttgatatggacacagggtgtggggtggaggggaggaggtatggtgcccgaccaaggaggcaaggggcaagggtggcagactgaggagggagcaccgccacgagccacagtccctgagttataattcacagtaagaaggctcaggctgcagggggaggtcaaggctcagtgaggttctggggtgaccaggggtttccctggggaaggtggccggggccaagatgctctcgagccagtttagaggccagggcccttcctggccatctgtcccgtggcctagccgacactccgttcatctcacttggtgctctgggttcctgtgacagaggcccctggcctttcctgcatggcctggccatcaggggggccgaggacaccactcagagagtcagaggaagaaggcgattcgggaggccacggtcttgcagccgttggaggagaagagctgctcgtcttcagggaagaaggtggtgctgtccagcacagcctggacaacctcatctcttggctccaggcccagctgggccagctcgttgagcacgcagtgccggacgtggtgccgctggagcgggaggaagggcccactgcgtctaggaggcgctcttccatgatggccgagtttgagaagcatggtgcggggtgtccncaccgcgcgggagatgaccggctcagctcctgcangaggatctctcgcggtccgccggntgcgcacgcttcaatgcacctggtgattgctcgcaccgtgttgctagaaattacatgcttgcggactggtccgttacaccaggaggaccaggatgcccagacttctcaggctgggcactgtcatctatctanagagatgacggcaatgatgagttctgtgcctcggcgatctggccaggcattcctgaggtccttatcgag

SEQ ID NO: 133010 - DNA, 1367 bp, Homo Sapiens
  misc_feature (1205)..(1247): n is a, c, g, or t
actgccccacacgagctcgggcctcacccggatggcggctgcgacgcgcggctgccggccctggggctcgctcctcgggctgctcgggctggtctcggccgcggccgccgcctgggacctggcttccctgcgctgcaccttgggcgccttttgcgaatgcgacttccggcccgacttgccgggtctggagtgtgacctggctcagcacctggccggccagcatctggccaaggcgctggtggtgaaggcgctgaaggcctttgtgcgggacccagcccccaccaagccgctggtcctctccctgcacggctggaccggcaccggcaaatcctatgtcagctccctgctggcgcactacctcttccagggcggcctccgcagcccccgcgtgcaccacttttctcccgtcctccacttcccccaccccagccacatcgagcgctacaagaaggatctgaagagctgggtccaagggaacctcactgcctgtggccgctccctcttcctcttcgatgagatggacaagatgcccccaggcctgatggaagtcctgcggcctttcctgggctcctcctgggtggtatacgggaccaattaccgcaaagccatcttcatcttcatcagatggcttctcaaactcgggcatcatggaagagcgcctcctagacgcagtggtgcccttcctcccgctccagcggcaccacgtccggcactgcgtgctcaacgagctggcccagctgggcctggagccaagggatgaggttgtccaggctgtgctggacagcaccaccttcttccctgaagacgagcagctcttctcctccaacggctgcaagaccgtggcctcccgaatcgccttcttcctctgactctctgagtggtgtcctcggcccccctgatggccaggccatgcaggaaaggccaggggcctctgtcacaggaacccagagcaccaagtgagatgaacggagtgtcggctaggccacgggacagatggccaggaagggccctgggctctaaactgggtcgagagcatcttgggcccggccacctttcccaggggaaacccctgggcaccccagaacctcactgagccttgacctccccctgaagcctgagtccttcttactgggaatcatacctccgggactggggcctcccggccggggctccttaccccacccggctcacactggggcctggannnnnnnnnnnnnnnnnnnnnnnnnnnnnnnnnnnnnnnnnnngaagccgccggctcccgtttcggccgcccggtgcgacccccttacaagccccgcccgcgcgggggcgttcacgcgcgggctcccgcctctgctccccccgaacgagtatcgtgatattcg

SEQ ID NO: 133011 - DNA, 1347 bp, Homo Sapiens
aaataggcaaagatttattaatactccttgacacacaaacaggaagtgagaaaatgggcaactgacacaaatcgataattaactgtgaggacataggtggtggagtctctcctaatcctctattcttggagatctggatgcctgccattcgcgtatgggaagaacagagacagtcatggaaaacagcatttgatctagaaaggaccacaatgaggtcaaagggcggtctcagggcagtcttaagagctccccatccccaaagaactggcaaggactctccaggtgctcgtatgcgactgctgcccaactcccatcacgaactcagaagacctgtcattttctgaaattttcatgacttctaagacactagttattggggaaaacttcaaattatttaaataatgagaggcgaataacattgctaaactcatgaatactctgtatttaaaacctccactggcgatcagggcacatagaatctctactactgatccctgacgctggccatcccccaacccgtcggcccacggaccccagccctgaccccacctcctcccagcatcttacacaaggattctcatcacactccccagagactcgcctgcccagggcccctctctaaccccatatagctcaggtctctgatcccgagactgcatcaccgacctctccgactacctatttccagattagagtccctgatcccagaggcattgtctaaaataactagctcttacaactacgtccacttcaggaaccgccctgtgatgtcagaactttgaggccgcccggccagggctgcacatgctcagtgaggtcggcgcccgccagtaacaaacatggctccctgaagccgctcaggctcaagagcaacatggaggtctgcacttaatcgctcctctccgggggcggccatactgaggaggcatctcttccgtgcaggcaggctctcctggggacctcagagattctctccagcggcagcagaaaacgggcaatgggtggattcgggtccagattcttgcaggagggagtttgggatcgagatctgcgcacgcgtcgcagccatctccgcgcacagtggtggccaccgcgactggtgctgaagtgtcggcgcgtgccgggcgctccgctgggacccgggttgctcgccctgagtctcagctttctcatctgtacggttgggacaagtacagtaaccctcgcccgtcaagacgggccagggctgtggcgagggtccacgccttagagcaggcacctatcttgtgcagggccctgagacggggtctgactcagttcctgcggggaacttcaccagtgacccagtcagtgcccttccctcgtgcc

SEQ ID NO: 133012 - DNA, 1181 bp, Homo Sapiens
  misc_feature (619)..(645): n is a, c, g, or t
  misc_feature (1052)..(1098): n is a, c, g, or t
tatctattttattgactttcataatagatttttttgagaatattctttttttctgatttgagtttaagtagattataatttttcactagaaagcatttaaaatgctgctcattttccatagttagtgtggcttgattatctgacaaatcctgccagcagcctgtaggtctgatataccttatataacatcatctgcattattattattatagcagccattttataagcagataggaatatttaaataatcattatcagataatcaaatctaacatactcttaagggtaaattaatttaagaaaaaaattactattactaacatcatgattgtacaaccagttttacaattttgtacaacctttagttactaaatctgatttttgtgtatacttttcaaatgtctctttaatgcagtgccttaaaacaaacataaatgcgcaagtccagcttgatcagtttttcagtagttttccagcctttcttgattactagaaaataaaaggaaagaaaattttgagaagaaagataacagtccacttaaagaaatctccctgctggaactggttctttatataccatatgcagttaagttattgccataggaagaaagtgggctgnnnnnnnnnnnnnnnnnnnnnnnnnnnctcttacaggaatccccttttgatttaaggccacaaacatttcccctccgttgtttgtccatttagctgctgcatatgtgttgtaatggttttccagaattagatctttgaagttacaatcttcattgtattccttctttgcatagagttttccttcctcgttcgttgcaagatagaattcactttccacccctttgattgccacaatcccaactgctactgtcctgatttccatgatataagtgtgctcctggtggtctttaactgaagggcactgactgggtcactggtgaagttccccgcaggaactgagtcagaccccgtctcagggccctgcacaagataggtgcctgctctaaggcgtggaccctcgccacagccctggcccgtcttgacgggcgagggtnnnnnnnnnnnnnnnnnnnnnnnnnnnnnnnnnnnnnnnnnnnnnnncgagcaacccgggtcccagcggagcgcccggcacgcgccgacacttcagcaccagtcgcggtgatcccgggaattccggaccc

SEQ ID NO: 133013 - DNA, 549 bp, Homo Sapiens
gagatgacccatagtaccccattccttgctgcaatgtaattatatttaattacaagtgtgctcctggtggtctttaactgaagggcactgactgggtcactggtgaagttccccgcaggaactgagtcagaccccatctcagggccctgcacaagataggtgcctgctctaaggcgtggaccctcgccacagccctggcccgtcttgacgggcgagggttactgtacttgtcccaaccgtacagatgagaaagctgagactcagggccagcaacccgggtcccagcggagcgcccggcacgcgccgacacttcagcaccagtggcggtggccaccactgtgcgcggagatggctgcgacgcgtgcgcaggtaaagtccatccgtgccttgcctcccaccggcgccttccccggcctctggtttttgtccccgccagcggctccgactccatcgcgtcctcttccagtctagtgcttttttccagatctcgatcccaaactccctcctgccagaatctggacccgaatccacccattgcccgtttccgct

SEQ ID NO: 133014 - DNA, 904 bp, Homo Sapiens
  misc_feature (62)..(99): n is a, c, g, or t
  misc_feature (191)..(213): n is a, c, g, or t
  misc_feature (516)..(529): n is a, c, g, or t
gtgccatagctaaaattaaccctcaactaaagggaataagcttgcggccgcggctgtaggcnnnnnnnnnnnnnnnnnnnnnnnnnnnnnnnnnnnnnngttttgtttctttcttgttttgcatcaacttttatcagtccatgcaacttcaatgccctcgatgaaggatgcataaaaagccatacttcttnnnnnnnnnnnnnnnnnnnnnnngacttccttctgcataaagagatatatttgccacatcagtccctgtagcacagttttcaaaaccattctgtcaaaaatacagtaatacaagactggctttagtgtcactagcttacactgcttttcatgtatttaggccacctgttgttcctggtactgtatcatgcaataagtcatcaagggcttagtctagtgtaccggtaagctagtggcactgaagcgcttttcacaatctcaacatacatttgaattgcaacacacagatatttctagagtattaactagtgaacccttttattattnnnnnnnnnnnnnnctacttacaaccattgaagaaaaaattgcaccaaagaatgtaaaaattgaccgtctccaacttgtcccctttactattaacaatgtgaccaacagatctgtggcacggacacagtacaaagagttgtcatggcaatgagtttggctgatgcaaaggtcattgtgcagggtcaaagggcaaaatcagtggtccatgttaccccccaactgcagggctccactccacccacacaattttagggaattagaaaaaacaggggaactaccagaaagtgcaaaatatgaagaaggcagctttcagctccttcagcatggagtagaacattcatttttgagcttttactattgaacttgaatagcctgcacattaaaaaaa

SEQ ID NO: 133015 - DNA, 986 bp, Homo Sapiens
  misc_feature (308)..(361): n is a, c, g, or t
  misc_feature (474)..(474): n is a, c, g, or t
acattaccaactactgatttattgcttttaatgtgatgaaacaccaaatttgacagctaaagtagcagtgggatacaagtatgtttttatctttaatcatttttgtagaataggacatgtacatatccatataaaaagagactgtagcagatgcctcccagaatcaaccagttcttgtaaacattgcatttgtgcagattttcatacttgattccaaaattgagaacaataagattaaaggcaaatttagtagccacaaaaagtccagtttgacttcctgcaacatatggtaccactcttctcttcannnnnnnnnnnnnnnnnnnnnnnnnnnnnnnnnnnnnnnnnnnnnnnnnnnnnnttcagtactctttccctcccatcaaaaaccgaacaaaaataaagtgcagcacccataaaagtgtcaagaaaatagccaagttcttcctttcttgtaacaaaatagcacttggnctcagcagtcttaaccaaattatacagtgtccatcattttgggttcatcatcttctttatgtaccaccgagtttaagctgcagagagctgtactgatagaatactgaagataatctggattctgtggtaaggattctaataaacctatagatccacaccagaatggggaacatattcctgaactgtcataggttgacaacttgtgattgagaataaatcttatcctgacttgaagcttcacgttcattttggatgcttaaaataacttcttcctctgcttggcttctggaaaataacgaaacacctcctggatcacatacagttttggccattccatataactgcatacacagctgatgtgcattgttcattaagcccttcttctcactccagtgaacacataaaaagaattacacttctccatcaaggaggtggcaacaaatcctggtacatcatcatcacaacaaatgcgattttgccaattcccggccatctggtcaagcattccaatg

SEQ ID NO: 133016 - DNA, 687 bp, Homo Sapiens
tttatgtttcataactaaaaatttattaaggaaacaaaaccagtgctgcaaacgggacagaaaggagagctgggtctccctcccgaccacccagtcatcggccttccagctggggagagaatcttaaaggagaggccggggaccctgtactccaaagagcccagtcttctgagactctaggggactcctacccccaaactactggccttggctcccctacacggtaccccatcgcttctggcatagtcctgggcctcagggagggcagagctgcgcacccatcctccaggcaggctgtgcagtcaggccatgggctctggggtatcccccactggtcccattaagatttgcccctggctccaccgaaaaccccgtcttcccctaagttgtccttgtctctggccctgggtttcaggaactcattcttggtaaggaagcctccccactgaggtaccagctaaaggggcaaggaaagggcccctgtgtcagtgtcagtttttccggggagtgagggcaaagctagaaaccaggttaggcgacggtgccccagcactggaatgcctcaggctgggctgtccacgcctggaagtttctcccaacacaggagccgagggtggaaggccctgggtgggagacctgtactaggttcctgccatgggtattatagagggaaagtcagagtgggaa

SEQ ID NO: 133017 - DNA, 712 bp, Homo Sapiens
acaacttgcagaaaccagcccatggcaccttggcaccatgtgttcccaactgagatccgtgactctctcagctagaaggcaccaaggtcacttgggggctgcaatttcaccatccgtcatcagccgagaggaccagtaggcaggaatccaggacagtgctccccacggggcccaggcataacacaagagcatgggcgtgggtcccctagcactggggctgccagcatgggtgcccagcactgttagatgacagagtaaaatatgctgcaaaaatagaggcaacattctcggccatcaagaaatgtgatatcgctgttttcaaagttgcacaggaagaatcaccgtggaacctttactgagtttaaagaaacggacttaggaaggaattgtctctcacagcaagataagctgcctgctctagaggacagaaagtgagctgcgacaggagcgggcccaggagcctgggtgctcacccacacctctgtggcactcagacaccctcagctcagagcaggacagggccctgcacgccagagctcaacagtccacagtgaagcgcttccaattccaatggtgaaaacgctcgcataggggctcggcacggtggctcatgcctgcagtaatctcagcactttaggaggctgaggcgggtggactgcttaaggctaggagttcaagaacaacttgggcaatacagcgagactgtctctcc

SEQ ID NO: 133018 - DNA, 716 bp, Homo Sapiens
  misc_feature (636)..(636): n is a, c, g, or t
cattcacaacacagcactttattatggaatatgtgcaacttggtgtaaggatttctgaaattcataccatttacaggtatttaatgggttataaattttcaatgtcagaattatacttaagtcatgttagtaatggtcattccttctggcccaatggatttaaatcttcttctgcccagtttcctcttcaatcagactttccagagctcctttcaggtctcggaggggagaacgtggctggtgcgtggtgcattcgaagcgttgggtttctgccagttgaccaacctctttgactatctcttggaaagaatcaatcaaattttcggcatctctctttcctccagggcgcagtccataggaccagtgctggctggagcagccttccacgcacgaagtcagtagaataaggccagctaggagtttttgaattggcttcattctaaggcacatgaatgcacaatcaaattagatccagacaaggttgagtataaactaaaagacctctttagtgaaaaagctagcatctgtatcactaaccctgcagaagatggaagtcagagtcagtttttacatacagacactgaaactcagagacacttgctggcttgcctttagtttcttagccactggggacanaatgagtacttaagctcacatgttcaggacctttttagtactaaaatagtctatacttttatttttattgtttggttatc

SEQ ID NO: 133019 - DNA, 671 bp, Homo Sapiens
  misc_feature (111)..(111): n is a, c, g, or t
gtgcggcctctgggcacagggtgggggctctcacaaggcgacttgaagaggacgcaggcttccagaggacaaaccccaatacaggagaagcacaagacagagaagggccanatggggtcatcccctccctaacgagactctctgtgctgggggtgctaattacatggcaggaagaatggggcctctaaggggagtgtggggtctgtctctccctttttttccatctttttcctctctcgctttctttcttacacagaaacatacacataccgagaaacctatttctcagacccctttttctcctctgtctttctctctccctctcccacacctcacacacacatactcccacttgcaactattctgtttctctcctgggctcccccactttcccttccccaccccacttgtatgctctggaatctgtggagacgccagccctgcccaatcagagatgccaaaaatggggacatgacttctggacagaggacatgggccacgcccccatggcatccccacccccgcccctccggacggcttacttacctcatacgcagctcatcttaaaccaatagaatcgctcggtggacgagagtgtctgactcagatatctacctcggagggagtttctgctactttagggaattattgactgggctttggggttgaac

SEQ ID NO: 133020 - DNA, 845 bp, Homo Sapiens
  misc_feature (621)..(634): n is a, c, g, or t
  misc_feature (745)..(779): n is a, c, g, or t
tttttttccaggcttagttgaagcaatatattttgcaacaattattctttcaataaaggacttgtaaattctctcccacaccacgttagacaggtaagtgacgtcacttccaaatttcaactgttacatagaagatccagaatgtcaacaccacttgcaatctccacaaggttacaaacaacacatacaccttcaattcaaaatacctgaatgaaaggtttcatcccaattatggggaaaaaacttcccatctcacaggctggttagaaactggttctgaatacagcgtaacatacacagcaattcagatcttaagaaactcaactgttgccagttaatacagtaagtagaactttattcagcttcacccttatttcatttttccatatatttaagtgatcctttctataccttttaaggtaagcaatcatctcaagattatcagacatctaaagaaaactttggtaaactggactatagtaatcgtatgagaaaaaaatagctcaagattcctaactgctacaagaatagtgttgatgggatcaaactcctaattatcctaatagacctaattcatttttaaatgtggaaaatatgcaagataaattaaatgcttagttnnnnnnnnnnnnnngtttcaccaactgttctccattactgagaagcccccacactgccccactgtgcatattcccccggccgtaatggccgaattcccgggcatatgtccggtaccgtcgactgnnnnnnnnnnnnnnnnnnnnnnnnnnnnnnnnnnncggccgcttcctcgctaactgactcgctgcgctcgctcgttgggaagcggcgagctagcgccctat

SEQ ID NO: 133021 - DNA, 714 bp, Homo Sapiens
gctgtaagtccatttttcaggaatttttattaatatatcacagaacacatttttagtgatcctgaactaccctaggccacaggaagaaaaagtttacaggtaaacagaaactgtaaaggcagggctgaagtggtcatagaatctgctgttgggaacaggcccccaaatctggccataaactggccataaataaaatctctgcagcactgtgacatgttcatgatggccatgatgcacacactgaaggttgtggatttactggaatgagggcaaggaacacctgtcccacccaggggggaaaacctcttaaggtgttcctaagccacaaacaatagcatgagcgagctgtgccttaaggacgtggcagataactagccagagcccatccctttgtttcagtccatccctttgtttcccataaggaatacttttagttaatctataatctttagaaacaatgcttatcactggcttgctgtcaataaacatgtgagtcaaactctgttcggggctttcagctctgaaggctgtgagtcccctgatttcccactccacactctatatttctgtgtgtgtgtctttaattcctctagcgccgctgggttagggtctccaagaccgagctggtgtcggcaagtggcgcccaccgtggggcttgaacccagttgaagggtcgctggagtgatggttggagaatgtggaactaagctggag

SEQ ID NO: 133022 - DNA, 541 bp, Homo Sapiens
caaggagtaggtatacatatttattataattacacgattgttaacaatgtgtactgccatccaaaaatgaacatttattgctactttgttcactagcataaagatgcaatttacttacatagaaaatattttatatgctttgatactgccatgtgtaaacattcttatggatatgtttgtgaactaaaattgacaaatacatattcctatgttaccaacttaagatcataaaccattctcatgtctgctcattaaagctaaagggtctattacatgtgaatctcaattatttttatagaaacatcacacttgattaccattttctgcatttcagtggttgctgtttgtattgaaaacacactgagaaattgagaaatcaaatgtagtacctctcttaaaaagaggaattgttaacaagtaggaactaaactgccaaaagttattttccataatgactagagtcagtcatcacatacacaaattattatttatttatttttttcttgagatggagtcttgctctgtcacccaggctgtttcc

SEQ ID NO: 133023 - DNA, 994 bp, Homo Sapiens
  misc_feature (709)..(709): n is a, c, g, or t
  misc_feature (720)..(720): n is a, c, g, or t
  misc_feature (760)..(760): n is a, c, g, or t
  misc_feature (884)..(884): n is a, c, g, or t
tacttattttaaatccttattctgagtttattttatcctataactagttcaaatgttcacatgattaagggtttttcagaaaaggagtaggctggagagtccctcaacttgccttttacagccccttaaatcttggttctagctggccattttcttggcttctagctttgagagaagtaaatcagaagcatctaccttctgtaacctaaaaaggagatttggagccaggaggcatttcatgagcaacttcatgctgaaaagcctccttgtaatttatttcttgtggcattttgaagttctggtcaatctggccagcagactctgaaggaggaacctgttgaggcattcctggaatcagactggaagtacctggcaggaattcctgcttcaaggcctccttctcaagggggtttgtgtcctcctgcatgaatatggtcttcttcgtggaaacagtttcagaagtcagttccttgtgacacttttcacagttctgttgaatctgatactcttcctgtttcagcatttctgtcatttccatttccttgaggctactgtcatattcctcctgcaggtggatcttcttttccctattctcttcttttgcttttgctgttttcccctgtaatgataaagccagtgagcccaggtattctattgggtcactgggcccgaccttcgcactctgccagtgctgggcaggcatttccanagcactctcangtgttagttccatcctggcagctatcgcgcgccctcgtgnccgatctggctcgagggcaatcctataggagtcgtataaatcgtatcatgcaagctttcctgtgtgaatttgtatcgccacatccacacacaacgagcggagataagtgtaagctgggtgctangatgagcatcacatatgcgttcgccacgccgctccatcggaactgctgcactgatatgatcgcacccgggaagggttctatggcgctcgctctcccacacccggccgggg

SEQ ID NO: 133024 - DNA, 472 bp, Homo Sapiens
  misc_feature (61)..(259): n is a, c, g, or t
tgatttttagagtcatggtctcactcaggttgaaccacaggccaccatgcctggctaattnnnnnnnnnnnnnnnnnnnnnnnnnnnnnnnnnnnnnnnnnnnnnnnnnnnnnnnnnnnnnnnnnnnnnnnnnnnnnnnnnnnnnnnnnnnnnnnnnnnnnnnnnnnnnnnnnnnnnnnnnnnnnnnnnnnnnnnnnnnnnnnnnnnnnnnnnnnnnnnnnnnnnnnnnnnnnnnnnnnnnnnnnnnnnnnnnnnnnnnttaaaacaaaaacaatcatgggattacagatgtgagccactgtgctagcagaaagatgcctttttaacatgccacatcttcagtaacattaaaaatcaccaggcacacttggtttatcaaccaaggaaagcacatacctttccttcttttctttactttccttcctttccttactgttctgaggctttttaataaaatttcactcctgctctg

SEQ ID NO: 133025 - DNA, 1429 bp, Homo Sapiens
  misc_feature (225)..(233): n is a, c, g, or t
  misc_feature (1313)..(1347): n is a, c, g, or t
  misc_feature (1350)..(1388): n is a, c, g, or t
ggttcaaagataattttaataacttttcttatgaatcagttccaaatatattagagaccaaccatcatgttcttaaaactttgtaacttgcagtcaaatatatggattctatatagtacaaacatttccctacatcaatcaccttcagttggaaagtgcctctccttaaaaagagatcaaaactcaccttccaggtagtgattactgcgtaagtttcatggaggnnnnnnnnntatttataaatgtgaaattgcctctaaacaaggcaaggtacatttccatcacttgtataaaacaataacatgaagatcaccctgttttgtcttctccagtgaaaagtaaaacatttcacttcaagcataaacaaacgaaatgttggcatgcttacttaagttctgagcaataaacagttcaagatatttcaaagataagaaatccagttttcatctagataaagtgctatcctcttcattgttgcaaaatggccactaacattttccatttcaattttagttcacattatgcccaaagtttgcatgttcatcagtggatgcattaggtaacaaaaatatgttcacagtttattatagtgtatggaagttaagtggcttctaaaggaagccaagatctatgactcaaaaaccagctcaacagcaaaacaccaaatgacccttttaaaggtaccaatattcaaatgctctaataaatacatatataacaaaagtgaaaaaagtaactatagtgagatgaggttcttccaaaaaaattctgtcttgtcaagcattctaggagtctgagccaaagtaaacagcgccattttgttcattcctccccctgcccacggacacttcctttgagccacctctatacccagctaactctggtatgtccctctagggaaggttctgtatcagccctgggactcgccagtgcctcagtaaacagacggactatgttaaaaagttaagttgtacaacgtgctgatggctggaaagatgtagtacctttgttattcctgataaggaacaatgccgtgctgactggctaaggggaggtttgccagccctgcagccattgactgccacatcagcaggattggaaagataccttgaaaagcttagcagtgccggatacaggataaatacaactcacagggccttacataagtgtcactgaaaataaacaacatagagttattttcctgaaacttggttttggtagaaaggtacgaaaataacttttcattgtccacaaaaacttcccccggccgtaatggccgaattcccgggcatatgtccggtaccgtcgactgnnnnnnnnnnnnnnnnnnnnnnnnnnnnnnnnnnncgnnnnnnnnnnnnnnnnnnnnnnnnnnnnnnnnnnnnnnnataacgccgagctagcgccctatagtgagtctatcagttta

SEQ ID NO: 133026 - DNA, 312 bp, Homo Sapiens
ctttaggaaatagaaatttattcagcctgatatagatcatttatgaaaaactaacagcaaacatcatcctcaatggtaaaaggctgaaggatttttctctaaggttaggaacaaggcaaatgcttgctcttgccactctattcagcatagtgctgggagttctagacagagcagttaggcaaggaaaagaaatctaaggcatccaaattggaaaggaggaagtaaaattatctctgtttgccaatgatatgattttatatgtatgaatagaaaaccccaaagattcaaccaagggccaggtacggtggctca

SEQ ID NO: 133027 - DNA, 201 bp, Homo Sapiens
  misc_feature (49)..(62): n is a, c, g, or t
attggaccactgctctccagcctgggcaacagagtaaaactctgtcccnnnnnnnnnnnnnngaatacaaccttgcaggatgtctctcctggagacagcaagagggagaggagggagagggctctttcttagaaaagaggcctttggtgagcccagaagtttgaaaccagcctgggcaattcagcaagatcccatctctac

SEQ ID NO: 133028 - DNA, 775 bp, Homo Sapiens
accagaatgtagttttaatctacttgagaattaattcttttcaaaacgcaggagagagtggggaagccaaagcaacttgataaagaaatagataagctggacaaatgagagcgagctgaggagatatacagacctggaactcacagagaagataggagttaaactgccctactgggagctgaaacacctatgaagctgcagcaggccagttgatcaacagcgaaatctcaaagcaatatctagagtatttgtatatatcataagaaatcagatggggcaagatccaagtttgaactagaggcttctgtgcaagcaagacattgaatcatgactacttcttctcaccaaatttccaaaggctgacagatattgctgaaaaattcctcagtctgttgtcatactcttgatttatttctcagttttatcatcccgtgtataggatattcagggaataattgacactatccagttgaaaaggcttcctcctgataaaatgcaaccattagccagatcaaaaagtctctcaagattgaatatagatggcagtgagatatcaaatgggacctcagatagtggtgttggctctttatcattcaaaaacagagatgctatttcagagcaacattgaataatcatgtcttccatttcattatcaactgattcctcttccacttctacttcatatatgttttcatttgaggtaatttcaggagctgctggcaatgatagttcagctatttgagcaagattagataatttctcatgaattgcctcg

SEQ ID NO: 133029 - DNA, 724 bp, Homo Sapiens
ccaaacagtatgtataatatgctatctgctaattaaaatgctaaaagaagaagaaacagtggacagcaagaatacacacattcactgtttgcttatatatggggtaaagaaactcaggaaagttacaggaggagctaataacagtggttaattacaatggtagaggagaggcttggcagataagggactcgtttgcagatatgactttcctttgtgtacatttctatatattattttacttcttctgaaaatgccacataatttgcaataaatgattcactccttagctccaaaagcaagtcctttatcaaaatgcaaatgttccagagggatgtagccagattctgtggaccgccgtctttttcacccttaagaatccgtcgctatgatttctctgctgtacttccctcgcttccctcacctccttcttggtttctcctgagagcctccctcaataaatcacttaccccagaatccttgtctcagactccgcttctaggacccaacttaagacattcacaaaataaatcacattgatggaaaacagatcccattctccaaaatgaataaccagtaggcacttgtgactagcacaagcatcagcatatccacatggtgctaaactaacaccaacccaaagcagatagtgctggggtggactcggtacaagttaatagctcatgggtctccatccccaacaccttcagactcaaggctccagggc

SEQ ID NO: 133030 - DNA, 1281 bp, Homo Sapiens
gtggttgtcatatttattaggaaaaggaactccaaaggacaaataatacttcacattattttctgaaccacatattgtacttttggcagaaatcccataatagaacctgactttatatttgaaaagaagtttatgagtgtttattaatttactatgctccttgtaataaacatgaacacattgattacatatttactgttgtaaattttgcaacatgccattaagaacaaggatgcgttacaaaaatgaatgtgcgtgtacacatggatatttgtttgtgatttcaagtctcaagggagtatgtggacatcagctgaaagtcactgttctgcttgttaaggtagtaatttaggggttaggattggatttaaggttatgctcatgacttaatcccaatgcttcccatgccaaatgcttaggaggtgctccttggatctagctgcaatttgcttcaggtgcaatgtgagtgataaatgaacttgtttctgtctgcatcctgttggaacaggaggcttggctttttctcaggcacctcttttttattcattccctttagggtaatataactctatcttttctgacgttacacgacttgttgattgtgtagtgaaaacacatgaactcaaaacattttttagccttaattgcctgttccttataaagagaaatattaaacgtttaccaatttcaaacatagcatgctcaggtgaactttccaattagcaacttcttttactttgaaaatctcatatatttctatgaaatattacatattttattaaatattacatattagtctaacgtagtagtagtggaatagacgtgatcttaaaatctgtattagctgtgtgatttttgacaaataactttccctgtgtttccaatcatttgaaaaaggactaaaagtcctaagtgacttccaacattagcgatctaataccctatcatcaaatctgtattttcagctgagagctttaaacttgctgctgtgaagtttaagggaaatagcacccattatatatcaacccgatcattttcttctgtcagcaaaactgcagagccagcttgggttgtagtaatacggtgaccgccatgtgaaacatgtttcttggtgttttcttttaaaactgccaaatatagaccttaaccagctgtaaggcagtgcttgaggtgtggagacacctgaggaagctgtgggctttctccctcgaggtgggcccacgatgagttttaagcaagacgggcaagcagtcacctggcaccaggaaaaactccttgccc

SEQ ID NO: 133031 - DNA, 593 bp, Homo Sapiens
  misc_feature (235)..(235): n is a, c, g, or t
ggcacgaggcacgttactaaaaagggcttcatgctttaagttgtgttgacccagaaaacatatttttatttcttagaaagcataaattaaaactggaaacatattactttaaatatattacttctaccagttattatgatgcacacagaagcaacgtggtgtacaaagagatgtgtcagtctcttggttaaagtttcagtatttgcttttcaaacttcaaaatatcttacagaangcccaaacagtatataaacaagattcacagaggcacactatgctttagaaatgtggtaactggctatacaagtagtatagcatcacaatttaggaaaaaataataaaattctaagacatttcctatgctgaagatcatgcccaattggtagtgtcattctttctgacactagctctgataagacttcctttggaatactttttcaccataatctagagaggatgtgttgaactgcacccttaagaatgcagacaggactggcatatagcagtactgctgtaggaaagaaattaaggacagttagtatgggcctgtgaattctggcatacatgtttaaatcaattacaattatgcaagt

SEQ ID NO: 133032 - DNA, 731 bp, Homo Sapiens
cagtagggagttccatcccaaatattttaaaaactaaatatattttttcaatgccatcccttgacctgctttaccttaaccatgaataacagtgtatgccactcaagcccacagtggagactgaggccatcttagtaaagcacagaggagcctgggggagctccccgtctatccctggttcagttccaggggtgcaggcaatgtttggaagcccttagcagcagcatcactgtgggagctgccactgtctccatccacagacaaaatctgctccaagggatggacaaggagcactgttaggaccctacccagccttaccctcagcccacagggccacctgcttctgtcactcttactaggattcgccaaaaaagcgggggagtggtagggttttaaccagaacacaaagtggtagttcctcctagctgtaggagggtgggctgtcctgcaccagtgtctgcatgggctcctgcccactgggggggctcaggccccaggagtcccggcctggcccataaggggggtgctgccctcctgagggtcaactggagtctggctggtgtggaccacgacagtcttctcatcacaatctcacaggtggggttggtgaaggcagacaagggcagagtgattcgctgcatctccctctcacatactttctgatcatgctgttctttcaatccttcccctcttgtaggagtagccaagtgatgcagctcgatggcatgatg

SEQ ID NO: 133033 - DNA, 874 bp, Homo Sapiens
  misc_feature (178)..(500): n is a, c, g, or t
  misc_feature (519)..(740): n is a, c, g, or t
  misc_feature (768)..(768): n is a, c, g, or t
  misc_feature (788)..(788): n is a, c, g, or t
  misc_feature (802)..(802): n is a, c, g, or t
  misc_feature (822)..(824): n is a, c, g, or t
  misc_feature (829)..(829): n is a, c, g, or t
ggcaatacaaagattttcagaatttattggacaaaatgacacaaaactaaaaatatcatttacacatgaaattcaaagaacgcattatttttccttacaaaattgtggaaaaattaattcagatagtaacatagaactagttctaaaactaaaatgctagtgtgaatgtatacaggannnnnnnnnnnnnnnnnnnnnnnnnnnnnnnnnnnnnnnnnnnnnnnnnnnnnnnnnnnnnnnnnnnnnnnnnnnnnnnnnnnnnnnnnnnnnnnnnnnnnnnnnnnnnnnnnnnnnnnnnnnnnnnnnnnnnnnnnnnnnnnnnnnnnnnnnnnnnnnnnnnnnnnnnnnnnnnnnnnnnnnnnnnnnnnnnnnnnnnnnnnnnnnnnnnnnnnnnnnnnnnnnnnnnnnnnnnnnnnnnnnnnnnnnnnnnnnnnnnnnnnnnnnnnnnnnnnnnnnnnnnnnnnnnnnnnnnnnnnnnnnnnnnnnnnnnnnnnnnnnnntcgtgccgaattcttggtnnnnnnnnnnnnnnnnnnnnnnnnnnnnnnnnnnnnnnnnnnnnnnnnnnnnnnnnnnnnnnnnnnnnnnnnnnnnnnnnnnnnnnnnnnnnnnnnnnnnnnnnnnnnnnnnnnnnnnnnnnnnnnnnnnnnnnnnnnnnnnnnnnnnnnnnnnnnnnnnnnnnnnnnnnnnnnnnnnnnnnnnnnnnnnnnnnnnnnnnnnnnnnnnnnnnnnnnnnnnnnttgattcggcaccgtcgtggacagcggnttggtgatgggggtctccgnttcccgcccacggntcgctgcctctatctttccnnncaggnagtgtaccaaccacctaaggcgggaaaggttaccaagaacaggga

SEQ ID NO: 133034 - DNA, 492 bp, Homo Sapiens
tggaataggtcttttacaccaaagccctcatgttttaatgaggtaattaaagcctagagggctatgtaattggcccagtcaccaactagatagtggcagaggtagaaccagaactcaagtctcctcactttcaatgtaacattttctctcttactccatgtggcatcaggctcctgtttctgaaggaaatcgatgtacatgtattgtggtgctgtatatggagaaatgtttagccagtcttttttctgagatcaaaaccaggccatgatagccatcttcctgggtctctgtgaggttcttgggacccagagttctctatgataacatcctggaggggaactgactcctacaatgcacgaaagagatctataccaagaacatggctctcacagacgagccagaggccaagagctagggaggggttagctcagtgtgcgtgaatttcttctgaattttaatggttttggaaaatattaaacatttcttccaccg

SEQ ID NO: 133035 - DNA, 725 bp, Homo Sapiens
tgagacagtctcaaaaaataaataaataaagacaaaatcactacagaccatacatatattattaaatgaacgatacaatgaactttatgccaaaaaaatctgacaacttaggcaaaatggacatattccatgagaaatataacttatcaaaattgacatactatagactaaaaaatcctaatagccctaactctactaactgaatttgttatcaaatgcgaatattcacacaaaccaaaccacaggttcaaatggcaaattctctcaaacatttaaggaataactaacatcaattgaacacttccagaaaaatagacgaatatttaacaactgattttgaggcaagcataacacctcatatcaaattgtgacaaagaaaacatgagcacgtatgcaaaaatctttaacaaaatactgcactaacaaatggagtctagtaatatatttaaaaatgattcatcatgaccaagtgacgtttatcacaggaatgtaaggttgttaaaacaactcatcaacacccacaccataatactgcaggagagatctttcacaaaaatctcatcacattcctcactttctcaaaactctttggcttggtttttggcttcctataaccacatacaagacagaaaccttaacacagcatgtaatgctcctttcacaaccccagccccgcgctacagtcacatctctaggtagtaccctccactatgtacccctcgtgc

SEQ ID NO: 133036 - DNA, 893 bp, Homo Sapiens
  misc_feature (531)..(647): n is a, c, g, or t
atgccaaccactttacatacatgatctgatggaatcctcagcacagctgatgagggagttactgttattttcctagccatacagttagtagctgacactacagggaacagacacacttactgtctatgaggatctcttctaaacactttccatgcattaactaattttttggggaaactgaggcagagcaggagcaaagccagttgtccagtgtcacacaactggtgggtgtggacctgaaaccactggaggctgggtgattccaaaatggagggttcacccctgcactaccccctgattttccaagtggggtaacaggttcggagacagtcagggaagagaaaccagggtgagatgggttagttcaaatgaggtcaaaggttgcactctcttctgcttcctgacaagcataatgagaggcacccatgggaacagaagctcagacatctgaccctgagccctctgccactcttccttcctctcctctggcccagttggtctgaaccgtgttgttccaggtctcacgggagnnnnnnnnnnnnnnnnnnnnnnnnnnnnnnnnnnnnnnnnnnnnnnnnnnnnnnnnnnnnnnnnnnnnnnnnnnnnnnnnnnnnnnnnnnnnnnnnnnnnnnnnnnnnnnnnnnnnntccatcatctctgctttcacctgcaccagtggacaaactcaggcacacgaggggctgctgccatctgtccctctgcctggcctcaggcaggatcattaggactggatcaggagggagcatcaggcctggcttcagggtgcctggcagcatgctcagatatagcacagcacacaggcaggaccagagacccagtaagtgatagccatgaagattcttaaagagaagggaactgggagctacaaagcc

SEQ ID NO: 133037 - DNA, 979 bp, Homo Sapiens
  misc_feature (592)..(592): n is a, c, g, or t
  misc_feature (637)..(637): n is a, c, g, or t
  misc_feature (653)..(653): n is a, c, g, or t
  misc_feature (764)..(764): n is a, c, g, or t
  misc_feature (908)..(908): n is a, c, g, or t
ctctctgtgattctctttgtcagctcctttgcctatatttgcatctcagttgacacccctgattctgacttgtccttatcttcctaccagtctctgccgaccggttactgtcagcctgtctttagggtttgcgctgcagctgtttgtcctttgtctttctgcctgcctccaagtccccatatctcctggtctcttctgtcagtgaatcttcccactgactgcctcctccgccttctgcttctcagctccccggactcgtccccgctcttctctgttcccacctctcctcttgctcttctgatctctctatctgccagtatttcctccatcactcctgagcctgggtgtttctccttgtcactcactctatttcactgtctagactctctgtgcctttcagccttggggtctcttcttgtcggccttcatttctatttttctggtcctttttgtttataacccttttatcagttctgtgactttggtgtctctcaggatctatgacagcctttctccatatttctgctagggcctgtctcttttgccctccatccttctttgcctctgtcacctcctatgtggaataatcccntctcctctttcttatctattactccagtcctacgtagttgtcgtntctgtacattttcccnagctgtcccgttccttcgggtcctactacgcggttttcgtcgctgctcattccttggtctcgtgggccaaagttcccatactgattcgtctagtatccgaactcatgtcantcttggttctgtgtgaatccctacccgccccaatccatcctgtactacagcccggagataaacttccaagctcgtgtgtctagttgtgatctgatcccatatattcgttttgctgccggtttctctcactcggaaccgtcttgncatcgccttatgcctgttacgtgcgcataagcggtgtctttgtttctcttcccagcacacagctcttgccc

SEQ ID NO: 133038 - DNA, 729 bp, Homo Sapiens
ttagatcttgatttctttttattcctcgttggtttaaaatggctaatcagaataaaaaataaaagggcctctttgtggaggctgggatctcccctatttagaggttagaacccaggtatcccctctacccagcaccatagtgaggtgggctgaggggtaacccccaagggacaatcggaggggcctaggcctgccactccttctctctatcccccgtttttggcatgtgatgaaaaatattgctttttggattcttctctcctggccttggattttaaaatcaagttaactgtgtaagctaggggaggctccaaggggccagtaggagcacactctaatccctctcccccaaggaggggattatccaatattgtttgagctaggccaagttattttcctgatctcccaccaccaccagtgtcttgaagttttgacccctttcctagggaaactaaatgccaatgagcctagaaaactaattctcctctccaagtccttccctcttgtgaccaaaattccagactcacctctccccaggcttcttcctaatcacacttagcaccagcagaggatgctatttccgtagttagtaactgggacaaatgagagggaaccacaggaaaaagactgacgtctcccctcttttcctgctggtctgaggaatgggaagagtaagatccccctccgtatatgtatccctccctcattttcccatcccaggatacatat

SEQ ID NO: 133039 - DNA, 581 bp, Homo Sapiens
ctggaggttcgaggtccagcacttcctcttcagtcaatagccagaccttaaacagaaatcagcccactgtttacatagctgccagccccccaaatacggatgagctgatgtcccgtagtcaacctaaggtctatatttcagcgaatgctgccacaggagatgaacaggtcatgcggaatcagcccacactcttcatatccacaaactctggagcatctgctgcctccaggaacatgtctgggcaagtgagcatgggtcctgcctttattcatcaccatcctcccaaaagtcgagcaatagggcaataactcttgcaacctctcctcgagtggtagtcactcagcccaatacgaaatacactttcaaaattacagtttttcccaataagccccctgcagtttcaccaggggtggtgtcccctacctttgaacttacaaatcttcttaatcatcctgatcattatgtagaaaccgagaatattcagcacctcacggaccctacattagcacatgtggatagaataagtgaaacacggaaactgagtatgggatctgatgatgctgcctacacacaagcatctc

SEQ ID NO: 133040 - DNA, 596 bp, Homo Sapiens
gtgtgtggttgttgttgttgttttccacagaggccacatgatgtgtggcacagtgagggactagtatcatctgcagatggagcaggaaccaaaaaagttctgtcggttcaactgaaatattttactatgagtttgcttttgtttagttttacaaatctgtcttataccttcacagtggatcatttaacccttgcttctgaatttttccattgaatttgttttagtaaaattacttaccaaaaatagacacttggttaaaataagatccctaacaaatggatctttagattcattccttactgttcccttaaaaatataaacacactttatgatcttgctgtgaaaccattttttcttaatactgtagttttcaattttctagttttcaagtttctgtttctaaaatggctagttttctggttggttaaaacaagtcagaagaatgagatacggctggtgattttctcttctcttatgtacattaaaatatttgacagcaatattggtacgctttggtttcaaagtatgcctgtcttttcatgagaagaaaaaataattttggggactatactgcctctcacctcgtgccgaattct

SEQ ID NO: 133041 - DNA, 805 bp, Homo Sapiens
  misc_feature (748)..(748): n is a, c, g, or t
  misc_feature (774)..(774): n is a, c, g, or t
ttttttcatatttcaagtgtttttattctgagcagtaggtacaaaaaataatgacatagttgtgtctaattctgtatagttcagcaccctccacaggctgtcaatctctgatttgatctacttttaccagatttaacagatccttgaatttactttactgtatatacttccttcttgctcacattgggaatcaaactaatgctggaaacatgcatcttcagacttcattgaggaattccagattgagacacgctgggatgtggattgagtccatggttagagaagatggattaaatggaaacaaaacaggaaacatgtgcttggcatctaatagcagttgctgagggtcattccgctcttgtagttgtgcctggattgttcgtataaaggccactgttacccgttcttcaaattcattcaggggagtataaaggtttaaaattttgacaatctgctgggtgctgagggaggtacacagggagcagatagcctctgcgtcctcctgggttttcttctttaattgcaggagctgggctgcttggatcagaggttccatggtctgaactgctccactctggtgaaggtttcttccccgaagccactcctcaagctgacttatattgtacctgagttgcatgcctgtgctccaagagcagacgtccttccgcaagagcaggttgttaagagtcactgcgttgatcatgtagaagagctgtttgaatacctgcaggatgatctcagggtccangccctggtcacacatgactgtatganaggcatcatctggcggatgatagctccaggc

SEQ ID NO: 133042 - DNA, 893 bp, Homo Sapiens
cacattgactattgcagaatgaacacagtgagcccttcttacgcttctactacatgccaggcagggtgccaggccctagtggagaggggacaatgatgggcaagctggctcctgccctcaagggctgtcgagcagggaggaaagcggcggctgccctgactgtgacccggagtggggtgattcgcaaagaggctggcgggaggctggctgggggctggctgggggctgctccctctcctgcctgtgttccgtggcagggtattaaactggcttttttcatggatttccgaggccctgactgtgggacctcgggcaggttttgggaccttgtgactttgttcccgcttgtcagtcaggcctttgtcctcagcagtgcccagcacacggcgacttgtgcatgtccttcagtgtgtgactgaccctggagctgagacttggcagctgaggatggtcattgtccttggataactcccggggaggtgggggcagggtggggctgtgacctggcaactccgagtccatagcagcctccgaatggaggctttcctcttgtaggattctcggggaggaaggaggggatgggggagatgaggcttgtgagtcttcaggagggcagaggttcacacctgcagcgccccagaaacactccggggtgcccaggcttacccagccctcctgagccagaaccaccaagagttggtgaccagcagtccattttttagcaagatccagaaatgattctcctgaacagtccgagccaagaatgacatatctggaatcagaacatcagaagtacagaggaatcgagagaacgggcgccaaaatgtgtagggacctcatcctacatggcgcctacatggaggaaagcacccaacaagagcgaaactccatct

SEQ ID NO: 133043 - DNA, 117 bp, Homo Sapiens
gaattttcttgagttggctttctgttaattctacccttctgttcctttcattttagtatttaatcactttgctcatcaattttgtccttttcttgttcctcaaccatcatgtttacc

SEQ ID NO: 133044 - DNA, 629 bp, Homo Sapiens
gtagggatggtagagcatgagggttttgtttgtgtatgtgtatggtcatgaaaaaaaattgagaaacattacctcatacacaatgaatgaatcagaggacagacacgggaatggcacgactgtgcagtgtgttactaggaaaaaagttcagaatcactgttctagagagcttcatttccattggttttaaaacattattctcatgtagaacagtgttgggtctcatactgttaatgttaatacgtaacaatgttcatgttaacaggcacctgttaatattaacagataatgttactgttaacaggtaagagaaattgctctaagtgcccaaactttatatacttcagttttaatgacaagcatttcagaaatataagagcggcagccagaccaaccagtttttccagatatcttgatgtgaacctgaccctactcctttagaagacagcctgttcatttttaaatagctttaacccaaactgttctatgaccattgtttcaagagacattaacacagttctgtaaatagaagtgtctatggacaaataagtttgggaaatgtggcatactgtatccttttcttaacatttgcatattaaagactctgagatatcctgcagtaaagacac

SEQ ID NO: 133045 - DNA, 775 bp, Homo Sapiens
  misc_feature (25)..(25): n is a, c, g, or t
ttttaaaccttaatcagacataacnggaaaagattactatgtatttgggacaccttttacaagattttgtttttgtaattaaagcagaaaccagttccctaaactcttttattcaattgtatgtcctgtttggacaaatatcaaaaatagaagactgtcgcttttgtaactgtgattttcactgcagtcttctataacttttacagagttcatggtccctaatatctccccaccctccattttttctaggtggggaaatggctaccacagtaaacttttcactgatagttagagtttctggaaacatgtattgtttgttattatttaagagtgactcaatttgggcactctgagtggatggtctacaggttttcttgtgatgcataccacagtctccagcatgaaagatcctaggaatttgagggaaccagcactttccagaattttggaagacaagatacagtcaagtattgaagagtccagtcccagttataatcatcataagtacagaaagtgtctgtgcactcgatcagcttctgataggcattccgggtcaaggctagacccatattgtgctctgtggatttccaagttttcacatctaccttgtcagccatgccatagaaactgcgactggcactataggtccccaggggagagaacatcacattcagggcactcttgctgcttcagtttccacatctttttgaagacatggtaaaagtctggggctaagtagtgatcctcttctaggaaaagtataaggccagcataa

SEQ ID NO: 133046 - DNA, 895 bp, Homo Sapiens
  misc_feature (193)..(201): n is a, c, g, or t
  misc_feature (876)..(876): n is a, c, g, or t
tttttctaatatattttactgacaagcccttgagagctgctttgctacttgcatgcaggcctctgtgtgaccaggcacacagactacatgtgctccatcttgtctctccgctgctccaggggccttgctcaaaaaccccctatattactggaaactgctggttttacctatgtgcttcttcctaaggcatgcnnnnnnnnntatgtgaaattcagaaaacatttacagttcaggtagctgaggcactgaagtcctaagagacatcacctaaatatcagtggctgtgactcccctgtcccccacaccaattatgaaggtcaggcatgggacacacttgtaattcccctctgctttatggtccagcttaaaacgatgccattagaaggaattctaactcaggtattgcaattatttgaaattcccaatcctcaggagccacacaagcccagggccagcaacaacactttggggagcggggggatgagtttcctgaagtttgtggctgaaaagcaggccttccttggcaaggcttgtgggagcgctgggtgctggagactgaccccacaagtgatcagccaccaggcctaagactaaccagctgcaggacgcccccttccacagtgaggtgaagcctcgccagggggcctgagcagcaggcttgctcttgtccctacattaggacacccgaatggtgtgacaggagagctaaagaaccacccacaaggggaaaagctgatgtcaacttaagagccacacacctctggaaagcaacaagcctctccttcagtttagtccagaagggaaatcccctcatttgtgaacacatcattcatctcaacccaagctgttggctctgtggactgggcctgggcaagntgtgctgctcctcccagga

SEQ ID NO: 133047 - DNA, 801 bp, Homo Sapiens
ccccgatgacaggctgtgggcaggttggggccccagtggacccaccccagggacatagcggagggggtctctgacatgcaagaagcggctggtagtcgtgaggcctgcggatctttagtgactggccctggaagatgatgccatcaaaggccatagcctgggtagtctcgtccactgagcggaactccaaaaaggcaaaattcttgtcctggttaatctgcacagccaacactgggttgccaggggcctgggtcagcccccccaggcgcatctgggcgttgaagaaatccatcatggcctcctcagtgatgccaaaggggatgttgcccacgtagaggcgccgggcttgtctggtcatctggctcccgaccacgggcaccggcgttggggtcacagccagaccgtcaggggtcatggtggggagaagagcagtggctggaatctgacccgcagcttgcatggccttgtactgcattggggtgatgtgctcaaagcctgggggtggcacgtcccagtatttacggaccttcttcttcttctcgtggcggggggaacgaatcagtccaccgtgctcctctttagcgcctctggtcaaaggtttgctgcgtcgtcgcctgtcccgggaggcgctccgctggtcccggttgcgccggtcgcggctccggctccggcgtttgcggtcccggctccgagagcggctgtggctgcgcttccgatgccggttctccttgtcccgctcttgtttattctcgttgagctgccgctcgaactcgtcgaagtccgacatgctgaggcggccgc

SEQ ID NO: 133048 - DNA, 399 bp, Homo Sapiens
ttttaaagtaaaatacaacaaaatgtttaatgagcaaattcgtcttagcaaatatgaaactgccacagagagtaggagaggggcaggggccacggggctgggcgcaggtcgggggagactaaagaggaaaaatcaactacgtaagaaacccaggaggggaccagagaggaccagaggccgaaggaacagagctgtggtcctggtaagggagagggcagggcactgagggccggacaacaaaattcaaaatagtttggccataaaatataaacacgctatgttcctaccgtggggaaggggagaagaaaggggtctatgggagtaggagaggctgttttgggaggggctggggtcctaccccgccctgctgtgcaccctgtccccatcccaaccccttcc

SEQ ID NO: 133049 - DNA, 596 bp, Homo Sapiens
aaaggcaatacctggtaagtccggtcaattgagggaactccaaaagccaaaatctggcccggtttaacttaaaacccaaaatgggtttccaggggcttggttaacccccccaaggccattctgggctttaaagaatccaacaatggcttcttaagtaatccaaaagggattttgcccaactaagagggccgggcttgtctggtcatctggctccggaccaggggcacggtcgtgtgggtcaacagccagaccttcaggggtcatggtggggagaagagcagtggctggaatctgaccccgcagcttgcatggccttgtactgcattggggtgatgtgctcaaagcctgggggtggcacgtcccagtatttacggaccttcttcttcttctcgtggcggggggaacgaatcagtccaccgtgctcctctttagcgcctctggtcaaaggtttgctgcgtcgtcgcctgtcccgggaggcgtccgctggtcccggttgcccggtcgcggctccggctccggcgtttgcggtcccggctccgagagcggctgtggtgcgcttccgatgccggttctccttgtcccgctcttgtttattc

SEQ ID NO: 133050 - DNA, 1417 bp, Homo Sapiens
  misc_feature (578)..(578): n is a, c, g, or t
actgattcgttccccccgccacgagaagaagaagaaggtccgtaaatactgggacgtgccacccccaggctttgagcacatcaccccaatgcagtacaaggccatgcaagctgcgggtcagattccagccactgctcttctccccaccatgacccctgacggtctggctgtgaccccaacgccggtgcccgtggtcgggagccagatgaccagacaagcccggcgcctctacgtgggcaacatcccctttggcatcactgagtgaaatattgtggggctgagatccctcgtagcaacaaaaagtttgctaccatcgtcgaaggaggccatgatggatttcttcaacgcccagatgcgcctgggggggctgacccaggcccctggcaacccagtgttggctgtgcagattaaccaggacaagaattttgcctttttggagttccgctcagtggacgagactacccaggctatggcctttgatggcatcatcttccagggccagtcactaaagatccgcaggcctcacgactaccagccgcttcctggcatgtcagagaacccctccgtctatgtgcctnggggttgtgtccactgtggtccccgactctgcccacaagctgttcatcgggggcttacccaactacctgaacgatgaccaggtcaaagagctgctgacatcctttgggcccctcaaggccttcaacctggtcaaggacagtgccacggggctctccaagggctacgccttctgtgagtacgtggacatcaacgtcacggatcaggccattgcggggctgaacggcatgcagctgggggataagaagctgctggtccagagggcgagtgtgggagccaagaatgccacgctgagcaccatcaatcagacgcctgtgaccctgcaagtgccgggcttgatgagctcccaggtgcagatgggcggccacccgactgaggtcctgtgcctcatgaacatggtgctgcctgaggagctgctggacgacgaggagtatgaggagatcgtggaggatgtgcgggacgagtgcagcaagtacgggcttgtcaagtccatcgagatcccccggcctgtggacggcgtcgaggtgcccggctgcggaaagatctttgtggagttcacctctgtgtttgactgccagaaagccatgcagggcctgacgggccgcaagttcgccaacagagtggttgtcacaaaatactgtgaccccgactcttatcaccgccgggacttctggtagaggcggctggggagggtgggggcaggctggctggggggcttctccccatcccgcccccccttatcccctctgaagacgatgggcagaggagtgacagcgcagacacacgaaagcggagcaactgaaatggcagcattaagggtggggggcggggtagcggggtg

SEQ ID NO: 133051 - DNA, 1042 bp, Homo Sapiens
  misc_feature (668)..(668): n is a, c, g, or t
  misc_feature (769)..(769): n is a, c, g, or t
  misc_feature (771)..(772): n is a, c, g, or t
  misc_feature (787)..(789): n is a, c, g, or t
  misc_feature (803)..(869): n is a, c, g, or t
  misc_feature (934)..(934): n is a, c, g, or t
tttttaaaggatgtatatttaatgagacagtgacagcagcattgttacaactgggcatccctcaggccagcctggtcccatgctgtgggaccacccatgtgtggtcttccacaaggtgctggcggcaccgggctcttcctgctgtgccacagacccacagaaagaaccatacgtgattccgtttaccggctgtgtcacccagaaggggcaggtgggggagatgctgggtggcaggtaaaaataaaaggggcccaaccctttgtccagcaaataccagcacagtttttctatggacacagtgatttgtaacttgaataatgtgaagttgattacacagatttcggaatggctaatatccatatgacagaaatgtgatgcattcatgagacgtgtgcagactttggggtgttgggaaacagcatttggcctttaacctcctcctcagccccaaagaggaaggggaaacaggacaggaacccacactgttgatccaacctcacatcacattctcttgaaggactccgacatgttccctgctcaccgttccacctgaggtaggtcaggacccctgcccccattttcccagatggggaaaccgaggcagagcagacaataagaccttgcctaaagcaccacagtggggaggtggacacatccccttcctgatngcggaggacaaagaggagccctgccgtctctcccactcctggaatgagccagtgagccaggtggcctttctgctgactgaggtgtctcctcctgggttccntnnggctcgtgcgattcnnntggctcgaggggcnnnnnnnnnnnnnnnnnnnnnnnnnnnnnnnnnnnnnnnnnnnnnnnnnnnnnnnnnnnnnnnnnnncaaatccacacacatagagccggagcataatgtaagctgggtgctatgatgagcaccacatatgngtggccatgcccttcatcggacctctgcactgatatgatcgcacccgggaaggggtggtatgggctccctctctcataacctggcgggctggtgggagggtatatcaa

SEQ ID NO: 133052 - DNA, 3418 bp, Homo Sapiens
tttttttgtgggaaaatattttattgctgccatccccatggtgagccgctgggggtgaggggtgaagctgggtggtggatcacagcatcttctggaatagggcgatggcctcatccaccttcctgagctctgcttctgtctgttggagcttggcttcatctgcctcctggacttcgagcggcaccttgacaggatagcccgaggcagcacggcgttcccgcagacgctgggcctgccgctgggcctcaactcgcttggcttgcagcttgcccagctcccgtgcagggtccaccagcccctgaagctgcaggtggatggagcagcgatcagaagccagagccacagcgcaaccctggggggcgggagcccccagggccagaacagccaccacacctgcgctggccagggcctgcacgtagcccgacaccgccgatgccagggcgcccgtggcctcatccgccacttccaggaaacagtcaggccggatccgggtgaggttgtagtcggcccgcagggagcgcacggctcgcgtgatgcttagcgccagctcaagggcggcttctgcctcggggtccttccaggagcactctgagggctccgggtagggggtaacacagaggctagggggagcttgcggcatcctccggggcagcctctggaacagctcctccgtcacgaagggcatgaagggtgagagcagccgcaggccaacgtccaggcaagtgtacagggtctggcgggcacactcagctgccacctggtccaccccattcagtacaggtttcaggcactccaagtagacatcacagagctcatagagccagaagctgtactgggcagtggtgacggccgggaagtcgtaggcctggaagccttgattgctgagcctcacagcctctgtcaggcggctgcggatccagcggtccaccaggctctcatggcctccgggctgggaggtgggtgagggcacaaaaacccttcccaaggccacgaagggcaaacttggtggcattccagagcttgttgcagaagtggcggtaacccagtatccggttcacatccaggttgatgtcacgaccctgggacatgtaggcacataatccaaaccggagagcatcggtgccacattcaggaatccccgctgggaagtcagctttctgcccttctttggccttctccacctcgctgggatccaggttgctgttcagcagctggttgtggaggccctgcagggagattccatagatgacgtccaggggatcgatgacattgcctagagacttgctcatcttccggccgtgagcatctcgcacgatggcatggaggtagacctctctaaagggcagcctgcccgtgagcttcaggcccagcatgaccatccgggccacccagaagaagaggatgtcatgaccggtctccagcagtgtcccggggtagaacacactcaggtcttctgactggttgggccagcccaaaatggataaggggaagaggccagaggagaaccaggtatccaatacatcctcatcttgctggagactgatcttgtcaggggacactccgaactccttggctgccttctcccgggcctccgcctcattgcgtccactcacccagtaccgcccatcagggtcctccccagggggcaccgctgggtcactgacagtgacaaagtaggctgggatgcgatggccccaccacagctgcctggaaatgcaccactcccggatgttgtccatccaggcatgccatgtgcgctgatgggcctcaggcaggatgcggaggtcaccccgagtcacagcggcgctggcagcctgggccatctccccgcagcgaacgtaccactgcggccgcagcagaggctctaccacgtccttcgaccggttgcaaagtggcaccaccatggggttgtcctcaatgccacggaacagtccccgctccttcagcgccaccagcaccgctttcctggcctcaaacctgggcaggcccaggaaaggcggaggcacattgatgagggccccccgggagtccatgatgctgatggcctccagcccgtgccgctgcccaacttcatagtcattttggtcatgtgcgggggtgatcttcacagcacctgtgccaaagtccatgtccacaaattcatcgaagacaatgggaaggctccgagacaggaatgggtggatcacgttcttccccttcaggtgctggtatctggtatctttggggtgcacagctacagccacatctcccagcattgtctcgatccgagttgttgccaccaccacctcctcgtcgctatctgagccttggaccttataggcaaaggacacgaggaccccgaactccaccttctccttgtagccaggcacggagagcagggtgcgacctgtcagctccttcttatccacctcaatgtcagagatggcggagttgagggtgcaggaccagttaacaaggcgggtactgcgatagatgatgccttcctcgtgaagccggacaaaggcctctgtcacagctgctgagagtttagggtccatggtgaaacaggctcgatcccagtccaaggagctgccaagcttcttcaactggtggtaaatccggtcacctttctcctccttccacttccagacttcctgtagaaaggcctcgcggcccagctggtgccggctcagtccctgctcacgccatagcttcttctccaccaccacctgggtggcaatacctgcatggtcacagccagggttccacagggtggtctccccacgcatgcggtgccatcgagtcagggagtcctggatggcgttggtgagtgcatggcccaggtgcagggagcctgtcacattggggggtgggatgcacatcatgaagacacctcggggatttgctgctgacacattaggacgcccatactctggcttgaagaagccctgctgctcccaccaagggtaccaggcagcctccacataccgagggctgtaggagtcgggcatggggccactgacatctttcttttccccgggtggggttgggaggtcataggtaatgaccccaggatcccgtttctccctcttctctggttttggtttcttctcccctggaggtggctgctgctgttggatcttctgcttctgttggaatttctctagcttctcccgtttctttgcctctttcttgagctgagcagctgtctttgggagggcaggagcctcggggcctggctgatgagagagaggcctggctcctgagtatagaaccacttctcctagcacggctcggaattctggctgccggacacacgtgacaaaccagcgagtcacattattccagatccggcgggcaggtgggtctaggacctggaacaggaaataaatgactcttctcagtcaccctacagtgaggtctgaggagagcagtcttg

SEQ ID NO: 133053 - DNA, 735 bp, Homo Sapiens
ttttttgggttgaagcacttttaatcacaaacaaacaatagtataagaccgtgaacagctcacccagtggctgttgccctcctccagccctcagctcaccctcttcccatgctccctccctgggtaccattgagtaaagagcagggtattggcagctgtccctgttgctatcaggtgattgataggaaggggatctagctagggaccacggcaatcctggccatccatccatggttctgtttctatacaacttcatcatgtgacatattccagctgtgaaagaggaacagtacagaaatgtgggactgaacttggctgctccattcagatggtccaggggtttagagtgtcaagagccaagggcaaaaaaggaggagaagtctggagtcggcataattcaagatgcagccaaatgtggaactaaggtgggttcagtggggaccagggaaggcctcatggccccagtccacaattgtgccccaaccccggcaatgaaactcacgcatatgcacaaacgcacatcaacaaacacacaaaaacacacagagcaaataacattactgaaagaacctggaggctattaaatacaaaatggcagttttctttcaaagtgaaaatatttgcttctttgatactcctcagtgccttgcagtctcccaatcacagaagagtagatatgggaagggccaaagaggagtatgttgccagtggccctacaagtccatgtgtgctgaa

SEQ ID NO: 133054 - DNA, 1434 bp, Homo Sapiens
  misc_feature (684)..(684): n is a, c, g, or t
  misc_feature (1079)..(1087): n is a, c, g, or t
tttgaacttttttctcccttctgctcttgcttcttcatttttaagagaacggtttcactaaccaatgtacagtccatgtccactgtctctcctcctaattttgactgactgccatcctttgtatctattacagtaacatccattttatactgagaaaggtctgctcccggatctatactccactggatattttcaaaggatacatcttggttgttttgtagagactttattttaccagttctacatggatttaactgaagaactgatgcaagttcacatcctccatggtctgacctggtttgtatttttattggctcatgagaaccagcactctttatgtcatctaaaacattctcagtctccaaactttcacgtggacgtagaggaattttaaagacagcattttcttcttttatttgtaatgatggtttattgtctggagagcatttattcaagggctgaaggatgatgcattcctgtgaacagggctcccctggggaatctttgggcaacgtgcagttgccatctgaggccttacggcttgaggaaaagccctttggaatggtcttcaaagcctcataaagagtcacttgcctaaatttgtttttagaagtctcacttccttggcttttctcttgacgctgaatagctgaaaatcgatcagacagatcccagaggtttatnccatcacacagtctccattcatggaaaactgattatcctttggaaaagggaaagcattttctttatcaaaagaagcttgggggcagtttacttcatgttcactttcttcctcagttttcttccttttggatgttcggcctcccaatgatttcaggggctccaaatgtttatcagtgttagaatctttaccgtactcagtcctattctgttcacctagggattcacttatatttttatttataagtatctgttttattagatgactgggataatgatcttgttcacttcagacccaagactgtgatgtgtgaaaagggcactatcttcaggattttgatctagttttttctaatctagatatacaagtgttgctaaaagggagtgttttcagatgnnnnnnnnncccaggctgtaaaagagaaggggacaaacttgtattcaaatctaaaccacttttgatactagaggtagctccaaatacaggagatgacactcgagtaggtaattcttcttgaggaggagtctttgaagtagaatctgaaaatcttaaactatcttcagtatttcttgtagattcctcaaaaggctgtttcttgtgatttccttccagacagtggtagagctcatcaccaagggggctcatgggaccttgagtttcagattcttcttgaacaccaagtccaagtgtttcagcaacaactgtagctaaattaaaagatgacttatcaggggtatagctgcttgttcccc

SEQ ID NO: 133055 - DNA, 1034 bp, Homo Sapiens
  misc_feature (816)..(816): n is a, c, g, or t
  misc_feature (840)..(840): n is a, c, g, or t
  misc_feature (857)..(857): n is a, c, g, or t
  misc_feature (921)..(923): n is a, c, g, or t
  misc_feature (967)..(967): n is a, c, g, or t
  misc_feature (973)..(973): n is a, c, g, or t
ttgatttcttatgaataatcattgttttaaacatctttgtgtcttcacataaattatgaaaatttaactcagaagaaaaatactgtaatccataatccattaaataaaaaatacagtgagctaggtcaaagtcagtattttaagaaataattaaggtattgtactcaagagcacttttctttttcactaggctaggaaagtgaaacataattagcattttactccgtgacagcaagttcactgcacttctaaatgcttgactatctccaaaaatacacttttcattgttttataatacacacatattttatacttgtgagttaacataggtatttttcttgagaagacattacaaaatgaagcactgatatgaacaaaacctcacaggcaagattttagaaaatctgaaatcatcttgcctgggtcataattcaaagacagtgacaaatgttgttaggggaaacaaaatcagtagaaatataaaatatgaaaagtctttaaaatccagacagccaatataaaaaacagacagacttcagtgaaagcttggagagctgtttaaagaaatgaggtatgatgaagtcatagtgctacaatatgtatcaatgtattaagaacctatatttcaaagctccaaaatcagcaaatcataaactatttgctgctgtgttcacatgaccttactggtcagatgtttaatggtcactaataatacatttaaaataagcatgaagctaactgcatgatcatatggtgagcttatccgccacatatgaagggcaattatagtaaaatggtagcaacaattttgtattnaatataatagagctttagcatttnacatatcaatactttanattttaataatgcatatttatacagactgtacatttatataacacaatatatcagtcccttttnnntacaagctgttaagatatatggatgtacagtacatcttgcatanatctantacgatttgtacttgaaagggtgcaaacacagactataatctgactgattgaatatcctct

SEQ ID NO: 133056 - DNA, 1242 bp, Homo Sapiens
  misc_feature (286)..(349): n is a, c, g, or t
  misc_feature (434)..(449): n is a, c, g, or t
  misc_feature (457)..(616): n is a, c, g, or t
cacggaggggcccaaagagggtttgagtgtcccccttggggagtatgagggtttttcatacactccgcctgtttgtggggggggttcccgccggtcggcgggggaagtgttatagttaaattttcccaccctctatttctcttataaaattgccccgggcgcgggggcgtatattattaaaatatgagagcccgccttgggggcctccctgtgtaataaaacccactgaaaagcccccccgagaaatccccttttgggtttttttccagaaacccttcgtgtgttnnnnnnnnnnnnnnnnnnnnnnnnnnnnnnnnnnnnnnnnnnnnnnnnnnnnnnnnnnnnnnnngtgggaaacacgttttggcccctgtcttttttctctttttggggggccccgggccccaaggaaaagggtttataaaatttttttnnnnnnnnnnnnnnnncgcaaaannnnnnnnnnnnnnnnnnnnnnnnnnnnnnnnnnnnnnnnnnnnnnnnnnnnnnnnnnnnnnnnnnnnnnnnnnnnnnnnnnnnnnnnnnnnnnnnnnnnnnnnnnnnnnnnnnnnnnnnnnnnnnnnnnnnnnnnnnnnnnnnnnnnnnnnnnnnnnnncatgtttgttttctttattgaaagacaatacagaaatgatgaaacaatacctcaagggtcttgaacatggatcaaatgacagaagtctttaatgcaatggcacagaagcttctggcatcagcacctgcaagccctgttcagtcatcattcatgatcgccaaatactccttctggtgttcaaccagcttcaggaatacttggtatttcttatcatagtattttttatcctgtagtctcgggaacacaactttcccaactttgctcatttttgccattgcttcctgtacagaagcgaaatcccctgaggcacaggcacccagaacagcagcacccacaagaacggactccacctcttgcgacaggaccacaggcatgccagtaatgtccgcatgcatttgcacaaaaaggggattcttgctgaggcctccacataggaaaagagtactgattgagtgccctgctgcctccatggcttctataatgaagcgagtccccaaagcaatggcttgaactgttgccaggtagagaatggcaagatcatcaaggtcctgagacagtttcaatccggtgaccatgccctttagtgtcagatctgctaagggagaccggttgccatggaaatctgg

SEQ ID NO: 133057 - DNA, 938 bp, Homo Sapiens
aattaagcttcagtctctaagcagtttttaaacttaggtttcgtgatcctttgacctcatacttttagatggagtcagttatcttcaaaacatgacaaatttcagaatccattaaaaattattttattcaaattatgttttccaaaagagagggttctgtgctagtcgtctttgaaagttttcataccatttcagaaccacatttgccggaatgaacatttcagatgggcttggtgtcatctgggcctgagagacagcaaatgatgaagcaaaattgtagaaattgtccaacatcttttgtgtgaactgagtgaatgagtcaactgaggatacagcagcattacctacaggagtctgctgagccatactgtctaataattccactgaaattccaatctgagcaacagatggagttcggacaatattcatggctccaaaaggatgttggcttccttctccagatttaagacctgaaattttgaagatggcacttggcttcccattcgtgacaaatcctaggagttgccatactggcattccatttgaatcaggataagaaaagtagacagatcctcccattccctcaggaaatgggattgttcccagcataaaaaccacaacatggttgatactttcataatcaggtaagtcaaaaacaaatttatcctctgccacttgctgtgcagctgtttgcaccagcctccccgccaccaagcagccaaacatggcgacggcagctccgttcagccggcagtgacctgaagccggcgactaggagtcctggggctactgccctagtcgagactaagaaccttccagaatttgcgggagggtgtctgcccctccactacatagtgactgggccagcggcaagaatgcctctgcccccgcgaactctgaccttctcttcctaagcagcccactgctcacctcgtgcc

SEQ ID NO: 133058 - DNA, 813 bp, Homo Sapiens
catttcagatggccttggtgtcatctgggcctgagagacagcaaatgatgaacaaatttgtagaaaattgtccaacatcttttgtgtgaactgagtgaatgagtcaactgaggatacagcagcattacctacaggagtctgctgagccatactgtctaataattccactggaattccaatctgagcaacagatggagttcggacaatattcatggctccaaaaggatgttggcttccttctctcatatttcaagttcatgctccagtctaatcttccatagagagattctcatttatctcagctcactattctgtctcctctgaacaatgtcttggtgtgatatttaatattcacacacacatgcagatgttgaaagtaggcagcaagtagatgttcaataattaccagatttaagacctgaaattttgaagatggcacttggcttcccattcgtgacaaatcctaggagttgccatactggcattccatttgaatcaggataagaaaagtagacagatcctcccattccctcaggaaatgggattgttcccagcataaaaaccacaacatggttgatactttcataatcaggtaagtcaaaaacaaatttatcctctgccacttgctgtgcagctgtttgcaccagcctccccgccaccaagcagccaaacatggcgacggcagctccgttcagccggcagtgacctgaagccggcgactaggagtcctggggctactgccctagtcgagactaagaaccttccagaatttgcgggagggtgtctgcccctccactacatagtgactgggcc

SEQ ID NO: 133059 - DNA, 589 bp, Homo Sapiens
  misc_feature (108)..(129): n is a, c, g, or t
aatttttgatgtgtacatatcttaggagggttatctatgttatctgagtatatgtttgggtaaccaaattggtcttaaaaatgatgttaacccaagaagtagacatcnnnnnnnnnnnnnnnnnnnnnnggaatgtgttttcattgttttaagtttttcttctgagtaaaacaaaattatagaaaacaaatgcaacaatgtgcacatctgacttaagagtttcatttctgttattatatgtgttgcatgtagcttggcgatttactgtgtaatgaataatagactggaacatctaccaataactttcacataaatgttcaaaatagaagtgtattttttcaggtttctggaaataaatagtaaaataaatggcacaaatagtttcaataaatttaccaatttgagtgttttcagctctatttcaaaactcataactaatcttcagaattactgaatttccttttgaactgggtaaggcattatccaagcaacttcacatactatttaaacatgatttctcggtaattatatattctgggcaaataacataaacatgtcaggatttttacaggtgttagtgaatttttct

SEQ ID NO: 133060 - DNA, 820 bp, Homo Sapiens
ctctatgtctttcagctgtttcttgttagctgcagactgaagaatcagggcatttcgttcctcttctaattctggtctctcctttgcaacaacaatacctagtaattgatcttcaagtccttctggagttatcatgaaattgagcaaagacacttttgtagccagttctggcatatagtgcgggtttctcagttttgtggtgatataaaatttgaaatcaaaggaatactcaataatgacctcaccaagtctgatgcaatcaatgccaccttgtttaaaagtttgtctgagtagtaaaggctccaaagatggatccagttcttcaccaacattttctaatagaagtggagttccaaactgaatacagttttccaatgttctcatatagtctgaatctgatagcttaataacactaagctgattttctttctcagagtttttgatccacttattggcttgaccctgggggtcaatcattaaaggccaacgcctacagttgttaacgatcactccgttatctatggaaaatgtatctgttggtaaaccagcaatattccaagctctaatttttactggatcacccagggttttactcaacaagaactcctctgaacacgggatttttttcttcttgcacaacatgctccaatcttttgtacatgtttgtcgaaagccagaagtgaaagcaccaaggtaagctattactcctgctgatactaagacatcgccagttaaattttcatatgttatctgaaggtcatctgcagcttgggcccatcttgatttttctccaccccagtcctccaattaattgtgaggc

SEQ ID NO: 133061 - DNA, 658 bp, Homo Sapiens
ctattatattgtaaaatagtacatttgaggctcacttataaaaattggaaaacatcgaaatataagaggtccaagagggtgtttgaaacacattttgctaagttgacaggaaattaatagactttttatgggccattaactaataatacactcaaaaaaaaggtacagttaaataaaggttttaaatagtctataccgtatactaaaactaaattaatatttaggactgaaataacatattgattaagtaccagctatgtacccaaaaaatgctgggcacagaagttagagtaagatgttttacttaaagggcctttgagtgagagttggcaattcattctgaactaaccactaatatcattaagaattagtgctgagttggtagcaggaaataggtaattctgtctaaaggaatcatgaaatggaaaataaataagcttttaataaggagaaggaagagctgaagaaatggcacagtgttcttagaatgacagatagtcctatggggactgcagcataaaagtgaaaaatgtataagataaacctttagatggtaagcaaggcaagattctcaaattctgtatgaatcagctccacctccgccccatggacagtagatgaccgttaatggcttttaaggaaagatgcaacctggaaa

SEQ ID NO: 133062 - DNA, 661 bp, Homo Sapiens
tttttcagaagacaaaagcaggtttattagggccctggggccaggaatgcctaagatatgagttaaggccagggccgtgagaaaaggtgactctcctgaggccaaacctttgcatctcagaagccctggctggagaccttaggagtcagttctgggagggacctggggatacagaggggtctctcctgaccctgggatctttgggcttttgccaggattggggaaatggtctggggggcagggagccttgaatccacagccttcatttcaataacgaccatttaatttgttccttggcagactgaagaacctgggactccacacgagacagcacaggctcatctcggtagggccaccacagcacgaggagttagcgccagggcgggaagttccatacaagcaggattagtctgagcagagagacctgggccacactctgttcagtcaagccgccatcatctgccctaaaattcaccttctggatcacttgctgggggtcactctccagaatcacaccgccatgcacaatctcgtccagcaccaagaaggctccgtccatgttctccagcaaccagcgcttctacacgttcttccttaacatgtggttcagagactcaaacatgcacgtgagaacagacatgatcatcagctcattctcgta

SEQ ID NO: 133063 - DNA, 644 bp, Homo Sapiens
  misc_feature (617)..(617): n is a, c, g, or t
ttttttttggcagaagacaaaagcaggtttattagggccctggggccaggaatgcctaagatatgagttaaggccagggccgtgagaaaaggtgactctcctgaggccaaacctttgcatctcagaagccctggctggagaccttaggagtcagttctgggagggacctggggatacagaggggtctctcctgaccctgggatctttgggcttttgccaggattggggaaatgatctggggggcagggagccttgaatccacagccttcatttcaataacgaccatttaatttgttccttggcagactgaagaacctgggccacactctgttcagtcaagccgccatcatctgccctaaaattcaccttctggatcacttgctgggggtcactctccagaatcacaccgccatccacaatctcgtccagcagtgagagggctccgtccatgttcttcagcaaccagcgcttctccacgttcttccttaacatgtggtttcgagactcaaacaggcaggtgagaacagacatgagcatcagctcattctcgtaggatgagcccaccacgtataggaagaggtcaatgctgttcttgtagacgatggtcatacccccanaaaaatgcaatctcactctcagtccgg

SEQ ID NO: 133064 - DNA, 768 bp, Homo Sapiens
gatactttgctgccaaaagcctttaatatgccctggtcccaggctgtgttcatgaaagcggacacagcagtgcttccagcttcatggttcccaggttcaggttcctcccagcggaggtgggagggcagccctcacacctggcacccctgagtgccatactcctggaggaagtcgttgagctgggcacaggctgcccgctggcgggtgctccggcacaggcgttcagagggcatctcctcgatccagctattcgagtccagcaggtactgggggtgtccctcgaggtcataggtggccccatccagacccatgatcaaatattctttcccaggttccaagcgaaggcgtcaggaggctcgaaccaggaagttgcgcatctgattagcagcggccttgacatccttggtgaagtgcaggacttgggtgatcttggtctcaaagaggcggaaagcagctctgctgtcttctcggagaaccttaacctggaagccgtactccacacgggggtagtagcaggcaaacttcatcctgtagccatcctcgtcctgcagaccccgctccagggcgcgacgctggcgagggcacttcccctcagcacactggcagacttcagcagaacacaaggtggccaagagtctgctcttactttggtgccccgtaaaacacagaacatcttgcgcttcggggttgtagtagtcgtacagggttgcgcttggccggcttgcaccagccccaccggcactttcttgcacagcctcaaagcccacg

SEQ ID NO: 133065 - DNA, 413 bp, Homo Sapiens
catttcatctgtttattcagcaagtatgtgctggttgcctacaatgtgcctggtgctgtttggggcactggggctcagggcgtctgagacacacacagtcctgcccacatggagctcacaatctagagggagagagtggcagctgacaggtaactacgagggtgataaagagggagatgtgaagtgtatacaggaagcctggtttggattagggtctgaggaaaagcccaggaggaaattaagtttaattgtcgacttatagctggggatggtggcatgtacctgtggtcccagatactagagatgctgagatgggaggattgcttgagtgcaagagtttgaggctgcagcaagctgtgatcttgctcaccgcacttcagcccagatgacacagcgagagcctgacacattta

SEQ ID NO: 133066 - DNA, 980 bp, Homo Sapiens
ctacaaactctcctgtatgtgctgttcctttgactcgtttccttggtgacaaagaaagaggaatgacggtgatatcagaaagaaggtacaagttgtttgttttcttttcacatcctcaggggggctgaggctctggttagaagcagtcacgactcctccattctaaataactcacaatggagacatatggactctcctagttttgtttaataggagagagggagggcccaggctgaaccacagcttaaggagtttcccactgctacagcgaaagacaagaaacagttcttcaggcacaaagccaagttagataccttcctggcaaatggcacatccacagtcagtcttctgcagccccagaacgccccaggtccacagtggctgctgggccctctggccacgagacaatgaccagctcacctgcgttggtcacttggctcctggctctgagagggacgggggtcttctgccacttgggatttgcctgcaagcacctgctggaccctctgcatccccaggcaaagccggtggacctggtctgagaagacaaagcgaaaccaaccaggctctttacactcgaaggccttgccaaaggacagcagcaccttggttgtccaaaaagcggcgccagagcagcatttcctcctcaaaggtgcccttgggcaggtactttctcaagtcaacccagatgaagaagccagccccacgactcaagaaggggatccccaatgccctaagctcttcctgaggcataggtgtgggcagccttgagccgggcatggttttccggcaggtacacctggttgatccagtcacggtcccggagcagctgtgccatctggtactggaccaagccactgaggccgtggtagcggcagagggaagccacggcagtggccacatcctggttttctgtgtacagcgtgccaaagcgagcccagacatcccgaagtcttgctgtggaagggtacgagctgata

SEQ ID NO: 133067 - DNA, 1065 bp, Homo Sapiens
  misc_feature (760)..(772): n is a, c, g, or t
acaaataaagcccctttattaacattaccttatctaggtcccactaaaagaaaaaatataaagtagtagagtccccattttctagataactgaggctcaaagattgactggtccaaagacacccaggcaatgaaggggaagatggaatgtaagagcaagtctttttgactcattatccagtcatatttcccccactgtgcaatagctgcatagcaaaatgaagaaaaattacaagtttctgactatgagtccaaaaatgagttaacatgtgattttatgctagaagataatctaatgaggtcactctgcttagctgcttagctaccgctgttatcccaatgggactgggcaagaatagaaccaagtcatgcaagtaagagtagcacctgattgggcactgggcttggattcaggttgttatctctatggatagctgtggttcactgaggaaccattccaaagatgttagaagagccagacagaacctacattaattcattggttaaagctcagaaataatcatgaggtctctgagacaggagacaattagacataggatggctcctattatacacaaaatttcattgagtcagctctctccgctttacttcttgccctagtatatcttaaatatgtggttttccccttgcctaatccaggaaagctggatttcataactaacaagactttagacttgtgcttcacctttcagcatgcttctgggttccatgatgtcccagagcctatgtgcttatgattnnnnnnnnnnnnngaaactgaagagggaccccagtctgcaggagtgagatgggcatgggaagaattacattttctctggttcctgggtatgctgaagatgacatccaggagaaaacttctggcccctcaaactgccccatagctcagcctgcgggctgcgacttacagtgacatcagcaacatgatggattccatcgccagcagcctggactccaggaggcaccccaggcgtggccgatgtgcacaggtaggagcatgtcctctgcgtggcctctgcactggaagagcttcaaggccttttcctcc

SEQ ID NO: 133068 - DNA, 565 bp, Homo Sapiens
  misc_feature (513)..(525): n is a, c, g, or t
ttttttcagattccaaagttctgtatttttcaaaataaagatcacacattgtttagagacaatctacacaagagttacaaaaaatagttgcccaggcataagcatacacaggtttgttaattatacacatatggttacaagtgtgcttgcaaaaaagttcattggaaatatacacaaggctctggaaatgtacaccgtgtagtgttacaattctatattcaaacaaggaaaattgacagtatgttacattcacttacaagtagacaaaatgcaaaatacagttcatcttctgtacaaaagggaagggcgattcacactttacaaggtgagaggggctctgattgtaaggaaagctcgggcaaggctagacttttgcacgtccttttgactgtcacaaaatcaaaacattacttttttaggattaaaaaaacactagtgagaactcaatcttgaataacatttagaaagaatctcgctatacttgagactagatgacaaataaaaccaagctannnnnnnnnnnnnaaacattaactaggctgtataaagaacatttattccttca

SEQ ID NO: 133069 - DNA, 725 bp, Homo Sapiens
tttaagtttcttggaaatttttttattctccttgccaacatttcttttgacattttattacttaattatgtgacattaagaaataatttggttgcatattattttcaaaaagcagtaagaaagtagctattgagaaagaaggagggccataggtttttcaataaaacgttagaaacattataaaaaacgagactcccattacatggaaacacatgatcaaagatcagactaacacacattcaaacaggcttggttcgaaatagagttctccatttctttcagatgagccttttttcttaggctctttcagaagcacttcacaatgaacagaggtcttgccagctcatttcattagcggagaagcaaaggtatgatggcagaatcatgagaagatggaaataaggcctgaggatatggcttgatctctgagaccaattatctttgagttattcaggccaggatagaagcttagagaggatcgaggcaaaccatgaagggaagggaatgcaggacaatgcccattactggctttaccacaaactccaaatctcctggacccacttcgcaaggttgtaaagttaaatgaggaaggagcctgcattgtttgtaacataatacaatactttcactttgtcttattttttaaggtgcagctcttcaagaatttcattttttaaaaaatcatctgtaagggaagaaaaaaacgcatttaattcaaagactga

SEQ ID NO: 133070 - DNA, 1018 bp, Homo Sapiens
  misc_feature (555)..(555): n is a, c, g, or t
  misc_feature (642)..(801): n is a, c, g, or t
tttaaagagtgtcaattaccttttgaacctgtgaaaatttgatagttgttaacagtctgatggtcctaattctttcttttcattctagaaatgaatgtggttgtaatcatgttcctaattcttgggacaacctctccttttccccattttttcgtgctgaagctcccaggtcaccccctggctgccagtgggagcctgcaggagtcggaagcctgagggacagcctcgcacatctccaccaagtacagctgcatcaccaagagcgcggggctgagctgatgcgctttttttcctctctgaaggatatggcttaattgcagaagtgggcaattttgggccacaggaccaaaaaaggggagccccagggaactagaaagtgctagggagagagcagagagagaagagcttaagaaagtgactccacaaagttttttatgaacactagcccttccccacctactcacatgttcacagtgcttatgggtagagctgatcctaagtccatataaagacagcagagaaccgagcttgcaggtgagccctgtcaggcctcanaccacaagatggggcccatatgggatgaatccaaatagcactgcaaaagctttgaaaactgaagtgacacctcgtgccgaattcttnnnnnnnnnnnnnnnnnnnnnnnnnnnnnnnnnnnnnnnnnnnnnnnnnnnnnnnnnnnnnnnnnnnnnnnnnnnnnnnnnnnnnnnnnnnnnnnnnnnnnnnnnnnnnnnnnnnnnnnnnnnnnnnnnnnnnnnnnnnnnnnnnnnnnnnnnnnnnnnnttattgcgttgcgctcactgccgctttccagttcgggacacctgtctgcagctgcattatgaatcggcacgcgcgggaaagcggttgcggtatggcgtcttcgcttctcgctcatgatcgtgcctcgtcttcggtgggcgaggtacagtcatccaagggaaaggtaccaatatcagggaatgcagacaaatttgaacaagcataaagcagacgtaaa

SEQ ID NO: 133071 - DNA, 731 bp, Homo Sapiens
  misc_feature (246)..(258): n is a, c, g, or t
tcacggaaaaactcaatttttcattttattttggtatattagtgaatgtctactgatctagtatttcaagtgtggatcacgtaaacaccatgtagaatgtagtaaacggagttaaataagaaaacacactggctatcaatgccagagtctttgaatatcaggtcataaatataaccaattgtgcaatataaccaacatgatgagaaaagcacacctcacaattgacaattttagttcatatgattnnnnnnnnnnnnntctgaaactgcatttagtgccacattctatcatatcatacatcagattccatgctgtggagccgcactgggctacaggacatacagtacatatagcatgttttaaaccgaaagtgaaaggaaaaatatgaaacagaaaatttttacatacacatctaacggtgttgtccatttaattcgatttatatgatttgctgtgccactttgactggcttgcagaacaccccagattctcttttccccatagagatctacttccatacagagtagaaaaagatggtggtaaaaagacttcagatcgtcaggttcgacgattgtgtccaaatgcactgtatgacactgtgtgctctctaacaacacactcttgagcgtcgggggctgtgccgccggttgactcagctgtctcagcagcatctcggtactgatactgagccaatctttctgggtcagctcactgatcgatttggtaagatt

SEQ ID NO: 133072 - DNA, 884 bp, Homo Sapiens
ccaactgggctgatattctgcttgtctttttgcttcatttgcacagcattatgtaacttgttctgcagcagctcgttctcctgccgaagctggcccatttctgagcggatccctcgctcggtgctcgaaagggagctgatctgactgcggagctcttgttccacttgtctgctggcttgcaggtcagcctttaactttttaatgtcttgttccagcctgaccagtgcgtctggtttgcttagctggttattaggaatacagttttccattaagtccttgtgtgtacttgggctcttgctagtgcatttctgcttcttctcatttttactagatgaggaaggaatgctcccatttgtggcgctatgacttcgaggtgaagagttcacaactccactggcatttttgtaattttttgaggaagcagtgcatgagtcctctttcaagagattttctgtacttcccacaagatcattatttaatcttttactattgatatggttttccatatactcaatctcttgtattttagagtctacaggttgtagaatattgttgttatttattccaaggttgtgttttttggcatccttgtccttttctttccctttttctcggtattctatctctggcaaagttgtggagagttttttgttggctgggatacctccattgtggtgtataaggatcgaagaatccatatcaggtaatcctttggctgcagtgagcagcaaatggacgacaaaggtctacatgaaagtttttgagatctttaaatctaatggctgcttcaatataaacaaagaggatccagagagacactgtaggcaaacacactccccattctgtgtgccatacgtactgaacccatacattagtgctagcag

SEQ ID NO: 133073 - DNA, 396 bp, Homo Sapiens
  misc_feature (15)..(15): n is a, c, g, or t
aataattaatcactntttattcaaatgctctagaaggattgttatctcttccttctcagtggatctcacaacctgatctttccttctaatacagtgtttgggaacagaacaagtaagaatggacagaggaataccatgtgctgactgacgaacgcctgggtttctgaaccaattgccatcaaggggattgggattaccataatttttgctgagactaagccccaccccagtaaccaaaggcttatgggtggaatgcaagctattggaagtatttgaagatgtgaccaaggaagctatgagaattggaaatgaggcagttgtttagaaacgggctgatgtgcttgtggtaaggtggaaggaggaaggcagatgaggaaaggaatgtgcaactgaagc

SEQ ID NO: 133074 - DNA, 1183 bp, Homo Sapiens
  misc_feature (1090)..(1127): n is a, c, g, or t
attaggtaagcactaaaattacttttatgtaataaaagtaaataggaattttgcatgtttgttgtttcattttacaaatttttttattccgttatttataggatataaaactttaagaaaacattctcaactaacattctcattagatgtaaatgattcaaattacaaataatactaacctaagcattgtcattactttttaaaatccaagtttctcaaaagtttgatttttttactcaatccaaaaaatgacctggttcacactattagctgcccaacaacctgtttgaaaaactaaatattctttgttcaagagtagattacaagaaatgttttccatgctcttatttcaaaaaacaagattctgatatacataatgaatctaaataaaaattcacaagtggtggctgaaatcctgtcaactttcagcccaatacaatataaatccacagttataatgcataaacaattcaaaattaaagtttataatggaaatgtcaacaagtcataactactacacattactactgatgggttccactatacttcaacctggcacagcagatgtgcacatctgatagacagactgcttagaaaattaaagctatcagagctataaataaggaatacataaatatgaacatagcaatgccaaagcattagagctgttaaaaaaagtgaataagatgtgatgtaaacacatctgatagttctctctgtaagccactttccactgatttataaagctatggttttataattcttttaaaaagtaaaatttttctacactgctgcatgcagtaatttcattgtacattctcaactacaatgcaatcttcaaaccctcttgcagagcttgacatatctcatcagaatttctccagaaagtcagcttgtcatattttcagcagccttcagtgcttcagtagccttgcgaagctccttaataaccgatgataaagcttctgggttaattccttgttcacaaagccgtacacaaatagacagagtttccatatctaagccagtattcaaaattcttgaaatctcaagcagaacgtccatggtctcccgcaccgcattcagattnnnnnnnnnnnnnnnnnnnnnnnnnnnnnnnnnnnnnntactcgccatggctaaggccgagggaggcgggagaagggcctgacccggaactccc

SEQ ID NO: 133075 - DNA, 952 bp, Homo Sapiens
  misc_feature (321)..(329): n is a, c, g, or t
tgggattttgcaacatttaatcaaaaaagaatctggcatcttaaaagttaggtttacaaacttgacacattctcaatattagcaatttatctatttaaacattgtctaagaaaatatgatctatgaagacattaatacattaataagatacttaagagttcattataagctacaacactttgcaaataagtatccagtttaattgtaacaaaccacaatttgtgagcaaatttaagaatataaaaaacattaattagttaaatacaattctctgggaatatacattatacctacagctgtttttacagtgagagtcttccnnnnnnnnnccttttaattatcaaaatggtaaatcactgtatggtcctggatctccatgctataaaactgaaatatgtatttccagcgtagcagatggtgaccaggaaggcaaagaacgatgaggccgcccagctgttgaagttgtgactgtccctctcaggggagacggaagatgcatctacaacagcggcagagaggtacaagacgaaggcactgccgttaaagcacaggcccactgttgtccagtgcacctggggaatcctggtgtaggtcattgttatgtagataatgaggaagaagacggtgaggacccagtaaaatacagctacacacatgacccagtcaaatgctgtgactcggtagtactcagttccagcaataagcgtccataccagcagccccagaacgatctcggccacgatgaggaagccgggcagggtgcggaggaactcccggtcgtaggcgaagctgctgctgctggtggagaagttctctgcgaaggagctggcggtggtggtgactgtgtgcgagcgggcgcgctgcggctcctccatcgtcgagccactgccgggctggcgcgtccccagggaccccggcgggtctggggctggacgcgcggccctgcgccccc

SEQ ID NO: 133076 - DNA, 1760 bp, Homo Sapiens
  misc_feature (393)..(447): n is a, c, g, or t
  misc_feature (517)..(547): n is a, c, g, or t
  misc_feature (808)..(810): n is a, c, g, or t
  misc_feature (813)..(813): n is a, c, g, or t
gctgtaaaacaaaacacacaactggggaagtattttattttttctacttcatataacattgttcaacaccacaagattttaaaggtctctttccccaacttttatgatttagaagtaccacttaaaaatatttactgatgctgtaaatattactgtttttgtacatagtaaagattttaatgaatgccatatccattatacctcttgctcctttggtcagaaagataaacagaaactttaaatcagatgtttggacattcaaaaatggttttgaaaagtatacccaaacaaaccaaatatatatcagcaactattaaaaatcagttttagtagttattaagaattcttaacaaggaagtatcgaagcatgtgtgagattttaaaaactatatnnnnnnnnnnnnnnnnnnnnnnnnnnnnnnnnnnnnnnnnnnnnnnnnnnnnnnnaaaagtttgtgcatcagatttaatatcttaatgtttatcagaaatatattttgtgagtaagaattatttnnnnnnnnnnnnnnnnnnnnnnnnnnnnnnnctgcaggatctgtgatgctggagaaaaattttgaagaaaaaaattgcacttttgattatcaagatattgtcaaatttaccctttaagtgaaatataattaccaatccaggtgcttttggcacaagtttttaggtgaatatcgacacaatcttaaaaacacaatgcttttgtattttattcactggaatatggagaatcaaacagaatttaaaattctgacccaaaaatcccagataactgcaattgcttaattaaatacannnaanaattgttttaaaaagcgcttagacttccctttccatctggaacatgtaaaattttgcagcaacaggttttctccaattccttcagcaagaattcccagcctacacacaaatttaacaccatctttttctattcatgtataacttggatcacacaccagtatataacgacaaaaaataaatgtataataaaaagattggataaatcagaagaggctttttggtcttgaattcttcacccactaacaatgaagcagcactgtaggcagcccaaaacacaccaaacagttttataagtgtagacaccacttcaaatgatccaaccaccaaaagtacaggggctattacaatgagaggaagtaatgaatatcctataactccaaggacttggccatatgcaacttctccaccaagaactctggccagtaagaaaattgttagtgaaccaaatatccaaatggttataatccatgagaccaccctaaactgtccatataatgatatcatggaaaagaaaagaacaacagccagaggaccccaaaagtcaggattgtctctcaccacttgtctattaaaaccaagtgatggcattggcatcaaaacacatcggattttgtagtaaatatcctttagatcaatgtccaattcttccaagagtggcttgttatcttcaggatcatcatcttcaacttccagaagccagccataacctctttgtctcagaaatgtagtagctgtagattctttgataaaatctccaccaagatttaatttgacatctggggatgctattgaaccactgagatcttccgcgtctgctgaggagacaaaggtgaagtccccgttagtgggggcataggccgggggcgggcccggaggctgcatctcgcggcgactcccaaccggccgcggttgtagaggctgcggctgggcccagaccccgaggcggc

SEQ ID NO: 133077 - DNA, 643 bp, Homo Sapiens
cttttaaatgagcaagtttgagagtctgcagtttgggctaccatgagaattgataggaaggtgggagtcccaggcaatcccaggtcctgtagcagcagctggtggggttcccactccatgccgtgcatagcctgaactcaggatgacacctgcacctgctctctggctgggctctggcacaggaagccctcagcaaacacccccggcacagccatgccatagccagacaacagctcgctgtaccacaccatcatgggagacagcagttattctgagcatctcactgctgaagaaaccaaggctcagagaggaccatgcatgcacaaggtcccacagggacccaagaatccaccaagtgtcagacaacttgcccatgctcttcacggagcaccttggaaccctccccgacaggcaccgctggctctcctgacgtggcctgcaagtgcacggagccccttcctcctcggccattcccagtttagattcccaggggaagcatcagatggcccctctcccctgctggcagcagagcagacggaaccagccagagcccagggcagtgctcacctgcaggccagtccactgcggccagcaccgccccctagaacctactgcgggcatggcggccgccagtcctgggtct

SEQ ID NO: 133078 - DNA, 274 bp, Homo Sapiens
ggcacgaggtttattcagatataaacaaatagtagaaggcgaagtgatgattcaaaagcagagagctgactgcacacagcaagttcccattactataatattgctgccttcagtctagccccattataaggcatctaccgcagttttcagaacgctttctaaaatgcaaatctggtcatgacactttcttgttttaaacatttcaacaggaattttctttctggataggatttaataggtagttgcaggttatcattctcactgcaccagatag

SEQ ID NO: 133079 - DNA, 682 bp, Homo Sapiens
gtttgttgaaatattttatttctaattttattatttttgaacagttaaaaactcaaagtacaatgaagtttacaatgaaaaggctcactcctgggatccttatcccccaggtatctagttctgctccttggagactaccaatgtgatcaggttcttccatatatgtcttcagagacagtctaccatatacaaacaaataggaatacatacacattttttcttcttatacatcaattgtagcatgccatacagtttgacaccatgcttttctcaataaacattattatgccttagagatcttttcatctcagtacctaaagcacttcttcattcctttttccattgggcaaattagtttcaccaatcctctgtaatttattatctaaagtgagacattgagaatgaaagcactattaataattatccaagaacagcaggtataaactggtagtgttcaaaaagccaaagcatatggttatcctacctatggcagatatttaggttgcttccaattctttgacattaccaagttgcaaagaatatacttgtaaatacatacttttgcacatctatgtgctttgtttggtaggataatttctagaagtggaattgcagggcacaaggttatgtatatgaatttacaagtttcacagactgccaattgctgtacataaagagtata

SEQ ID NO: 133080 - DNA, 586 bp, Homo Sapiens
  misc_feature (293)..(352): n is a, c, g, or t
  misc_feature (543)..(543): n is a, c, g, or t
aaagaaggtactactgctgtaagaagttaacaagtaataatttcctatttaacatctgttcataatgacatttccgctgcatttttttccatcaagaataccaaaacagtttcctaatatacagtatttgaaagtgtttgccatattggctcttaaaatgatagactaatttttctcattcaataaaagaaaatttctaataacaaaatacatgtaaagttagaattttataatttccacaaaggaagcagcatttattaaccagagtacttgtttgcaattttttatctgtnnnnnnnnnnnnnnnnnnnnnnnnnnnnnnnnnnnnnnnnnnnnnnnnnnnnnnnnnnnntccatgttgttgggcataccactgctgtctctgctttcggttttccaactctgtaagaagggcttgtctgtatgcttcatacattttaacaatctgctccaattctttcatgaagagcaactttagcattccctggtatgtatccaggtcagccagctggaagagttcccacttcagaatgtggtcatatntcacaggggctcgtgcgtaaacctgaagccagtcaggaatttc

SEQ ID NO: 133081 - DNA, 1565 bp, Homo Sapiens
  misc_feature (65)..(124): n is a, c, g, or t
  misc_feature (1311)..(1404): n is a, c, g, or t
ataatttccacaaaggaagcagcatttattaaccagagtacttgtttgcaattttttatctgtgnnnnnnnnnnnnnnnnnnnnnnnnnnnnnnnnnnnnnnnnnnnnnnnnnnnnnnnnnnnnccatgttgttgggcataccactgctgtctctgctttcggttttccaactctgtaagaagggcttgtctgtatgcttcatacattttaacaatctgctccaattctttcatgaagagcaactttagcattccctggtatgtatccaggtcagccagctggaagagttcccacttcagaatgtggtcatatttcacaggggctcgtgcgtaaacctgaagccagtcaggaatttctgcagtatgatatggatttgcaggtaccagaagggactgatttctttcagtttgctgtggctggtatgtgacaggaggtggttgatcataccgaggtacactaggagcacagggatgcctgtattgggccttcttatttgtgtgatctacataataggttccaaattcggatgactcaactcgttcccatccaggaggaagtccttctcgctcaagaggatggctccagtgagttgtatttgtgttatgatctatataatattttctccctctcattgtccagtccacagaccagccaggaggaaggggtaaatcttcagaaccatggttagtcaaatttcctaaagatgtagcagcaactctcccaatacctgaagcatgcctcccctgattctgtggcattctttggaagagatcatggttgtattcataatatctgtagtcttcatgtgcacgatctccaagtggccgctttctctgaccatcaaaaaaattgtctgaataataatatcgggaaccagagtctccattttcaacagcaaaactaacttccgttacaaatgactgagaagaaccatactctctagggacatctgctagacttctggcaagataagaaggtgcagataatctgttgctttctcttctcattatttcatgaggtgttctttgaattggagttctaaggaaactctggtttcttgaaactacatctccagaagttgaaaaggcattagggcttgaatctggaagacagatatcagttcgtcttggaattgttggaccatgccggatgaatgaaggcataagattccgaagcagaggcgacgtctccttcttcacgtacttcccctgcacctcggccggcttggacacttcgtttttggttttctttcgggacagcatccttctcgacgaggcccgaggccgcgctgaactgcctccctagggctnnnnnnnnnnnnnnnnnnnnnnnnnnnnnnnnnnnnnnnnnnnnnnnnnnnnnnnnnnnnnnnnnnnnnnnnnnnnnnnnnnnnnnnnnnnnnngcccggggtcgcccgcagggactgccgcatgttcagggcgctaagcgcgccggccgccgctcagtcgctggtcagttccttcccggaagtcggcccgctctgcgacgctgctcgggacgccgtgaggaaagcccagcgacgccgggccagggccatggtcc

SEQ ID NO: 133082 - DNA, 422 bp, Homo Sapiens
agcccttcttacagagttggaaaaccgaaagcagagacagcagtggtatgcccaacaacatggaaaaaatttttgagctgattttttaaaaatttaagttttgtaagagctttaaaatattttcacagataaaaaattgcaaacaagtactctggttaataaatgctgcttcctttgtggaaattataaaattctaactttacatgtattttgttattagaaattttcttttattgaatgagaaaaattagtctatcattttaagagccaatatggcaaacactttcaaatactgtatattaggaaactgttttggtattcttgatggaaaaaaatgcagcggaaatgtcattatgaacagatgttaaataggaaattattacttgttaacttcttacagcagtagtaccttctttaaaaaa

SEQ ID NO: 133083 - DNA, 1406 bp, Homo Sapiens
  misc_feature (168)..(176): n is a, c, g, or t
  misc_feature (341)..(369): n is a, c, g, or t
  misc_feature (497)..(497): n is a, c, g, or t
  misc_feature (532)..(532): n is a, c, g, or t
gcttgtttttgttttcttctcttctgcgccagcacacccccggggctgctattttaatttcgcgctcttcccttgggagacccgctcgtgtgtgtagtgctgcccctttgtggcctctctggactcctctctgcggagaattggttcaggagacaccctcggtgtttnnnnnnnnngccctttttttaatgggtgaggaaccccgcccttgctctgcccccgggtttccctttgggacccgcttttggcccatgtcgccctaccctctggggcccccgcgcgccccaccggatggtgtttagaaaacgtttttctcaagggcccagaggccccccccaaannnnnnnnnnnnnnnnnnnnnnnnnnnnnagtactaaatgaataatttttttctaccagtcgaaatactaatgctcccaaccatttttaagtcgtcttatttgaagttatgtgagccaaaaagtaaatctgtctcacattttatttttatcctgccnaaatttaaagtctataacttggtagaaaaaaacantcggacaagaaagtttaattttcctctcacttaattttatctggtaaaaccaggacttcaggaataaagtagaactgtacatttctcccatctcttctgctcctttcagaagtatctccaactcaggagatatggaaagtaccttcttttcttaaattatatggtaatattttttgtctgttacaaaaataataaaaagacatgctcaacacataattaaccatatgactataagtctttttgatcaactcaggaaataattcttgaactactttttgttgagaaaaagggcaggatctagcgaagtaatgtgattgctcagggtatcactgagcatgcccagttgttcctactcttctttcctttcccaagtttgtcaagtgtctctgaggactccgtcaagtgtctctgaagacttacccttcccattattctaccaaacctaaacctaaattcagcccaactggagacattaaattctctaggttttcaagggtcacagcattaagagtctagacagccttgagataaataccaagtttacataacatgagttaataaaataaatggtcacaaggactcttccattcagtgtagattaacaactatttgcacacaggcttaagcaggatgagcaaagtggaaaaacatttcgctagtagtatttgttcgtgtcccaagaaaatctagaaaagaacatctttttaattgacatgtcaataaatataaactactatattatttataatgttaagctacctgaagcatgcctcccctgattctgtggcattctttggaagagatcatggttgtattcataatatctgtagtcttcatgtgcacgatctccaagtggccgctttctctgaccaac

SEQ ID NO: 133084 - DNA, 886 bp, Homo Sapiens
caaattaattaaatattttaaagtcctcccatccccacacccaggatacagaaataagttatcagggtgggggttgggagctgaggagggggctaggggtctccaaagtttattttctgtacacaaacagtaaaaacttgaagcatatacacctccaacatgtatatgctgttaaactatgataactgccacttttacagatcaaaaacaattatcagcagtttattgtggttcaaccttttatttataaattaatgacctacatgtactaatgaactaatattgatgtatatttgatgtatatatataaaatacatccaaagtgagaaactaaataaggctgagcctcaaaatgaatataaatcaaaggcctaatcttttcttcccacccccacccagccatcctgtgtgccctcttccccttggaggccactgccctaagtgaggatcagcatcgactccaccacagcccactttagtggtgacaacttttaatccacggaagcagtttttcaaagtgaaaactgtttcaaatcacgaagcttaccacttagacaattcagacaaggtaatgctcatttagactgacacaggtatgaaaattccaatcccttcttttcactatcattgtatctgacacacacatcaccttcctaggcactatgacactatcctgggagaagcaaatgtgtacaaagaagcacaatcctgctctctccccacacttcacataaaccagtatagtccccctgtagtcaaggcttcagatgtcaattttctgttggagacagcgtcttgctacgttactcaggctgaagtgcagtggccattcacagaaatgatcatagcatactgtagccttgaacttctggcttcaagcgatcct

SEQ ID NO: 133085 - DNA, 650 bp, Homo Sapiens
tttttccatcaatagaacagtaaaaactgaattatgatttattaattagtaaaacactacacagcatcaaaaataaactcagccacatgcaacaatacagagaatcttaaagacatagtattgagcaaaataatcagtacacacaaaattccacttatacaaagctcaaaaacaaaattaagcaatatttttagaaatgcacttataaatgatgactgacccactatcaaggaaagtatttaacattgctctgaaagttctggaaattcttgattttcctttctcaatttctacacccatcaccacgcccagtcttccccaactcactaaacagcaccgtcatccatttagcatttcaagccagtgagaagtcatccttaattctgctttttcattaatttccctacttctaatctattacgtgtgttattagatctaagatcaatatatttcctgaatatgtctatttatgtccatttccaacactaccactgaagtctaagccattgtcacctttctttctggattactgcaatagcctcacagcttccactcttgaccacatacactccattctgcactcagccctcatagtgatcattataaaggataaaatggtgtgggcagttagctcagttggttagatcatg

SEQ ID NO: 133086 - DNA, 703 bp, Homo Sapiens
agagttatcattgaatttattttattttaaagttatctatgtacaccaagtaaatacacacagggggttgcgcagtttggtttgtcttccacgctggcatgcaacattttggcagatgtgagtgggcaggccaggtgccccttgcagtgaccctggctctgaaagggatgcggtgaaggtggggagcaggaggaggaggaggatgtagtgtgaagcttctggtgaagggtttgcgtgtgtgttgtttcttttttatgtaagtgaattatatttcccttacatcttgctaaagagaaggctgctccctctgtgtcatctctctcctcatctgcgctacaccctcacatttccttatgtgtttttaaaagaaccatgtggtggcaacattacataaaaccccctggattcttaagtgccctgctgacagcaaatattagcctaagtccacaggcccacaggaaccttccttccaccctagtgggtctggagacagcatggcttgtctaccccaccgttgccctcttttccatgagttgcagctttagtgcagaggagccagattggacccccttcctcagaacaatggttttcaaactactccacagaatcctcagggtctcttaggactgttcaagggctcatttgctgaggagcctttgaacagtcagtcctaagagacgctgagacttcttccaccaaaaaa

SEQ ID NO: 133087 - DNA, 1103 bp, Homo Sapiens
  misc_feature (261)..(283): n is a, c, g, or t
gggggttatcatcaaagttttactgcaactctaaaacataggaatgtcccatacaacagcagctaacactttgctttttaaagtgattcttcttagtgcagggacactcatttgtctatgcttgttatacagcgaaattactgcctatgacatctcataattgaaaaatttggagtcaagattaaagctgtttacatttttagtgaaacttctcttaagactgtccaaaagaaaatgaactaatatatgatgctattatcnnnnnnnnnnnnnnnnnnnnnnncatctttcatggtctttcattcatctcatcaattaggacacacaaggcagcatctttctctataatctgatctctcctatgacctgaattttctctttgatgttcattctgtccagtacaattgttgctatcatcagcatccattggttcagtttttactctcattcctgcttctgaatgaggcaaatcatcaggcaaagaagccaagcaattctgaatcatttcaattactcgttccaggtgcttttgaaatctctcagctgtttcaagccgttgacgtttctggacctccatcatgactctcaaggtctctcttgcttggtggggtcggtattcatttataagatgatgcacgtgtacaaaaagcagcttaagatcttctagtttctcttctcgttttatactcccagggctccttattaaaatatctaaaaggtccaagaaattaataaggatagacatattaagttttctcagttctttcttgtgatcaaactgcataggatgaagccgttcgatgccctgactttccaaagggcggatgataagatcatcacattggaactgattgccaaccatcatgtaactgtcttttattggagggggaggcttgggagctaagccttcttgaatattttcatccgtatattccttgatatattgcattggaggtggtggaagtgcactcacttgctgtggttcacccattgtggactatcaagaacctcagctctggctttacactggtagccgccttcccctctgcagcccccggccgtaatggccgaattcccgggcatatgtccggtaccgtcgactg

SEQ ID NO: 133088 - DNA, 710 bp, Homo Sapiens
  misc_feature (595)..(595): n is a, c, g, or t
  misc_feature (608)..(608): n is a, c, g, or t
  misc_feature (658)..(658): n is a, c, g, or t
  misc_feature (668)..(668): n is a, c, g, or t
  misc_feature (671)..(671): n is a, c, g, or t
aactggtggccaatggaagagatgaggtggcctgatctttgacaaatccatccatgcttggtaccagcttggcctatctttattgctcaaaccaataatacaatttgctgaggtctgggaggtcccttcagagaatcattgctctccccaaatttggttgaggtctaaggttcattttgctttataactcctttcctggagttttactcacttccaacaaggaagattagttttcctgtttccatgatgatggagggccagcaagtcctttctggagtttctgctcccttccaacagagaaagtgagtttgagttttttcctgcttcatagatggtagacagcagtgttcagcgtgagcctcattcctaggtaagtagctcaattagagttttgtcttgaaaattccccttagtgactaaaagttaagattgacaagtaactggtcttaacttctccttaccattaaaagtcctcagtaatcatatttgttttgttattttggttttcttccatcagatttgattaactctacctgagttggtcaaattcgaaggagaactccaaattacggggaacaaggctctggatcactanattcatgcagccnttttgagctgtctgattgctgtggagttcctcgtcgattcttggctccangggcaatccntanatgagtcgtataattcgtatcagtctagctgttctgtgg

SEQ ID NO: 133089 - DNA, 754 bp, Homo Sapiens
tttccttatgaaaccatttcttttattgtaattgggaattatcaggaaattgaatcaaccagaaatatctatgccttcttgcattcccatttcatatcgaatctatataagttgaatgaaactcctctgaagttaggccaagctgggatgaagttccaatccagtcataactgttggacctgcagcaagtactcatccttgccaaacctttgttttctcaccttcattgcgcctcatcttccatctatcaaggtataagcttatccatgtataaggctggcttcaaaatccttaagggttctaatgggtatagttccaagggtgtagatgaagccgtctcagttgtgaaattattagcccaaggttcaaggtcctgaagttttgctgcagtgtggatgacaagggcagtctttctctgaggttctcagaagatccgatcttcaggttctaaattatgaagtggttgatggtcctcaataagtgaaccatgaaatgctttctttacctgtattcaagagtgcttttcagggtccgttccatcctttcataaacctcctaaaatatatcatattctaggattttcagtgcttgtgaagttttcaaaaattccaacaaggaagattagttttcctgtttccatgatgatggagggccagcaagtcctttctggagtttctgctcccttccaacagagaaagtgagtttgagttttttcctgcttcatagatggtagacagcagtgttcagcgtgagc

SEQ ID NO: 133090 - DNA, 2961 bp, Homo Sapiens
  misc_feature (823)..(823): n is a, c, g, or t
  misc_feature (2447)..(2469): n is a, c, g, or t
  misc_feature (2571)..(2622): n is a, c, g, or t
  misc_feature (2717)..(2731): n is a, c, g, or t
gcccagcataggtgacactatagaaccagtttgtcacaaaaaagcaggcttggtaccggtccggaattcccgggatatcgtcgaacccacgcgtccgcagttgcctgttacgatagatagtacaggtatattacaacaaaacacaaatagcttgactacatctagtgggcaggttcattcttcagatcttcagggaaattatatccagtcgcctgtttctgaagagacacaggcacagaatattcaggtttctacagcacagcctgttgtaccagcatctacaacttcaagagtctcagcagccaaccagtcaagcccaaattgtgcaaggtattacaccacagacaatccatggtgtgcaagccagtggtcaaaatatatcacaacaggctttgcaaaatcttcagttgcagctgaatcctggaacctttttaattcaggcacagacagtgaccccttctggacaggtaacttggcaaacgtttcaagtacaaggggtccagaacttgcagaatttgcaaatacagaatactgctgcccaacaaataactttgacgcctgttcaaaccctcacacttggtcaagttgcggcaggtggagccttcacttcaactccagttagtctaagcactggtcagttgccaaatctacaaacagttacagtgaactctatagattctgctggtatacagctacatccaggagagaatgctgacagtcctgcagatattaggatcaaggaagaagaacctgatcctgaagagtggcagctcagtggtgattctaccttgaataccaatgacctaacacacttaagagtacnaggtggtagatgaggaaggggaccaacaacatccaggaaggaaaaagacttcggagggtagcttgcacctgtcccaactgtaaagaaggtggtggaagaggtaccaatcttgggaaaaagaagcaacacatttgtcatatacccaggatgtggtaaagtctatgggaagacctcacatctgagagctcatctgcgttggcattctggagaaccgcccttttgtttgtaactggatgtactgtggtaaaagatttactcgaagtgatgaattacagaggcacagaagaacacatacagggtgagaagaaatttgtttgtccagaatgttcaaaacgctttatgagaagtgtccaccttgccaaacatattaaaacacaccagaataaaaaaggtattcactctagcagtacagtgctggcatctgtggaagctgcgcgagatgatactttgattactgcaggaggaacaacgcttatccttgcaaatattcaacaaggttctgtttcagggataggaactgttaatacttccgccaccagcaatcaagatatccttaccaacactgaaatacctttacagcttgtcacagtttctggaaatgagacaatggagtaaatattacacaaatacttattcattgtggttatttttatacagtagtgagaagaatattgttcctaagttcttagatatctttttattgatgtgcaaaaatttttggattgacagtaacttggttatacatgacactgaaatgccttactttgtatgatattccatagtatattaaaaatggtaaaattgcatgggttttgtaggtacttttggaatctagaagaaatgaaattttaccaagttatataaagagaaaattgaatttaacaatgcggaatggtagtctaaccaaatgcatcaatcctgtgtggtttagtgtaaaaatgagaacatgttggtatttatctattgtaagataaaaaagctggtgggtgaaagaaatcatgttatgataaaaaattttgtaattttcttgatgactggaatttttattatgcataactgacaaatcaagtttccaagcaaatgttacatagtgtaggctttacttagcttatcaatttgtcattttgaagctaattattttaattaggttaactatgtacaatattttaagcattactcttgtaagattttgaaaactacattttaacatggaactctagggatagtcaccttttaaatcctgttgaaaagccatgtttatgatttaatttgccaaaataatgtcttgttaatattctttcaataacgaagttgggcaatataaccaatgtttaaaaaagtttaaaatgtataagttgaggcatttgggtggtaagagaatgttatagtgaattatcccttttcttgactattggaggaccaaaaaaataaggtgtattgcgtcttagcagtgatttttatccaatcttgtttccaaaaaccatgtctccccagggccttaaaagccatcatgtaaattacccgtaaagtgtaacatatgcaaacataacaaaatcacttccatagtgacgatactccaaccatatggatattagtcatagaagaactagaggttttatgatannnnnnnnnnnnnnnnnnnnnnngtctaggtagtcagtctgcacttaaatatcaatcattttccttttttgcttcttcccttaaaatttatatgtatccagtacatttaattgagaagcgtatgnnnnnnnnnnnnnnnnnnnnnnnnnnnnnnnnnnnnnnnnnnnnnnnnnnnncaattcaaaaatgtacaaaataaagttacattgctggtcttgtaagagctatacagttttcctaaatgtatacctgtaactgcagcaatgtaacnnnnnnnnnnnnnnnaattattgtttatattttcaattcaaaaatgtacaaaataaagttacattgctggtcttgtaagagctatacagttttcctaaatgtatacctgtaactgcagcagttcacctatttcaaaaatttggaattctgttcatttgttattcttaagaccacctcaaatttaaaggctaccttattgtacgtttaaagtgtattataacagtgtggtagttaataaaagacta

SEQ ID NO: 133091 - DNA, 915 bp, Homo Sapiens
aaacagaagcaaaggccacatttattccacttcttgaaggtgcaggccttggacctgcccagactcacagtcctggctgcatgtcccaggaccagctggagcctcagagagtgagggagagccaaaggggccccaagacactggcactggccttggccacccattttctcaactttaggctcagtcagaccaagcatagaaagaacaggaggctctctatgttgcctgaggctggcagtggtgaccctcagaaatcacaagggagcggagagagctgtgttcaacatgaaacgcttgaagaggaaggaagactgtgatgaggtcgtttgacctactgccctggggaaaccccaggaggcctcctctcctgttggctagggagtgaagtcctataaaccagagggagtgggaaggcgtatgagagtttcttctccccacggcccagccatgggcatggaggagcagtacctgagcctagatgaagatagaaaggtcagccaggcagttgctgccacactctttcctgtgggtcccaacagaggtggcctggtgcccagtctcagctgtgctgcttcccagggagaaaggcagtggaaggtaatgctggcgacatcctggccagcagccaggagggaggtaggctgatgtgatgggatgggatcttgccctgggttggtctcatggtgcagaagagcagtgttggaatcattctaatgcttcaggatgcctcatgtgccccatggagctcagacatcaggaggtgctgggactctatttagcctacaagaaaaggtacaggctagcagtgcccacctgttggagaggcctgcagaccacactccagggcccagcacaattagctttcaagaacactgagccattcaagtcctcagctctccccttgtagcaccctca

SEQ ID NO: 133092 - DNA, 748 bp, Homo Sapiens
tttttaggattttactttagttttaattgacgttttgctcaaaagcaaagaactgaacatttcaatggttcaatgttacaagattacaaacaaaatccttacacagttacagtatcctacttcggttacttcacattaaatgcaggttgttaaaatcagtgctgtgcttgaacacaagataagcatttcaatttaataacaaaattaaatctagcaccttgaaataaatattgacgacagctttataagtatgaaagtatcatttcaataggaggaaaaaatccagttcaccaacagtggaaactaatagcagcattttcaaagctgagatgaaatttgtgtaaacacacactggcccgcacagtggacatgcacttctgttggctgggccctccccacccagggatgaacagagtgcccactgagccttttacattccaaatctggaaagctgcctcaagtttcagaccgtgggctagaaagactcaaatgcagggcaagggagatcaatgtgtttaagcaggatggggtcctttttgtaacaggccaacctagtaacatttccagtccaacttcagagcattccaggccaaaggtgcatatagtaacaggtctacctgatgtgaccctgacttcagggggagcacctgagtgcagggcaggatgcaggtgaggaacgagggcccaagatccccacagctgacaccactttgcaaccagcgcattctaggctaactcaggtgagatt

SEQ ID NO: 133093 - DNA, 1370 bp, Homo Sapiens
ttttttttctggtccgggttagctttattggagcctcctagcaggccaggtgtttcaggcaccagtagtgctgcaggcacgggggcctgtggtgtggccagctgcaggtgatctcggtggtggactccgaagtgtactccagagaggtcccggaatggcaggggaccagctcgggcactgaggcgctgctggcaggctgtttcgacgattccttctggcgctgtccgctggtcttgggggctgcgtcctccggcttgccagaggacttgctggggggctgcgtggggatgttgctgctgctgggagactggaccatgggtgagaccgggctggaggtgacgttgggtggctgcaggggccccgaggacgggagggctgactgggaggggctggaggaagtaccaggcggctgggtgtgttgccgagaccagtgggagctgccctgtgcccgacgctggccctgggccctgccggacaggcgggagccacagccagagccagagggcagctggccctgggatccagagctgggggtggccgaggactgggactgggacttgcccgaggtggcatttaaggagacccccagggccttgcctggacccgagggactggcaggggctgctgttgggggatgcgctgaagactctgtggaggcctgggagcctggcgcggccccctcctcaccagccaggaggtccttgtgaggctcagggggctgcttcacttgtccttcggctgcggggtctggcttggcttgacgttcctggttattccggccgccgcgtccagggctcgcccgctgaggtcgttcatgattctgtctacggccccgtggtgccttaggaacagcggacgcacgacgcgctgatacagcatgagagccccgttccagggcctgggagccatgcagaacaacaggaaggcgcacttgcccacgtagtagaaagggaaccaggacaggagtagatcgctgaagaactcggccagcccaaacagggcgtacaccacccagtaggtgagccacacagtgtcgtcgtccttgcttgggctctcgatagctttgattgaggcatatgcggggtacacaaatccgatgagattgcacagcagagacgctccgtagccgaacagcagatacaggcttagcagagtgacggctcctgcagccagataccgcttctccaccccggtcttggcctccagcgcccccagcacttcggtgaccaggttcctttgctccaggaagtgctccacgcgctgcctcaggccgtccatggccccgacgcgcccggggttggctgctcgagctcgcccgcggaccagggcacccaccccgctgcacgcgcaccgctttcccgcagcctccc

SEQ ID NO: 133094 - DNA, 493 bp, Homo Sapiens
  misc_feature (69)..(80): n is a, c, g, or t
agctttgcaaatgatttattgtgcaaccataaccctgtatcttgagtcagtttcctcatttatgcaggnnnnnnnnnnnntctgggccatccatccatcacaagtgttccaagtagaagaatcccaagttggttttgcagttggaggaaatttggtccgagtaatagccaaaattatgaaaataatgactggccataagatcaagacaagtgtccaaagcggctgcctttttacacctagccaatttttccagaccaggatctgaagctgatgaaacagggaagccatccttcaaatgccccaaatgagagatttcctcttcttttctccactccacaaatgaagaactgatgccccgtccaacttgctgtatgtcagtgtatcagtacccctttcacggcatagcttccttgagggctggggtaagaaacccacagttcttctgtttctgctggatttttccctgtggttaatccttaaccaacctcgtgcc

SEQ ID NO: 133095 - DNA, 1799 bp, Homo Sapiens
  misc_feature (1520)..(1551): n is a, c, g, or t
gacctttttggctttggctgttcaattaaaaagggatttctgttaagggaaaaactttggcttctataatttaacagaggaggccagattattaccaggaaactttagattgtcttgctacttcactgacccttaaatatttatcttttcttttgcaactatcaattcacttaaaagttttaatcattgcataccctgtaaacttcctataaacaatatgttattgcaaaatgtttaaaagatgtgagaaagtatctgtggagtttggtatcagaaagggcagagcctttgttttatctaacgattctttcccaaactgggaagttcgggtagagacagtggcttttggtaatatttaggcagtgatttcttattcttaaaatcaacagtaatgaataaagttttgacatcagaaatgtttacaactaaagtagacattgattacattcttagtacaatacaatttttaacataactacaaatgtgtatacacttcaaatattagcaaattgcttcaaaatgaaattctaagcaagtttttggtaatttattcacagttcaggcttactcactggacttaacgacatgaggaagaaatgaccaactggctcagtaaactaaacattcatttcaaaaatcacaaaactgaaacaaagcaaagatgatcctaaaatttccacttctcaagaagtgtaatttaaacaaataccaaaagctttatttaagcaaaaacacattcaaccacagaacattcagaaagctaacaggatcatttctacattcattctgcaaacagtgtagtaagaaaggtaatttgagaatttccaaagatgttctcgctagccattatttatggtaattacataacattttgatgtcaagttattacagacttaaaagttaatatagcataattttacaatcgtactttcactatgatttttattttaaccctggatattattggtttgaagctaatattatcagtcctattggctgtcactgtcacagatctgaagatatgtttaaattcatcaagctaggaagatatcaaaatattaacaatcttcaagtatagtgagaaaaaaactgatttaagtgttagcatttctaaacttgagactctaacagtaaaaataaagtaatctgaaacctgtttccatgggtaaaacactctgcctggtattcttgtacacaaaatttactaaatatgtgaatatcataaaatgaaaatatcactcccttcaatttctttggccttcacaaattcaatgtgactatgatccttttcaataatactttcaatgacattgtgcttctttagaaaaatcacttaagttgtagcatacaatagttaacattagttcttttattgctatggtatatgctaatttttttaaaagggggaaaaaaaacccagagaacttattaaaatgtttgttaaagcaaacatttcagttggtttcctttctttgaagaataatagaaataaatgtcagaggagtattactaaggagccnnnnnnnnnnnnnnnnnnnnnnnnnnnnnnnntcctttattactcccatcctcagaactaactcaagacaagagatctgtattcaaaaagataaaacaatctcatctcagtaactacctcctatgaaacctaagagagaaaacctgtaatagctctcttaaccaacagccccatctgcacatcaccaagcaccagttccctttgggtagcagtaatgcttgtttttcatctttgccggacgcgtgggtcgacgatatcccgggaattccggaccggtacc

SEQ ID NO: 133096 - DNA, 804 bp, Homo Sapiens
tatgttttccttaacagtgtgaacttgtctgatatggaataacttctgaatcaggaagaaagggtaatccccacttctttatctccacagaatttctccacttgtgtgaattaactgatgttgagtatgatctgaaccagaaataaaggctttcccccagttctttaaattcattcagtttgtctcctgtattaagtctctggtgtagattaaacactgtatgctggttaaaagtgggccttttttcacaggtgcgtatcacctgcttgaagcattcctcttgattatcttgaagtgtttgaaactgagtgttgccttcccagtcacctctaaaacataaacagtcaaggctgtggtttttacaaattctcattatttccaattgggctatttctctctcaaaaatgccattttttggtaataacttcttggtctgacacctcgactgcatgtctgggcaaggtcctcttgtctcatccctcaaaatcttccagggctctttccctttctccaataaagagaacgcttctggctgataaatgcaaaaacccagtgagaccatgttgctgtagttctccaacatcacatctctatataaatccctctgttccaggtccaggcactcccactcctcctgagagaaatctacagccacatccctgaacatcatcaaatgggccatgacttaacattccaagtccaccagtccttctctggattctttcttggtgaggcagcgtgctgggaaagcagagccggccctgcggtcccttgatggtggaaggttccgcgatcttttttccc

SEQ ID NO: 133097 - DNA, 847 bp, Homo Sapiens
aggaaagaccggtcactaccaccaccactaacaactaacccagccctgcctgcctgacccctcaccagcctgcctctgtcccgaaggcctactactggagggagagcagcttgctgaagaacctgtgggtgtctcagaagagacagcaagccagcttccctggtgaccgcctccgtggcgtggtgtcccgcctcttcccctacagtaactacaagctggagatggttgtggtcaatgggagaggtgatgggcctcgcagtgagaccaaggagttcaccaccccggaaggaggtaggtctggcctgcagctcttcagggtggggcaggagaagggtggcacacaccttgggcctggagaaactccagcgtggctcagcatggatggcacaaggtgacttctgcgaggcctccaggagcggatgacctgcaagccgagccactacagccattcccagaccaccatcgccaaggtgacctgccctgcgaggaggttgtatctcaagagaagacctgtgaggtctgctgacataattccagacgggttatgcagactgatccccgagggcacggcgggcacctgggccaccccaccaccttccgaggcagaaggcagcacgtccatcctgactgcctggaaccatctgatttgtttgccagcacccaacaccttcacggttttccccccacgttttcaagaagccgtcactgaaatagtcggcctgtgtgtgcggtggctctgcagagggatacccaagtatagccccgccttttgcaggcctatggtttcacatggccctggggtcaaaacccctattttttgtttcacataaattcaagttcatgaatt

SEQ ID NO: 133098 - DNA, 781 bp, Homo Sapiens
  misc_feature (593)..(593): n is a, c, g, or t
  misc_feature (607)..(607): n is a, c, g, or t
  misc_feature (691)..(691): n is a, c, g, or t
  misc_feature (704)..(704): n is a, c, g, or t
ttttaaaaatgaaatgcgtttattgagctgatgtttcacagttgtctgtggatggaggcgacattgcaaaattctttttacattatattattctcttcttctttttaatttggtgtattggttattactattattttgcttgttactttccagacaaaagtccaattcagatatgtaactgcacacatgtagtactaacttctgagctcaattatttctccttgtattttcccaattttctatcaggaaagatgattcattccaaaggacaatgtaccatacaaaatgtgttacatagacttctcataaaagaatacctctagtaaaccattataactactctacgttcacttgctcttgattattgccatgttagaactatttgttcgcttctttatttaatatggttattctttccatcttccagttttgtttagctattcgggtgtgcgtgtgcctgcagaagaagctctgaaaataagttagttgaacctgagaaaccatttggaatgaccgtatggctaaatctttttttaaattaaaaaaatcacatatacccaggccatttcgagcatcatgccgattttccctcncactttacgtttanagcaattagagatgttgaaccctaacaaaatgtagtcgagtttaatatactacgagggaggggctggcagtcattttcctttanatatttaatctanacataaattgttattaagggtagggggaaaaacctcacatagataattttaactgcagtttgaggtttaagcaacag

SEQ ID NO: 133099 - DNA, 402 bp, Homo Sapiens
tattgattttttttcaaaagcactctatatatggagtggcaccagatttaacctatttaaaataaaagtcatacaaacacaaaatatatttctgtgtcatgccagctcattatataataaacatgttatgacagctaattctactagaattactgtgaatacttacagtacactgaattttattctttcacatccattttagttttaaagagaggttcacgagttaaatgacaatggcatggctatcttgaatggggtgcaaacatcattggggaatgtggatccaattaatccgaaggtccggtgtgacccgtattagttttatagacaagagaagggtttaagatagggtgaaatgagctatcagtggtttcaatgtctcatgaaagaaagaaatgcatt

SEQ ID NO: 133100 - DNA, 702 bp, Homo Sapiens
atcttggtaaaacacagaatctttgttttctaggccagtgaccttgatcaggggaatacatttaataacaacataggaaatcctagtaacaaaacaattttgacacattaagaaaaacaacaatatagaatcaagttttgctgaagtaaaatgttgcctttctagacctttaagataaatcccaaaccaggactagacagttctcagcaaggaatgtggcagaaataggaattagtttgtaattcagaatggctgttaaggaaacattgcagaattaaaaatcaaagcctcttgtaatcttactaagaacaaatcaatattttaagagactcatattgttttaatgtagaagaccaaaatttaagttttgtatcagtgcatcttaacatcaaagttccattttttccaacttttattttagatgtaggggatacatgtgcaggtctgttacttgcagtttttccaggggcatggtggaagctgctgatgattccaccattctggagtctggaggatggtggccctcttctcacagctctactaggtagtatcccagtggggacataactggcaactgtagacataattgtttggcttgctacaaatccattttctgttcatgtagattctgcccctgttgactccattgtcattcaggaaggcacattcttcacttcctctgatagcaagcatgttattata

SEQ ID NO: 133101 - DNA, 678 bp, Homo Sapiens
cggcacgagttttcaattccaaggacagtcacacagatgaacctggaattaaaaagtgcttgaatcctgaagaaaaaactgtgcattcaagacagcgtcaacttcattcgaagccagtaaccacaaattcttagacagaatgtcaccatttggctccttggtaccagtggaatgctacaaagttagccttggaaagacagatgcgttcatatgtaaatataagaagtcgcactcttctggactgtagcaggcttgctgccatcagccgggttcaggcccttgtaagttagctgtacagcagaagtttgctgtctctaggattcatatagcacccacagagctccaagtaaccaaattcccccaaagacaggaggtgtggctgatgggtacacatgcttggtaagagtttctgctttatattctaaagtacttaatgtttttgagaaaaaagttatcgaatattttttagacttaagttttatcttctgtcagaatgtgaaaagttctgcccagtttctgagcaaaaacttcaatttcaaaataaaggttttcaggggttctcttaagtgtatcacaatcaacaccagacgggatattttaactatcagattttcggaaatgtaaaaacctttatgtgtaacttcttttgatattaaacttgatttttgagcctgtaaa

SEQ ID NO: 133102 - DNA, 868 bp, Homo Sapiens
acaatttatcaagtactttttaattaaatccacaaacagctgatcagatacaaagtaataaattatcacagaaaatattgatatgaaaatcaagcataaggatctccactgtcagtaattctacacatatgtattggtctttcattctgtgttggaactaattctagttgtttaagcacttctgttccttcaatcagttgcccaaaagccacaaattttctatctagataaggagttgcttgcagtgtgatatagaattgtgacccgttgctgtgacggcctttgttgggcattccaagtactcttcttttattatgaggaacttgaaaagttttcatcttcaaatgttggaccataaatcgactctccattatctccttttccatacactatatcccctccttgtatccagccattctgtactattcgatgaaaaatggaatttttgtaatgtagtcttatgccacgttgagaaaaccctgcttttcctgtgcacaagacctgaaaatttttacatgttttgggacacacatcacagtatagctcaaaaatcaatcttccaattggagaagaatcaatacaaatgtccaaaaacacgaaatcatgcttggtgtctcttaagaacttagcggaaaaatcctcagtgagtgcgtcataaagtgcagagggtttaatgtcaactatatcccacacctcgtgggcccatttctgcagatccaatgcatcacccagaaactgaccattaacaaaagaaatcacagaggaagaatattcccaggtttcatttttgagttcctcagcggcgctcttcgcaatctgaaagttggggcagctgaagagccccaccaccttcacctgcagcggccgc

SEQ ID NO: 133103 - DNA, 559 bp, Homo Sapiens
tatccagccattctgtactattcgatgaaaaatggaatttttgtaatgtagtcttatgccacgttgagaaaaccctgcttttcctgtgcacaagacctgaaaatttttacatgttttgggacacacatcacagtatagctcaaaaatcaatcttccaattggagaagaatcaatacaaatgtccaaaaacacgaaatcatgcttggtgtctcttaagaacttagcggaaaaatcctcagtgagtgcgtcataaagtgcagagggtttaatgtcaactatatcccacacctcgtgggcccatttctgcagatccaatgcatcacccagaaactgaccattaacaaaagaaatcacagaggaagaatattcccaggtttcatttttgagttccctttttttctcctgtagatattgatgccatgcaaattcttgaagaggaactaatataggatcttcaaatttggatggatgattattcttcagattctcagcggcgctcttcgcaatctgaaagttggggcagctgaagagccccaccaccttcacctgcagcggcccc

SEQ ID NO: 133104 - DNA, 1076 bp, Homo Sapiens
tggcgaccacggagagaaagccgggacttgaggtggtctcctagcaggaggagcgagagagcccagcagcgatacggtggttttcgacccagctaggggccaggccgtacgattgggagcccggggcagccccccgcgcagtcaccacgacgcggcacccgtggacgggcgttggctctgcgtggtgggcggctgggacgggtctcgccgcttggccacagtgaccgcactggacacagagcgcggtgtgtgggaggcgtggacagggacccctggtgactgcccccccgccggcctcagtagtcacacctgcacccgaatctctgaccgagagctgcaggtggctggccgggagggcggtatccacactcagcgacgctatggaagcatctacacattaaggctggaccccagcgcccgcacctattgctacaagcaacgaaggctgccacacagcctcacgctcaggtcactgtgcgtgcctgctccaaactcctggaccccatccaggtcatcagctattgctctttggaggttgcaacttagctgaaccagaagtagctgggcattggagtcatgggaaaattaaggaggaaccacctgttgctcctcatttgatggaacagcttgcaaggcttgtgagcagtgggcaggggtcccagaaggggccccatggactacggcatcactcatgttctgtggtcgggccctttgctgtgctgtttggtggagaaactctgaccagagctagagacaccatctgcaatgatctctacatctatgatactcgcacatctcctcctttgtggttccacttcccctgtgcagatcgtgggatgaaacgcatgggccatcgcacctgcctttggaatgatcagctttacctggttgggggttttggtgaggatggcaggacagccagtccacaggtttgcatcctggactttatctaaatagtgccaagacacatcactaagcctcgttttgttttgctttgttgcaaacctataaagcgttatcaccagagctatctgcttcacttcaaatgcttattaaatttcaatctgagactcaaa

SEQ ID NO: 133105 - DNA, 639 bp, Homo Sapiens
tttctgtttcttgcatgaaatatatttgtaaacaatataataaaagtaatttttaaagacctataaagaatgaattttctattggactattctaatactatctagcagtttaaatggtttttaaagaagtagactggactataacatagttctacaattctagctataatatattttgagagatactttctacaaaacaaaaacgactaaagggcagaaaaatgattccacactaagaaggcattggtgcctctagaagttggcccaatctaaatttgcacaaggattttttcaattttcaaagcattttccttgtttaagtcggtcaatgtagtagcatagcttcacagccgttcccagcttcacccccaagtgcttcagcaacacgtcactcgtgagtaggagcagagccttcccgtcaatttcatggcttctgaagaggtcgacaagagggcataatgcaagaggatctgtttgttttagaaataggaccactgcttccaccgaccaggttgaagggtgcttagtgatgcttccttcctctatgtaaccgtcattttcaactggtgaccttgtaactgaaggtggtgctgcagaagcatggtcagttgagtaagtgttgtggatgctgtcagcccg

SEQ ID NO: 133106 - DNA, 795 bp, Homo Sapiens
tttttaaaatacatttccatttttaatttaaaaaataaataacagcaaatctgaacaaaattttcctacttcaatgcacatcttcctaactgtccatgtttgaaatccagatagcaacaaaatcatggcaaaggcatttttgacaaagtttagacaaacgactcacaaaatatggctaatagtagatgagtttggacatctgatactgcagaccagccttggctagatcctaggcgtcagagtgaaatcatgaatttccttttgtagattagaattgatggtccaactctcaacccaccaaagagaaacttaccttttccaatttaattgtaaaagccagatatatcactgaatgaaggtatctaaggaagtgatatttatcaacttcccaaatgatacagagaaggaaagcataattattaaaatgaacctaaagtctagatacagtgggccaggctggtgaagccttagactactatggaaatgacattgtttataagatgttgcacaaattatggtaatctgtgtcaatatttcaatgtgtgctggattattactgacatattcataattttaatgtccacaaatctttttatcttaatagccagggtatggcagggtcaaagcaccacctgggatgataaatgggacaagtatagtccatggacctcaaagcctttgtacagaaaactagtttccttcagatcctccccctctttttgtttaaataaaaagcagaataaaagcagctagggctgaaggaattctaaacctcaggtagcttcaaaattaaaa

SEQ ID NO: 133107 - DNA, 1004 bp, Homo Sapiens
ttgccatggaagaactgtaatatgagtaatttattaatctcaatttattatatgacagtattcaaaaataaagggaaaaatatactgaagttcttctagtattctagtccccaaaggaaaaatataatccaatctacaccaggcttccttcctttcccccaatctttgctgatttcatcagctttgattctttctaagacatttccttctgctcttttctgtgcttttgaacagaggcccacaacagcttcctatggggccatgggagtataattaatcaagtaatcagctagccaacactgttaaaatgttttaatatcaatgtaaaatgagatgagagttttacaagcagatttcagaacaccaacactgatttccaatatgatttctctccctttcagaagcctaaagatgaacatatacaaatcttaggggtttttacaaaaagcatgttttttttctattttcatacatatacagttgacaaacatgcaaaataactaatttccaaatcaaaggtctctagcagaaacatccaaattaaaaatgaagcatttaaatttacttactggccatgaaatccagcaagaaaccaccctttcccccacacttcagaaaaaccaccaattccttcctagaggattgatggcattaacagtacttggctctcccttgtcagcatccagacatccccggttcaatcttgtaaattaatgttacagttccaattactaaaaatgccccaccatcttcttcactgcattacagcttagcaaggcacctaccaacaatgcagtttgggaaatgagccatgaaaaacataatggtctgagagttaaccatacatcctaggtctgccacttgaatgaggacattaatgggaatgtaaaattccaggagactttcttttattctcctctccaagttactagcatgtccagtatcagaaagaaaacagtagaggaatgtggcaatagcacatatgtgaaaccttagtagagcta

SEQ ID NO: 133108 - DNA, 1006 bp, Homo Sapiens
  misc_feature (241)..(255): n is a, c, g, or t
  misc_feature (285)..(894): n is a, c, g, or t
agagaagagaatgatttatttcctagtgggcttcacacatatcttatcatgatgcttgcatcacttttaaaataggagcagtctctctaggtgccttgcagtggattaaatggggtcagcagagaaattatacttctttacacagagaaagccttctgaggctggtcaaactttttacaatgttaagaactagtgaataacagcaaaacagaatagtcccattgatggtgtggggaggagnnnnnnnnnnnnnnngcctacagccgccctcgtgccgaattcttnnnnnnnnnnnnnnnnnnnnnnnnnnnnnnnnnnnnnnnnnnnnnnnnnnnnnnnnnnnnnnnnnnnnnnnnnnnnnnnnnnnnnnnnnnnnnnnnnnnnnnnnnnnnnnnnnnnnnnnnnnnnnnnnnnnnnnnnnnnnnnnnnnnnnnnnnnnnnnnnnnnnnnnnnnnnnnnnnnnnnnnnnnnnnnnnnnnnnnnnnnnnnnnnnnnnnnnnnnnnnnnnnnnnnnnnnnnnnnnnnnnnnnnnnnnnnnnnnnnnnnnnnnnnnnnnnnnnnnnnnnnnnnnnnnnnnnnnnnnnnnnnnnnnnnnnnnnnnnnnnnnnnnnnnnnnnnnnnnnnnnnnnnnnnnnnnnnnnnnnnnnnnnnnnnnnnnnnnnnnnnnnnnnnnnnnnnnnnnnnnnnnnnnnnnnnnnnnnnnnnnnnnnnnnnnnnnnnnnnnnnnnnnnnnnnnnnnnnnnnnnnnnnnnnnnnnnnnnnnnnnnnnnnnnnnnnnnnnnnnnnnnnnnnnnnnnnnnnnnnnnnnnnnnnnnnnnnnnnnnnnnnnnnnnnnnnnnnnnnnnnnnnnnnnnnnnnnnnnnnnnnnnnnnnnnnnnnnnnnnnnnnnnnnnncttctccctcgggaagcgggcgcttctcatactcagctgtagtatccagtcggtgtagtcgtcgctcagcgggtgtgtgacgaacccgttcaccgacgtgccttatcgtatt

SEQ ID NO: 133109 - DNA, 672 bp, Homo Sapiens
taaatgttgcttaatgtagttttagggaattatactttttctaaaatttttttctgacataagtaccctctaacactgaaaggttgtcccctctcaactgcatgctgaatactggatcctagactcttgagagctaaataaagtatatcttttagctgcagtttcatattaaaaatgaatttttaacaatctgcatatttagatgaaatattagggaatagttactaaatgtacaaaatggtataagaaatgtatgttcgtgtcctcattatactccattccataaggtagtaaaatacttgtctgtttttcttacagaagttgattcaagtcagttgagacgccagttgtatggaggaagtcaggccgccatagaaagaatgatccactttggacaagagctgcaagcaatgagtgaacagctaaggagagactgtggcaagaacactgcaaacaaaaaaatgttgaaggtgaatatattttttcttgaaaaattatgaatatgtcagaggaactaaaatgtagttttgtgaaacactgagcagtgtaccagaaattcttgttagggaactgggacctgaccttccccctggctccttgcccatctgagagtggaaatatttgatgaagttaggcagttctgatctactggaaagagcattggactaaagc

SEQ ID NO: 133110 - DNA, 1590 bp, Homo Sapiens
gttcttttaggtattgtttaaggaatttgtgatgatcaatttgaaccgtcggaaatcaagtaatatttaactccttagacactaagaggttaaagatggaaaataatttctcctaacactaagtagaaaatcatttgcatcatgctgtaaactaggaagcaatgtaaagcgacaaaaacctgtccccagtacataatttaaaatatctaaatttcaaatcagcagagctggtcttacttccatgttgactatatgccaccatataagtgtgagctcttgaaatgcatagctaaatgtaggtagtcttccactgtggcaaatgcgcaggatccaattcctgatcgagccatcagtcctagacattgtgtggcctgtcccattgctagggcaagtggaggttgctttggcagattgtggggtttctaatattgcactgttaagagctgagcacacaggttctctctgaatcgggtcaagctgatttccaactgggctgttccagggatctgaatatgctagtagactgaatgcatccttcaacatttttttgtttgcagtgttcttgccacagtctctccttagctgttcactcgattgcttgcagctctcgtccaaagtggatcattctttctatggcggcctgacttcctccacacaactggcgtctcaactgacttgaatcaacttccatttcggtgtcacaatcgttccatttcgtggtcatgtttagagctaccatttaggaaaccattggatgaagtttctccgaactccattggagtagtgatctggtttccatgtctacatcattactggtgaagttattaacttgctgtgatcttgacatatttatactgtttagttctggtacattcaagttggatgactggtgtttattactatggcaatatgattgatgtgctttatttgatattacaccattactacaactgtttcaaaacctgaaaaatgtgcggtgcttcctttgcctgatgctaaattgtggatattcattccatggctggggctcatacttggactactaaaaggtcgaggactaacaggataactgtcgttgagactttggacttcggcctcccaaacatcgtacttcactatctgtaccattcaccatttctataaactgacgcacttttaatgtgaaaaggagattaggatttctttcaagtaaacttgggtataactgttgtgttgtttcaatggcttctcccattcttcctgctaataccaatttctgaattctttgtctattcttaatggaagctaattcttctagaacggtctggtctgtagatctggcaaaggcctctgctgtggcacagtacccatggtggactaaataagatgaaaccattttttgtatcatggtctgccattctccttctcgatctccgataggaaatcgatctatctgtgcctggattttggttctccactcccgcatatagtcttctatatcaaacacgaaaggatgttgcccaaaattggcatcgaccacttctcctggtgtttgaagccccacagtaggatacaaatttggctgtaagatagcacattcattaaaatcta

SEQ ID NO: 133111 - DNA, 991 bp, Homo Sapiens
caataaatatttattgagcagcacagcagcattacaggagggttatggatttgtggaacacactgacccccatccccaatccctgccatacacatatcctcctactataagtctttaatagagctatccaagaatacatctggctacaaatacctggctaagagttccaggagtgctttaagcaggagcaacagcactgcctattcaaatttatctcttgccctttattccccataccaaaggcaaaaccatcagagattctggtaagtttccactgtggtaaagttctgcaagagttaaggggaaattttcttgcttcatcacttctctgttatactcggatttacatcaccattgtgaaattacactaatatatacaccactgttcaagggaacatttatatacatttggctcttccgtttcttgatccaaattcagcttcaggagatacatgtcttcaccctggatcaaccacctggcattccagcaaaatacccctactttccaaagtcctttaaaggcaatcatatgtctgtatttaccaaatctctcaaaggctctaaatctatatctctaaatatccgatggttatttcatctggcaaattcataaatgtttacattgaactcattttctttctctatctacgcttggcttagatgtttgtcccctccaaacctcatgttggaatctgatcaccaatgttggaggtggggcctaatgggaggtgtttgggtcatgggagtggatcctacatgaacagattaatatcctccttcaagggtgagtgagttcccattccattagttcccaagagagctggttgttaaaaagagcctgccgcttttcccaccctttctcttgcttcctcttttgcaatgtgatcgttgcacgtacaagctccccttcaccttccaccatgaagtagaaggagactgaggctctcatcatgcagatgcccaatcttgaactttacagccatcagaatca

SEQ ID NO: 133112 - DNA, 555 bp, Homo Sapiens
  misc_feature (526)..(526): n is a, c, g, or t
cacctaaattgtttttacttgcttcaccttaaatcagttattcggttcctttgaagaacatgtagctttagcaacccccaaagtgaacccagatacccagaactactgattgttacatcagagtttttgaaaacgccaatactggaaacaggccgacagttaaggagaggcaggcctcaaactaaagcagaaccttttcaaaacctacttatatttcaagagatggattaagcgaaaagagctgtacaaagaaataagccattttctatgcgcctgttatatgcaagggactgcactcccttgtcacttgttaatttacaagaagactcgccggtccagggaagggagaggggaataggtgcaaggtttgtggagggcggcaaactgcactccatgtggcgcgaggctgcgcttgcggagatccgggttctggtgcctggcgccggcagccagtaggggcgcgcgtcctgcgcagttgccgcgcgcggcctcctcgggcttcaggccgggccaatcaggaggcggncgggagggggcgcggtaccaggagggaac

SEQ ID NO: 133113 - DNA, 1957 bp, Homo Sapiens
  misc_feature (741)..(741): n is a, c, g, or t
ttttttcaccaacacaattcccctttattgatgaccttccacattaatatcatacagcagggcgggggcaggaaccaagctgagtggaaccagaggcggctcgctagcaatgttatccacaggagcacagccgcaacggaggtgaaacctcacaccctggcccctcggccccagacaatcctgtctccaggtcctgggagtttgggaagcagggtacagatggtggcctggtcatggagttggcagggagtggccggggctgagctggtgagacaaagagctcttgccagtctcctgctctggagggctggttcccttccccagaggaggcaccggtggaggacgtgccaggggcccgggcctaacgtcctgctcagcctctgcactcagccccaggtcgggccctggcaggtgctgggatgacccacggaaggcacttggctggggcctgcaggccccctggaggatgcggtccgtggctcagtagatttggggggggcccagggaaagagggaacccaagggaagaagggaaccaagggagctgagccctggtggggtggcccatccccagggtgggcttgggttgtggcattggcaggcctgagtcctaggggctcagagcttggcccggggggtggctctgcagcagggcacgcatgtccaggagcgccttctccaggtaatgcgccaggcgggcggcgttggtctccgcgcagctgttgtaggccgccagggaganagttgatgtgggcctccatggggttatagcagacaccgtagccgttggggaccacgggccggaagaacatgacacagtctgtcttggcagggacctggctggtggagaggtggaagtgcatggcgatggcgtaggaggtgtccatgaagatgtcgggcatgctcaccaggtcctcgatggcctgcagcttcaggcccagcaggtgtcgatcaaaggcctccccgcggatggcccggtcggtgtagcctcggtgggcctgcacggccttccgcagcagctccaccttctggtgctccgtgacgctggagtcatccatggccttgacaaaggtgagtgagtccatggaagccgagcggatggtgtcggtgcggcccaggtgaaacatgcgcagggaggcactttcataggtggcacatgcctgtccgtagatcctgtagtaggccagctgcaaagccatctggatgaaggcatctgggcttagcttctccgacttggggaagtcttttccaaaatggtggaacaccatcacggtgatatccaggtcctggatcatgatgctgaggttctgcttggccttctcgatgtcgctcttgatctcgggggtgatgttgaaccgcagcttcttgggcatgggcaggggcaccatgggagaccgcacaagctcgggtttcttcgtgtactcgatgacatagtccagaagggtgacaatagggggcccctccgctgcagcatgctcgtacacaagcccacaggagccatcttctgccacgatgaactgcagcgtcttgtcgaaccagcggttgccgctgttgagcctgctgccgcccccatgcagcatctggcctgccacgtggctgcggtacacgtcttctgagaccctgggcatggttgcatctaggcacacggtgaagatgctcttctggatggagcgcacggaatcccggttcaccttgtctttgatgagggtgttgtatgccttggcccaggagttgcggtggttggaggtgaggatgcccacaggctccttgttggtctgtagggatgagttccagatcttctccagctgcacaaagatctgatccgcagtgaggggtgtcccgtcactgtggtacacatccagctcaaaaaactggtagttgtgtaccacggtgatgtgcgtgggaggcttcttggtcttgccctcgtgccgaattcgccacccaggcctcgctacctt

SEQ ID NO: 133114 - DNA, 1180 bp, Homo Sapiens
catggttgcatctaggcacacggtgaagatgctcttctggatggagcgcacggaatcccggttcaccttgtctttgatgagggtgttgtatgccttggcccaggagttgcggtggttggaggtgaggatgcccacaggctccttgttggtctgtagggatgagttccagatcttctccagctgcacaaagatctgatccgcagtgaggggtgtcccgtcactgtggtacacatccagctcaaaaaactggtagttgtgtaccacggtgatgtgcgtgggaggcttcttggtcttgctgaagttgctgactgtgtcctgcttggggcccggcactcggcaggaggacaagatctgatagtactggttcatgcacagtggcttcccccccaggtactccacgggcagggtctcgttgtcaatcatgaccttgaaatccaacacaccctcaatgagtttggcagcaaatcggagctgaccctgcaggtccacgaagtcctgcttgggtagcatcacgcctgggctcgagtagatgaccacaggctggcggtactggaggtaggcggtcttgagccaccactcagacagccagttctccgtcttcctggcccgacgctccagccccttctgcaggcgctcccctacacctcctgaggcctgaaactcatccaccagctgcttggtgtgggcccactcctcctcactcacgatgggctgcagcgccttcaggtagtggtccagggactgctggagagggggcacgggcagccgtggcagtgcatcctggtgtgccttgaagcggctggaagccttcatcaaggagaagggcttcaggaagcccagaggcttcaccacggtcctggcagcgaaggctaacatcttcgctgcccgtccgcggacacgcagtccgctccgccccacacaccgggcaaagtccgcgccgccgcggctggggtcggtgggtccttgctagagccttcgggccaaggtcgctgagttacagccgccagccggtagaggcagccccgcgcccaccctctgggccgagcgggctgcgggcaggcacccggggaggaggactcgcgaggcggggcctgggccggtagcgggccccgggcgggcaacggtgcccgggaggttggccctcgtgccggaatcgccacccaggcctcgctaccttgga

SEQ ID NO: 133115 - DNA, 822 bp, Homo Sapiens
  misc_feature (113)..(176): n is a, c, g, or t
  misc_feature (422)..(457): n is a, c, g, or t
  misc_feature (800)..(800): n is a, c, g, or t
gtaatattacgttttctcttacatctttggaattttctgatgttagtgagagtgatctttgtttcactgaaataactaaagtatccttatctttatataataatccattctgnnnnnnnnnnnnnnnnnnnnnnnnnnnnnnnnnnnnnnnnnnnnnnnnnnnnnnnnnnnnnnnntgctcttcattggttttcacctcactgatttcttggttatgtcctaatattatctgggttttttgtcctgtattctcatttatgacatgtttcatgattttttcttctttttgtgcatcagactttaattcttgcaatggaaactgttctttcagatttccttttagatcagagtttcccaattcagttttgttatctgtattttcatattttctttcttgcttgaccaattcttctgaacatcgnnnnnnnnnnnnnnnnnnnnnnnnnnnnnnnnnnnnaaaatctgccagaattgtttggcttgatatagattcttttaactttacttgtattgattcttttaatatagtctgtctatctacattttctttcatatttgattcctcaactagccaaaggagaacatcttcctgcttctttgaattttcatccactagatttttggctatatcacccttatcatttgaaatatcttcaagacttaaatgtttgttattatatccgctcttctttaatgcactacttattattagctgttggcttgcatcttctcttaatattattttttccttgcttattagttgctctctttcctgtttcacaatattctttttttcttcnatatctttttctctccttttcc

SEQ ID NO: 133116 - DNA, 855 bp, Homo Sapiens
  misc_feature (58)..(117): n is a, c, g, or t
  misc_feature (201)..(284): n is a, c, g, or t
tgcatttgtaaactattattattattaatttgttatttttttctagagataaggtctnnnnnnnnnnnnnnnnnnnnnnnnnnnnnnnnnnnnnnnnnnnnnnnnnnnnnnnnnnnntgtgggctcaagtggtcctctcgccttagctgtggagtagctaagactgcagacatgtgccaccatgcctggttaattttttannnnnnnnnnnnnnnnnnnnnnnnnnnnnnnnnnnnnnnnnnnnnnnnnnnnnnnnnnnnnnnnnnnnnnnnnnnnnnnnnnnntcagcattgtaagaatactatttttagtaaccatgccttttgagagacagtgtttttattttcctttcctttgcatctgaaaagacagttttgagaagatggatttttctgatactatcttggaattatttgagtggtagaattttagagttgaaatgagatcattgcgagtgttatggactctcagcaagatgaacttgggttctagtttttccttgtttgaccttgagcatgttactgtgtaaaatatagaaaatacatacttttcaggattcttttcagtttttaatgagtaaatgaagttcttacctagcacagtgcctggttcccagttgagtgatcaaatagtatttgttttattgtaaatgttaatagttctcctaaatggtgccttattttcacagttggtggcaatgtattaagttacagtcaacagtgtgtatttatttttaagatgttataatttaggttttgagtaaatttaatggacaattaaaatggaatctaaaaattgaaaggaaaaataaccctgacccagattacacacttagaaaagttttgtgggggtacc

SEQ ID NO: 133117 - DNA, 1120 bp, Homo Sapiens
  misc_feature (735)..(735): n is a, c, g, or t
  misc_feature (777)..(777): n is a, c, g, or t
  misc_feature (849)..(849): n is a, c, g, or t
  misc_feature (854)..(854): n is a, c, g, or t
  misc_feature (857)..(858): n is a, c, g, or t
  misc_feature (867)..(867): n is a, c, g, or t
  misc_feature (870)..(870): n is a, c, g, or t
  misc_feature (873)..(873): n is a, c, g, or t
  misc_feature (877)..(1053): n is a, c, g, or t
catatttcaacactaattttagtaatgctttacataggagttcttataaaatatttacttaaaattcacaatttactagatgtagtcatatagatctaacacagcgcttagagacaaactttattggggccttaatggatttataggaatataaagttatacaacaagaacaggatgtcaccaaaagagttcactggttggctgctgcaggaccatctcacaggcattgtttgctttggtaagttcaccatgatccagggcatggccttaaatctcagaggtcttacaacccgatcttgcccatgtcttagaattcatcgaaattcaggaagtgaaatcgtgctgattacatcataagacttaaaaagcacaacttccaggttcaggacaccagaaaaagcagggtagcattgtaaataatcttcattgttttcaccaggtgaactattatatgaatgcaccagggaaatggagtcatactgcaatcactcaaagactggtttagggtgggagaaatttatttctctacttctccggaggaggagggtgcgacttcaggccggctgatgcaggaggaggtgcggagggtagagtggtactacctccgttgggagttccttccggataatcccaacgcggagcgaggaggcagcgcttttttggaggcttggcttcccgtgcgtttccaggtgggagagtggatctcccggaggcacaaggttggtctccccatanggatacagaaacgggtcgtcagttttctccggtgggccctgncaagccaagagactgagatggcggcgagtccctccaggcacagagctggcttcctcctgtttcgccctcgtngcgantcnntggctcganggncanattnnnnnnnnnnnnnnnnnnnnnnnnnnnnnnnnnnnnnnnnnnnnnnnnnnnnnnnnnnnnnnnnnnnnnnnnnnnnnnnnnnnnnnnnnnnnnnnnnnnnnnnnnnnnnnnnnnnnnnnnnnnnnnnnnnnnnnnnnnnnnnnnnnnnnnnnnnnnnnnnnnnnnnnnnnnnnnnnnctgtcgtgcagctgcattatgaatcggcaacgccggggaaaggcggttgcgtattggcgtcttcgcc

SEQ ID NO: 133118 - DNA, 1008 bp, Homo Sapiens
  misc_feature (881)..(915): n is a, c, g, or t
  misc_feature (919)..(957): n is a, c, g, or t
ggttaggagagagacttttccggagggcgcgaagggggaaaacagcgagggggtggaggaagaatatgccgggcgagcgatggtgcgggggacaaaccttttattgggggcccttaaatgggatttatagggaatataaaggttatccaacaaggaaccaggatgtcacccaaaagagttcactggttggttgctggcaggaccatctcacagggcattgtttgctttggtaagttcaccatgatccagggcatggccttaaatctcagaggtcttacaacccgatcttgcccatgtcttagaattcatcgaaattcaggaagtgaaatcgtgctgattacatcataagacttaaaaagcacaacttccaggttcaggacaccagaaaaagcagggtagcattgtaaataatcttcattgttttcaccaggtgaactattatatgaatgcaccagggaaatggagtcatactgcaatcactcaaagactggtttagggtgggagaaatttatttctctacttctccggaggaggagggtgcgacttcaggccggctgatgcaggaggaggtgcggagggtagagtggtactacctccgttgggagttccttccggataatcccaacgcggagcgaggaggcagcgcttttttggaggcttggcttcccgtgcgtttccaggtgggagagtggatctcccggaggcacaaggttggtctcccataaggattacagaaacgggtcgtcagttttctccggtgggccctggcaaagccaagagacctgagatggcggcgagtcccctccaggcacagagctggcttcctcctccccggccgtaatggccgaattcccgggcatatgtccggtaccgtcgactgnnnnnnnnnnnnnnnnnnnnnnnnnnnnnnnnnnncggnnnnnnnnnnnnnnnnnnnnnnnnnnnnnnnnnnnnnnncatctaagcgcagccccatagatcttacagtctttttcgatgtctgttttc

SEQ ID NO: 133119 - DNA, 842 bp, Homo Sapiens
  misc_feature (732)..(766): n is a, c, g, or t
ttataggtatattatagttattcacaagcacaggatttccccaaagagttcactggttggcttctgcaggaccatctcacaggcattgtttgctttggtaagttcaccatgatccagggcatggccttaaatctcagaggtcttactacccgatcttgcccatgtcttagaattcatcgaaattcaggaagtgaaatcgtgctgattacatcataagactttaaaagcacaacttccaggttcaggacaccagaaaaagcagggtagcattgtaaataatcttcattgttttcaccaggtgaactattatatgaatgcaccagggaaatggagtcatactgcaatcactcaaagactggtttagggtgggagaaatttatttctctacttctccggaggaggagggtgcgacttcaggccggctgatgcaggaggaggtgcggagggtagagtggtactacctccgttgggagttccttccggataatcccaacgcggagcgaggaggcagcgcttttttggaggcttggcttcccgtgcgtttccaggtgggagagtggatctcccggaggcacaaggttggtctcccataaggattacagaaacgggtcgtcagttttctccggtgggccctggcaaagccaagagacctgagatggcggcgagtcccctccaggcacccccggccgtaatggccgaattcccgggcatatgtccggtaccgtcgactgnnnnnnnnnnnnnnnnnnnnnnnnnnnnnnnnnnncggccgcttcctcgctcactacttcgctgcgctcgtcgttcggctgcggagagctaggccctatatgatgatctat

SEQ ID NO: 133120 - DNA, 750 bp, Homo Sapiens
  misc_feature (708)..(708): n is a, c, g, or t
  misc_feature (730)..(730): n is a, c, g, or t
ttttttgaagttttattgagaaatattaataacatatcacagaagccacccattgaaagtgtaaaattcaacggttttcagtatatttgcacagttgtgcaaacagcaccacagtaagttttagatcattttcattaccttgaagtaaaccccatatccctccagttccccccaactcccctaaccccgggccaccactaatctactttctgtttctatgtattggtctattttggatattttatttaaatggaattacacaacatgtggtcttttgtgactggcttctttcacttagcatcatattttcaaggtttattaaatgttgcatgtgcagagggggcactttacataaggataaacctgggagtgggtgcgtactgattttgaaacttcactccaaaattgtaaaagggaaatgattgatttcaaatagaggaaaaacctgttcaagctaaaatcctccgttttcaccagtttgtaatgtggggttttattgcgaagaatggcaaggtttttatacatattttctgcaaattctccctggtgtttgggaacagtcacagaatgtggaggtatgggcttctggactctgtggctggagattcgagtccaggagaactcaagtctcagggtaggcagagaataacagtgcaagagtgccaatggaacccctttgaatggaaaatttaaaatgttccctcccanaggagtcccagataccacacanaagaggagtttgctgagtca

SEQ ID NO: 133121 - DNA, 601 bp, Homo Sapiens
  misc_feature (320)..(365): n is a, c, g, or t
aagtatccaaagataacaattttactttaaaaaatgcaaatttctcaaaaatatatgttaagaatttacataaggaagaggagctacaaaatacttttttcctttcattgggaaaaaattataacaaaattaaattaatgcaatggagacactcttgtacaaaattttgtgttcagaaaatactgctcattaaaaatgacatttttagtcaaaaggtagctctgttcaattttgagtacacaagaagctttttcaatttgcttaggagaaaaattcatctatttatttacttatttatttagagatggagtttcactctnnnnnnnnnnnnnnnnnnnnnnnnnnnnnnnnnnnnnnnnnnnnnngaaaatataacttatagaattggcatttatttaacaatagtttaatagtttaaatagaatttctcatcttataaatttatcatcttaagaggcagtgcttaaagcattacaaacttataatactcccaattaggggggttatgattataaattttccatttccatttttgtattcagggattattaaatttttaaaaaaggctattcatgactgatatgacccccgtaaattagct

SEQ ID NO: 133122 - DNA, 919 bp, Homo Sapiens
ggggagactcagacggcggagcctggaggagcccacgcagtctgttcccggcacccggtgcgtgtgaagggacttgagggcagcgagatggaattagcaagagaaaacatcgaccttcaacctggaagctccgaccccaggagccagcccatcaacctgaaccattacgccaccaagaagagcgtggcggagagcatgctggacgtggccctgttcatgtccaacgccatgcggctgaaggcggtgctggagcagggaccatcctctcactactacaccaccctggtcaccctcatcagcctctctctgctcctgcaggtggtcatcggtgtcctgctcgtggtcattgcacggctgaacctgaatgaggtagaaaagcagtggcgactcaaccagctcaacaacgcagccaccatcttggtcttcttcactgtggtcatcaatgttttcattacagccttcggggcacataaaacagggttcctggctgccagggcctcaaggaatcctctctgaatgcagcctgggacccaggttctgggcctggaacttctgcctccttcctccgtgatctgccaggctcgtgggcactttccacagcccaggagagcttctgaaaggacagtatagctgcccttgctccctacccacagcacctgagttaaaaagtgatttttatgttattggtctaagggacttccatcttggtctgaagtcctgagctcagacgcaggtactgccagccataccttcctggtagcatctgctggacctaagtaaggcatgtctgtctaaggccaagtctgcccggcttaaggatgctggttctgactctaccccactgcttccttctgctccaggcctcaattttcccttcttgtaaaatggaatctatatctataaaggtttcttcaaatcc

SEQ ID NO: 133123 - DNA, 1005 bp, Homo Sapiens
  misc_feature (528)..(957): n is a, c, g, or t
  misc_feature (969)..(969): n is a, c, g, or t
gcatcttaaaagtcatttttaatcctcgactgtacacaatccaaatcttggtagcagcatctgacagggtaaataccaactcttgtgcaagggtcttttatatcctcaacccctctgattctggaaccggttccctaaacaaaggcagacttcttcagcttcttccagaatagacattagacatggtgacagtgataaacctttggggtgggctagtctttttcaacattgatggagcagaatttacaccctctgattcaatccatctcagtaaatgtcaatgatgccttcctatctacttctgctatccaggaacccacctctttagagtcaatgcatgtgaaaggctcatgatttgtaatatcaagaagtaggaagacaaagaggtttgaaggattctgccaaaggcaaagctgtatgaggctctctcctgactacatgtacaccctatatttggataactcattcccaactgagtctgctcttaagggtacagagcagggtcattggcctcgtgccgaattcttnnnnnnnnnnnnnnnnnnnnnnnnnnnnnnnnnnnnnnnnnnnnnnnnnnnnnnnnnnnnnnnnnnnnnnnnnnnnnnnnnnnnnnnnnnnnnnnnnnnnnnnnnnnnnnnnnnnnnnnnnnnnnnnnnnnnnnnnnnnnnnnnnnnnnnnnnnnnnnnnnnnnnnnnnnnnnnnnnnnnnnnnnnnnnnnnnnnnnnnnnnnnnnnnnnnnnnnnnnnnnnnnnnnnnnnnnnnnnnnnnnnnnnnnnnnnnnnnnnnnnnnnnnnnnnnnnnnnnnnnnnnnnnnnnnnnnnnnnnnnnnnnnnnnnnnnnnnnnnnnnnnnnnnnnnnnnnnnnnnnnnnnnnnnnnnnnnnnnnnnnnnnnnnnnnnnnnnnnnnnnnnnnnnnnnnnnnnnnnnnnnnnnnnnnnnnnnnnnnnnnnnnnnnnnncgccgtgctggngtttcccataagtccgccccctgagagatcaaaaaa

SEQ ID NO: 133124 - DNA, 1770 bp, Homo Sapiens
tttaaacaaaattcacattttatttagattgaaataaactatacaaaattgattttcttcaccaaaaataacagcaatattttccatatttttctagataaaccacaacacttattttgtaggttttccaggttttgcttataaatcaagatgaggcagtatataagagtcatggaaaaagacagagaaaaaaaacagacaaatcagttgtcagtatccatggcctctgattctgtctcaaccatgaaacagaagtgttcaacatatacctgctaaaaagcttaggaagatgtaggctccacaaaggaatgtaaacagcaacgagatgtggaacaacagcaggcttttccattcaaactttgtcatttgtttctttaagttcaagaaagacaaaatctacactgaaatccttgtttggtgagctcacaagcttttctccggtaatttcttgtaactgtccagtatagatttttaacatacttaaaactcctattagtcaaaggtcaattgtgggcttcactacaacattttataaaatgtattccttcctcgcacacctcttcaaaatatatttcttcaaagaattcataacacccaaccaagtagagatccacagtgataataaatgctatgtctaaaatgacttaactgaaacaattccagagtgccatcaacagagatcacgcaaaagggaaacatggcactttcaacgttctcttctggaagaacaggtaggtcttccaaagcttgagagttcaaaccaggggccatttaaacaggtagattatcaatggctaatgtattcaatggagtcctataggcaaagatatttagtgattaagtggtctacatacaccttacggctttttcttccaaatatcaaatataagaaagcctatttttaaaagtctcttaggtattttccacagtttcggaattatctgtaggaagctctgacttacttgtatagagtttaatatatgtgtccaccattaaatccaggtcgtgttttatatcaaaatttatgttaagcaaagccaagttacttgacctttggtctgtcaaagtgttcctcaaatatgctttaagacgctttcgtccattttcataccgctcattctcaaccttcatcacaggaagaatacacaggaccttcagcaatgcatacacattaggaaaaaacttgatgtcaggcaggtggagggcttcatagatggtggacggaagctctatatctttccccctgtgtttccatttgattctccaacaatgaagctcagctgacagcgtgtcaggattgggtaagtcacttctatacatgtcagcatggtgttcctccgacgtattgaatttgagttgtcccatgactgagggtaccagagataagcatttaagagctttgaggtgctgttctgagaatatatctttaagttcctgaataatgtgctccactgttgggacacttagggtttctttatagtaactctcagaggttagctgagattccaagttaccctggtgagctctgcggaatttcccagggagtttcatttgaatatcaagtttggttgccaaatttgtggcttcctcaaaccaaaattcatgataaacttcaatattttccatcacttcgttgagtgaatgcagtactgcagtcaagctaccggccgcaaagaagacatcagaggtttgcccctggaggtttttcccaaaggctcttgtaaaagataggacatttttaagaacaacaatagtaacaatgaaatcaaa

SEQ ID NO: 133125 - DNA, 754 bp, Homo Sapiens
tttttctcaaaaacaatgtttattttaacacataaaatgtaccatctagcaccaatgcctgtaaataccagaattccatccggttactactctttggaacaagtatgattaaagtccttgacagattattgtatatgagcgaatggcttcataacataaaacagagagacacagaacagaaattcatttggtatatacatatagaactacatttgtagttattcaaaaacctttcactgcttcatgtaaacaataccagtatttttaagccagattttcctggaacatatacataaagtgcatgagccacgtaagtgcataagcctgaaactggtctttctattctcactccatgctcaaatgaaaaatctgtaaagatatcttttgttcctccaatcttctgatttgtcttcttagcaactcattacagtacaatttactgattaaatcacatagacatgtatggtggaggaaaagaaaactttggccaatataagtatacaagacaatatctcagttctttttaaaattaaaagaacatttcagtattaaagatattttaaaagaaatgaagtggaaaatacaaatgataaatattgtataattatgtacaaaatgaaaaccttttaaactctgaagacaaactaaaatttactagtttgaatttaaaacattattatataatagcagatagttctcttcagaaatttatctctagcttcctgtaaaaggtccagtcaaatcatgttggctg

SEQ ID NO: 133126 - DNA, 513 bp, Homo Sapiens
  misc_feature (467)..(467): n is a, c, g, or t
  misc_feature (480)..(480): n is a, c, g, or t
acacatacagtatatacacatacacatcacattttacaaccttttttatttaattaaatttcagtcataatagaactatttagaatagtgtcgacatacatttacattattatatgcaaactccaatctatgactgaactgagggtatatctgcgcatccatctaaattaatacttttcaagtccattgatttaaaaaaatggtggcaagtggacactataatcacatattaacccttagaatatagaatagaatattttgattggaaaattatatttagtgagtattgtagctcagagatcaagtactggaaaacggtgtggtttttagtttaacagttgttttaattttattgttaaaaacatcataaggatgtagttggagatggcagttataaataaatttacaatgcttagtaaacatttcaggatcacaaatatccattttagcatggattatttcttganaaaaacaccttgnttataaatgaaagtaccattattttatttttac

SEQ ID NO: 133127 - DNA, 715 bp, Homo Sapiens
aaatgtagctcttttagaaaacgatgaaaaggatgaagaggatatgtctctggattcaggggatgaaatctcacatatagaagtatgcagcaattttcattcagaaatatgggagaaagagaccaaaggatcacgtggaacagatcaaaaaaagaatactcaaattgagttgcaatcgtctcctgatgtgcaaaacagtttattagaagataagacttaccttgattctgaagagagaacttctattgatatagtatgctctgaaggagagaacagcaattcaacagaacaagattcatatagtaactttcaggtttatcatagtcaattaaatatgtcccatcagtttagtcattttaatgttctcactcatcagacatttttggggacaccatatgccctttcatcaagtcagtctcaagaaaatgagaattacttcttatctgcttatactgaaagcttggatagagataaatctccacctcccttaagttgggggaaaagtgattcttccaggccatattcacaagagaaataactgtagtaactctttttttaagagattgttgtggactttgtttattaacaatttatatttcattctctaaacaaaaggttcttgttctttctcaaatgttttttcttttatttaaatcatgatggcctgtaacagttgaagcatctaaaaattgaaataaatatatatttttaacat

SEQ ID NO: 133128 - DNA, 445 bp, Homo Sapiens
tttatttttgagcaacatggctgtttattcacttgtgtgtgagtgggctgagtccgagaaaggggtcagcaaaaggtggtgggattatcattggttcttataggtttgggataggcggtgtagtcaggagcaattttttacaggcaggggatggatattacaaagtacattctcaagggtggggaggatgttacaaagtacattcacaagggcagggagggtgtatcgtcacaagggcagggaggatgtattgtcacaagggtggggaggaatgttacaaagtacattcacaaggacaggagtatcacaaagtacattatcacaagggtgggggaatgtcaccgtggcttgaccatagtgcagccagctcagaggaccttacaaaaagtttcatacttgcacgtgttttcttgtggcaaaaatataaaacatttaatttctggga

SEQ ID NO: 133129 - DNA, 750 bp, Homo Sapiens
  misc_feature (691)..(691): n is a, c, g, or t
ccccaggagctggtttattgaaagctgcttcacgttccaggatcagtcctccatctctcgctgggccacctgatgtctccatcccaggtgtggtgacatgagggtgtgcaggggcagagcttatgttccaaggcctgggtgggcccttgtcccctgcaacacaggccagcgccaacccccacctggtctgggcctgatcaagtggggagaggagcctttgcaggctgaattttcgcagcatggacccctcccccggctggcctgaccttcagggacacacactggcccttatctgaacacagggtgggcggagtccctgccctctccaaggaactgactcactgctgtatctctgtttgctttcatgcctgctgtgctcagctggccctcggaggggaagtgtggccggcgtcagcccgtggccagtacggtgcccgtctgccgcagggtgaatggggtcctgctcacagactttcctgctgggctggcctcctccaggagctgtccttgggcgctggtgtccttgggttcagctagtgtctgggcagcagtgcagccatggactctggcagggtcaggcctctgggtagccctggttgtgggttcagcaatgggaggtcttgattgaaggcactgccctggaccaaccttgggtttttccagcctggtcatcaggcctcacagcacccangcatggggacgtgggccagtctgggccccctggcctgttggcggcggggctgtcctggg

SEQ ID NO: 133130 - DNA, 647 bp, Homo Sapiens
  misc_feature (609)..(609): n is a, c, g, or t
agagtttcacaaataacatttattgaccacattcataacagaaactcacccacattcacatgaactttgctacaaccaagaatcacctgatgagaaatcatttggagttgaatcctgggtgtggattctgttctgagaagacagcgactgtcacagacgcctcctgattggtggactctcaaagatcttgatcgtgacacatttttgtggctgttcttgacagtagctgaagattccaacttcagaccccaaaacactggcgaatgggcatgatgaccctcgggatggcctggaggagggtcaggaggccgaggggcagcagacgcgctgcaggagccggtagctggtcctggtagggggcctggagctgctggaacttggacaacaggcactcatcaccgcagatccgccagcagttgtgccagcagcatgcatccagcaggggtgcttggatgcctttcaaactctgctgcctcctgactatctgctgctgagacctcaggacctggggcacccagtagggcatcactgcctggtcgctaggcatcgggaggcggcccccatagcggtggcataggcaggggcacatcttggcggtttgggggatangaaattgaaccgtcttttgactctgctttcggggtctc

SEQ ID NO: 133131 - DNA, 771 bp, Homo Sapiens
gattttaaaattcaattcacatatacaatgttatgctacttaaagggagacccacctgacacaggtgctgaaaccattttcgggccctcatccagtgggtctgctgtccctgaagagacactcggaaatagctgccctcccccagggacacggacatggggacaagtccccccttaatgaagggaaatcagaggtcatcatttaagaggtggccagtttagagtttcacaaataacatttattgaccacattcataacagaaactcacccacattcacatgaactttgctacaaccaagaatcacctgatgagaaatcatttgggttgaatcctgggtgtggattctgttctgagaagacagcgactgtcacagacgcctcctgattggtggactctcaaagatcttgatcgtgacacatttttgtggctgttcttgacagtagctgaagattccaacttcaaaccccaaaacactggcgaatggccatgatgaccctcgggatggcctggaggagggtcaggaggccgaggggcagcagacgcgctgcaggagccggtagctggtcctggtagggggcctggagctgctggaacttggacaacaggcactcatcaccgcagatccgccagcagttgtgccagcagcatgcatccagcaggggtgctgctttcggggtctcagggacagagggacccagtaaggcagtgctgcttccaccctggacacaggcaggcggcccccgaatctggtctggcattcacagcagatg

SEQ ID NO: 133132 - DNA, 1309 bp, Homo Sapiens
  misc_feature (151)..(263): n is a, c, g, or t
  misc_feature (588)..(588): n is a, c, g, or t
  misc_feature (733)..(733): n is a, c, g, or t
cttataggttctctctgtgttgcacaggttggagtgcacaatcatagctcattgcagtctcagacttgtgggctcaagtgatctcccacctcagcctcacaagtagctaggactaaaggtgtatgccaccatgccaggctgaattttaaannnnnnnnnnnnnnnnnnnnnnnnnnnnnnnnnnnnnnnnnnnnnnnnnnnnnnnnnnnnnnnnnnnnnnnnnnnnnnnnnnnnnnnnnnnnnnnnnnnnnnnnnnnnnnnnnataaaccacaatgccgtgctgatttttttatataggtctgatgaaatgctgtgtgaacacaagaaggaaggttagcccacagagatgtctctcactttccagaatgtcaaatatttgggctgataacaaaactttgaacagtcatgaagtatggcaatatattcatctaatgaactggcaatattataaatgtctaagaatcataaaaatgttaaggtttcatcttttcttaagtagaacactcagaagctgtgttggattctaatgtgcacttattagactgtgaaattatttcagttatttactaaccaattaatgcatttanaggacatattttaaaaggacaattgaatgcgcaaataaagatttttgccttgtcatcaatttcagtggaatatacttgttggattcaaaacatgtttctgaaatattttggtaccatgagattctccaggaatataatcatagtntgaatcataggtggttaaaatgggatggggtattagaaactactatctggtaacccattttcttagaggaaattgaagctcgtagaggtggaggactggttcatggtcaaagctagtggacaaaatgcatctccctgattcccagtccagtgctgtttgcaaagcacaatgatgcctcatccagaaacacagctttagggcatttttagagccttcacatctagaacctatacaattgtatacggtggctctgggtaatttgaacttgctggacagtagacagggctattttaaactatctttagggggaagatgagagtggtgtatactcacagacagataccttactgcagaataactcagggctatgcccttcccttttcagcaagaacacatctgctgtgggaaaatgaaagggacccacagactctttgcaaaccctatctccactggccttgtggcttcatcacccgctggggaccctccgctcactctctatctcagttgggctgattcccatccctgaggtgtcataaagtgtgtctatgctgttgtatgtatttggggagtcattcg

SEQ ID NO: 133133 - DNA, 488 bp, Homo Sapiens
ttttcagtatatcactttataagtttaattattcttatttgaaaacgggtagaattagtattgtcaggaccacagttttgtgttcccttccatttcccattctttgttggagacaaattacaaagctattttttatttagaaaattgatcttggcccaggtgagaacagggagaagttgaagacttaccttctgttaatacttagattacttaaaagcaacaggcttgttatttgatcataataaaatgttttaacaaagctactggtgcaaagggtgagaaggtggcttaaatccacattctaaaacacattataactgaaataactgaaatatacactatataaaaaacattataactgaaatatacagaaatcactcgaatatattatcctactgactcattccttctgtttattactgtattgccacattggagttccatatttccagctattctttctacggtacaaatggttccacactacc

SEQ ID NO: 133134 - DNA, 713 bp, Homo Sapiens
  misc_feature (113)..(113): n is a, c, g, or t
  misc_feature (636)..(636): n is a, c, g, or t
taagcacatagcagtatttccctgcaagataaaaatcctccctcagtacatttttattctcgagatccgatagtgatgggggtgacggtggaagcaggtcaggtgaaacaggngacacccatgtgtgtcccaagcaaaaattttgttgacatcggaatagtaacaagtattgaaataaaccataaacaagtggatgttgcaaaaaaaggacaagaagtttgtgtaaaaatagaacctatccctgatcagccggcagtccattgatgcactcaaagactggttcatagatgaaatgcagaagagtgactggcagcttattgtggagctgaagaaagtatttgaaatcatctaattttttcacatgtagcaggaactggagtaaatgcaatactgtgttgtaatatccctacaaaagtcgtacgaagtatggaacagacgtatttggacactgatggacttaagtatggaaggaagaaaaataggtgtatacaatgttttccatgagaaaccaagaaacttacactggtttgacagtggtcagttacatgtccccgcagttccaatgtgcctgttcactcacctctcccttccccaacccttctctacttggctgctgttttaaagtttgcccttccnccaaatttggatttttattacagatctaaagctctttcgattttatactgattaaatcagtactgcagtatttgatt

SEQ ID NO: 133135 - DNA, 1374 bp, Homo Sapiens
tgtataagaatctctactgttaccaggtgctggcatacaagctatttgaatgatagtttatttcgtaagataattcttgtcctaggaggacaacttgtgggagagaagctacactaacatggaagcctaacagagcttgcttactggtggatgtctgttttctttattggtagtttggtttagaattgtgatgattacaatggactcgtgactacacaagcagtaaaaagcagccagctgtgcttttacaccatggtttcacacaaagcagctaaagaaatatcagaatgcctaattttctattttataaaagccctaaaggcatatggcagaagaatgctggaaaaatcactgtgggaagaatatgcataaataaagaagtatttcttacgtcaaaaaagtcccaagaatcacgaaatctgcagaagcttggttaatcaaatactgcagtactgatttaatcagtataaaatcgaaagagctttagatctgtaataaaaatccaaatttggggaagggcaaactttaaaacagcagccaagtagagaagggttggggaagggagaggtgagtgaacaggcacattggaactgtggggacatgtaactgaccactgtcaaaccagtgtaagtttcttggtttctcatggaaaacattttatacacctatttttcttccttccatacttaagtccatcagtgtccaaatacgtctgttccattttttgtctgatttttgttgggatattacaacacagtattgcatttactccagttcctgctccatgtgaaaaaattagatgatttcaaatactttcttcagctccacaataagctgccagtcactcttctgcatttcatctctgaaccagtctttgagtgcatcaatggactgccggctgatcttactaacaagaatatctgtagcttcaaaatgtcttccaaacattttgggtgactcaccagggataggttctatttttacacaaacttcttgtcctttttttgcaacatccacttgtttatggtttatttcaatacttgttactattccgatgtcaacaaaatttttgcttgggacacacatgggtgtcccctgtttcacctgacctgcttccaccgtcacccccatcactatcggatctcgagaattaaaaatgtactgagggaggatttttatcttgcagggaaatactgctatgtgcttaaattcttcttgtttctgtttcttgtagtcttgtctatattttgtaaaggcatcaaataaatgataaataatttctgcactaaaaattcgacgcgtgggtcgacgatatcccgggaattccgaccggaccagcgtgctttttttaacactgtctatatgtcacatgca

SEQ ID NO: 133136 - DNA, 1089 bp, Homo Sapiens
  misc_feature (828)..(828): n is a, c, g, or t
  misc_feature (897)..(897): n is a, c, g, or t
  misc_feature (910)..(910): n is a, c, g, or t
  misc_feature (917)..(917): n is a, c, g, or t
gacattttaaattgtaattgccttatatcagtaattcacatattaaaatttgggggatacttttggatatccccatattacaagagtattttgagagtgaaaatataaatacaggtacatttattttctgatagagcttttaatgttaggctgtatattttttcttatccaaaatgccctaggacagaacacttcctcaaatttaaaatgatttaaaaacttgaaaaatagaaactgatgaaaattttttggtaaaaatgtgttttttccagatggttgtccttgccatctcagtcagagcaggcagtgatgtccctgtccagttcggcttgcccgttgctgctgacgttacgagaccatttacttcagttggagcagcagctttgtttctccttatttaaaattttctggcaaatgcttgtagagaagctggatgtatacatctaccaagaagtaagtaagaatagactgtttttgggctgtgataataaagacaactgttatatgaattattctttgtttcagataattcttgctaatcacttcaatgaaggaggagcagcccagctgcagtttgatatgactcggaatcttttccctttgttttctcactattgcaagagaccagaaaattattttaaacagtaagctcaacatttaacaattaatattaatgtatcaaattgttacaggaggctaactccttttaactttagggttctggagatgtttgggtgggataagatcagttgaaattttaaaacattgtctatctactgtatgcttacagcacaatggggaaaccaagatgatagatgtgacccatgnactcaaaaagtttcagaactagatataaattacctgttgggttttggtttctagtattttggttatgcntctaggtgcttantactggnggaataataaatagaaatgaaacagtacagtgtgcctattcctaatatagaaatacagggcgggcgtgtggtcacgctgtatccacacttcggagtgagtgggaatcaaagaaggaatcaacatctggtacatagatgcctcgggcgatctggctcaggcaatcctaaggag

SEQ ID NO: 133137 - DNA, 361 bp, Homo Sapiens
ttttggagttttaaaaaaatttattggctatgtttgattatccacaacagaatttcccttaattagcacaggaaattgaaagttggttataatttaatatctctgctcgtcttcaacagacatactcagcatttatacttgtaaatagaattgagttttcattgtttcgttttctgtttttgtttccttaggaacaagaggatgaaggaaatatggtcagcattttaataacaccataaatccaagataataagtaattctataaagttttccagtttcattaattcagaatttcatcatataacttgaaatccaattggcttcctctttcttagaaacaaaaaccaaagaaacctttttc

SEQ ID NO: 133138 - DNA, 729 bp, Homo Sapiens
  misc_feature (17)..(17): n is a, c, g, or t
  misc_feature (87)..(87): n is a, c, g, or t
  misc_feature (188)..(287): n is a, c, g, or t
  misc_feature (292)..(319): n is a, c, g, or t
catctttacttataccnagagaatattaaacttaccttgaaagatgtcaccttgaagaagttcccattggctgaatctgggacaatntgaacatccaaataaatatgatagtaatggcttataacccattgaataaaatccatgagtccattcagataatgaacaatcagctgggcacagtagctcannnnnnnnnnnnnnnnnnnnnnnnnnnnnnnnnnnnnnnnnnnnnnnnnnnnnnnnnnnnnnnnnnnnnnnnnnnnnnnnnnnnnnnnnnnnnnnnnnnnttttnnnnnnnnnnnnnnnnnnnnnnnnnnnnttttaaggaggtaataaacaacaaggtcaagcccaccattacagctgattaaaatctaataaatataaaaggaatgataacatcagaaaatcaccataactgtcatagctacaattaattgaggcaagagtcatcaagggatgcccaaattttgggacaataataacctccttacttggaaaatgaaatggtaacttcacagtggagaaagcaaatggacactaagttatccaagtggtaaaagttaacaatcctaataataaaacaaaatgacataatcacttatgtagtattgatgccaaaaaatgtattacctgaatctagtcatgaaggaactccagatcagcccagattgaggaatgctgtacaaatcaagtggcctgtactcttttaaaatgctaataacattt

SEQ ID NO: 133139 - DNA, 1051 bp, Homo Sapiens
  misc_feature (154)..(186): n is a, c, g, or t
  misc_feature (326)..(339): n is a, c, g, or t
tttagacttgtttttataagcaggtgctggtattcctgcagtttcaccatgcaggcccacagcaggccgggattcctgcatatcagccccaacctcactgcccacttgtgatccttcaggcatggccaatgactcaaattcctggtgattggannnnnnnnnnnnnnnnnnnnnnnnnnnnnnnnngtgagtaggtcctagtagttgtggagtttcatcatccaagcccacagtaggctgggattcctgcatatcagtcccggcctctctgcctgcttgcgatccttcaggcatggccagtgtctcatattcccggttactggacnnnnnnnnnnnnnncttagacttgtttttatgagcagatgctggtagttctgtaatttcaccccctggacccacagaaagccaggactcctcctggtgggattctgactgaggcagggtgtcccttgcccgctggctctcccaggatgcagctttcctctgatgctttttattctttttctccctaactttactgtgcagggcttctgatttatgtgcatgtgacttagcaagtacctgaaatttgtctgttttaggctttcttggtaacttctgttctatgctcatatcaacacaaacaacatcaacatcctttctaaaatgctttggtgtgttgttaatattttctttatccacaaggacaactgtaacacctgcttcctcgtccacctccaaagcactatatcttctcttttttctctttttgagtgtggaagtggcatttgcagtctcatcacagattctggattttttcaaaggagaagaaatgagatgctggaaatcttttttcctctttttcctcctagttatttgagactgttcattcaccagggaggagtctctgaaaatttcgtgggaatgtttctgaggtctttccttatgtatagaacactttttctttttcttgtcagaaactggagtgtggatttcaaatctgcttgattctccttccattttattccctccgaaagcaccgccacctttctcccaacccggaagtgctccc

SEQ ID NO: 133140 - DNA, 558 bp, Homo Sapiens
  misc_feature (516)..(516): n is a, c, g, or t
ggggcgacagtgtccccgcccgcccccggccgggtcgcgggcatgaaggacagctggatcgcggcggggggcggaggtggggcggcccgggcccctggactctagacctacgccgcccgggcacgaaggcccagccctggccctggccgcggtctcagcccgggaccccggatcgcgcagaaatgcactgaacaggcccctacaattgggctccagaaactacctgagctcggactacctgttgcctcacattggcaaaagagggggaaaccagaaggagggaattctgctgcggcgacttgactttccccgccccgagcagaaaggcattgacgtttgtaggcggtgacccgccccttctctggccttgctgcgtgatggggtctccatgcactttatttatttgcagtctgttttctaggcggtggagcttctagacaccgaccggaatgacatacgtttctgtgtgtgattcactgtgtactggtcagcacaggctggccagagagatgttcntgtttctggtgttgtcacgtcttcattgttttctctaagttt

SEQ ID NO: 133141 - DNA, 600 bp, Homo Sapiens
  misc_feature (107)..(147): n is a, c, g, or t
caatgagaagataatttttaaagtggatgaaattgaaggtgcatgtaacattatcacagatttaaaatcatgcatattctccataaaacttttcaaatgcagttaannnnnnnnnnnnnnnnnnnnnnnnnnnnnnnnnnnnnnnnnaaaccaagcaattataagtcctctgaagcatgtaactgtgattagctgctactctcagcaatataaaaatactttcaccacaattacattccagcctgtaatgtaattcaaaacaaacaagtcagagacatcgctcaaatgacagaaccaacaaatacagatgctttgcatcaaggaaatgaatctactgaagaaatgcaactgaggagcagcagcccctccagggcctggagctgagcttctggtggaacggcgaggcccccttctgggcagaggcacacagtgcgcccagagggctgtgcaaagctgccctgtagtcatggaggtgaactggggacttcctgctgtggataccctttccagtgttgtgttcaaaattttacattttagattttaaatttattatatggattataaaagaaataaccatttgtttcagattaaattgatcat

SEQ ID NO: 133142 - DNA, 630 bp, Homo Sapiens
actaatacttgaaaatcttattcaaagtctagaataagattccacatttgtggattaaaaaagattgcttatacacaaactaggttttaaaatataaataaataaacacatagaaaatgatctacaaagatacagttaggagcagtgggtcctgaggaagactccaggacagcagtgggatgaagaggaacttccgctctgtgctcttgatccagctgttctcagctgttctatcatttgattttctttacataataaacactctatttttgtattttgagacaaaaccagtacaatctggtaaagatgagaaggaacagttaatcctgaagtctgccctgtccttgacactcctactgctaatagcttgcattcaagcagcagttctcaaagtgcggtctgtgggcccttgagggtgcaacggtcaagaacctctcagagggtccgtgaggtcaagactattttcatcataatccttgtacatcatctgccgttttcacgctgttgtcatttccacggatgagcaaagccaagggcaggtggagctgctggcggctcagcatgatctgtggcagcagccccgagctctcctctccacgcccttcggccacgtcctcgtcgcctcgtgcc

SEQ ID NO: 133143 - DNA, 731 bp, Homo Sapiens
  misc_feature (661)..(661): n is a, c, g, or t
  misc_feature (691)..(691): n is a, c, g, or t
ctagtctccaaattttattagttggttgttaccatcacactaatagacaacctccattttccaagaataaaactgtaatatctgtaggtcattttgcagctcgatttctctgcccagcttcatgtccaaatgttctcatcattcagttcccacttataagtgagaacttgcagtatttggttttctcctcctgcattagtttgctgaggataacagcttccagctccaaccacatcttttcggattctgcgcctccgaaggcatcctctcctcccagccccggggcctgggccgacggggcggggccgggattgagctcttggacccggggtcctcactccctcggactacacacgtagttgagtgaagagttagggggaatgggcaccgactagggccggtgtacagtctattttaattatctcaagggaaggcagaagagtgtaaagagtgttagccaggggaaggagtggaggtgaactctaaaaccttccttttccctactttctcgttagcttacctcccccggcattagcaatatcaagagcaatggttttcttttttcttccttttggtatctctcagctgccagtctcgaccccacccagcggctccaccccatctactactacaccattctgtcaatcaccagcccctttanagctgcatcgcacaacttggttgttcgtcncacttaggctggcggacatatcttggtccttccgaccttt

SEQ ID NO: 133144 - DNA, 1209 bp, Homo Sapiens
  misc_feature (45)..(54): n is a, c, g, or t
ttcttgcccctttccaattttttaccaccagtaaagggttaaaannnnnnnnnntttgggggatcctgagtcaaatataatgcccactttctttttgggtagcttgagcttcatggtgtcaactgccctggggttatccaattttaatacagtctcttccctgtagcatgggcaaatattttaaatctttttccaaaaaaagtgttttaagttatgatgttacaatggcaggactttttctttagggaagggaattcagttgtgctgcaatgtattagattctataggtggagcagagtcatatagtgtatctgtatcatgtgtaggctcaccagctaatgtacaaggattagacagtgttccagcaccacagtcacagaaaaacctatcatgtctaataaactctacatcatgtccctgatggcacttcttaatgcagttcacacatatggcatttcgatctgtggtgttacaagtatgacatctgtagaaatcatgcatgggatagctggtataacttgatatttgtatataaacattggcctctactaacagccttttctatggcatcttgattgttcattatgtttgttatctttcgattgtcacattaacgaccagatgctaaaaataagcctccaaaccggttgttaaaaatctgattgccttctagtgttgcagttgcgtgatttgtaatttcaatacctgcggcaaatccatcaaatattctgtttttccttaagattggatgactattagtgctgatgagaacacctgcttgagcattcctgaaaatatcattttcttcaaggagacctcgacccccattaaatatacagatgccaccatctcttccatcatggattttatttcttcttagtgtaggattactatctgtcttaatccagactccagccattgcattgtcaaatatttcattgtcttctatacagcctagaccagaattataaactagaattccaccattctgtcctccccagattttgttgcgtctaattttggggttgcttccagtccttatctgaacccctgaatacatatgattatagatatcattgtcttctagcactccatgtccattgtcataaaaataaacaccaacctgcttgccactgtgtatccggtttcttctcagtactggagtgctgccagttgtcacccagactccagctagagtgttactataaa

SEQ ID NO: 133145 - DNA, 610 bp, Homo Sapiens
atattacaaaagcaattggtacccatgtccataaaggcagcaacaaagctgcttgtctattgaagattactactgcaaattggactgcattcaatgctagttgtaaaaacaccagcttttcagaagttggtatctgtacaaaattgcagcttattttcttcacttctgtcccttcaagtctttacacagtaatgctaaaacacccagctttgagatcctgagtcaatatattgccactttctttttggtagcttgagcttcatagtgtcaactgaccttgtgtatccatttttaatacagtctcttcctgtagcatgggcaaatattttaaatcttcttccaaaaaagtgttttaagttatgatgttacaatggcaggactttttctttagggaaggaattcagttgtgctgcaatgtattagattctataggtggagcagagtcatatagtgtatctgtatcatgtgtaggctcaccagctaatgtacaaggattagacagtgttccagcaccacagtcacagaaaaacctaaagcaaaatgaaacccaaatattagaaaagtgagggggaaagtaattgggtaatatatgtagcacacttgcttgata

SEQ ID NO: 133146 - DNA, 1842 bp, Homo Sapiens
  misc_feature (145)..(206): n is a, c, g, or t
  misc_feature (236)..(281): n is a, c, g, or t
  misc_feature (513)..(521): n is a, c, g, or t
  misc_feature (613)..(740): n is a, c, g, or t
cgtgaagggtttgtgggcacaaaatattatttttgggggcgaggaggccaatacacggggggaggttttccgcccccttttatgtttaaaaaagggggggccgagataagaggggtttgtgtttgggcgcactttgtgcaaaacnnnnnnnnnnnnnnnnnnnnnnnnnnnnnnnnnnnnnnnnnnnnnnnnnnnnnnnnnnnnnnagaaaaagcggccaattacgggccattgtnnnnnnnnnnnnnnnnnnnnnnnnnnnnnnnnnnnnnnnnnnnnnncccccccgaggatcgatatgtttgcgaacagggtgagcgataatgtttcaaaaggggcgcaaaaggatcggcatggaagaagaccggggggacaaaaagggacgccattgtgaattttgtaaaacaccgggaggggccccccggggtttttttcgagggaagggccaaaggtgtctttggcggggtttttttgggaggggaaagtaacccccttttcctttgcgggaggggnnnnnnnnnaaaaaagagcctggtaagggtttgttaagggcgaaggggccggcgccaaaggatttttatgtttgtttttcgtcctgaaggccttagaaaannnnnnnnnnnnnnnnnnnnnnnnnnnnnnnnnnnnnnnnnnnnnnnnnnnnnnnnnnnnnnnnnnnnnnnnnnnnnnnnnnnnnnnnnnnnnnnnnnnnnnnnnnnnnnnnnnnnnnnnnnnnnnnngggtactagtaatactattttactgaaaatctggagttgcacaaatagttctttagaacataaaactaaatggatttatacataacagttacattcagcatttaagagaggcagtacaaaaatgtgttctgcttttatctgatataaattgcatgtaataccatgatttaaacaatatcagttatattaactaatgccatgagatatatcttactcagaacgtctgatgtttcccataatagccagaaaaaatgcagttgtatgagcaactgagtttcttttcatcttcaaattcatttgtgatggtgggaagatctaaggacaatccttccattgaagaagtaggaaaaacagttacagcactgttctgaactcatcaaaaatgaaattaggcacatgtgcttcagcaaccctcctgggtagctttgtgtaccgaacataatcctccaggaacagaagggcacccacaacatctgcaggaatttcaggtatcttctggcttgtacactgctccaccgtggagcagataaactggccaatcagcgccaggaactgctcggtgtaccgggaatggaactgcttcagcagagtgagcagtcccaggacaagtggtggccaatcaaccgggtcggtcggttttcggcagaccattcccagatttttgttgtattgaagttttggcaactgggcgatcaaaaatagaaagtttacaattggaaaatagggtaagcggctttgttgttatgtatatcttattcagtgggttgtgaatgccagctgcctccagataggctgtgatttcatataaaagtgtgttatcttctttggggtaaggaagtgaagggtcctgatagtgggcttcaatgtctgctaggagagccttattgagattctccagagcagctgccagatgtttagaatcaaaccgacaagaataatttaattcattggcaatctgttgtctcagaatctgcatctgcccaaccttcattatagcctcgagatacgcagtccaaatcttctgtgttttggcaatggcggaaaaataaattttatttgaatttgcgacaatactttttaggggactgacagcattcatgag

SEQ ID NO: 133147 - DNA, 1259 bp, Homo Sapiens
tatgatatggcaaaaatatttattaaaatgattttttttaagtttgaactttattggaaggagtccctctaattcacactttcatcctagataaatgggtaagaaccacatatggaatataaagcattgattttttaaaaaccacatagtagcacagtgaaagaaatgcaattctccagggtcttagagaattcaaagtggcatcttaggtggtctaagaaaccaattacagtctcatggttttccttttggttcaagattagaagagtcaggttaccactacctgtttttagaggtagaatatgaactttctactagtccacagtttactggtcaggtggccccaacagtcttttatctcagcccatctgcctctaggggtggccagatgatctctatgtcccaggcagcaaggcttcctgctgatctctacttcagatccatgaaccggatatccatgatgagaaggaagttcttaggcagtgggcgaggggctggagacagaacagtaaacacctgatgctccaggtccacactggtcaccacaatgaagccagctacacttgtctcggacaggttctcctctgtaccctcggcagtgctaacactcagtaggtggtgcaccatatctcgcccagaagtgacaggtactagcttgagctgattatcctcttgaggacatgcccaaagggtaaacaggagttctgggatggtgggtgcccccaactttgtagattttcacatctgaaaatttgacattgaaggcatgggatagaaacagcctcggaatccataaaaatactcacggatacgctcatccctacattcccgccggaagtccttggagcgctccaccacacccccagatttagggagcagcacagtgcgtacaaagtgggggaggtcccgtttcagttcattgtacagtcgttcttgatccagaacaacaacgacatccacctcaaaagctgaggctgcatgcaccagagcctggtaaccagagcccttgacccagccacaggtgttaatgacacagccactcacagatgcccttcggttcacctcacacctttggttgaacacatctgctaaacgagatgtaatcttattataaagcttgatgttagtgccaggagtggtggaaccaaaatgatacaccagaggggcctggatagagaaaccctcttcgacatctgcaggccgctcgatgtagagggcccccatggtaccagggatggacacagaaccctggcccaccc

SEQ ID NO: 133148 - DNA, 464 bp, Homo Sapiens
atgatctggattcattcatgccatagtgtgtttatttatactttaaggtaacaagtccacttgtacacattgatttcacaacatcaataaatttgtacactttgagatttgtttctgggttataattcttcctctgggtctcgtgaccgtttccgggtgctcaaggaaccttctgtttgcaatgaacatgcagaagtaacaacagtatctctaaatccctgaggtttgatttgaaacagtactgtgcattccttctggctgggtgacttgtacaatgttgccaacctttgctttcggtcccaatgaaagattagccgtattgtagcagcatgtccccaactttcccctaatgcaggaacaagcaaggcctgatttctatcaatctttgttgtcatctgattggttaaaattacagctaatctgtgattattttgaaggctgatcatttgctgggctaggccatt

SEQ ID NO: 133149 - DNA, 923 bp, Homo Sapiens
  misc_feature (80)..(80): n is a, c, g, or t
  misc_feature (160)..(169): n is a, c, g, or t
  misc_feature (174)..(174): n is a, c, g, or t
  misc_feature (185)..(185): n is a, c, g, or t
  misc_feature (209)..(260): n is a, c, g, or t
  misc_feature (296)..(296): n is a, c, g, or t
  misc_feature (298)..(299): n is a, c, g, or t
  misc_feature (301)..(301): n is a, c, g, or t
  misc_feature (304)..(307): n is a, c, g, or t
  misc_feature (310)..(314): n is a, c, g, or t
  misc_feature (316)..(318): n is a, c, g, or t
  misc_feature (455)..(455): n is a, c, g, or t
accaaccccccttttttcttgtccccggggtttcttcttgggaacaaccactttttggccccggttgccctcctccccgnggggggccgcgggcccccccacaaagaagggttttagaaagaatttttttaaagggcccgaggggcgggccccccaaaannnnnnnnnngtgtntggggggtgtnttggggtcgccgggtgttttggtnnnnnnnnnnnnnnnnnnnnnnnnnnnnnnnnnnnnnnnnnnnnnnnnnnnntgtgtttttggggtgttgtgtgtttttggtggtttntnntntgnnnngtnnnnntnnnttgcttgtaaattgtgctttaatttctgcaatcagatatgatgcagtgagatacaagtataaactttcattgtgcatccagaaaataaaaagcacaagtatacaggtttagctcaacagcttattcccttataaagnaaaaaaaagttttgaattaaagctagtttatcttcagtgtaaaaacttggaggtataaacaaactcaagatattatatacagtaaattaatttacatttccaaacttgcacagtacagcattttaaacaaagtaaatggtctcatttcagctctcactgttaagcataatccacatcccaatctcagataaaaatttcacaatatataaatccattgagaattctgtacacaaatacgagttatagaaatctgatttcaaatataaatacaaaaattgtcatgaccttacacgttacaacagcttatttttctattgtaattttaaaaaatcatagaaaaatatgtcaatgcacattcaactgctatgacaaaggccatgaccttgtgcctttaaaccatactttgtagagtgtaaagcatcacaccgggcatttttggaatgaaaattacaaagcctgaagaggcta

SEQ ID NO: 133150 - DNA, 1020 bp, Homo Sapiens
  misc_feature (427)..(446): n is a, c, g, or t
  misc_feature (558)..(604): n is a, c, g, or t
  misc_feature (658)..(674): n is a, c, g, or t
gttttcctccaaggcatttattaactcctgagtgtcacggggccaggggaaggctggagccaaaaccaagtctctgggggcgggggtcctctctggatccccactactcagctccccgggctccccatgcagccctagagacgggagaagtccagtgtgccgttccacctccctccaagtcccaagaaagtgggaggcagtgttccactccagtgtcgtccagacgaacaagtccaaccagtctggaaccctaggccggcgtggtcaggtcgggggcgggagggccgggcctggctctgtctctgtctgtgtccaggtcacacataaactgcccgccgtgagatgagggagccgtccagctgggactccatgtcatcctcgagtgctgggggtggaggcaacatgaggcctttctctgccttctctnnnnnnnnnnnnnnnnnnnnatccttgccatctggttccatgggaccagggactactggtgtccagaagaacgggttccccatttcccaacacctgagctttcggatcgtagaatcccccgtcgccactggnnnnnnnnnnnnnnnnnnnnnnnnnnnnnnnnnnnnnnnnnnnnnnnagcaggatgaaggccaaggaccccccagccagaagcagcagcaccagcagtgtnnnnnnnnnnnnnnnnnacaccagcgggcccacatctcggggcgaggccctgggggtttctcggacaaagatgacctgctcagcgcggcccatgcccacggcattggtgactgtgcagacgaaggtggtattgaacagactgtccactgcgtggatgaccagctgggagccctgggccactgcggaggtcgggaaggtgcctgaggtcgtgctccagtcatagcccgtgggctctgggttgctgcggacgtcacagctcagggtggcatcagtacggccgaggtaccagttgtcatcatagccggagatggacacttcaggagggtagcatacagagagggtcacaggtatcagggcggccgc

SEQ ID NO: 133151 - DNA, 1723 bp, Homo Sapiens
  misc_feature (56)..(66): n is a, c, g, or t
  misc_feature (369)..(369): n is a, c, g, or t
  misc_feature (1448)..(1477): n is a, c, g, or t
caggacaaaagcgacaacactccgaaacaggcaagcaaaaaaagggatccaaattnnnnnnnnnnnatctaaacaagaacgtccccaccaggcccggagcacggagggggacccagctgggccccagggcaggtccgacctctccaaggggcagctcatgtatcgagcatttcctgctcagtgcatgaggcgccagcatcaaagtaggggtcttgagtggggctgtgcttccgaggccccccgaggtgaaagagctgggagggcatctcttgtgcctccagcttcgcttttggggtcggtggcttgtaggggggagttccctccaggtcttcgtcctcttctgccccctgcagcgtctgctccttccgnctgctgccggcggataaggatgcccgtggcagccacagcagtagcaatgatggcggcgatgatgcccccgatgatgccgcctgtggcccctgcgcctgctgtgttgggggtctctcggacaaagatgacctgctcagcgcggcccatgcccacggcattggtgactgtgcagacgaaggtggtattgaacagactgtccactgcgtggatgaccagctgggagccctgggccactgcggaggtcgggaaggtgcctgaggtcgtgctccagtcatagcccgtgggctctgggttgctgcggacgtcacagctcagggtggcatcagtacggccgaggtaccagttgtcatcatagccggagatggacacttcaggagggtagcgtacagagagggtcacaggtatcagggctggttcctcgaagctctcatgctccactttgcaggtgaccgtgacaccatctgctcggcccgagggcaccaaggtgaagcggctggtgacagtgacagttccggccagggtccctgacacctgagtctctttggcttcccagtccagggatgagagccaggagatccgggcaggtgggcggccctctttggagatgcagagggccactgtcgtagggtcctggctgaacgtgaccttctgggcctcagcttggttcttgggcttggctatgactctgagccaggtcatccctcggacggaccccttggggaaggtggcaaactcgcaagtgtagttgccctcgtcctccaccgtgagcccgtggagggccagcgtggcgtcctggagctctgcctctgtgtcttgcccagtgctctgcttggcagagacgaaggacagccgctcgctgccaggcttcgggctggggaagctgggacccatcttagggtggaaggcggccacattctggtggttcgcaggtgcatctgggcgctgccaggtcaccagggagatgtacagtccaggaacaggtggcagcaggtggcacggcagctccacggtgcccccgagctggcctcgcacctcgggtagcacttgaactcgcacatcctgggctccggtttccaggnnnnnnnnnnnnnnnnnnnnnnnnnnnnnnggcgtcggcggcgatctcgacggcaggagggcagcggcccgggccatggagggcccgggaggggactgggcccggccggaggcccgcgggccactctgtgggggccgatcggctgggcggtttagtaggtgcctgtggggctccggctccggctccgggccggttcccgctgcgctctagcctccctgttctgctctcccggcccagctctccccgcccggctcggcacccccggcctctcgctca

SEQ ID NO: 133152 - DNA, 627 bp, Homo Sapiens
gttgccaaatccttatttattttacagattgaaaggcttaactactgtgttccttatagcacatggggattcaagataattgaaatactttaaatataaatttaagtttgacataaagtgttacatcataagcattattgtgaatcttcctttcattctaagagaatattttgaagatgtattttcatggtaactatagtgttctactgttttataaaacgtagggtaggcatcaaaagcaagagaaattgaaacattaaatagaaatgcagtgttagcaatctgtttttataaatcttgtctcttagatctgctcagtctttcagacaacactaagcctaattgaaaccagcttttcttcagaggtcctaggccaattttcattcagaagacacaagcatcatccatatccagattggtatacaacaggattcagcagatttgttctgtaaagatccagctaataaatattttaggctttacaggccacatgtcgctgcagcttattctttttttgttttatttatagctctttattcttaactcacggcccatataaaacaggccatgcatgggcagtcatttgcccatccctggtatagattcaactaccttccccctcgtgcc

SEQ ID NO: 133153 - DNA, 567 bp, Homo Sapiens
tttggattttccatatcctttaatgaattgcaaatatattaacagaaaagactttccccctcaacactgtacaatttctgaaataagtcagttaaagcaaaaagaagacacaaaattacattgtttcaatgcaaacagaacacacacttcatacccacacttgcattttcccaggttttcacaaagaaaatgggtcaccatatttctcagtgaagactcatactatactctggctaatcagagacttccaaacttttttcttcaaaaagagcatttttaatagactaaatactggttatcactgagtttttgtttaaggtacaacagcagcatggttcaaatgttacttgtagttctcggaaaaattaaaaattttaagtgatgaatacagaaaatgtagggaccacctttcattcttttgagtaccactgttctcttgaaaaaatattctaaccttctaaaatcccagagttaagaaccatttccaaggggaaaaacaaatccaaggccacaacataacttctgtataagtgtgtgcgcgtatatatatatgtatatagatgtatt

SEQ ID NO: 133154 - DNA, 1023 bp, Homo Sapiens
  misc_feature (184)..(228): n is a, c, g, or t
  misc_feature (241)..(328): n is a, c, g, or t
  misc_feature (373)..(407): n is a, c, g, or t
aacttaggctaggtagcgaggctgggtggtgaattcggcacgagggtccgcactaagttcggcatcaatatggtgacctcccgggagcgggggaccaccaggtgcctaaggaggggtgaaccggcccaggtcggaaacggagcaggtcaaaactcccgtgctgatcagtagtgggatcgcgccnnnnnnnnnnnnnnnnnnnnnnnnnnnnnnnnnnnnnnnnnnnnngctcaagcaatcnnnnnnnnnnnnnnnnnnnnnnnnnnnnnnnnnnnnnnnnnnnnnnnnnnnnnnnnnnnnnnnnnnnnnnnnnnnnnnnnnnnnnnnncatattgcccaggctcgtcttgaacaccggggctcaaggaatctnnnnnnnnnnnnnnnnnnnnnnnnnnnnnnnnnnngtgtgagtcatcatgcccagcctccttgaagtttactaacaattgggataactgagggaagagaagtgacaattccactcagtctattagaggtctggatataaggtagccacacaataactctaacttgacttctaaccattctatcttattgatttggaggctgtcttctgccagattttttgtggcttgagatgatattttcgaacccttctttcactacctttcttacccttaatgtgccaagcttgaaacaggatttgatttcctgagctacttgttcgccttctgtgcgtcaccaagtaatctggttcatctttcgtctcattcatgttattttcaagtgaaacaagacattttgggggtcaagtctctttgggtgttttgtttttatgtatataaaaatggattttgtgttccctttccatgtaagtaccaacttatatggaaactcacaatcataatgtaaagaagaaatgaaagcctggtgtattgtacttcaagatgcctccctgatgtatagaatctccttgtaaaataaataattgcattgtatatcagtcttcccatcaatattaattattaaatattttagaatttttaaataccaactata

SEQ ID NO: 133155 - DNA, 320 bp, Homo Sapiens
  misc_feature (24)..(24): n is a, c, g, or t
ccggtaccacagctagtgccaccnggttgggcatagtcccgtcacgtggagagcaacgagaagaacaagaaggccagacatctgaaactactgcaatagtatccatagcagagcttcctctgcctccatcacctaccactgtttcttctgttgctcgaagtacaattgcagcccccacctcttctgctcttagtagccaaccgtggactagtagccaaccgtggactagtagccaaccgtggactagtagccaaccgtggactagtagccaaccgtggactagtggccaaccgtggactagtagccaaccgtggactagt

SEQ ID NO: 133156 - DNA, 730 bp, Homo Sapiens
ctgttccttgtgtgtcccccggttggctactagtcacggttggctctagtccacggttgtctactattccacggttggctactagtccacggttggctactagttccacggttggctactagtccacggttggctactagtccacggttggctactagtccacggttggctactagtccacggttggctactagtccacggttggctactagtccacggttggctactagtccacggttggctactagtccacggttggctactagtccacggttggctactagtccacggttggctactagtccacggttggctactagtccacggttggctactagtccacggttggctactagtccacggttggctactagtccacggttggctactagtccacggttggctactagtccacggttggctactagtccacggttggctactagtccacggttggctctagtgcagtggctattcacaggcgcgatcccactactgatcagcacgggagttttgacctgctccgtttccgacctgggccggttcacccctccttaggcaacctggtggtcccccgctcccgggaggtcaccatattgatgccgaacttagtgcggacacccgatcggcatagcgcactacagcccagaactcctgggctcaagcgatcctcccacctcagcctcccgagtagcgttggtatcacgggcacacaccaccatgcccagct

SEQ ID NO: 133157 - DNA, 1208 bp, Homo Sapiens
  misc_feature (972)..(972): n is a, c, g, or t
  misc_feature (1006)..(1006): n is a, c, g, or t
  misc_feature (1024)..(1024): n is a, c, g, or t
  misc_feature (1037)..(1038): n is a, c, g, or t
attttatttcaaatttattttatgccagatccaagctgtaactggaacctattcccagtctatgggtttctgaatttcattttcctatttattgtatttttatgagaaacttgttgtaatgagtctgtaccactttatttgacatttactaaagctgtataaaagccatgcacagtttatttacagtattgtacattaaatgataatgtttgaagatcacacaaagatttcacaaaactataactaatacagaaagatgtgtgaaaacattaggggctttcaaaattttaggtatggaattttgcaaagattattttggcttataagtgttaggcaatcactaacctgaaataagtgacaaaaacatgcagatgattaccatttcaacaaatgaaaagctataaatgtctagctaaaagctaaaatattgtgtagctgaaatactaccatataacaatgggaatttataaaacaggaaaaaaggttattctttaaaagtcttccatgagtaatagactttcagtaattttctataaaaacattcagaaattaagtttctcaaattatgtttatcaccaaaattatgttttcagtagtgactggagctatgacttttaaataattatttattgtactataggggaagtatcagcttttccctgtaggggataggctggagaaggaaatcaaccagtaaatttagattcaagtaaaagatcctagtacaaatatatcattaacacagagtggagagttacaagaactgcaggtccacatacttttaactgtactcttagaagtgtaaactttaggtttgttcactttaaggtctcctattaggaaatacctcttcattgagagtataggaaatatcaatagatatttcttctttaaatccatctcttccagtttttactgttgtggctgaagtacatttacatattcagactgccccaactgatacgttgtgtntcttccacagtcgacatactgatacctctcctgngatatctgttcagagtgngcaagtatgttgnntgtcacagtacttgcatcatgagtactatgttatgcactttgatggatatcagagtacagaatctacatatactcatttctctgctatacggtagtacttgtatcaattgttcaatcagtggacatatgggtagtgttagcgtgcttcatactgtttgaatgactggcag

SEQ ID NO: 133158 - DNA, 1475 bp, Homo Sapiens
aatttcgcagtcccgcttgggaatcccggtttgaaaaatcccaagtaaatgccttcaggaaccgcccattcggaattggttcaggaacgcttcggttttcccccgggccgttttttaattggggggaattccaaggcctattgcctgccccgggatttcctttggaaaacaaggtatggccatggttccctgtcctaggtgggccccgggggccaaacgaaatggttttggaaaatttttcgagggccgaggccggccgacattgtaggtaggtggagcgatcaggaggtttcggtttctctgctctcttcttatcaatttgttctttcaacgcagcaagccgttccttccacaactttgcagacatctgctgtctggtctccatgtggtcttgcactgagtatgtcatgaggatccggtggcacagtgctgtcaagatctgtaggcttctcctctgacgtcagctcaaaaaattcagaggtctccagcttttctaggaactcatcttgtacctcattatcctcaaatgcagctgaatctttattgtcatctgtgtctgagccctcgctttcctgctgaacatcagatctgcgcaagcagagccgcaccagctctgaaacagaatgcagagtcaaggggatttctgacagcttcattcccaattcaccatagtcttctgctatctcatcttgtaggagggtctgtaagaggatgaccaacaccctgttaaggtataaaaagccacccttatctgcactcaaggcttccataagggacacagcagtaataggatgctgagcatctggtaaaagtagcccagaataacagctcaagaattccaccaccatggccacatccccaaacagcgtgttgggcagcccttcaggggtatccaccaatctgaatgctggaaggtttttgccagttaactcttggtcctcataccgcttctgtttttctaatctctcaagcatttctttctctcttcgttctttggctttttccttcaacttctttttcagctcctcccgtttctttttcaaatattctttccgttgttcttcagacatagaagcccacctctttttgtgctctagaagttcatagcgtttttgaacaagacttcgcaattcttctgggagacgagctctatcttcactagagagaagacgagctgttttggagataacacaggacagggcgctcctcttgtcctccctgtctttgttttctttgtagtatgcaatgaggtgtagggctgcaggaggcagatgtttatgaggtttactagaggtcctaggtgtacccccagaattccgtggggctcgtgtcatcttctgcgtgcctttggccatatccaacaaagtcatctgcttcattttggttttaggagtcttcagtccttttttgggagatttggaattccccctcgtgccgaattcaccacccggcctcgctacctagccgttagtttc

SEQ ID NO: 133159 - DNA, 801 bp, Homo Sapiens
  misc_feature (777)..(777): n is a, c, g, or t
ttttgaaaccagacatacttattttaatcatattttatataaaatagacatttacataaatttaattttggaaagacctaggcaaagtatacatcattagactcaatgggagaaatactttatggaagataaattctaacgggcacagccaaagtaacaaaaatgtacatttacatacaactgatccaaacaggaagtaaaagcattatgaaaaaagaacatgatgcaaatcatttccccctgacaaaaggagggatctgcgtgaattacagcaaatcaaatgatttccacattataaaagcaagccatggcttctacagatattttaattccttgggaggaagtttcacctcatcttttttccccagtaaagtaacaatcactgtaggaatttttaagtgcacaaactgcaaaataagagtaactacctctgccatgttcaagcacttgggcaattcagtcacttttagggttgtatcatttaaaaaaggggcaacatttatgaattatctcatcagatgcatggtgtttttcaatccagattcaagagtaactattagagttactcattgagcttaatggaaacatcaaaccgacgagtcctttcatgggtggtaaacatgactgggagacaatggctaacttgccccaggtaaggtggctcttcagtggcagagctagaactagaactagaactcagatgtcttgattcttggggtagtgtaccctcctatggaccagcaagataaataaccccaaaggacatcacacatactngaaactcctcgtgccgaattcttg

SEQ ID NO: 133160 - DNA, 837 bp, Homo Sapiens
  misc_feature (732)..(733): n is a, c, g, or t
  misc_feature (774)..(774): n is a, c, g, or t
  misc_feature (788)..(788): n is a, c, g, or t
tttttttattctttttgatcattgttcttactgaggtgccttcctagaacaagagccacttacaaaatagcttataattattatgtaccacacaactactattgtttgatgtatgactgctgagagcttgaatacatgcagagagtgactgaagacttagtagaggaataaattctgagcctgtctaaggtggggctaaggaacagatgagtaataagaggctcttggatttttttaaccaatgcaactgaccctttcaatcagttttctttgaattacatctacaagttttgttccactcagctaccagtcaactaggcatgctccacagtatcacaggaagaaggtcagaaatctggaactgaagctaaaagaagtgaggatgtagaagccacattcctctccaaggtagtgtgtgaaagaaccgccccctcttgacaggaggatgacccgtccgccattcttgcgtgggactgactcaccccagcttgagaggaaggaccaatagaaaagaaaattcacatttgagtccacctctctccccctttttctggaccttcattccataagatctggttgtttgggctgtaggtggcataattcatgtttattttggcctctgtcacatccagtttctttagcttttaaggtaagcttcttttggctttttttcatatgttcaccaagcttaagtttaaaataataggtattctaaaagagtatcctaatttnnttatctgtattcttttagaataccctaatgtttcagacagngatattctcttgtnatttctaaggctaaattggcagagtatatcatctaaagccaaacactga

SEQ ID NO: 133161 - DNA, 389 bp, Homo Sapiens
  misc_feature (101)..(114): n is a, c, g, or t
aaattgtcatttaattcttaaactgtcatttatttgagatggaaataagatctaaagttagttgcctttgcctgtaaaacatgtgatttgcaaattattannnnnnnnnnnnnnaacaaatggaagtaaatttgtttcacgtaaatcttaattttcaacctttctggataccttaattgtaactgtcagtttgcactggtcggtatatggaaacacattgctctaccctgctacttagttgattttaaagtgaatttacagtgatgagaaatttgtgaaaaatatattgtatttcttttgatgtttcaaaaggttgcctatgaaaaactgatttgttaaaacatgctacgtgtccaaaaataaagaccagaatgacattttgataacaa

SEQ ID NO: 133162 - DNA, 588 bp, Homo Sapiens
agcttacattttaatttattgtggttgaccacattttatgcgctcctgagtgccttcacccagctacactttaccttgtatctataaaagtgtaatttagagtaaatacattggctgtaaagtcgagatcaggtgctctccaccaaaagcaaaacaaaactgctgaaatgtggcaaggtttctcagtgcaagcttaaatgtttaaactgttgaccatttggaaaatactggacaaaggggaaggacaaaacatcatttgcaatagttaaaggttatgcaaggcaaggcaacattatactttttgactaagttattaaaagttaaatgcatttcttctttgaagtgtggattataaaagccaatcaaagacaaaaccagtttgaaaaaccttttgtattctacaataccttttatgagtaagagtaaaacatacatttcttatttgtaattttatttaaggagaaatactctttccctttgatacgactataatattataaacagcaaggaatatgttctgctttctgcaattttagaaagtcattccattctgggtgacagaatgaggtaagactgtctctttaaaaa

SEQ ID NO: 133163 - DNA, 1118 bp, Homo Sapiens
gcagtcagtgggttttatttgacgagggggttttctgctgaactgagatggggttgattgaacggggacagagcgaagactggcagagggcacacacgggaccctggccactcccgggaccctgaccactcctaggctaggtccttcatgtcttcagtcaggcgagcctggggccccctggggagagcctgcatcctgagtgggcacccccgacccatgacaagcctcctgcaagggcagcttctagctcatggtccgtgagtcactcggggctggtcaccgggcactgggaaggtggccagagccgcgtctggggggccgagcccagcaacagcagcagcagcaggtgggcccaggcaggcgggctgttgtcagagccttcctgcagctgctgcccgcccgcctggcctcgcaggcgtccctgtcatcccgcagccgtgtattcagctccctgagcagctccagttgccgtagcaggctgactttctctttctgcatgttcctggagacggcgaccacgtctctgtggatgggaggtggtgacccggctgcaggaaggctccttggggagcccccggaccccctagaagatcctccttcccacggggcgggcctgggacttgaaatggggatgaaagtggcccagacctgagcgcccgtcggccccgcccccgggacacgcaccggggcccgcccagccccgtcccacggcaccgttgggtttgctcctggcggcctcgtgcttcgctctccagcctgcggatctgctcctgcgccccctccagctgcgttcgcagcgcctcgtgcgcccgccacagctgggagttctgggcctgtgcctccaggtgctccgcagcctgggcgtgcagctgctgctctaactggagggtggaaggatggagaccggcgaggaacgccccctcttccccggggtgctgcgcgtgccccaggctcccgacaacccggggacgctaaggcacagggggagagtgcacgggtgaccgtggggacagggcaggggccgggtgctcacctcccgctgccgcaggcccgcgcgttccagtcctgctcgcgatctgcctcgtgccgaattcgacacccagcctcgtactagctat

SEQ ID NO: 133164 - DNA, 2168 bp, Homo Sapiens
  misc_feature (53)..(794): n is a, c, g, or t
  misc_feature (827)..(844): n is a, c, g, or t
tgctcttccagtgcgatagtctgtctaccgggttgactcaagacgatgtaccnnnnnnnnnnnnnnnnnnnnnnnnnnnnnnnnnnnnnnnnnnnnnnnnnnnnnnnnnnnnnnnnnnnnnnnnnnnnnnnnnnnnnnnnnnnnnnnnnnnnnnnnnnnnnnnnnnnnnnnnnnnnnnnnnnnnnnnnnnnnnnnnnnnnnnnnnnnnnnnnnnnnnnnnnnnnnnnnnnnnnnnnnnnnnnnnnnnnnnnnnnnnnnnnnnnnnnnnnnnnnnnnnnnnnnnnnnnnnnnnnnnnnnnnnnnnnnnnnnnnnnnnnnnnnnnnnnnnnnnnnnnnnnnnnnnnnnnnnnnnnnnnnnnnnnnnnnnnnnnnnnnnnnnnnnnnnnnnnnnnnnnnnnnnnnnnnnnnnnnnnnnnnnnnnnnnnnnnnnnnnnnnnnnnnnnnnnnnnnnnnnnnnnnnnnnnnnnnnnnnnnnnnnnnnnnnnnnnnnnnnnnnnnnnnnnnnnnnnnnnnnnnnnnnnnnnnnnnnnnnnnnnnnnnnnnnnnnnnnnnnnnnnnnnnnnnnnnnnnnnnnnnnnnnnnnnnnnnnnnnnnnnnnnnnnnnnnnnnnnnnnnnnnnnnnnnnnnnnnnnnnnnnnnnnnnnnnnnnnnnnnnnnnnnnnnnnnnnnnnnnnnnnnnnnnnnnnnnnnnnnnnnnnnnnnnnnnnnnnnnnnnnnnnnnnnnnnnnnnnnnnnnnnnnnnnnnnnnnnnnnnnnnnnnnnnnnnnnnnnnnnnnnnnnnnnnnnnnnnnnnnaagaattcggcacgagggccgcggctgtaggcnnnnnnnnnnnnnnnnnnaggtttcaagtaagtgacttttatttttctctgacatttcacagtcaatttctgcaaaacttcatactttctcaaaagaattcacatttgctaaataaatttctaccctaaagaattcatagctgaaaaaccacttcaatatatgcacaaaagttacttttctgctaaaggaaccatagtagaaaataaaaagtcagacaatactataatcaataaaaaccaatgagtgtaataaattacaaatgtcattaaattccattcccataaccattgcaatcagcaacttttctatatatatttcaataatgccaacaaaatctgccaaaagttctcttaagggttgctctgagctaaaaatggcttctcaccttcagaaaacagcagctctgccacagtacttcatagccaattacgttattcatcgctaaaaccatcactacttacagccttgggcaaccgatggagatctttctggtcacctccgaggttcctccatttgctgatctggcttctggactcaatggatctctccttccaagatctatcttctctacttgggttcatctgcttacagctccaacagagaacaaatgcccatggtaatagcctggagagacttctagcactaagttacaagattagaaaagagctgagagtggtgctgcttctccctgccactcagcagtgaggattgatagtggctttcatcatcttttactgaaacagggagggaaatgcaagccttaatctaggaagaagagtccaagaggcttatagctccacagagggtttttccaatggaataaatttggttctcagcaagtgttttcagatttttgacacagtaagactcatgactggtgcccaggatgttctgaatgcacctgtctctatagctttgctgccaaacatattctgccaaaaaggaagcttcctagcatggtgcacagagtagagctgctatagtaccacacagattcaggggaggcaaagagagtgggccaagagaaaaatattaaaaggagctgaatctgcctaaagacacatttgctctgatttctgaaattctttcagaaagcaaacagcaggtaataattctgcgttcatgagtggagtctagggatgttaccaagttgttcacttctaaatcagtcatatctaaatcacacgtttgtgaacaaagtataggcaatctgaagccacatactttttaaactatgttagagttacaactacctaggaaatgtcatatttaacttctggtcttagtaaaacttttctttgcagacagggtgaagctgagctgagcgtggatcccgggaat

SEQ ID NO: 133165 - DNA, 766 bp, Homo Sapiens
  misc_feature (98)..(143): n is a, c, g, or t
  misc_feature (707)..(707): n is a, c, g, or t
  misc_feature (716)..(716): n is a, c, g, or t
ttaagaattttaagtacattttattaacaatgtatccctttgataagattatgcttcaggaggcttttaatgcccttgacataaactatacacattannnnnnnnnnnnnnnnnnnnnnnnnnnnnnnnnnnnnnnnnnnnnnccatttggggacaaatcttatttaaattatacacaactcaatgaaatattcttacagaaaaaatataaatactttttctttctatgttacagttatacaatataaatcagatttcaatgtctgttcagtgacctacaaacaccagaacctccaaatatgtagcagcgtattactaaataaaaaagaagaaactcatgtggttagagagcattaagtctgagatttttttcacaattccttaccacttttcaaaactagtttacaccatttgttttacaatgcagctttagggtttctgacaggtatttttgtaacaattacctataaaatttttttcactccccctctctgccccaagactttgcattttgtgctaaatcaaccaagtagcaaaattgaaaggtatgctttttttggcataaattatatttttgaaattaaatattctataaagaaagtaaaacaaaatgtgcaatttatgcatgctgtggtgcagctatccgatacttacattacaaaaatactccaaacaggaaaaaagtccacattctgtgagtcatatanacctactangaatgaaaaataccctggaacttggaactaaaagaagaaaagatgctcct

SEQ ID NO: 133166 - DNA, 878 bp, Homo Sapiens
tttttttcattttaaattgtatgtatttattgaccggggggtttactgatctttagaatttacagtttaggttgggaggtcaaaatcataactttctcaatttttttggcaaactgatatgatggctggaatcatccagaaaaagtagagatcattatattttcttgaatattcattcaagtttcaatttaatacttaaacattcattttcgaataaaaatactatgtcttgtactagggatacaaagacttggttattcttgttggagtaatgattctcctctatctggggaggtcatcctctgcagttggggactgaaggactgggagatgggagattgaaacttaaagaggtaaaggtatgtcttggaataaaactagttatcagtcaccaccagaccatcatggcggctagaattccagaaacggtgaatagaagttcatcttctattttgtcttcatggaatatatcactctggtaaacagctggttctaaatatgatggttagactttcaaggtcttcattttttagatgtaattcttcaaggagggtgtctagaaaccgtgtaaacaccataccttcctgagaatgtttctgaatgccaagaattggggtcagtaatgacagcaacaccatagcaattaaagtccattccgcaggtttgtgtataatatttctatttgttaacctgaaagttcgaacaagatttttaagttgtgtgtaaatatctcccaatgtaatctgaagaggaaccagaagcccaggcaacactttactcaacttttcaagtacgatgcgttttctaatctggttctgggaacttgagtctatcagtggaaaggtggaatcatgctcttctgagtcttgtgatttggt

SEQ ID NO: 133167 - DNA, 415 bp, Homo Sapiens
aagctagtgctggcatgccaccttcccctcaaagcagagtcaacttccttttgtttgagagttttgtactggcctctgtaggcccttttcaggatacaaaataaagtgcccttcagcatccacatgcgagtgggttgccttccagtgtcagatctgtgttccagagtttggtcaatgcatttttacaagaataaaaccacatgcctacacacacagacgagcctggaaatggctttctggacagggttacttgttatcttgacacttcccctaaaagaaattactttcttggtgtaagatgattaggacattgaatgacctactctcaacttctggaagggcagcttgttttgtccatttttcaatgagggagtgggaagaacccaacattttcagttacaacaataagattttg

SEQ ID NO: 133168 - DNA, 744 bp, Homo Sapiens
gacaaccaacactctataaatttattaccaaatataacctatgcacaaacacagctaagctaatgagattagcaaagtagcagcacaaaaggtaaggaaaaacacatttaataaatacaacttggaaacgtctttttctttaaattaggttcaaatactgggagacaaacactgaaacaaaagtcttaacaacgcacttacaagccatcataacatgcagtgatcctgcgagacactgtgtccactcacagccatgttaactgggggccactccctgctgccgtaccatcatatgaatatacatttgtcagtaaaaatgtgacaaaaatgtgatgtttttccaggtttgtgtgttttcataaagttactcaggtttttagagaatgaacataggaacatgtaggatccacaatttttaatgtcatcaggttagtctgtatttacaaaactctaagaaaatagatgtgtgttatgtttggaactgctgctttgaatgcaatacatccaaataatgaagctgaccataacaaagacgggaaaagtaattcagacatttcacagaggccttatttggaatacaaacactttgctagagaaagaaagatggaatattttaaacaatttcaagattaaaaagaaaagttaatgggaggagggcaacagcaggagggaaggatgtgcttaaaagaaacagatctgcatagatgatgaactgaatttaattcaatcctcgtgccgaattct

SEQ ID NO: 133169 - DNA, 970 bp, Homo Sapiens
aaaaccgatactttttactctccacgttacaaaagttctcaagcaaagcttggattttctacttaatcagtattgatccaactgtgtccagaatgaagtgaccttcggcatttatcctttgctaatcttgctattatgaatccagaaattgatatgacacatttcaagggtgcaaacttaaagtaagtctacacaacatgtaaggctaacaattgccccatattttagtgagaaaaacttcaaaaaaacttctcaaattgttttcaagtggcatagccaatgggtattttttaaaagcggcagacaaataaatggtactgatactgtgctaaaggccaccctgggtatgcttccatcatagcatctccatcctccaactacagtaaatgctaagactaatcagtcttaagcccttagattaaaaggccatgtctactggaaatactacaggatctgctattgtctccattaaggcaaaccatttctaaatgatggtgaaaggaatgtttctgaaatctcccaattgtaaatgacctgaaaagaaagtacaaaaacagcaagacaatgggtacatatgtagaatcataccatcttttcatcatgcaacactggctcctcatatcaggatgactaaatagaatatttatacatatcctttgtacacatctttctctccctctgtgagtacacgtgtacttgtccttgcctgggtctccaaggctacatgtggtaatgggctacattttctgcacgagagtccagtttggttttgtttcttgctgaggatatgttctaggtattctcttaattctttcggatatccgcatacaccacagactgggccctggtgagatccagaaggcagactctttacaagaccctcagtgtcggagggggacttccgaggagcctgcttaactggtgacaaactctctgatgtactgcagccagtgtaatcccgcctcgtgcc

SEQ ID NO: 133170 - DNA, 1592 bp, Homo Sapiens
  misc_feature (72)..(128): n is a, c, g, or t
tttgacagaggcttgtgtcttgctacttctatcactcgtattttttttatctccagaacttcttgaactacnnnnnnnnnnnnnnnnnnnnnnnnnnnnnnnnnnnnnnnnnnnnnnnnnnnnnnnnncaacagaaatcagctgtccatgcagctcagtgcgatgaagatgtgcaatacacctggacacctctgtgcttgaagacatagttacaatgccatagcattttgccccaggacttcgagcatttgtaactacttttgcactcagaacctttccatatttgccaaagaggttcttcaaatcagcagctttggtattagatgaaagtccactaacccagatatttttagttgaggcttccactgctaccacttagtgctacttgtacttcctttgtcatctttagatgatgtcttgctgtctttagattcctttgaagagctcttttctttttcttcttcctcagtagtcttgggccctttcttgaaaggtatccttttctttttcttgagattctgctttcttagaactttctctggcttccttctcgacagggtcacccttcacgcagtcttccttcttaccatctttatggttcgcattcatctcataatccttgctttccttctccgggctctgtgcaatggcgtcctgcccatcttttggcttacttgcttcagaatctgtaattttcacatttttacctgtttctaggaggtcatcaccatcaaaatccagagtgatggcatcttcagcctggattgtgaccgagatgttgtcatcctcagcttctttcacagtcgtatgagcttccatctcttcatgagctgtgtgatcagcctcagctaggctcccttctgaaggaagaggtttagatacttcttgtgtaccatcaccagaacctgctatatctttctcattttcttcttcctcaccatcttgggctgttagaaaggtatcatcttcaccttcttgagcttcaatttcctgactttcgatgtcctctttttctatatcttctattccttctgcctctattaattcatgagctctcttgttttcttctgcagagagtaactccttggaatgcacattttcttcttcattttcaccaaattcttcagagtcctttagttcatcatttccatcttgctcatgtgcctcttgattctccaattcacagtccttgataaaagcatcatcttccacagaagcatctccactcaactcatctgcttcatgttttttacctttgcctttagttggtttcttgtttggagtatcagttgaaacagttaattcaatattatctggatcgcctccttcctcttcaatagcctgcttgagtcgggagatgagcacggtcttgactccggtgatgtctaagttccgccgcttcagctcggacttcagatcgatgacccgcagatcggtgatctttttaccttccgcctgacccgaggcggccgaggctgccaccgcaccggtagcggcagccatcttagaagagcagcgcgctgccgaggcagcgagtgggctgcagggcggcggcagcagcgccaacttccacccaggcctcggcggccgca

SEQ ID NO: 133171 - DNA, 1822 bp, Homo Sapiens
  misc_feature (66)..(66): n is a, c, g, or t
  misc_feature (1332)..(1378): n is a, c, g, or t
cctctggacatgaattggccactgatttgtacattctatttaatgggggatgcgttactgaaatgntgggttatcatgcctgctcctgcccgcccgtcacccattcgccctcgtatcatgatagctaggcccttgagaggggtggaccatgccactctttccttggtccgcttgtgtcccgtctcatggcgttcaaccacatgtcgctcctcaggatagtgctgtgatccacctcctcggtctgtgatgactcctctgtctccctctctgctcccgtatcccgttgcgctgttacgattcccagggggagcgcctctcacactgtgccctgatacttctctcccagatcgttctggcctttcaactcttgtttcccgtttgtcagtggacatgcttccttcacttttccagctggtgggtctggaaggattgggccctgcctctcgaggatgtctaggatgagtgatatcaggcctgtcatgaataatcaccgttctcctttcgtctcgctcccctcgtacttctcgcctgtctgattctctaagttcatttcttggtggtggaggctcatttcttctggagtcactgaaatttttgggatatctttcgaagcttggatcttcccttcgtgcagtaggtcgtgcttttttcccctcactttgaccaacaaagcgatcccgcctttcaaaagatgaagactgtactgctgaactctcaggaaacctgcccctctctcggtgatcaaagtcattaaatctgttctgttggcgagagtagtcggatccatggccaaatcgtgcatctgtatctagagacaactttttattctcgctccagtaaggatcatctcgcctatgatctacatcacgtgggcgtttcaaggaattccttttttcttgttcataacgaagctgctgttgttgccttctgagttcctctctttctcgagcaatccgttcagcttccttacgacgttccttcgaagttccattgctcgtcgcagcctttcaaaacgaactaaatgttctctcaacctttgttccttcatcttttcaaaaggcaagatctctttccttctgtagtctttatctctttttttatctagactagctctctccttttccttacttcttccatgaattttctcatatcttcctcttcttgatggtctacaatgatctcctttagtttggtctagtattaccatatgtcctggactcttggaacttattcgcttcttttcttcactttttttaatcgattctgatgtttggccacttgctccattatcattcttctcatctttaccttctattttcttagtatccttgnnnnnnnnnnnnnnnnnnnnnnnnnnnnnnnnnnnnnnnnnnnnnnngacagaggcttgtgtcttgctacttctatcactcgtattttttttatctccagaacttcttgaactactcttttcatcattttctttcttcatttctttcttagagggatcaccttttactttttcaacagaaatcagctgtccatgcagctcagtgcgatgaagatgtgcaatacacctggacacctctgtgcttgaagacatagttacaatgccatagcattttgccccaggacttcgagcatttgtaactacttttgcactcagaacctttccatatttgccaaagaggttcttcagatcagcagctttggtattagatgaaagtccactaacccagatgtttttagttgagcttccactggtaccactagtactactagtgcttactttgtcatctttagatgatgtcttgctgtctatagattcctgagaagagctttc

SEQ ID NO: 133172 - DNA, 802 bp, Homo Sapiens
  misc_feature (309)..(323): n is a, c, g, or t
  misc_feature (627)..(640): n is a, c, g, or t
agccctaacacttgtctagcaaatggagagcctaatttaccaaaatgaaacttgtaaatttttgtgtcattgtatgtaagtttactttttatggaggaaggattctagataatgacaaatgaagattatgacatgtatttcactcctgtgattaggttctacgcacatgggtcataactcgcatgtcgagccccctttagtgaagggtaggagagctcagcctcggatggccaacattcagttgttcaggttcattcgtcaaagttaagttttagaactatttgtactcagtaacaaaaatcattttcnnnnnnnnnnnnnnnctgttgtggaaaagcgtgaatttgttattaagcatttgattttctgtgtccttaagtacttcctgaagatgaagcaaaattttaatctggcaattatgaaaaagaaatattttagctctgaaggatttagtagattctgttagattagggaggccttacagactgactttacttaaagaggacgcgtcactcgctgtcagtgtggtgtgggctttatttgcttaaataccttcatttgtatagtacgtctcacttgaaattgctttgtatacattttgtaaaaatatttataaaatgttttgtnnnnnnnnnnnnnnctataacaaattgcagtttattttgttatgttggataaatactgttaaaagaaaccagtcagtaactatattgttaatccatggttaggaaatgtttagttggagattacaaattgaaacaaccattgcaatacagccaaagatttgggaaaatgtgaaaaa

SEQ ID NO: 133173 - DNA, 765 bp, Homo Sapiens
cactctaaagatactttttatttaaatattttatgatgatacatatacaaatataatcttccaaaaaacaaatgtaaaactaatacaaatcactttttcaggaacaaagaaaatcatttagaaaatgtgattatgctaaaagaggcaggttaggtttccaaggctgctcaaggtggaagcttaagaccaacttttgtttgagtacacaagtgatatttacattttcatatactagtgatatgcctgttgcatacttggcaaaataaaactgatagtaagtctataataataaaagaaacaacaattactaagtaaacaattctagatgatggaagagtaacctccatttaagctacagacttagatgtctaaaaatatgtgtcctgatctgtacagttagtgggagcacactatataaatcctttgcatgacaccattcaacaatattttttaaaatctacaaaattttaaagtttcacttccctagcaaaatatcttcagtcaagaaattagtctttgaaaattatgaaaattgttgtgggaaatatttatacaaattattactgataatgcacatatattttgaaacattgtttctagaagcaataaaatataacctatttaggagataacccaaatgatttgtaaaaaaattaacttgtagaaaagggaaggatgttgtgtaaaatcaagtcaattatttgaggtttttataatattgagtacttatgtactaagtcacacccagccagtcaataactgaga

SEQ ID NO: 133174 - DNA, 384 bp, Homo Sapiens
ttaagattcttacaatgtactccaaagcgagggggagagaaaagaaactctcagctggcaatgagctggcacaactcagcctgtgtgtcccagcagtgacgtcttcttgaactgatctgggggctggggacaatggtcagaagatggggctttctggtaccctgggtagtgaatcctgcccgtcttgcctgaagcccttttcctgtttttaagctgatctgtcatcccttagtttctcctgagaccccagaatctcagacctacttgtgtccctctgatcctaatccctacccacagagcttcgagaagctctgggcacacaggcggaaggcactgggcaggggtggggcctggggctagaggggtatgagcgaccctcgtgcc

SEQ ID NO: 133175 - DNA, 679 bp, Homo Sapiens
gttgcttctggtgagaaggacatcccattgacccctggccaccaggtccagtattccatccttccttctgtcccagcctatcgccctccccaccaggcccacccccacaacttctcctcaagggaggttgctcccgcagctggagggcttgcacagaccagcagtcacagaaatcattcttcctgctgtactgggccttaactgcctgcaaatgtccagcactactgcataggatgccagagccaccgaaggaaaacacagccaagtttaataataataaaaggaaaaatctcagcctgcagaactctggttttgacccaccatcggccagatgcacatcttcagggcctgttgagcaccttctgaaaagcagggctcgtaatagactccagcacattccatcagagtcaggaaaactgcggtgagtcccagagaatctagggtgcagggcagggagcaggagtcataaggagtgataacctaaactgtgtgtagtcagcggggagggtcttatgttatcaggtgaaatgagagccagtaagttagttgatcctgtcacagatataaccctgataacaccccatagatacgcgacacgtgtgtcctgcccctgctttccccatccaacatggttcttctgttccacagacattaaaggggctttctgcatttaaaaaaa

SEQ ID NO: 133176 - DNA, 620 bp, Homo Sapiens
ccttttaaaatacagatatccaattgtctcagcaccatttattgaaatgactgtcttttctcctgttgaattatctttgcacatatcttgaaagtccgttggtcgtctgtgagggcttatttctggactcttaattctgtcctgttgctgtatatgactgactatccttgtgtcaataaacagtcttgattattgttgctttacagtaagttttgaaactgggtaaggcaattcctccaattttgtgcatttcaaaatcatttaggatcttttagacattttgcatttccatgttaagttttaggatcagcttgtgaatttaaagaaaaacctttctggaatatcgctagggattgagttgaatctatagaacaatttggggagaattgccatcataacactgttgaattctctaatccatgagcatggaagttctcatttagatcctttgatttctctcggcaatattttttcaattaaataaatgtattattatattctttttgacgctattctgagtttacttttgaaggtatcgttcattgctaatataatgtcaatttttaatattgattgtgtatcctacaaccttgcttgctgaattaggtcttgtagcttca

SEQ ID NO: 133177 - DNA, 1744 bp, Homo Sapiens
  misc_feature (87)..(96): n is a, c, g, or t
tttttgtttttccaggccagaatttgtgcccccccgacaattttttctggtaaggggaagaaggtttttttgggcccatccactttnnnnnnnnnnttggcccctgggcattgccccaacaaaagttggaagaggggaaaaaataattttcaaggtgaacccagggtttttaataaaaatttggcacaaaatctgggattggggggcccaatttttgtttccccgccccaaggaaggggcttaatttcttttttcccaacctcggctggggtttccccagacctgagcttccccttcttaatttactttttttccggggaattaaagggtaatggccccaaaggcccggaaagttattttgggggttttcaaattgacctttaattccttctgaaaagtaaagccatattttcaaatgtttttctattgcgggcatcttatgttattatttctttatttgagccaaagcaatgttattgatgaaacccatttttgaaagtccaatggagtcttcgagtccatttaacatcttctgaactacttctatgttttcaacatcacccttcatggccaatgcctggatgacacgggtcactgctaacctagaaggggtctgctgctgatccaatactgttttcagtgttgtcacagcctctttcaaataatcccgcctaacttgcgttatgatgaggcggctgttggcagcatcgttcagtgtgaagcccttgatgtgggtctccgcgaatgctttcacttccattgcttgtgtaaaataatcttctgacatcagtaatttaatgagattgctgtaggtttcagcattaaacacaatgttttgctcttttgcattcaggaaaatatcatatgccccttttttttggttcaatcggcaggcaatcaatatatctttctggaaatcaggttctgtggttgaggctgacgaagaattcagggaatgtttttcatcttcataccacaactcaggtacgtcaaacggaacttcctggttaccctctctaaggatttctgctaataatcttaatgtcttttcacgaggaataacattttcttcttggattttattccagactgcatcagctctttgccagtcaccgtttattttatacagttttagcagattgtagtacatctggtctctatcacattcaaatagcttctgtgtcagctccactaatttttccagagtttcaacctgattatttgcaacacatctgtcacaaaaccactgaagccttgcagatcgagctctaatccctggagtctcaatgatcttcttggcctctttgtaatttcctgtttgtaggaaggcaaagaagagatcatagagcatcaccatttcaccttgttcttggctcacaaagtccattgctttctgaattagatcagtctcgcctttctctaccagtttacacaagacatcatgaatccttggtaatactttatacttttcatagcagtcaatggcgacctcaagagcagtagataggtcgcccttttccaagtgtacagtgaccaatgggaaacttatgttggtggatggttctgctaaccctagagtcacgatggcttcatgcaactgttttactgtttcaatttcacctcttaaagctgcgccatttagcatgtggaaaaaggacaaggctgttgtatctttgataagaacatccttctctcccggccgtaatggccgaattcccgggcatatgtccggtaccgtcgactg

SEQ ID NO: 133178 - DNA, 558 bp, Homo Sapiens
ttttaggctttctcttgtctttattctggggaggaggaatcctcctcatcatcttcctcatcttcatcattgaacgagcagggggtctcgcctcgggactcggagcagtgagaggccgcactgctggactggtgactgtttggggccaggaactgcccagttgctaaggccacttctgcatccaagcataatccttggtttacacttgactggggtaaggtggcaccagtggtcaggtctaaatttgaaactgattgggtagagttcagaagtagtccctgatttaaccaagaaggtcctgtggagatatctgtgatataaccttctaaagcctttggcaccagggatttcgcaagtttcagatcctccagagagcatttgcctgactccaggccaaacgacattcccatccgctttagtacttctatgtcatcatggatctcaaaggtgttgtcaaaattgaaaagatactcaaacttgtcactggagatgctgcaatctatgactgtttttctgcttgtattgatgattatgaatggcagctgaatggtagagttc

SEQ ID NO: 133179 - DNA, 1376 bp, Homo Sapiens
  misc_feature (406)..(406): n is a, c, g, or t
agagcactgagtttaataaatcaaacttagaggtggttgatactagtacttttggaccggaaagtaatatcttggaaaatgctatttgtgatgtgcctgacccaaattcaaaacagttgaatgctatagaaagtactaaaatagagtcccatgaaacagcaaaccttcaggatgacagaaacagccagtcaagtagcgtttcttacttagagtcaaaaagtgtaaaatccaaacatacaaaacctgtaattcattctaagcaaaacatgaccacagatgctccgaagaaaattgttgcagcaaagtatgaagtaatacatagcaaaactaaagttaatgtcaaaagtgtgaaacgaaatactgatgtaccagaatctcagcaaaattttcataggccagtcaaagncagaaaaaaacaaattgataaggagccaaagattcagagttgcaattctggggttaaatctgtgaaaaaccaagctcattctgtactgaaaaaaacattacaggatcaaactttagtacaaattttcaagcccttaactcattctttgagtgataagtcacacgctcatcctggttgcttgaaagaacctcatcatcctgcacaaactggacatgtatcacattctagccagaaacagtgtcataagcctcagcaacaggccccagcaatgaaaaccaatagtcacgtgaaggaagagcttgaacacccaggcgttgagcattttaaggaagaggataaactgaaactgaaaaaacctgagaagaacctacaaccccgccaaagaagaagcagcaaaagtttttctttagatgagccaccattgttcattccagataacatagctaccataagaagagaaggctctgatcatagctcctcatttgaaagcaaatatatgtggactcccagcaagcagtgtgggttttgcaaaaaaccacatggcaacaggtttatggttggctgtgggagatgtgatgactggtttcatggtgattgtgttgggttaagtctttctcaagcacagcagatgggcgaggaagacaaagaatatgtctgtgtaaaatgttgtgctgaagaagacaaaaagactgaaatactagatccagatactttggaaaaccaagctacagttgaattccatagtggagataaaacaatggagtgtgaaaagcttggattatcaaaacacacaacaaatgatagaaccaaatatatagatgatacagtgaagcacaaggtcaaaattttaaaacgggagtctggtgaaggcagaaattcatcagactgtagagataatgaaattaaaaaatggcagctagctcctcttcgtaagatgggacaaccagttttacctcggagatcctcagta

SEQ ID NO: 133180 - DNA, 1185 bp, Homo Sapiens
agtggaaaaatctgtttatttctaggctcattggtgggcagtattacttatgggaattgctctgatcatgctaatggctggatttattaagatatgcagtgttcatactccaagtagtaatccaaagttgcctcctcctaaaccacttccaggcactttaaagaggaggagacctccacagcccattcagcaaccccagcgtcagcggccccgagagagttatcaaatgggacacatgagacgctaactgcagcttttgccttggttcttcctagtgcctacaatgggaaaacttcactccaaagagaaacctattaagtcatcatctccaaactaaaccctcacaagtaacagttgaagaaaaaatggcaagagatcatatcctcagaccaggtggaattacttaaattttaaagcctgaaaattccaatttgggggtgggaggtggaaaaggaacccaattttcttatgaacagatatttttaacttaatggcacaaagtcttagaatattattatgtgccccgtgttccctgttcttcgttgctgcattttcttcacttgcaggcaaacttggctctcaataaacttttaccacaaattgaaataaatatatttttttcaactgccaatcaaggctaggaggctcgaccacctcaacattggagacatcacttgccaatgtacataccttgttatatgcagacatgtatttcttacgtacactgtacttctgtgtgcaattgtaaacagaaattgcaatatggatgtttctttgtattataaaatttttccgctcttaattaaaaattactgtttaattgacatactcaggataacagagaatggtggtattcagtggtccaggattctgtaatgctttacacaggcagttttgaaatgaaaatcaatttacctttctgttacgatggagttggttttgatactcattttttctttatcacatggctgctacgggcacaagtgactatactgaagaacacagttaagtgttgtgcaaactggacatagcagcacatactacttcagagttcatgatgtagatgtctggtttctgcttacgtcttttaaactttctaattcaattccatttttcaattaataggtgaaattttattcatgctttgatagaaattatgtcaatgaaatgattctttttatttgt

SEQ ID NO: 133181 - DNA, 806 bp, Homo Sapiens
  misc_feature (746)..(746): n is a, c, g, or t
  misc_feature (791)..(791): n is a, c, g, or t
tttgcaagtaaagattacttttaattataaactggccataaacccaaatgaggatatagtcattgtagagcaaaatgatacaatgcacccaacccgatatttacattaaaatatttccagtcacattaactttcaaacaaaaagacttaacgaatttacaaatttttccaagacgtgagaagtgaaaaatgtttttgaatgccatctgagcaggatagtaaaatcactagaatagtctttttaagttctcagttactggactgaaaagataaagctgatgaaaattggtgaacaatttgttcctttccataactactatcagattaatttaaaaaagattatttttaaatctatgccaactatgggagtagatcacaagacagtcagttccagtagcatgtgattaggtggggggaggaaagggggttataaaggaatatttctttgtttgggtgacacaaagatgaatggtctattgtcttactgtctgaaaagaaaaaacaactcaacagtgccacctcctggagaaattaccaaatacacttttaaacgctattaaatttgttccaattatctgtaccttcactttttagtatgttgcttttagttatcacaggcttacagtacttatatatttccttcttaaaactgtatcagcttctgggacatggtaacttgcatatggcactgagaaaatgtttgagtgaatatatttattatttcacttttttaattggaaaccctangaactatatttcattttttgtctaatgagattgacattaaatatnaaagtggcactgtca

SEQ ID NO: 133182 - DNA, 1014 bp, Homo Sapiens
  misc_feature (257)..(268): n is a, c, g, or t
  misc_feature (301)..(884): n is a, c, g, or t
  misc_feature (887)..(887): n is a, c, g, or t
  misc_feature (889)..(890): n is a, c, g, or t
atggttaatatatttattcattcattgagcaagtatttattgaacatctgccatacataaattctatgatggattgggaataaacagcttatccacaagatgagtaataaacagcttatccacagggaatttatacttaattgctggtgggatatgaatgcagttaatgaaagcatagaatttgatccctatcataaaatgtattcaaagttctctatgaacccacagaaagagaattattcccagcagcaagaatnnnnnnnnnnnngcctacagccgcggccgctccaacatcagcttnnnnnnnnnnnnnnnnnnnnnnnnnnnnnnnnnnnnnnnnnnnnnnnnnnnnnnnnnnnnnnnnnnnnnnnnnnnnnnnnnnnnnnnnnnnnnnnnnnnnnnnnnnnnnnnnnnnnnnnnnnnnnnnnnnnnnnnnnnnnnnnnnnnnnnnnnnnnnnnnnnnnnnnnnnnnnnnnnnnnnnnnnnnnnnnnnnnnnnnnnnnnnnnnnnnnnnnnnnnnnnnnnnnnnnnnnnnnnnnnnnnnnnnnnnnnnnnnnnnnnnnnnnnnnnnnnnnnnnnnnnnnnnnnnnnnnnnnnnnnnnnnnnnnnnnnnnnnnnnnnnnnnnnnnnnnnnnnnnnnnnnnnnnnnnnnnnnnnnnnnnnnnnnnnnnnnnnnnnnnnnnnnnnnnnnnnnnnnnnnnnnnnnnnnnnnnnnnnnnnnnnnnnnnnnnnnnnnnnnnnnnnnnnnnnnnnnnnnnnnnnnnnnnnnnnnnnnnnnnnnnnnnnnnnnnnnnnnnnnnnnnnnnnnnnnnnnnnnnnnnnnnnnnnnnnnnnnnnnnnnnnnnnnnnnnnnnnnnnnnnnnnnnnnnnnnnnnnnnnnnnnntgncnngctacggatactgtcccgcttctccttcgggagcgtgggcttctcatgctcagctgtagtatccagtcgtgtagtcgtcctcagctggctgttgacgaccccgtcatcgacgtgcgctacggta

SEQ ID NO: 133183 - DNA, 640 bp, Homo Sapiens
aaattccagttattttattttttagttcggcagagtggggtaactaaagttatctttccatctattttaagagtgtccacaattgctttttagaacattttaatattaataatagtgcctctaatatctttgtcatttaattccaaagtctgtgtcatcttaatagtgtctgttgattgctttttgccatctgagttgagatttgtctaattcttcccatgccaagtaattttgggttgtgtcctagacagttcgactattatgttatgaatggggtcttgtttaaatcctatgggaaatgttggtatttttgtcttagcagacaataaaatccaggtaggttcaggcttaagttccaacccgccatctttggtctgtggtttcaaggtcagttcaattttcagggcctttgcagtgttgtttacatctgtccacaaatgtgctactcagtgactgcctggaccctagacggtggtctgtctgttacttcagttctcaaagtcctttgtgtgctgattagaatcacattcattcgtgtgcagctcacggggagccaggatttcataaccaccttgaagggttgctttcccaaactccttgccctctgtgctcttgtgagtccttgctagttccccggccc

SEQ ID NO: 133184 - DNA, 894 bp, Homo Sapiens
actggaagacccatcagacttatgcttcgttagaatatagttctgaacaattaaagcagataactgcactaaattggacacagattcacattatctaaagccatatatcagaaattcacataattctgaggggaaaactcaatatctagctaacaatttgtcttcctgtcaaaagcgagtcaaagaggtaacaattacatagctttgtattatagatcagaagaatattcaccaatatatcaaagacttcaaaagtcagccaacattgcattgaattgacacacacaaaatgttacaaatgaccttgacccttaaaaataaattcttacaaaccaaataataccacacaatgcactacatacatctaactatacataaattataattaaaacacaactgcatatttcaaatgcttggcagtgactcaatcttacattacagaagttagtggcagtgtggaggctggcatggctcaactccaatccattgtacaagcctaggattagaaacccatactattccattggtagactggggaaatggcataccatattaaagatctggtctaagatttttataaagtttgatttaagcattaaataaaaaggcataccaattactgtgaagtacactggaaggagagtgagttaatattcagacagaagaactttttagccgtaatactgaaattcatcgttgttctaatgatttgtcatctctgctctgaacttttcgcccaagataacaatcataaatattaatttgacaactaaaacaagaaatctgatggtaatgtggtgtgatttcattattcatagtctacagcacgttgcagcagaaacaagctccaatgacacagtccttcctcacaatcagatatcaactcgaaacagg

SEQ ID NO: 133185 - DNA, 709 bp, Homo Sapiens
gtcggttaatttacactttatttttttaaaaaagttgatttaaaaaagaaacaacacaagtttagaatccataaaatgtcagcaatgctgatgtgcactggactgaaacatcttgatcatcttctgatagaagtaatattccatacaaaaagattcttagattccattttttgcttcattattgtttgtggcttgctttctttgagcaataaaggggtacatacacttgtccgctcctaggaaccgatacatgcacacaactgcttcaaatggtaggatgctcttcatgaaggtcacgatgtacatgaggcggggagtgcagatcatgggctggtcagtgaggatggccttcatggcctgcttcacacagtaatcaggcttcagaggtggcagaaaaggctcaatttctttcctgattcggcagcctctgaacatgccagtgtctacaagataagggcaaaccaaggttgttttaattccatccttttcagcagcctttagttcatggctcagggattcatgaaaacccacaactccaaatttactggcacagtaatcctcaactccggcagtactgaacaatcccaaggaacttgcaactgtcacaatatgaccatgattaatctccagcatcgtaggaagaaaagccttagtggtccagaagtgtgcatggcaattgaccatcatggttctctcaatgagctcatca

SEQ ID NO: 133186 - DNA, 1087 bp, Homo Sapiens
  misc_feature (884)..(902): n is a, c, g, or t
ggacaggccacacatattttttgtcgttatttaaatttttagttgtactacatagaaaataaactcattttaaaaagttatttcagtaggcaatgcatcttcatgacttttacatatgagttttattttttattacttttgaagaaaagtctgtagaaacctacttttcaaggcatctgacccaaccattgccttggatggcagcaatccagctcaggcacagcatcaccgccgcccggccgggaagaagacgccggctcgggcagcccgcagccttcgagagaagatgcctgagaagcgcggcgtcggcgtgggtcctgcgcagcctgccccgcgagcgcccgctgcaagtgcgaggaaacccgcggtttctccagatacagttaaactgttagctctctctaggagtcacagaagatgaaacagtctcatgccaggaaagcaaaatccctggaggtgaagcccctccatccatgtaacagttaatactgtatgctgtgattcactgtgtctatttgccatcgtctagtagagtattcaccaagctagcaactcagttgagctccaactcaaccaatgaattgcctgcctgtcacaacgtgttggggtaccaacttgagactgcaattttttctatgagtctagttactaggcagtgtagttagctgattgctaatagtaccaatcactaaccacacggccaggtaaaaagatttgggaattcgtccaaatgagctgcctgtgcatcatcaatgtgcgtggggaagaggggtgttggaaaatgctgatttcatccattgcctattaattgctcagccaaaagaaaagaatcaacatttcagctactaagtttacaatgtatgtaatgtgtatgtatgtggggnnnnnnnnnnnnnnnnnnncaatattccttcaggctcttaaccaaaattttagatataagggggaatatgatttttttcttagctgactgatgtatgttattatatgaacatgtgattattaacttcttgagactatattgttagtaatattttgaaagtaatattgttagtaatatttcgaaagaataaagtgccataaagac

SEQ ID NO: 133187 - DNA, 2010 bp, Homo Sapiens
ttttttagaaatcaggttttttttatttaatacattctaatcaaatagtaacagcagtaaataaacactttgaaaaacaggcaggtatccccctgtatctggaagaaaattaagtcaaagtattctacacagtagaagggagacaactgtttatgtccatggttagacaattcaaggacaacttggatatttctaaagccatttccaaaaaatcaatggcaacaggttgggacacagctatttcaaagggtagaatgcctatacctacattggtttttattaacggggattgagttgcacctgtatagcatgatattcttgtctttagctttaaaggaaaagagaaagtcttttccatttgcaccagtttgaaatatttctgaaataaggctcccatagaatggattactacagtactcattcacatgagagttcctacatgtagtaaaaagacaaatacaggacttcatggtcactttttttggttgatttggttaattgcataaaatgggataaatactcacatacatcatctgtttaacaaaactcctaggtacatcagaatgcaaaatataaaatgcccaagagactctgatcagcaggcatatcaaattgcagtgaggcctgtgtcagcttggttccttcccacttcttcagtattcctatgaggagttctttctctcctactggagcctggacctttgacataatggaaaagaacctaagaaggcaaggcattctgataaaacgcgacttcagcctttacatgcgacattttatttgtaatctaaaaggatcaacaggtcttggtcagccttaggaagggaagcatcactcaggtaaaagtatctggaggaactttaaacacctagctacctcttcaagctgttaaatttaaattagattagcttcagctgttcttagaaagcattccatatagttatccagagcactcaagttttggttctcttttacatagctgcattcggagatactctatgtgagacatgtttaaaaaaagagaaacatttatacctggaatttatattcttccaagtaatcttttagtcttgttggtaaaggcagtccccagatggcaccggtacatttgttaatggtgagcctacagagatgctgcagagatggtgctgacgtgtagagcggtttggtcagataaaggtgaacagtgccgttccggggggcttctggacctgtccgcttatccttgcacatctgaacatagtagtcgatcagatgaaccacactgtcaaattgtttaagcttggatttgacacatatgatagagtccaatctgaattttccgtcttggtattcgattcgaagattagttggtccagctgatgttttaacagatattgttagtaggtagtctgaatgcgagctatctctaatcaagaaagttccttctggtgcctcttttaatttctctttggcttcattaacagtcatacttccccagtaccatcctgtctgaccgagctcccgcagggccttcgccagacgcgccgcctgcggggatggctcctccgccgaccccgcggtcccccactggctccgcgtcccttccccgccattcccggagggctcaaggcaccgcagggtcatgagagaagggtcaccgcggcaaagacaggtggccgcccgagctggggtcagagaagggttcgcgtccttccttgaagtcagtgcgaatcccaaaacgagtccctgcggggtgtccgaaatggtggcagagagagaagggatggggctctttctccccagatcctggaggacggatgacaaagtccctcgcagccgcggtcacccactgatcgcctgccgcgggcgcccgagctgcgggcacggggtatcctgaggctgtgcacccgggaccccggcgcgcactgtccgcgggccacgcggtgagggtggctgcgggcgagagggctcatgcttcaggggaagcccaaggcccgccagccgcggcatcccgggaattccggaccc

SEQ ID NO: 133188 - DNA, 1109 bp, Homo Sapiens
ttatggaataagggttatctttatttggattgcaaagtataaatatgaaccaggtttggaaatacaagttgtaacagttcagaaatggcaccagaaacttccagaaaggaccatgacagcataccttcatcgttttggtgaggtgggtgggattatacaaagccttccccacctccaaccttctcggtagcaattggcaggtaatcagttaccaagaacagtcagctccaatgttccctgttccttctcagccttttgctttgctaataccttctccagactgtcctctgctgcactgacccctgcatggagtagcaccagaagaatggcaggagttagagaaatgtcttgacacaagggaaagtgagttcccacgctgtgggcctggggccatgggggtgagggaccaggaaagctacaggcatggaagcccaacctcttctgagacttggcagggagaggacacggggagacactgatatctgttacactttgacatcagcaccttgggctttcaaaacacaaatggtagacaaaatcgcctaggcaagactgaagtccaactcatagagtggctctgaccaagttaacccctacatcctgaccatacagagctcccgcagtggcactctgaccacggaagatctgcagaaatgtagacagacaataaattactacagatgggtcacagaaccatcctagctttgtggccaaggtgggtggcactaagccagattgtggtgatgaggagtggagggccaggaaattgcccaagtaacagtctaggcacttgaaatattattgttagattgttaaaaactaaataaatttacatacatagaattaaataaatatataatttaagaggcatttaccaaccaccaccaccaaaatagttgttatttttccatctgggtagaagtccccaaattcagttctcaggcttgtggtatttcacagttaactcatcaaatccagcactggagggtccccatggcagatcccttggtggtacttgagtacatggcttctctatctttgttgctttcttcccagttcaccaatctttccttcgtgctctccttcttttctttttttcgccggtcata

SEQ ID NO: 133189 - DNA, 2298 bp, Homo Sapiens
  misc_feature (447)..(455): n is a, c, g, or t
  misc_feature (543)..(543): n is a, c, g, or t
  misc_feature (634)..(677): n is a, c, g, or t
  misc_feature (789)..(828): n is a, c, g, or t
  misc_feature (865)..(896): n is a, c, g, or t
  misc_feature (947)..(976): n is a, c, g, or t
  misc_feature (1003)..(1026): n is a, c, g, or t
  misc_feature (1821)..(1831): n is a, c, g, or t
tatcgggcgcaaaagaggacgcgcgtgcatgtacaagaacaaacatttaccgggtgtgtacaaacgcgcaagtcgcggggttggtgggggggacactggcgtgtctcttatgtcgactggtcttagtggttgtctcgtgagggcggacattccgtgggtaaggaaagcagaggtgtgcggcggcgcagaatgtgcggggtgtgcggggaattcgtcgtgagaagtggacaaaagtgcagggggtgacccaagaggcagaggtgaatagttgggtgaccgcctgtaaatagaggcattggcataaggggtaaggttgagggggacgagggtagaatatgggggaataataccacataactttagtgggccggggggcctataatcaaatataataggtcgatgaaagggcgcgaccggtacgggggaattaatggcgataagcagaannnnnnnnncattatgtattggcgcggtgactgttcgcttttagggcgcggagcgcgcgcgggccatacatcaagagtagtcgagcggaattatggnggtggacaatagtaaagagccgctgcgaaaattgggaattattaatgcggcaagatggcgtgaatcaaaaggcgagaggtagatggcaagnnnnnnnnnnnnnnnnnnnnnnnnnnnnnnnnnnnnnnnnnnnnataaattatacgggagggggtgtcgaagggggcgtatatgggggatctggggagggacgggcattcgctgggttttttgttgggtttattagggaggctttaaatggagtcnnnnnnnnnnnnnnnnnnnnnnnnnnnnnnnnnnnnnnnnagtctgaaggcggtcgcgcgagttggtcttaggtaannnnnnnnnnnnnnnnnnnnnnnnnnnnnnnnaaagggtatgggaaactagggaattaaaagcgcgggcgtaatgagaaagannnnnnnnnnnnnnnnnnnnnnnnnnnnnnagaaacagagcggggtatgaaaaggcnnnnnnnnnnnnnnnnnnnnnnnnagtaggagagtgtatttcttttttagaggttcgcggggaatatggtaatcgtgaggagagggggggtgttttttgttttgtttgtaggcagagttcttaggatgtatttttgttcacctgaaaaataaaactttttaaaaatatacaggactttttgagtacaggtatatcttaaatggctgaattataaataatgtctctggtcatgttcacagctagggctggagcaaatgtcccaattccagtgaaggctttggagagtcaggaggccagcagctggacctatgagtggcctctctagactctctgatccatcccaaagaggatttaaacagtccagaaagcagggatcaggaagaggacagggaagtggactcccagatgttctacaagttcaaaggattcttggaataagagatcaatttacaaattattaaaatataggactaaaaattcacacagtaaatataaattacaggctattattgaagttgtaaagtggcattttatgtttcttccccatctcacaccaaaaatgtaaaggcctcataggcttcccaatgactgaagtcctagtcagctgctaagaaatctgctctagccaagagaccctggaggtgttaccagcctgctggtaggctgtgacagctcagttgctattatcgtgcccacaacaggacatggcttaaagcaaggctgttgtcctgtaaacttggatcagagctaactagagtataggccagaaaactggagagacaaactgtttcaggactcaggtgggtaagttgtcttttnnnnnnnnnnntagtgcctcatttcccaaaatggaaacactaagggatttgatatctcatcactacccacactcaattgcctaaaagcaaatggcagaaggaaatggaatccaaattgaggaagtctagttcttgctaccccagagctacatgtatgtcatttctcttgatgtttctcatctcctttatacaattacaggctgcatttaagtagggcttatcgggaaaagtaaagacagccaattcaaccttccctcggctggtctattagctggttctcaaagcacaatcctgagtgtgaagcccaccttccagcctttctgattctgtagaataactcaaaaccagaggatgtgtaatcaaagctctggtgttacaacagatttcatcccaaatcgccgggctttgtcactacaggctcaggaaagagggaaggcaaaagtgattgccggaacaagacaacattttgaggagcagg

SEQ ID NO: 133190 - DNA, 885 bp, Homo Sapiens
ttttttttaggcagagttcttaggatgtatttttgttcacctgaaaaataaaactttttaaaaatatacaggactttttgagtacaggtatatcttaaatggctgaattataaataatgtctctggtcatgttcacagctagggctggagcaaatgtcccaattccagtgaaggctttggagagtcaggaggccagcagctggacctatgagtggcctctctagactctctgatccatcccaaagaggatttaaacagtccagaaagcagggatcaggaagaggacagggaagtggactcccagatgttctacaagttcaaaggattaaaagcttgctcttcctaaaagaattctgtgaggggaaggccaggattgaagcacagcagcattgctctttcccttccttcctccctggcccatatccagatactgagggctgcaacaagaagcctctttggtgggggcactaggatggaaagaagaggggatgagtacattccccaccctccctaaattgtttctacttctcctaaggctttccacagccatgtcaacagtctaagaatgattatactcttttgtgaaagaacgtcataaacttatatttcagaaacaggaggggaacaggagaaagtgagtgatttaagaagccgtgtttgtgcccttctggccaggtgtactttttgggggacagcaaatagcccttgcttgaccccttcagtcagtagctacccagggtgtgggaggatatacatagaattctatgtgattatagcttctagtgcatatgtcaacaactatatacaaggatctagaaatttaatgcatctctggccactgcaactaggttgacgtacctgagctccactacttttggtgccctc

SEQ ID NO: 133191 - DNA, 1764 bp, Homo Sapiens
  misc_feature (162)..(668): n is a, c, g, or t
  misc_feature (715)..(777): n is a, c, g, or t
  misc_feature (1201)..(1209): n is a, c, g, or t
  misc_feature (1369)..(1369): n is a, c, g, or t
  misc_feature (1474)..(1529): n is a, c, g, or t
  misc_feature (1534)..(1534): n is a, c, g, or t
  misc_feature (1538)..(1538): n is a, c, g, or t
  misc_feature (1540)..(1540): n is a, c, g, or t
  misc_feature (1544)..(1544): n is a, c, g, or t
  misc_feature (1552)..(1552): n is a, c, g, or t
  misc_feature (1612)..(1612): n is a, c, g, or t
  misc_feature (1627)..(1627): n is a, c, g, or t
  misc_feature (1635)..(1635): n is a, c, g, or t
  misc_feature (1646)..(1648): n is a, c, g, or t
  misc_feature (1677)..(1677): n is a, c, g, or t
  misc_feature (1704)..(1705): n is a, c, g, or t
  misc_feature (1720)..(1721): n is a, c, g, or t
tcaacgccagctgggcgaagcctaaccgaatggtaccacgcgtggtttgagaagcccagctcccgagggagaaagcgaccagttcccgtaagcgcaggtcggaacagagacgcacggggagtcacaggggaacgcttggtattttatagtctgtcggttccnnnnnnnnnnnnnnnnnnnnnnnnnnnnnnnnnnnnnnnnnnnnnnnnnnnnnnnnnnnnnnnnnnnnnnnnnnnnnnnnnnnnnnnnnnnnnnnnnnnnnnnnnnnnnnnnnnnnnnnnnnnnnnnnnnnnnnnnnnnnnnnnnnnnnnnnnnnnnnnnnnnnnnnnnnnnnnnnnnnnnnnnnnnnnnnnnnnnnnnnnnnnnnnnnnnnnnnnnnnnnnnnnnnnnnnnnnnnnnnnnnnnnnnnnnnnnnnnnnnnnnnnnnnnnnnnnnnnnnnnnnnnnnnnnnnnnnnnnnnnnnnnnnnnnnnnnnnnnnnnnnnnnnnnnnnnnnnnnnnnnnnnnnnnnnnnnnnnnnnnnnnnnnnnnnnnnnnnnnnnnnnnnnnnnnnnnnnnnnnnnnnnnnnnnnnnnnnnnnnnnnnnnnnnnnnnnnnnnnnnnnnnnnnnnnnnnnnnnnnnnnnnnnnnnnnnnnnnnnnnnnnnnnnnnnnnnnnnnnnnnnnnnnnaagaattcggcacgaggccgatgttggagcggccgcggctgtaggcnnnnnnnnnnnnnnnnnnnnnnnnnnnnnnnnnnnnnnnnnnnnnnnnnnnnnnnnnnnnnnnctctcctcgtggtgactgtcatgtgattgtctcagtttctggaccaaacaaacacactaataattttaaatctgaaacagtgattgtgcctttcggctcatgtatgtacagggtgatcagaagtggtacctgttagcaaaagtgtcacgatgctgcacctctaccgaaactgatacccacgaactacggaatctaaacagactacaccctgtaactgcgtattactgtccacaatggaatctccaaagacaaaagagtatgaaatttatctgtagtgattatagccaccattttgaattaaattttacactctgcgctcaaataaattagctcaggccagacttagttgggacctgagagttaagtgctggatggtattatttcactttgatttttgataggaatttcttttattccctcatgnnnnnnnnnctttaaaaagtatttccagtgctcactcctcctcttttatcccccctccccaggcgctacacacaaatcacccccaaagtcgtgttttacatgcacctgtatttgcttaaacgaaaatgtcagaagtatttgtcctacaagcagtctgagtggtttgtcncgcagctggtctggtgacgctggccctcgcggatgtctgcgtgtcgctcacatgtgaatgagtgaggtaattggatatgagggcttctttcttatcttcgcttcnnnnnnnnnnnnnnnnnnnnnnnnnnnnnnnnnnnnnnnnnnnnnnnnnnnnnnnngctantcgntnttgntcttttgntcctttttgacactttgcgtctcttttctgcgtagaccaagacaagtgggtatattttangggacttggacatgngtgtgtcngtcatcatcgnnntgttgtttcctcggattttcagcggcttnatcactcaagatgaggactccgcttgnncatgcattgactaannatgtagtttctgcactggtctctaagcagcagcggaattcgag

SEQ ID NO: 133192 - DNA, 1090 bp, Homo Sapiens
  misc_feature (919)..(936): n is a, c, g, or t
  misc_feature (990)..(999): n is a, c, g, or t
  misc_feature (1045)..(1045): n is a, c, g, or t
tttcttttaaaattttttttattgagacacttgtagggattctgcaacatttccagttgggaatctttatttccaactcttagggtggctaaacccttttctgaatgccaaaaggcacactctcaccaccttaatgaggaaacacacttatctgtgtctgttccgatatccaactgggacctggaccccaagccccgtggtgtcttgtacaagtctcattagtcctccacgtacaactcagaagcctgttaatcagggagggtaatttccaaataaatgtgagctggcctaaatccagctggttatttctgatttggtaatctgtagtatcttaatttggggacatcctgtcctaagttttggctggtgcatgtagaacttataatctacctgtataacaacagatgcaacatagctccgttccagccccaaattccttaaaggttctagtctactcttgcacttcttcctgtactgttgttgagaagcttacattttagggagaggctggtcaaatctctactctctggtaacagcattaacaagagtctttcttttggaaacagactcagaagttatggacatcagccacttcagacttctttaggccagtatccttgaggtgactgaccagcctcctcatggattggagtttcccatcattgttttaattgctggaaatgttggcctaattctgcttccttgtaactttctgctttttagtacaagttctcttgggaatctacgcatggtaaaaataccagctccttccatctttacagccctgtcagtgctgtgctcttcaaagcctttcccttaatagcaagagggccaagagtggcaaatagaggcagagccgcctgcattacagttgttcccatcgtaaggtgaaaacgaacgtttaacttcatctagaagnnnnnnnnnnnnnnnnnncccatcaggctattaagattctgcttgcaaattaatgccaatccatgtttacannnnnnnnnnatcattgagacatttacatatatatgcaggctctgctccttaacanaaaggtgaactgaaaaactctaagggtgtttgtttttcagttaaa

SEQ ID NO: 133193 - DNA, 1383 bp, Homo Sapiens
  misc_feature (433)..(536): n is a, c, g, or t
gaagactaatgacatttttaatgacagattcaaatatataaggaaattgcccccacagggaattgggaatttatcaagctgccaatcacagtaattaccctgcaaacatatcagtatctgggtcagaaactcctttcagattttctatatgccagttctacaatgcctcaaaattttgatcccacaagtgaggcagatcctgttgtgaatgcctgttttcaattagtatggctgcatgagcacacactccagcaaaggtaagcagagcatgcttggtagcatgctcacaggagaatttggtgcaccagccccggagagcgcctagtgtgcaccaagtatgtgtttcattacaccgctgtattcccctcatgtaggaaagttgctgcagactgatacgtcaatgatcttacagtatttttaaagaaaagtaccnnnnnnnnnnnnnnnnnnnnnnnnnnnnnnnnnnnnnnnnnnnnnnnnnnnnnnnnnnnnnnnnnnnnnnnnnnnnnnnnnnnnnnnnnnnnnnnnnnnnnnnnagaaaagtaccatcctcccacagggtcaaatacatatgtagtcgatacaagatacttcaaaaaagtcttatacaatgagatttggttttgcagcttaaatttcttcaatttaagggtacatcaacaaggaatttattgaaatacagtgtatcatacaaatagaatattcacatgaaatgatcaaaggaaggggtaaggagaaaagtattaaaactgaaaatttacctagtgaataagtggacataacaattgagaatctatccacttcatgtcacttatggaaacaacacattaagattaaactacatgtttgctagagtaggagaaagtatataccacagggaccatcattactctagagtgggtctatgcataactcctcaaaaagaggccatcgttggtgtttatgtgctaaaagttgtgtattttggcttctgagaaccataaaattgactcaaagaatagtttcaaagagtaaaagaagaaatgcgtgacaattgaagacatggaattaaattggtttgtctctaactgcctcttagtaatcaagagttcttgcttggcaaaacctcataaaaacagatttaggatttaagacagtgtcagtaaattggtacaagcccatacacaagtcctcaaagtgatggacaactactcagaaagtaaaaaacctgggatcagtacaacgtgatttaaaaatgagaagtgaatgattattctggatttaattcttatttactaggctacttggttctttgtgtttagtagtaatttatctatttaagttcccataatagatgtatccagtatatagaacaatagctaaatactcagagaggtatggcca

SEQ ID NO: 133194 - DNA, 965 bp, Homo Sapiens
  misc_feature (51)..(51): n is a, c, g, or t
  misc_feature (65)..(65): n is a, c, g, or t
  misc_feature (108)..(109): n is a, c, g, or t
  misc_feature (123)..(123): n is a, c, g, or t
  misc_feature (132)..(132): n is a, c, g, or t
  misc_feature (145)..(530): n is a, c, g, or t
cgagacccgaggagtccagggaacgctgatctatgtctgcgggtcgcactntgattagctgattnttgtgctgtcaggggcgagctatgaaaacgcagcacgcgcctnntacgtctgcccctntgctgcctntgctcacatgtcnnnnnnnnnnnnnnnnnnnnnnnnnnnnnnnnnnnnnnnnnnnnnnnnnnnnnnnnnnnnnnnnnnnnnnnnnnnnnnnnnnnnnnnnnnnnnnnnnnnnnnnnnnnnnnnnnnnnnnnnnnnnnnnnnnnnnnnnnnnnnnnnnnnnnnnnnnnnnnnnnnnnnnnnnnnnnnnnnnnnnnnnnnnnnnnnnnnnnnnnnnnnnnnnnnnnnnnnnnnnnnnnnnnnnnnnnnnnnnnnnnnnnnnnnnnnnnnnnnnnnnnnnnnnnnnnnnnnnnnnnnnnnnnnnnnnnnnnnnnnnnnnnnnnnnnnnnnnnnnnnnnnnnnnnnnnnnnnnnnnnnnnnnnnnnnnnnnnnnnnnnnnnnnnnnnnnnnnnnnnnnnnnnaagaattcggcacgagggactgcccacagctgcccgagggggctgagttctgagtctgggctctgggtggcctgagcaagaaatctgctcctgggcacccgcggctgtgacggctcctgtggctgggtcctggaactcctcctgcctcaatcatcgattgggcagaaggtctggagcatgctgggcctggctgctgcctgggcacgagtggggatagcttcagtgtcacctcagtcaccccaggagccctgcgggatggctgccccacttcacagatggagtcttgagagagctgatcaagaacggggtgtgggcctctgtggtttccgcctcccggatgccccatgcctctgtgtctcaggggtgcctgggcctctgggctgctgccaagtccaggactaagtgttcttccagagccccagatgcatccttctg

SEQ ID NO: 133195 - DNA, 1001 bp, Homo Sapiens
  misc_feature (35)..(35): n is a, c, g, or t
gacaaggggattatagtttagaggcgcgttaaggnggaaagccaccagatgggggcaactgcccactttattagacaataggtggcccacaggtctcctcagggcccaccctcacagtagacacaccacacaggacaacagaaggaacctgctacccagtcctctgtccctgggattctggtcctgggacaggtgggaaagaggaaggtgggggctggcctcacagaggcctcataaatacaaggtcactggccagggatgcaaaggagcgcagcagcagggactcggggaggatgacctgtcctagagtggcccatgtcacgcagcctcctgtgtgggagggggcctcggctcggcatccaggcggcacaggggactgtcatacaccatctgcaggttcaccttgtggcccaccagctcccggatattgttgatgccatatttgatcatcgttgggcgctccagggagaggccccaggcaatgaccgacacgttctcgggaagccccatgggcagcagcatctctggacggaagacccccgagtttccgacctccacccacttcttcaggccttggtggtagctgaacacctccatgctgggctctgtgtatgggttgtaggctggcttgaagcggagttgcgtgatacccagcttggtgaagaactcccgcagaacgcccatgaggtggcccaaggtgagaccatgatccgccaccacgccctcgatctggtggaactcagccaggtgcgtggcgtccagggtctcattccggaatacggcggtcgatggagaagtacttgaccggagtgaagggcttcttctgggcaaggcggtagagcgcacgggcgctggctgatgtggtgtgggttcgcagtaggtttttccgggcctcgtccagcttccagttatacttgtacccctgtgagccgtagccgccctgagagtgggtccgcttgacccgctggacatagtccattgggagctgcagggcctccgcc

SEQ ID NO: 133196 - DNA, 650 bp, Homo Sapiens
aactccagaaaggaaaagctggcaatgcagttttattgaaattagcttgacatagttgctctggagctcacagacttctctcttcttccccctgaaggtatggagaggttcaaaggccaatatttccatagccgccaatacaagcatccagatggatttgagggaaaacgcatcctggtgattggaatgggaaacttgggctcagatattgctgttgagctgagtaagaatgctgctcaggtgtgatgctctctgcttaccatgtacctgggtcatgagccgtatctctgaagatggctatccttgggactcagtgttccacacccggtttcgttctatgctccgcaatgtactgccacgaacagctcatttgctgttgttattggtgtacttattcttgtaggctgttatattattccctaccgtcgaagttttacacaaaaacctgtctctgccatgcttacagagttaactcctaactctcctccaccttattcagaaaaattacttctcttaaaaggacaaacaaagcaattaagtcaaaacatattaaacaagtttgaagaagaattatgaaataagaggaggaattgtaaaaagtaaagtagaagttcctctggaaagacttgtctccccatttaattaggaat

SEQ ID NO: 133197 - DNA, 1294 bp, Homo Sapiens
  misc_feature (904)..(912): n is a, c, g, or t
agcctcgcgcgacattccctagccagcccatgcccctgacccggggcctccccgcccgccagtgcgctggatcccgagacggcgggacgcgaagtagcctttgtggacgtgggaagcgtttcagtgtttggttctgcgtggggagtcccacgttactcgatgactttcggccgcgaaggctttgaatggtgcgtttgaaaatacggaaactttcttctactctaggtggccatggctaccgggcaggtgttgttccagcggttcttttataccaagtccttcgtgaagcactccatggagcatgtgtcaatggcctgtgtccacctggcttccaagatagaagaggccccaagacgcatacgggacgtcatcaatgtgtttcaccgccttcgacagctgagagacaaaaagaagcccgtgcctctactactggatcaagattatgttaatttaaagaaccaaattataaaggcggaaagaacgagttctcaaagagttgggtttctgcgtccatgtgaagcatcctcataagataatcgttatgtaccttcagggtgttagagtgtgagcgtaaccaacacctggtccagacctcatgggtagcctctgagggtaagtgactaagacttctcctctgctgtccaagcgctttggtgcagggacagcggcatcttcagccaatccagtgcaggctctccaccgaaggctggctctagactggtggtacgcacatagcatagccatggccgactcctgctgtggttctctgacgattgtgcttcttgttaatcctctgtcgtgctttggtaatcgtattgattagagttggtaactgtcttgacttgaattttgtccctttaaaactgctgtacctgtatgataaagatgcagtacctttctcttnnnnnnnnntgctatggaaagctgtgagaattgaagagacaaattggctgtgtcagtgtggggttatgtcatgatttctagaagccctgaagttgctcttttgagcagctttgcatgacacgctctggtaaaaggtgtgcatctttaaattatttcatggatactttgaaaaatattgtatcacttcaaatacagcaataagtttatatgttctcaagatttcatttgtttttaagaattttaagttcgtggattaatatcactacttgaatactgacagttgttgattagacaccgaaaggttactgattgttgaatgtatctgtgttagagctgtgcactggcacgcttgcatcaggggctggggccacacggccgccacacagattcc

SEQ ID NO: 133198 - DNA, 1154 bp, Homo Sapiens
  misc_feature (1037)..(1071): n is a, c, g, or t
ttctttttttgcctttataagagaatttttattgttaattatttaccttaatagtttcagaaagaggaacaaattagctcagtccaacatgattggcagttggcatattctagtgaagcaagtgttctgactgctaaggatttaatttggataattttaatacttagccatctaacacttcaagcataacccagaataaatgcatcaccttccctttcactttaataccgcacctacctcacttcgatatagaaatatcattcaatatgatttccagaaggacaagtttcctggagaatacaggcatgaggacaatgcacaaaaagaaaaactcaaaataaaactctgtatgataatttactagtctaaggaaacaaaaccttccaatatattaagaaataaatccagttacaaatgcactaataggtctatgtgaagaggttctggtataataactgaaaatggctggctatttacaagatacacaagcagttacggtgcacctagcccagcaatggccctcagaagccaaaagtgttctctccgctgtaggccacatataagaatccatcttcatctttttccttctcgtaaagctgtcccatagttaggctggactgtgggactgtcttatccacaaacaggaagatcgccttttcagaaggaagctggatccttttcctgatgatccacatgaactgagccacagtgatatcagatggaaccaagtacttccgtttgtcaatgtcaacaatctgagagcctgagaccttttccacaatcaccggaaccctgtcgggatatttcgctcgaatcttcgcggactccacgcatctgtgttccagcgagtggtcctccttgaacatccacttcatggcggcggcgggaaggggacggaaccggctcgcggagccgcggagctcagcgcaccgagcacaacaacaacgacggcggcagcggcagcggcagcgacggcggcgactacccccggccgtaatggccgaattcccgggcatatgtccggtaccgtcgactgnnnnnnnnnnnnnnnnnnnnnnnnnnnnnnnnnnncgccgcttcctcgctcactacttcgctgcgctcgtcgttcggctgcaacgagctagcgccctatatgatctatacatcctttt

SEQ ID NO: 133199 - DNA, 863 bp, Homo Sapiens
  misc_feature (587)..(622): n is a, c, g, or t
  misc_feature (721)..(721): n is a, c, g, or t
  misc_feature (734)..(796): n is a, c, g, or t
ttttttttcaggaaagaacatgatctcccagtctgaggtgaccggaaaatgcttttaaaaattccctgctcctcccccgcatacactcttccatcacagtatttgacagacaaacatcatacaaacgaagtgtacgtcaagacgacctggcaacttctacacggaatttaggggtcgttttcaaagcagcagaaggggagcaatgtttttatgtggtcgtggttcttgaacattaggactgcacgctgttttcaagcatagaatagggacaggggctcttcaaaggcatccatccaattgttacaagaccgactttcagaaggcagtcactccggagcctgcttccctccggcggtgaacaagaaacgccttgtagaaccctagctggagccgaacactttccctaacaagatgtgtattgcgaggacgcgcccctgacttcaagggtaagactaatttctttcaacgacagacactttaaaaagcaattttttttaaagcatccggcctgggtggtggaagacgccccagggcccagatggagaaggaagattagggttgccagagggggatgggaaaccgtcgannnnnnnnnnnnnnnnnnnnnnnnnnnnnnnnnnnngcagcgccaaggagatctccccagtcctgcaggtgccagcagagcagctggagctcgagggggcccaaccggggcggcggcttccgggtcccgcaaggnggttggcccggcnnnnnnnnnnnnnnnnnnnnnnnnnnnnnnnnnnnnnnnnnnnnnnnnnnnnnnnnnnnnnnnccggcccggggggcccttggatcccggcacccggggaagccccgggcttaattgggaacgccggacc

SEQ ID NO: 133200 - DNA, 919 bp, Homo Sapiens
  misc_feature (699)..(767): n is a, c, g, or t
ggcatacatagccattagaggaaaggaaataagactctagtaacatttttaaaggtcatcttgtagaaggaagtatcctttcagtaccttgagggagagttaggattggtttattttctggaaagcttcacgcattaatccgttctcacataactataaagaactactcgagactgggtaatttataaagaagaggtttagttgactcacatttctgcagcctgtacaggaaacatggctgggaggcggaatcatggctagaatcatggcggaaggcgaagagggagcaagcacatcttactatggtggagcaggagagagagaatgtgaagggggaagtgctacacacttttagacagccagatctcgtgagaactcactcactctcttgagaacagcaagggggaaatccacctccatgattcagtcacctcccaccaggtccccctaccgaaattgggaagtagaatttgacatgagatttgggtggggacacatagccaaaccgtatcaccttggaaattataagatgttttgtctttatcctttcagcaatgaggagccagtgaaagtgttctgaagagatgataatatcatccagtctttctgttggagagtgactggtgcattctgatggatatattagaaggacaaaagattggaggcattgtagtagtagtaacaataaccattctgttnnnnnnnnnnnnnnnnnnnnnnnnnnnnnnnnnnnnnnnnnnnnnnnnnnnnnnnnnnnnnnnnnnnnntctggatttatctaaacagaaactaagacttgaggcagtcagtggaacttgctccaaaccacaaagctaataaatggaagagctgggattcaaatccatttgtgactttagggcctctgctcttaaccactgaattatattaatattcatag

SEQ ID NO: 133201 - DNA, 525 bp, Homo Sapiens
gtcgggggaggtcaagttttctggcaaagttccattcagatcatcagcaggaaaaaaacatcctctataatgcaggcaaagacttggaatgtgcatcacatttaaagaaatgggtttgtctaagaccttcccttggcactgccttaaaatcaagggaatctgaatgctggtcctcctgtattattcattacataattgctgtgttttattagaaatatgatctattataaccttgaatagagtacattaaatgacattgaaaattagattattctgattattagagaagtgagaaatgtgctaaacatttgtaagactgataatcaatcagggtatccatttgagtgtaataaaaatcaatctggagccagtgtgtttaaatctaattttttaagcatgacattttcctcagagtttctttctaaaatgtcaccatcttctaccacagtgattgattctgtctctagggagaagcactcactccaattacttcatccactgcacacaaaccacagtccacttcat

SEQ ID NO: 133202 - DNA, 1594 bp, Homo Sapiens
  misc_feature (907)..(907): n is a, c, g, or t
  misc_feature (921)..(930): n is a, c, g, or t
  misc_feature (1169)..(1180): n is a, c, g, or t
gcggccgctcttgtttttagtctcgcttttcggttgccgttgtcttttttccttgactcggaaatgtccggtcgtggtaagcagggtggcaaggcgcgcgccaaggctaagtcgcgctcgtcgcgcgcggggctgcagttccccgtgggccgcgtgcaccggttgctccgcaagggcaactattcggagcgcgtgggcgccggcgccccggtctatctggccgcggtgctcgagtacttgactgccgagatcctggagcttgccggcaacgcggcgcgcgacaacaagaagacgcgcatcatcccgcgccacctgcagctggccatccgcaacgacgaggagctcaacaagctgctgggccgcgtgaccatcgcgcagggtggcgtcctgcccaacatccaggccgtactgctgcccaagaagacggagagccaccacaaggccaagggcaagtgaggccgcccgccgcccccggggcccctttgatggacataaaggctcttttcagagccacctaccatctcgagaaaagagccgcactgatcctgcagttctttataggccggaggcctgatcaccctaggctcatgaatgagcgcagtggccatggggaagggcgcaacgggaaccgagaccctggggactgattgggctgcatacttgcgaggtgggcaacgtgttctgttaacaacagggaaccctcgtccacaggtggccaccccttgctcttgagtcccacccaaaacctctagtagggttttaataacgctcaccgtaaaggtgtcttcataattactagtgacaagttctcttgactctagcaaggttcccgtgtggtcatcaagtacagaatgcaatttcttaatgatttatctgatattaaaagtatttatgatctccaaacgtngaaccctagaaggnnnnnnnnnncccttggtcgggccgccctcggcccctcgaagaagcttttctaaaacccattcctttttgggcgccgccggggcccccgttaagggaaaaggggaaaccatgggacccattaacctggtttttccccctaagagaaaaaaacccctgggggttcacttgagaccgtaaaggggggctcttggggaaattttcctctcccaccccgaaaatatagcgaaaaaaaagccgggccccccgcnnnnnnnnnnnncaaaaaccccgggaaaaccgggttttttcttgggaaaaccaaaaattcccccgacaaaagggggggagaattttccgtggggaggggggctccaattttaaaccgggggggaatcctctttaattccaagaccagggggggaacgccctcaaaaggggcgaagaagcctctcccgaataatactcgggagaattttaaagggggcccccccgggtcccgccctgggggcaccaacttttaaaatttcggacaacaaaaaagaccgtgggttctggcaaaaaaatttccccattataaaaagaggggtttttttcttggggcccgcaagaactattgggggaaagaggccccctttttctcccccaaaaaaagggggggcctgtgtgggattgcgaaaaccccccgcggaaataa

SEQ ID NO: 133203 - DNA, 901 bp, Homo Sapiens
  misc_feature (788)..(822): n is a, c, g, or t
gggatctgggagtacttggtcaagcacctgagcaactgggggctgatgctggttccgtgtccactttgtctgagacatccacatagtatcctcgtactagattcagcagattccatgctcgttccatggatcttgcctactttatgtatgtagcttccaggtgatgcctttgccagcattaacaactcttttatttgaaaacgtgggtggctctgaaaagagccttttgagttcacaggtgccccttcgagacgcgggccgggctgggcccacttgggccggacgtcagcctcacttgccctttgccttgtggtgactctccgtcttcttagggagcagtacggcctggatgttaggcaagacgccgccctgggcgatggtgactttgcccagcagcttgttcagttcctcgtcgttgcggatggccagctggaggtgacgagggatgatgcgcgtcttcttgttgtcccgagccgcgttgcccgccagctccaggatctcggcggtcagatactcgaggaccgcagccatgtagacgggcgcgccggcccccactcgctccgcgtagttgcctttgcgcagcaagcgatgcactcgccctaccgggaactgaaggccagcgcgggacgagcgcgacttggccttggcgcgggccttgcctccttgcttgccacgaccagacatgacagcgatagtagtcaccgagagaaactcctgcctggcgatcgggaaagtcccccggccgtaatggccgaattcccgggcatatgtccggtaccgtcgactgnnnnnnnnnnnnnnnnnnnnnnnnnnnnnnnnnnncgccgcttcctcgctcactactcgctgcgctcgtcgttcggataaaaccgacgctagcgccctatagtgatcgtataca

SEQ ID NO: 133204 - DNA, 1140 bp, Homo Sapiens
  misc_feature (80)..(114): n is a, c, g, or t
aagattgtatagactcatataggggctccgctatagccgaacgacgagcgcagcgagtctgtgagcgaggaagcggccgnnnnnnnnnnnnnnnnnnnnnnnnnnnnnnnnnnncagtcgacggtaccggacatatgcccgggaattcggccattacggccgggggattttgtttgttttctcgtgagcttaggccgctggttttggtgatttttgtctgattgcaatgtctggacgtggtaagcaaggaggcaaagctcgcgccaaagcgaaatcccgctcttctcgcgctggtctccagttcccggtgggccgagtgcaccgcctgctccgtaaaggcaactacgcagagcgggttggggcaggcgcgccggtgtacctggcggcggtgttagagtacctgaccgccgagatcctggagctggccggcaacgcggctcgcgacaacaagaagactcgcatcatcccgcgccacttgcagctggccatccgcaacgacgaggagctcaacaaactgctaggccgggtgaccattgctcagggcggcgtccttcctaacatccaggccgtgcttctgcctaagaagaccgagagtcaccacaaggccaagggcaagtgatttgacaggtatctgagctcccggaaacgctatcaaacccaaaggctcttttcagagcccccctaccgtttcaaaggaagagctaacctcactgcttgtaggtagaaggaaaaaaggcactaaggttgcaaaagcttctcatttcagagagatgccaggatcctaagtgcctgccaaacttaccaattctaaggaataagtggatggatggcattactgattcctacattactgattgattctgcatccgcaaatggttttattaaaaacattctacttcatgtgtggggagataccggaggctacacactgacgagcaaccgaatatcattcacggggaagttcttctgaataccaaatgtgctcacttttctacatcacgtattacattcacaggcttcaaactatttgaacgtacagagattatctttaacaaatccatccctcaatttacccaggtggtcacttttcttttccttgggtttctggcccggattcattcctgctgaaatccgccaata

SEQ ID NO: 133205 - DNA, 1126 bp, Homo Sapiens
gcggccgcgtctgaaagtcctgggctaagcaccacgccgggggggtaccagacaccccggctgcagctgccgagggcctcactcaccttcagggccgccggcctctcggcctggactgcccacctcggccctgcgtcagagcggaaggccaagtcttccagaaggtgctgcggcctccccgcagccccttagcgactcgggatggggcggctgagtcacgaacgccgaggcgggcaggtgcggcgccgccggcctccccccggcaggctcgggtcttccgcgccacggaggtccccgaagagcgcccaagccgcatccggaaggcccgaaccctaccggagggcggacggcggacagggcagggcccgaggccgacgcggcaggcggtgcgggacgggagcgggggcgggcggggactcgaggccgggcggcgaaggcgggcgaggggaggggaggggaagggagccgcggcccgcttgccccgcagtctgaagcggctcagctctttccatgagggcggtggtggcccttaaaagggcctttgtggtggcatggggaggcctggcggccggccgcggcgcgggccctcttagtactcctgggaggcctgggtggccttcttgccgcccgagggcgccttcggccccacggtggcgctggtcttcttgggcagcagcacggcctggatgttgggcaggacgcctccctgggcgatcgtcacgccgcccagcagcttgttgagctcctcgtcgttgcggatggccagctgcaggtggcgggggatgattcgcgtcttcttgttgtcgcgggccgcattgcccgccagctccaggatctcagcggtgaggtactccagcactgccgccaggtacactggcgcgccggcgccaacgcgctcggcgtagtggcccttccgcagcagccggtgtacacggcccactgggaactggaggccggcgcgcgacgagcgcgacttggccttggcgcgggccttgccgccagtcttgccgcggcccgacatgctagcgaggtagaccggtgaagcacgacggctcaaacactagaacaacgcccgccgcagcctcgtgccgaattccaccccagcctcgtacctagccgtaagtgt

SEQ ID NO: 133206 - DNA, 537 bp, Homo Sapiens
  misc_feature (181)..(181): n is a, c, g, or t
  misc_feature (345)..(345): n is a, c, g, or t
gtacccgctgagctgggctttgggcaggtgagcagcacagaggcttccctcctcgtccctccccacaccccaccatcgccacagctccctccgccgccggtggggcacccagatggggaggaagctgaggaggccactgttcacccaaactggttggtccttcgggcaatgctgggaatangggtgggggctctgggcaagcccaggaggaggagggcctggctgagttccaggaacatctcacaccacaagggaggatctagctggtgccctccctgtactgtcaggaggccagagggcccttctccagctcatcagggagggaactgctctggcagggagtanggaaggctgtttgtggcatccctcaagaaagctcctgcctcagaagaggcccaggcaaaaagagcccacaacagtctacctgtggagcacggggagcccacagagcccagggggagcccacagagcccagtgagagctgggggtccttgctgccaactcagaccctcagatccaagccaatggctttggggc

SEQ ID NO: 133207 - DNA, 739 bp, Homo Sapiens
  misc_feature (696)..(696): n is a, c, g, or t
aaggtaaactgttgaggtatagcacacatattgaaaagtgtaagtcctagcggtataatgatgaatcttcacaatataaaacacacttagtgtaactggcattcagcccaattagcagaacgtgaaatcaaccttccatccgcttctaggcactgtctcctcactatgggctcctatagcctgactgctaacactattatttcatctgcctgtttctaacccgcttgtagccatttcttagtgagagctctcaggggatgtccacatgggaggctttccccagaactggcaggcaggtcctcagcagtgcacccacaccaagacctgctagttacatgaatatatcctaatgtctgaaagcttccaacaatgaaacttgacagttgaagctcttctggactgtcttctctgagggttgcagtgcatcaggggccatctcagatggatcatctagagcatggatggcaaaacctattcaactatccccagtgcccttgcctacaaccacccatacaccattcatcgacagcagcactcctggtgctcagaacgagtctctgaattcttcttcgtaccatatagtcataaagcacagagttattattgtgaaatgtatcacttatttctttggtatttcttgagtgcttgctatgtgcctggcactgagctaagcactggggatataatgttgggcanagcaatctctgcccttggtgaagcagcctgtttacgatcactg

SEQ ID NO: 133208 - DNA, 1591 bp, Homo Sapiens
  misc_feature (18)..(18): n is a, c, g, or t
  misc_feature (76)..(77): n is a, c, g, or t
ctctctttccttccctcncccctatggaagtgtatgttatgagaagacgcattaaaggtaataagctcgcggccgnnacagctcttctctctcttttttttaatcactggcaagttagcattttattgagaccatcaacatctttacaatgaaaacaacatactttactgcaaaaagagaataaggcagctttcctaggaatctctgagaaatgactcaggaatgagaaatcatgcaattatttttcatatatagcacagaaaaatatacgcatatggtttataaataggtgtcaatctggcctaaccaacaatctttggtaatagtgtctcttgctaaatatagataggcactccctttcaatccagcaagcattctagctccattttaaaagcaggtatcagagcctgaccatgacgatgagaggggaagagagtacaaatgagcctgaaaagtcataattcaagttcactctgagtgagctccttgattctattcatgcaatgatcaatggcattaataagtaaagggatccaactatcttctggctgaggggtcacatgacttgcttttgtaatttcaagtgccttctttaaaacagatacaagtttcgcagaattgattcgcacggtcaggtgacacataggtggatatatgctcagagccaaatcatccacactagggctgatttcatcagaaatatccacaatgtcatccagctgtgccacctgatccttcttcccattctctgccactaacatccgaattttcttcaggcaggctttggatgctctcaccagcgcaaggcatgggattatgagctcttgatcgtcctctgaccaatacaagtcctgattgctgggaaaccccaacacatcatcctcatgattgtggttgtcagagttgttctcctcagtatcattcaagaggccagagtaagggtcacattcttccacagcctgctccatttcttcatgtgcatccttcacaaaatccacattcttggtcagcatcaaaagagctgcagctttgttatctcttggtatctgaggcatctgctggcacgcaacccagacactgttgtaggaaataaggtcattgttctcagggctctgagttggagtgacggaaagtacttccatgagctgagccatgccatccacgatgtccagggtggcgccccgtaccagctttctcagggtgatcccctgatcctttggaagcaaatagtacactgcaataaatgccttgatggcagcatggacttgttcacagaacttctgggtttcctgtggagacggcagtggaagctgagagaagactatggtcagagtcgtggcttcccttgacacagtcacagctgcctcattgagtcttctccagaacatctctcgattaaactcctcggtggtctcctgggcttcgccgacccgcactcgaggcaggagcaaccgcagctcctccgccaagtgccggagctgctccaaaggcgaagccagggtggggactgcggctgcaggtgcagttgcgctcgccatctcagtcgcttgccgaaggccgcaaacacaggcctccgctgccactgccggag

SEQ ID NO: 133209 - DNA, 828 bp, Homo Sapiens
  misc_feature (139)..(139): n is a, c, g, or t
taccaagagtttttcgccaggaattgagatttccgccaacggttcagggtggaccacactaggggtggaattatattgctccagaaggccaaaatcaatcccacacttaggggctgatttcattcagaaattatccacnaatgtcatcccagctgtgccacctgatccttcttcccattctctgccactaacatccgaattttcttcaggcaggctttggatgctctcaccagcgcaaggcatgggattatgagctcttgatcgtcctctgaccaatacaagtcctgattgctgggaaaccccaacacatcatcctcatgattgtggttgtcagagttgttctcctcagtatcattcaagaggccagagtaagggtcacattcttccacagcctgctccatttcttcatgtgcatccttcacaaaatccacattcttggtcagcatcaaaagagctgcagctttgttatctcttggtatctgaggcatctgctggcacgcaacccagacactgttgtaggaaattaaggtcattgttctcagggcctgatcctttggaagcaaatagtacactgcaataaatgccttgatggcagcatggacttgttcacagaacttctgggtttccccgcactcgaggcaggagcaaccgcagctcctccgccaagtgccggagctgctccaaaggcgaagccagggtggggactgcggctgcaggtgcagttgcgctcgccatctcagtcgcttgccgaaggccgcaaacacaggcctccgctgccactgccggagccgcactgcgacagccgctccacttccgggccacagcccc

SEQ ID NO: 133210 - DNA, 473 bp, Homo Sapiens
aatctcaaacttaggaaaagatgcaagtgcgttacaaagaattttgtttcctgaaccgtgtgagtcagttgctgagagtctgctacccgcccacgatacagacactgaacaggaagtcagcatggacgcagtactcctagcgggtcctcaggcccagtcatgtcctctaggaaaaggatccagttcaggagcaggagctgcacttggttgtcatctctttggtctccttctgattggaagctttttgacttccaagacgtggatacttttgaagtgttctgaatttgtagaatgttcctcagtttgtgtttgcctggtgtttcctcagcactggattcaggctaagcatctttggcaggagtgtgacagcactgacactcttgggtggcacgtactttcaaagtgcccattactgatgatgtgcatttgaccacttggtgaagacggtgtctgctgggcatctccctcgtgcc

SEQ ID NO: 133211 - DNA, 424 bp, Homo Sapiens
  misc_feature (399)..(399): n is a, c, g, or t
tttacaacgtgtaacgtcactctttattatgaaaataaaatggtgatcatgagtggggcgaatacacagagcaactggctctttgggtggttatgtcacgtggcctgcaagttaacgttggcttcctggtcagccaggccttaggctggtgaaaagaggaaacaaagaggatgtgaacgaagacaaagaagacatcggagggctccttttaggagatttgcttgaaggcctctgcggggatcttgccctcggtctggagcatagtgaaggcctggccagctctagtgtagttccactcattgtcctgaaggcacttctgagaccactccagtttcatcccagactgggcagagaaagcctgcaccatttcctgctgctccttggagagggagggctcanagctggaggagagtgtgacactggg

SEQ ID NO: 133212 - DNA, 975 bp, Homo Sapiens
  misc_feature (42)..(57): n is a, c, g, or t
  misc_feature (152)..(225): n is a, c, g, or t
tgaagggggctcggtgggaattaaattagcacccacataaannnnnnnnnnnnnnnnttggaaccttttgataaggagaaaatggtgtttagaggcacgcttgtaacactgggcccgacaaagggacagtatgaacgggcgaggaaagagannnnnnnnnnnnnnnnnnnnnnnnnnnnnnnnnnnnnnnnnnnnnnnnnnnnnnnnnnnnnnnnnnnnnnnnnntgaataggaaggggcagagatctcgtgtttggtggtcgctggggaattttattaagccatcaaaatttccttcacactcaatactgttgaacaacaagataacacatcttcttgctcatcccacttgaactcaagtcatcagttttaggcacaaaggttttagttttctcgggaaatcaagttttaaccacttgaggttactactgcagcaagcagattttgttgacaaatgtgaacagctttcaccctctgttagtacaaattaatatcctttccttaaataaagttagttagctatttttggtttcaaaatcagtttccatcataaaataacagcaagacactgtacacctttacgttcaatactagaaatttcacccagtgcatcagcatctgtgcggcattccctcagcacgggctctgctggcgggcagcaggggtgctgagctctctctagtgcgccctgtgcagccacaccactgctgtcaccacatgtccctctgacggcagaggtggtataagcagcttcaccctggcccgactgaaggctgtcatagttgtttttcatattatgcacaataaactgtagcacaataatcatgatataacaactgtccagcaaaaataaaagtattttacatttgattatcatacaaaaatatgcatttttctatttttaaccattattaatagtacctaatatttttaaacttgtaaattaaccctcgtgccgaattcgccacccaggcc

SEQ ID NO: 133213 - DNA, 531 bp, Homo Sapiens
ttttttttggaatgtaatcatttatcacaaaatgaacaatttcaattcttaaacatacaatcactttttttcatactaactcaaaatgagtaaacagaattttattcaaactttacaaatatcatttacatttagcctgagattaaacatgagaaagttcaacctgaagttagacttcattgcccagttaagcatctgaaaataaagctgagaatgaacatacatcatcaaacaaagcattccaatgaagtctggcaatgaattgtgacacaaactgaactttaatttgctctggtccacatgatcttcagagcctaaaagttcctgttttttaataatgatggaaaaatatctgcaaatgataaatgcatgaaggtatgaccagatgcaaaattttagttcaacatttctatagcagctgctttaggtgaccattaaaaaacaactccccaatccttactgttcaacatgtacttgaaaacatgcagcagcatggtacagtttattaaatttataaatatccctcgtgcc

SEQ ID NO: 133214 - DNA, 842 bp, Homo Sapiens
taaagggtagaaatagtcattttaatattgatacaagttattttaagggacagcatatcaaatagggtcatttccaccaggatagggtatatgagacacaagggtcaggaacgattacggggagctcctttcttcctaatgcggtaagtgctccaggttcaggtcccaggcaaagctcccattaagcccacccttccctttactgcactagatcagggcctgacttagaggacacataggttcagggtaggactaaggattgcattatagacttcttaaggtgtttcatgattaaagaggaacatctctctccaacagttatagttcaacccaagtctttcaggcagtggaagaaaagacatgtaggttgtacaggctagcaaagcccaagaagaatgaatcaggaaggtccccaacagtgtcacctctcacagtggacccctgcagtctctgtctttgtgatcttgacattacattgatccagatgttggctttcaacttccctctaactcctcctacgcaagcttaccagtatggccctgataagtatataagatagaaagtgaacagacaaagataatgcagaaaattctctaattcaagcattctctaacataaatgctgcaatctttagtctgtagttcatgtcacctgtttttcatgttgtttccctggaaaccctgggaggaacattactgcctatgaatgttttgaactccctcaagaaagggaataggttctgggaccactgtcacttttctgagggcatatgttgggaaaagaaagatcatatccaaagtgaacctgccgcagagaagcgaagtggagtaagcatcctttac

SEQ ID NO: 133215 - DNA, 1042 bp, Homo Sapiens
  misc_feature (151)..(159): n is a, c, g, or t
  misc_feature (273)..(290): n is a, c, g, or t
  misc_feature (344)..(344): n is a, c, g, or t
  misc_feature (848)..(856): n is a, c, g, or t
atttatttatctatgccaaatgtttattagtgaaatagtcctgaagatataattctacatatggggctttgatttcacataatatttaagaaaaggacaaaacacatagaattagacatataattcaaagaccaccgtacaacctttatcnnnnnnnnncacttcagcaaacaaaaaatgtcaaatgacatgaaaagtggcaagtcttccgacaataaataaaaaattactttataatttttgcaatgcaagagcaaacaaaaaaagtttccnnnnnnnnnnnnnnnnnnatttccatagagagagaaaacagtcattttaaccaataactatacacatctttngggggaaaagttcttggacagacacaagtcaaacacaatcccgagacgcttgtggcaaaatagaggtaaccttgttgcaatgctttataagttggtttttaaatctgaattcaaaaacctttatagtcgcttcagacttcttgataaaggatggatctcaaaaaaagtggggagggggcaaagtaaaaaataaaccagctacaggacaggccaagagacccaggatttcaattaaccccttgttaaagtcaactttaaacatatcaaaccaatgcagctccaccttcctgaaaggactctttcagccaaggaggccagtctctcttcctgcgcttttgctggagctcctgtttggcaaggcaatgaccaatatagaaacagcaccattcagattaggatggactagaaaattttctatttttgtttttctctagatgtgcagtgaaatgaaaatgctttctttgagatccttgaatataaatcctctacgttttaaaaacgtcnnnnnnnnncagtacttctaagatcattgaatagcatatactgggttttgcgttttgtttgttgtttaattctagtaaaatcccatgattgtcttcacagtgttgctaccatatcaccttgtcattaaaacagacttcgtgcatttcatggagcatcatttcttgattcagttttcattgactgggtcgttaata

SEQ ID NO: 133216 - DNA, 752 bp, Homo Sapiens
gaaagtatatttgtgtttgtatttttttgtagagaccgaactggtctcttcccgagctcaagcaatccatctcccaaagtgagccaccatgcccagcccttaaagagatctttggagattttttatgatgtaggatggatgctttgcctcaagcagtaagtcccaacacatgacaaggttggacagtttccccatttacttgggaaacacggaagtgagcagtataaagttcacacggagggtctgctttggctttgagctatcttccttaatcctttctgagctgccttctcccgtgtcaaaatattgatcctaaagtgatccaggccttgtatatgcagatgctgcaactcatgaaaatagatgaaacccattattagagcaagtactaattcttaggccaactggcctgttccatcacaccccaccacattctaccttctggggcgtgctcctaccacacctgctagagtgccttttctacctagctgccagacttgcaccaagttaggactcaaatatggcaggtcctacaaatactccagagaaccctgatttacatacctacctgtcaactgagaaaccttgaactcaggctttagtgtgtgaattatcccaagctgctcatcccagttttggataatcccaaactgtcctatgtggataactacctggacaaaggattcctgtgaaggaaaccatttgaacttgtttaaagttgttccttggtcttcaactcaatggtcaatgaa

SEQ ID NO: 133217 - DNA, 958 bp, Homo Sapiens
gcacatcaaactggaagcagacaaaggcagccagaactatcttatttattataaagatacaccgggaagaacaaacctgactgtatactgaagcctgtaatggtacatgccaaaaatgtacagtactatacataaaagtgcattgtcacaacagattaacaaaacattttttttctttccagactgtaaaagcatccccctttattttcacctcagagaggagggaatgaaatggtgagaggcagtacagagcacgggcgaatgcgatgctgtcagcagcacatgagcgggggacggatgcggtgggatgggaggacacaggggtgagaaaggcacaatcacgtctacaaggaaaacgagacagtctgaggaccgacagggaggtgagatgggacattactgagcaccgaggcacaggaaggcggggatggggaaggtgggggacagggaggaagcttcgaatcactcgagtgggcagcaggaattgggaggaggaggtgggggtggggcacagagcggggcaacggtacaagagcaaggctaaaactcctctaaaatagaaaggcactttcacatgtacatactacagatgtacattgacacaattaggtaacagtcacaagcaggaagctaccggtaccgcaattgatcaaaccgacaggaaaggacaatactgatttaattacgcgggcagcagttacccttcagtacgtaggtaaacagcagtctctcctgttacacagccacttactatactttaaatatctataataaccatcacactacacactgaacttggatgaatgctctaaggggggcattcacaaatgcacggttcatatattttcttttactaaagtttctaagataagcattatggaacccagtacaattatttaaacatacaaaattccctacgtaatttaaagacacaggtatccatctcgattatacacat

SEQ ID NO: 133218 - DNA, 797 bp, Homo Sapiens
  misc_feature (199)..(216): n is a, c, g, or t
acaggcttaaaagcaaagtttattcctaaaggtgcctgcaaaatagctatacctatttgccttttcaccgtaagcagctttagggtgcaaatgcacaccaggaccccctcagttttttggagcagaagagccatgttttccccttggctgttatacattcgcaagaagcaaaataaccgtgactatctgagtatgcaannnnnnnnnnnnnnnnnnaacagggatcaaggaaaatgcatccgaagcttcccttttcctttccttttcagggcatcgatggctcggtctcactaacgggacatcacacagttaaatgtgcaacacgccacgctgctttacggcgacgtcgtttctgcgtctttagaaaaagcaccccacgcgctcatgttcacggcttacggttagaaagatggcgttaccgttggcgggaaggtaggtgaaacgctggtactggcttcgctttctcttcccgttgcagacgtagaaactgacgtgaacggggctggttatcctctgattccgaaatggcgggatctcaaccaccagagaattcggcttgcacaggtcccggtcagttttcgcttccatctcccagacatggtggccatctggggctttctccacgaaaatgaccttggagtcctgcaggaagttgtggccagacaggaccatcttcttcccgcccacgaccggatagctgtccgtgctctgcttctccaccagaggcagctcctgagctgagcgctgggagcattcgatggggttggaggccacctgcagggacagcgtgcggcccc

SEQ ID NO: 133219 - DNA, 554 bp, Homo Sapiens
tgtgcttctctacgaacagggcgggaagccgcccacgaggcaggagctggggtcgggtggcatcgcgagctgctggctgtagtatggtcttgggagaggacttaacccctggctcaccggtccacaggttggagcaggctcataatcatcagtgggttctgtttttataattggaacgttggcggtaaggtaggtgaaacgctggtactggcttcgctttctcttcccgttgcagacgtagaaactgacgtgaacggggctggttatcctctgattccgaaatggtgggatctcaaccaccagagaattcggcttgcacaggtcccggtcagttttcgcttccatctcccagacatggtggccatgtggggctttctccacgaaaatgaccttggagtcctgcaggaagttgtggccagacaggaccatcttcttcccgcccacgaccggatagctgtccgtgctctgcttctccaccagaggcagctcctgagctgagcgctgggagcattcgatggggttggaggccacctgcagggacagcgtgcggccgc

SEQ ID NO: 133220 - DNA, 1962 bp, Homo Sapiens
ggtcggattccccggatatcgtcgacccacgcgtccgatggccgtcaccgacagcctcagccgggctgcgactgtcttggcaactgtgttgctcttgtccttcggcagcgtggccgctagtcatatcgaggatcaagcagaacaattctttagaagtggccatacaaacaactgggctgttctggtgtgtacatcccgattctggtttaattatcgacatgttgcaaataccctttctgtttatagaagtgtcaagaggctaggtattcctgacagtcacattgtcctaatgcttgcagatgatatggcctgtaatcctagaaatcccaaaccagctacagtgtttagtcacaagaatatggaactaaatgtgtatggagatgatgtggaagtggattatagaagttatgaggtaactgtggagaattttttacgggtattaactgggaggatcccacctagtactcctcggtcaaaacgtcttctttctgatgacagaagcaatattctaatttatatgacagggcatggtggaaatggtttcttaaaatttcaagattctgaagaaattaccaacatagaactcgcggatgcttttgaacaaatgtggcagaaaagacgctacaatgagctactgtttattattgatacttgccaaggagcatccatgtatgaacgattttattctcctaacataatggctctagctagtagtcaagtgggagaagattcactctcgcatcaacctgatcctgccattggagtccatcttatggatagatacacattttatgtcttggaatttttggaagaaattaacccagctagccaaactaatatgaatgacctttttcaggtatgtcccaaaagtctgtgtgtgtctactcctggacatcgcactgatctttttcagagggatcctaaaaatgtactgataactgatttctttggaagtgtacggaaagtggcaaattacaacagagcactattaaattgcaacaggattcagaaatcatggcaaagcagctatacggaagaccagatggatgagaaacttatggaacctctgacatatgctgacacaacttcctgtagcctcagataatacaccagaaaccgaagctgaaagactggcatcctcctgggggctttattctgggattatgggcacttattatcatggttttcttcaaaacttatggaattaagcatatgaagttcattttttagagttgatgatgaatgaagaatgcatggaggactgcaaacttggataataatttatgtcattatatatttttaaaaatgtgtttctcttgtatgaattggaaataagtataaggaaactaaatttgaatcaactattaattttataacttaaagtaaaataattgttaatgcaactgcttaatggcactaaatatattccagttttgtattttgtgtattataaaagcgaatgagacagagatcagaatacattgactgtttttgaaaatagtaatttccccttatccccttttcatttggaaaagaaacaattgtgaagacattaaattctcactaacagaagtaactttggttatagaaaaattttgtctgattatgtgaaggatctttctgtacatgaaaagaagggaaaataaacttgcaattgaatagactgattatagtagcactgagacacaaaaagattgaccatgttgccctccagacactcatacaaggtcgtggacaccacggtgaggcggagctatttagggtggtaaaggaattatgattgttcttgagccaaagtaatttagtttgaatataatgaaacataccctgtaaagactgctagaaagtaaaaggattcgtcttcagaggttgtagaaggtgcccttcttagttaaaaccaaactgggaaaagtaatactggataaaatattcaggataaattttgcctcagcagaatttcaa

SEQ ID NO: 133221 - DNA, 740 bp, Homo Sapiens
ttttttacatttatgtacattttatttctattattattacattgtaacatatagtgaaatatacaactcacagtaatgtaggatccgtgggagccctgagcttgttttcctgcaactagacagtcctatctggaggtgatgggcaacaacgacagatcaggcattaggttttcaaaagaagcgcgcaacctcctcacatgcgcagttcaccatagggttccagctcctatgacaatctccagccgccactgatctgacaggaggcggagctcaggctgctgtgggatcaatgggggggtggctgtaaatacagatgaagcttcccttgctcgcctgctgctcacctcctgctgtgtggcccggttctggtaccggtctgtagcccaggggttggggacccctagtctataaaaccgtgagcctccagacattgtcctaccctgcctgccttcaggcagtttcgaggcagacacctggcccacgatcaggttgttagtgccaggcactgtgcactgggccaaccaccctctcagcctgttcccagcaggtcctggcaccaatggatggagactgccatggggctctgggtggagcccatggggcaccaacctctgacccagcttccttctgggaagacagccccctatccactttccattgtcccaggcctggagagctcaggatggaggtcgattcatgacattccccgctaggctcttcctgtggctcagactgggaaa

SEQ ID NO: 133222 - DNA, 609 bp, Homo Sapiens
gcttttatattcataagggatattggtctgtagcttccctgtgaggtctttgtctggctttggtgttaaggtaatgtccgccttatagaatgtcacagggtgctcctttctcttccattttttgggagagttcgagaaggattagtgttaattcttctttatatgtttggcatagtttgccagtaaactcatttagtcctggactttctttgttgggagatttttgattactggttcaatctctttacttgttacaggtctgtttggattttttatttccttttgagccagttttgtcaattggtgtgttttttcatcgaggtcatctaaattgttggcaacaatgcttctatgaataaatttgtttatagttaagttgcctaaaataccatgcaattcatctaatatgtataaaacttgaaatatattatattgcatctacttttctaaatcaaaacatgtaaaattccataagagatttaaacaaaagtcttccctaaatactaaggaaccaaaattttctgattgggtgttactggtaaattttattactatagagcataaaccctcttttttttattaaaataattcctcacataaaatgaaatc

SEQ ID NO: 133223 - DNA, 1511 bp, Homo Sapiens
  misc_feature (315)..(336): n is a, c, g, or t
atgagtaaatcatttccattttattatattctagatcatataacttttaacttggtgaactaatccactcttagagaaacaatagtgggagttttatatatgtaatcttgcaggtgaggaggctttaaattctaaaggttgtggtgtcttcatgccaagaactgtattcactgtggttgtagataaatgtgaaagtaactttatgcttaatttaataaattttcattgattttttttaaaaaaagaaaactgaaaggagatatagatgaatccacaattatagttagaaattttgtgaagcatttcatgtttttnnnnnnnnnnnnnnnnnnnnnntcaacaagaatataaaacaactcaaaatgccattaaccaaaagaatctatttggcatttacagaatattccacacagtaacagcagaatacacatattttttttgagtgctgatgaaacacatggcaagatagagctgtcctaggccctaaaactcgccacaacaaatttaaaagagatagtaatcatccagagcagatgaaaaccagaaatcattgtagggaatccaattggaaatcagcataagaaagatatgaaaatccctaaacatttggaaatttaaaaacacacttcacaataatctatcagtcaaagaagtctcaaggaaaaatttaaaaatacattgaactggataaacatgaaactgtgacatatcaaagtactgatagaagtttttccttgtcaggtgactcctcagtcaaaaaggagcccagtagagaaatgggctggtgagagcatctgatgggctctagcaagggagacagagctgcgggggacagttcctcagccctggactctgtctgagtcccgggaatctgagtcacgagatatgaggcacctggaaacaggtcacagtgaggagagtcctcaggggctatcagagcgggcattgaaggcccatgatgctcattctcctcttccctgctcctcgctcttcccactgcccccagcctgcccccatcccaactctctggctctttcgcctcctgcccgctgactgggacccctttctcctttataccatgatcttcttgctttccagttacttcctctgattttcccaaaaaggtttgactcttttcgtcctgagagtccgccctgttctcttctggcacctgcagctccctcttcctctcttctccctgttctggacctccctgaccctgagccttcctctccatatcctcctgctcccactcaccgtcattcagaccctctggctccccagtgagccccattctttctccttgtctcccaagcatcacatcttgtacctgttcctgtttttgcttctgttctcccttttcatcattaacctgctctatcatctgttcctcccctaatagcccatcggcacaaacatcctccctcagagttccttccccccgaaatcctgcttcctgctgtccggacgcgtgggtcgacgatatcccgggaattccggaccggtaccag

SEQ ID NO: 133224 - DNA, 733 bp, Homo Sapiens
  misc_feature (17)..(17): n is a, c, g, or t
aggctaaatacattctntgaagaaccagaggcatataaccacatcattatgtcattcctaatacatggctagattttctaatgataaaattgactgtgtcccaatgcttatttgattctaagcttttttattctgtttctgagatattttaatagctttgcaaaatatgctgaccagtttttggaaaataatggtttttatagcaagcaaagactttatggcacattttcaaaatagcactcatacatacttacattttgacagaaatgtgaattctcacattgatgagatattctttttcccacctgccctaccctttaaaaatggtcacttttctaatgtgtagtagattcatttacgcctttccctttgagtcataccatgtttggagaactgtgtgaattgtaggtagagaaattaactagggaagccagaagcttgaactaaagttttaaatttgtaggcagatgagaacttttatactatggttgctttgggcgattctaattttgtaatagcatcatgatcaccaaaattaattcaaacattttagtacatctttaatctgtcttatttaccaaagttctaatctgtttaagaacaggatgccaagagcatctttcattttatagaatgatatgctcacctttataagtgtcacctaaaagcttgagggtaaaaaagaagcagcccatatatctaaactacaggatgtcttgaacaagattcacag

SEQ ID NO: 133225 - DNA, 1152 bp, Homo Sapiens
  misc_feature (794)..(1079): n is a, c, g, or t
  misc_feature (1118)..(1118): n is a, c, g, or t
tttgggatttcattatctcagtttactttaatttgcttgtttacacacacgatctgtgtgtacataacagtggcaagagccattctctaaatacaatctggtacccagactatgacagatgcacgtggaaaatgaggcgtcagtgaattaatctcaacatagaaaggcaaaataagcatggcagtattctatgatcacagatgcccccagagcctgggggtaaccgacacttttcaacataatacaggacaattttaacaaaagacccagactccaaatggcacccaaaatatattcgtttctctgccttctctagaggagtcagaaagttctaaaggcttactcaagaaaaaggaggcagggagactatggcctgctaagcacagatgctgagcactttacatgcaccatttctcttcatctccacctgacagacgatgaaaacgaggtttgccatgatcacacagctatcaggagtggtgccaagatatgaacccacatctcatgtttgcttgagcccaaatcctttcacttatgtcaggctgtttcacataggaatagaaagcatgctcccaaggaagaggcaagggggctaagcatggacaagtggcggaagcctcatcgatacagaaggctctgcaattgacactttccacatacagttaatttagtgctgagcccgcatcagacccacgtgggataaatatctggagatttaagtgtcacacatgaacttctggggtcaccctgtgcctattcccttttggtgctgaacatgacactttggagagccnnnnnnnnnnnnnnnnnnnnnnnnnnnnnnnnnnnnnnnnnnnnnnnnnnnnnnnnnnnnnnnnnnnnnnnnnnnnnnnnnnnnnnnnnnnnnnnnnnnnnnnnnnnnnnnnnnnnnnnnnnnnnnnnnnnnnnnnnnnnnnnnnnnnnnnnnnnnnnnnnnnnnnnnnnnnnnnnnnnnnnnnnnnnnnnnnnnnnnnnnnnnnnnnnnnnnnnnnnnnnnnnnnnnnnnnnnnnnnnnnnnnnnnnnnnnnnnnnnnnnnnnnnnnnnnnnnnnnnnnnnnnnntaggagagctttcaatcccttcaacaagcccctgccatntactccatggccactcccaccactggtttatggg

SEQ ID NO: 133226 - DNA, 797 bp, Homo Sapiens
  misc_feature (115)..(125): n is a, c, g, or t
  misc_feature (210)..(222): n is a, c, g, or t
  misc_feature (780)..(780): n is a, c, g, or t
tttacacaataaatatttttatttttaaacactgaattgtacatctttcatataaaacatgagattctagcctgttttaaaaaataagtatacttgctagtactatcttcactcnnnnnnnnnnncagaagccaatgttctctaaatctgcagcttcattccacagctttacagaatcataatctcttgaatatatttccaatgttattnnnnnnnnnnnnntcatacaagatatatttagcacattaaaacttaagaggttacagtataactgtccagacctccaggtaccactgaatacttttccagtacaaagaggccaatatgttagaataattaattctctgtatttacttttattaaaaagaggtttttggtagtaagaacaaataatctctcatttgttgcctgaaatcctaaaataggatcattggtttctaggcttgctacttgctgcttagcaacctgtcctacttgcctgccttcctttctgttgtaaagtacagtggacatgggagcaggctgacgatagatgaatactcgacgaaggcactcacaaagggctgcatacgagtaatttggagcacaggcaaaaaattttttgtctctctttgatgcttggacatagcctgccaagaatatgagacaaacaaaagaaaaactatatattaaacagaaggggaaaaatgatgatttaacaattaatattttgcaatgtttattacaaattaaaatgccccaagtaaatatataccataaggtatataattctgaatcatntacgattagcacaatca

SEQ ID NO: 133227 - DNA, 939 bp, Homo Sapiens
  misc_feature (49)..(49): n is a, c, g, or t
  misc_feature (69)..(71): n is a, c, g, or t
  misc_feature (73)..(73): n is a, c, g, or t
  misc_feature (126)..(126): n is a, c, g, or t
  misc_feature (128)..(129): n is a, c, g, or t
  misc_feature (218)..(218): n is a, c, g, or t
  misc_feature (234)..(234): n is a, c, g, or t
cccgcggggttagtgaagtgtcctggccggtcccctgccaaggatattnggatgccatcaggctcccannntngcctcgtccaggagtgccccggctgcccccctcccctttggtgcagtactttntnnctgcgcagtgcctgaagttcgaaaaggggcccctttgggaagaacttgcagcgcggcgtgtccgggcctgcagctgtcgaacaaccccncgtgtagggcaggacnctgccaggagagggactcagagggctgctgggtggcctacacgctggagcagcaggacgggatggaccgctacctcatctatgtggatgagagccgagagtgtgtggcaggccccaacatcgccgccatcgtcgggggcaccgtggcaggcatcgtgctgatcggcattctcctgctggtcatctggaaggctctgatccacctgagcgacctccgggagtacaggcgctttgagaaggagaagctcaagtcccagtggaacaatgataatccccttttcaagagcgccaccacgacggtcatgaaccccaagtttgctgagagttaggagcacttggtgaagacaaggccgtcaggacccaccatgtctgccccatcacgcggccgagacatggcttgccacagctcttgaggatgtcaccaattaaccagaaatccagttattttccgccctcaaaatgacagccatggccggccgggtgcttctgggggctcgtcggggggacagctccactctgactggcacagtctttgcatggagacttgaggagggagggcttgaggttggtgaggttaggtgcgtgtttcctgtgcaagtcaggacatcagtctgattaaaggtggtgccaatttatttacatttaaacttgtcagggtataaaatgacatcccattaattatattgttaatcaatcacgtgtatag

SEQ ID NO: 133228 - DNA, 1508 bp, Homo Sapiens
  misc_feature (68)..(103): n is a, c, g, or t
  misc_feature (1129)..(1179): n is a, c, g, or t
atcatatagggcgctagctcggcgcagccgaacgacgagcgcagcgaagtagtgagcgaggaagcggnnnnnnnnnnnnnnnnnnnnnnnnnnnnnnnnnnnncagtcgacggtaccggacatatgcccgggaattcggccattacggccgggatagatatgataggcaacagactgaaaaccataatctttactgtattctatgcattcaaatgtggtcacaaatattgtggacacattatcttatgttttgaaatacctgtgaattgttggcattgagcagctgaagctaactcatgactctgttttgaatgtaaatatttgtaattaagcctgcacatatttttttattgccctagagtactcaagtgtttttcaccaagagcttttcaggttgcccctaagctttgtgcaattttttctggttccccaaagtgtatttttctctaagtcgagggctatgccataatacaaatggaaatgttacctttgattttcttataaaggagtttaaataggatttttaaataatgtagtaacactcctgatacaactctggttataagtgaattgagcattaatgtttcttttgtataaattcctgtcctgaaatattttattcatgaaaataaggtaagcaaaaaccaactccattttgccaggattttgttgtgctgagattgccaatcacggttaaacacaaagtgtttttatagaatgaagaaacagtctttaacagaaaaaaggtattgaaatattaaatggccaccaagtttactttgaagcccatttttggctgtttagtcagcatgaagtgggcatgataattttttaatatttctttttgtgaaatttcctgtacagccttttgtaggattactacaggttaatgtgagttgaggaagacagtctttctcaaacaatactacataccttttattatattacaaacctaagtgttttatatcctagagtcaaggaacaaatttccttaggattatagtattacatgccataaaatactatgctttattggtcccatgttttgtgcaattttaaagagatggctttctattaagtataaactatgtatatataagaaccatattttccacaactaaaatgtgcnnnnnnnnnnnnnnnnnnnnnnnnnnnnnnnnnnnnnnnnnnnnnnnnnnngaacattcaatccgttcattttgtatgtatgcttaatacgtgtcggtcatatacagtattgaatttttactgtatagtaattctggaaagagcacataaatgaagattggttttatttgcctgataaagtaattgaaagtgtattttttggtatggaagctgggtttttctggccacaatttgtaatttttcccaaaatttttaaaaataattcttattaactaaaaattaaaaataatttgggatggggccaaaaagacgaccggaccccactttatgtgttaaatataacctcttgtgtgggggccgcgcctctcgggccccctctc

SEQ ID NO: 133229 - DNA, 562 bp, Homo Sapiens
aaatacaggggtttttttgggaacaaattacccacctgaaatggggaaaaactgtactttatcccgaattaggcaattcatagccagagatgaccctaattgatcatgagaacgagcctctcagatctctgactacaggaaggataatagactgagtgctgcagcagctgcactcaaatccatcactgtgtttgtgtcgaggccagtttctcactagctcctcccagtcactgactgagcatggcaggcctgttcccgggagacacatcatttttccaacaggcacctttcactcaaagactttctgaggccttgcaaactttccttagtattgcactacagtctaagacactttcactcaaagttccttccttccttacctctcttttaacttggagtcagactttcatcagtctgacaactctccctgtctccttccttttcccccctcacaagcatttcacctaacaaatgtcttatgtgcttaatcccatcttggcatctgcttctaagaggtcctggactaatacaatgacaaaggctccccttgaagcatcacact

SEQ ID NO: 133230 - DNA, 989 bp, Homo Sapiens
  misc_feature (860)..(860): n is a, c, g, or t
  misc_feature (892)..(892): n is a, c, g, or t
cgcgcgcgggggggcgttttattaggtagttgggggtgaggaaattcccacaaaccaatttaggtgcaagaggcacaggggattttccctaggggaaacaaggttaaggggccactgtttccccttagccttactggggcccccggggccagaacgagaggtgttagaaaactttcttgagggccgaggcgggcccgacaagggggggttttttggggacggcttgccattttgagtgaagaaaaaatgcttttattaatcacaacatgaaattaacatgacatcgtattagaattaaaccaggataaatactgctgttataaaatttacatttctcacatccattccagaggaaaatcttacatattagggctcatcttaatgttatggactgatttcagtaaaactttttaaatagtaaatagcaattaacgtattctcaaactgtgctaagtagttagaaaggcaactataaaatctataatgataacacgtggcaggattagaactgttctgttaaacattaagaaccacatctctgttttagatgttacctcagtgcacctttttcactggtaaggcaactgcttgctgtgggtgccacaatgattaccaagtttcttcttaagtaaaagacacttgtttgatcaagactcaagtgagttttctttcccaattttgttcttttgaagcagaaggaaataccttggtctttgatatatataaggaggcaaatatgaaatacagctgttataatcttctaaatcacaagggcaatgaattattcattttctttgaaaatattcagtctttgaaatatttcatttttaaaataacaaggcttctgaataatttctcanaactagctttccattttagtacacgatttgantcacatagcacattagataggtatttagcaatttcttctaccaactacactttgccctcactaagggttagagtatgattttgaacaatttctacat

SEQ ID NO: 133231 - DNA, 696 bp, Homo Sapiens
tttgcaaatcataaggaagtttttattgggtcctgtacagaagagaaatgctccgttgtcaaaaaactacaaagggatccctggctctgggtgtgctatgaagacaactccctccccagtgagcccagggaacaggctggatgctggacaaagtttgggagggagctccaggcccagggtcctccacttggggtctccccctttatgtttgtaaaaaccgcaggattggagtatttagaggactctgtccccctgcaagtattgccgttggatatgaaacacacagagcaaaaccccaaggtgacaaatgagtgaaaacctaaggtgacaagtggacagacgccccccagatggaggagacactggctagctggcgacctctgcccctacgtaacttgtcagtccttgaaggcacagcagcattggccagagatggcccctcccgcggccagggctggattgcagttccctgccttgctcacctgtggccacagctcatacccccagttaccccacagccagggactggaggggcctctgaagcacagacaggcttaggcagcctcccacccccaccccagcagcttcttctgggagtgggaccctatctgaaggatgaagagatgggcttggccacctgagggccagaaggaactgggcacaggcaggctctatgctcaccctcgtgccgaattt

SEQ ID NO: 133232 - DNA, 1521 bp, Homo Sapiens
  misc_feature (216)..(225): n is a, c, g, or t
  misc_feature (464)..(531): n is a, c, g, or t
  misc_feature (1303)..(1304): n is a, c, g, or t
  misc_feature (1310)..(1310): n is a, c, g, or t
  misc_feature (1322)..(1322): n is a, c, g, or t
  misc_feature (1475)..(1475): n is a, c, g, or t
ccctgtgttaaaaattttgtttcgggtacaaagtgctactgtgtagcgcatacgatgttttcttagcgcggcccgccagaattatccgggtgtgtttgtgatcaccgcgacattataacacgccgcgaatgttgttagttttatccttctcctcttggtgggtgcgtttctgattctccttggtggggcgggggttttttccccatatttgttgtnnnnnnnnnngtgtagggggtgttctctgatcccaatgatttcctccctggcgcgcgtgtttgtctcccgcgcgcgcccgctgtgttttatacccgcgccgcgctcgctcgtcgctctcgctctttttatataaagcccctcccattggggcgccccccttgttcaaaaaaaggcggggtgcgcggctctagctttgtgggcccccccgcggggatagtatttgtggggcgcgcgcgcccctcctctcnnnnnnnnnnnnnnnnnnnnnnnnnnnnnnnnnnnnnnnnnnnnnnnnnnnnnnnnnnnnnnnnnnnngaacagaaaaggaaaaagtttattgaaaactatatacagttggtccagctcctaccatgggctgcaatctcagccagtccctcccacaccttaggcagtgtcttggcccctcatggggagggatggggctaggcctagggcccagactcccttgggtggcttggcagctggagcccaccgtggatctttgtaaatttacaactctaaatggcctgaaggtagtgggcaggggacagggaatggatccctgcctgatctagtcacagccttgataggggaacactattctgaaacttgggcccaagtagggcccagctaagttgtccggaagtcctgactgctcctctcacaggccttcctagacgtggaggcaaacagcctccctacgaccccaccccatgtagcaggccgcatgggctttcatgggcttgactggggacaccaggtacccttcctcccaacattgactcagggtccggagctcctggagaactccccaagcagaggacttggggttgaggggtgagcgttggggaggtcacagctcccagcccagaactggagcctcctggggtcagggcagccgtggggtcagggtgtcccgctgtaggaatagtctgctttattgtgcatcaccagccggtcatccacgaagtagaagctgtcagactgggtctcatacgggtggcggatcatctcgctgatcagctctcgggagagaggggggaagtccgtaatgtgctcgcaggtgttcttgctgctggggatgcannagccanatgggagtcgangcttttggagtactgggtgcgggagtagtgctctcgatcatgcgggagttgttgacaggctgtctccccactgtgactccacggtgggtcccacttgctcaggcggaggaggcaggcgtgactggtacggacaagcgccaacatggggtccangtccgcccggtgatggcaacgttcttaactggggctctctgattca

SEQ ID NO: 133233 - DNA, 1027 bp, Homo Sapiens
  misc_feature (84)..(92): n is a, c, g, or t
  misc_feature (321)..(340): n is a, c, g, or t
  misc_feature (697)..(697): n is a, c, g, or t
  misc_feature (731)..(731): n is a, c, g, or t
  misc_feature (737)..(738): n is a, c, g, or t
  misc_feature (757)..(758): n is a, c, g, or t
  misc_feature (793)..(793): n is a, c, g, or t
  misc_feature (841)..(842): n is a, c, g, or t
  misc_feature (890)..(890): n is a, c, g, or t
  misc_feature (941)..(941): n is a, c, g, or t
  misc_feature (965)..(965): n is a, c, g, or t
  misc_feature (980)..(980): n is a, c, g, or t
  misc_feature (983)..(983): n is a, c, g, or t
  misc_feature (985)..(985): n is a, c, g, or t
caatatttaggatacatgcttatttactcaataactttacaactttgacacgtcatattacatttttcaataaaattttgtttnnnnnnnnngatgatgagaagtgagtggatctaggaatatgaaaagctaacacgtttcgtggaggaggtgagaatgagaccatcatccctccagggacagaaaaaaatcatggtcagaggagatggagaaacaggagaggggcagactagggatgacagaatcggctgttagggcttgtagagcaaaggatgaagaaaacagctacagagagcagggaccttcctcccgcatcatggnnnnnnnnnnnnnnnnnnnntgcttaacccaaagggtcactggactccaagtccagatgacgtgggttctagccccagacctgccattcagactctatgtgtcacagggtggcagggtgagtcatagaaagggagctgggttcatggcaggttctctaagaattatgaagctcagcaagtcacttcaactactaagcctgataaggaaaatgagtcaacttgaacccttttatcgctaacagcctgattccaactcctaaccccagggtccaggagtaacccatagacaagtgaatggagataaggagacagctctggggaaaaaagcaggaggcaagagaagcaggagcctggggggagctgactgcagtcatccngtaatacatctggctatgtccggcaggtcctccntgcccnnagcagagagagggcactgnnggacaagtgggccaggctgaggctgagggggcaanacagtgcgtctgcacctgaggctctgacagaggagctgcacaacattnnccctcatcagctcaagtccaagaagggaatcagcatcgtcacacgttncaagcatgaccctgtctactcctaccctgtcacaagtcttctctcttcccngaagtcctctccttttgtcctcanaagggaactgcatanatnantaactaggtgaggaagatcccaaatggtaaaggtactccggt

SEQ ID NO: 133234 - DNA, 1033 bp, Homo Sapiens
tttgctgttttatttttatttattttgaaatatttgtgggtgtttatacatacacaaggcactgtctaggcactggagtggagtgttgaacaagacagttcaaaatcccgattccaatggagcttgtagtctcaacaacaggtgtattttcctggagctcagttgtgtgcgaagccagtaaaccaatcacgtgagcaaccttggcccgtatatcccagtttggagctatccgcaaatgctggattagcaattggaacaggggggaatggaggagcctggtggccacctcctggtgaccagccaccacgcacaaatagcaaaggagattcagcttggctcgggaggcccccatgctcttctcagtggagtcgatctgcgagcacacttgttgcaaaaagtcattccaatcttgatctttcagaaataataacttatccactgaatatgttggtagatgcaatatttttgcatcaaatttaactggtggctgtttcattatctttggattgtcgataatgggggtgacaacaagatctgagtccgtgtagataagctctctcatctgggattccaggtcctgctgactcaggtgtccacttgtaatcttggtcagaggagaagtcttctgtggtgaacagtgagtcatatcctcaccaggacttacttccactgcagtgctagttctgggagtaggacgagaactgagaagaaacatggattcattcaattgaccctcaagagtactcttaggccgacactcagttggattttctagtctgaaagagtgacctagtggttgaccactcttgtgcccttttgcttgtctactctgagagttctgcaaaagctccttggaatcttgtggcccagaacactccatagtgtttctgctgagactgagatcttcgacgcttgattcctgatctgctccagcaaaagctttcttccaaaatgaatgctgcagtagccttgtccaagtcaatcttttctgaggatctctttgaagtacccggacgcgtgggcggacgcgtgg

SEQ ID NO: 133235 - DNA, 404 bp, Homo Sapiens
  misc_feature (192)..(201): n is a, c, g, or t
tttttttaaatgtttactggttaatctaggtgatggaaacaaaggtgattattacagctttcttttcttttctaatctttgaaacattttataataataggctgtagaggattcagagttccccttcccgaaggcacctcattagcactgtgtatgcagccaagggaacagcccagcactctctagggttcnnnnnnnnnncttcctggggggctacaagatagatcagctccccaagggttggtaaaaggcactgttttaatttgctgttcctgaagttttccctaattaattcagttaagagaacaattgcctcaacaacaggtgtattttcctggagctcagttgtgtgcgaagccagtaaaccaatcacgtgagcaaccttggcccgtatatcccagttt

SEQ ID NO: 133236 - DNA, 507 bp, Homo Sapiens
ggcacgaggtgagctgcaaagttctcttgtcaccttttgtcctagacacgtgggccggcaggcagagtaccgtcgcacacactcgctgctgatatctggcctgttggcccaggtcacccactggaaagacaaggcaactctagttttgtacaagttctatgacagtctattaacatgttgccttgcaattcttggtgtactaataactgctggctaaagacattcctgacattaaaagaacatgctctgattcagtattttacatgtgagaaacatctccaattacagaaaatcattcctaagttgaggagaaaatattttcccactgatgaaatttatcaaattggtatagaatcttctgggaagaaaaacagcagtgataaaacttcagctgggagccatatgtttttaaaagcagccattttaaactaagggcaatatatcaagtgatagagctggttcactttgcagtgttgtcacacataatctgacctgtgaaatttttgg

SEQ ID NO: 133237 - DNA, 1021 bp, Homo Sapiens
  misc_feature (685)..(697): n is a, c, g, or t
  misc_feature (721)..(721): n is a, c, g, or t
  misc_feature (771)..(771): n is a, c, g, or t
  misc_feature (850)..(850): n is a, c, g, or t
  misc_feature (901)..(901): n is a, c, g, or t
ctgtttttaaattaaaaaacaatttattgaaaaagagtaatgctttatacaaattcccattataaaaccccaaaatgtctattggtctgtttccaggtgtggtagaagaatataaaaagatcaaaattggataaattctattgtaacaatttcgttggtcattttgggccataaaatttttttgtaatgtttggtaactgatatccacatggaattacactcacacatcatgaagatctatgtatgtggcaaaagccatttaaattttaacttccaaaagcatatattctcaggtttggaaggcacactaaaatttattaggtccaattcctcataagacacggtggctgactttccttgtgtagtttattatgaagtaccatttccaaactaactatcctagcagcgtcagctgccagctaacagcaagagctctgagggcatcactgaacagatagcaccttatgagttattatgattcaaaaatctcccttgctgttggatttaccaacacgtaggcttttatttcttcccattacatctgtttagccacagaaagcatcgggccatactcactgcagaagataagacttcctcagaatcttattcgtttagtgcactcaattttacttcactgtctcatcacttgagagactggttaaggcaagaaaccatttcttaacannnnnnnnnnnnncaaacatttgaaaagcaacacaanacgtatgcagttaattcctcaaattctttcctgaggatagcactttttanattacaggaccacacttacatgtattctatctcactggatccccacacatcactgtgaggtgggaaatcaggattacangcaacgcttacaggatgagcataagctacagcagccaaatgcttgctcaanacagaccgtgatgatagcacaagactcaatccaggtctcaagcacagtgcaacacctttccattaatcatctgccacgggataacatctgtcaactggaagtaaagcagttttaatgtaa

SEQ ID NO: 133238 - DNA, 1038 bp, Homo Sapiens
  misc_feature (64)..(64): n is a, c, g, or t
  misc_feature (110)..(110): n is a, c, g, or t
  misc_feature (151)..(151): n is a, c, g, or t
  misc_feature (161)..(161): n is a, c, g, or t
  misc_feature (228)..(228): n is a, c, g, or t
  misc_feature (236)..(466): n is a, c, g, or t
  misc_feature (507)..(524): n is a, c, g, or t
cactgattatatcttcgatccactttactagctgattttgtgtgtcagggggacttggaaaacncgcacggccttacgtctgcccttgctgccttgctcacatgtcttcngcgtatccctgatctggataccgtataccgcttgagtgagntgtacgctcncgcaccgaacgaccggcgcagcggtcagtagcgagaagcggagagcgccatacgcaaacccctctcncgcgcgtnnnnnnnnnnnnnnnnnnnnnnnnnnnnnnnnnnnnnnnnnnnnnnnnnnnnnnnnnnnnnnnnnnnnnnnnnnnnnnnnnnnnnnnnnnnnnnnnnnnnnnnnnnnnnnnnnnnnnnnnnnnnnnnnnnnnnnnnnnnnnnnnnnnnnnnnnnnnnnnnnnnnnnnnnnnnnnnnnnnnnnnnnnnnnnnnnnnnnnnnnnnnnnnnnnnnnnnnnnnnnnnnnnnnnnnaagaattcggcacgagggttggagcggcgcggctgtaggcnnnnnnnnnnnnnnnnnngaaagtgttttttcttcgtccttttggtttaaaaagtttcacgtcttggtgccttttgtgtgatgcgccttgctgatggcttgacatgtgcaattgtgagggacatgctcacctctagccttaaggggggcagggagtgatgatttgggggaggctttgggagcaaaataaggaagagggctgagctgagcttcggttctccagaatgtaagaaaacaaaatctaaaacaaaatctgaactctcaaaagtctatttttttaactgaaaatgtaaatttataaatatattcaggagttggaatgttgtagttacctactgagtaggcggcgatttttgtatgttatgaacatgcagttcattattttgtggttctattttactttgtacttgtgtttgcttaaacaaagtgactgtttggcttataaacacattgaatgcgctttattgcccatgggatatgtggtgtatatccttccaaaaaattaaaacgaaaataaagtagctgcgattggg

SEQ ID NO: 133239 - DNA, 436 bp, Homo Sapiens
  misc_feature (353)..(353): n is a, c, g, or t
  misc_feature (407)..(407): n is a, c, g, or t
tttgaaagtgttttttcttcgtccttttggtttaaaaagtttcacgtcttggtgccttttgtgtgatgcgccttgctgatggcttgacatgtgcaattgtgagggacatgctcacctctagccttaaggggggcagggagtgatgatttgggggaggctttgggagcaaaataaggaagagggctgagctgagcttcggttctccagaatgtaagaaaacaaaatctaaaacaaaatctgaactctcaaaagtctatttttttaactgaaaatgtaaatttataaaatatattcaggagttgggaatgttgttagttacctactggggtagggcggccgatttttgtatgttnatggaaccatgccagtttcattattttgtgggttccattttactttggtacctngtgttttgccttaaaccaaagtgaactgt

SEQ ID NO: 133240 - DNA, 798 bp, Homo Sapiens
  misc_feature (680)..(680): n is a, c, g, or t
  misc_feature (716)..(716): n is a, c, g, or t
  misc_feature (770)..(770): n is a, c, g, or t
  misc_feature (777)..(777): n is a, c, g, or t
tttttgtctactttcaagcatttgaaaatttattctatttcatcgctgcattgtatattattgtgtaatattgtaatattatcactgtttttgttactctagcatttgctttagggattacaccatacagatgttttaacttaaagataacttgtaatagccaacttttaataggcattatacaactttacacacagtctaagaaccttacaaactatatttccatttagtctctctaggttattgttgtcatatattttacttttactcatgctgcagaactcacatgacactgctattatttctaaacagccaattatctttaaaagatatttaagtaataagggcaggtattgtatatttacttatggtgttactattgccagtgctcttcatttctttgtgtggatccatgtttctatctgcacaaagatattattctttattttccttcttcctgaaaggcttttacactgttctcatagtccaggtttgctgataatatattacttttaacttttttatgtctgaaaaatatctttgtttcatcctttcttgaaagacggttttgctgggtatagaaacctaggagagacagttttctgcttttggttggaagatgtttcactggaagcatgaaagatgttgctccactgcccttccccttgcattgcttccanaaagaagtctggtatcatccttgtttttcttctctngtgtagacttgtctttttctctttagcacactgagttttgattcatttgcttangatgtantgtgatatggttttcttaata

SEQ ID NO: 133241 - DNA, 510 bp, Homo Sapiens
tttggagagtgctcaatggacgtagttattattatcatcatcagcacagtgcggggcacatggtgggcattcagggatgatggcccttgtgtcacagccgacactcttgaccagtgagtcctctctcctccctttgttgactcctgaccgtccacaaatgaggttcagaatcctccatccagcatcttccctggtcacatggtcccaaccttttgctccacccccttctctgttccccccgcagtccatgctccagccatcctgactctgtccctggatttctggcttactgacacctgagcctgtgcacaggccctcccttctgtatagagcacgcttcccatcttgtggacttgcttcccatcttgtggactcggagggttccgagcagccgttgaggctgagctcctatgacacctcctccgtgaagcctccctcacttttccattaccagtgaggcctgccacagcctgatttgtactctgatcctggcacgcatgaagccgtgtt

SEQ ID NO: 133242 - DNA, 674 bp, Homo Sapiens
  misc_feature (390)..(498): n is a, c, g, or t
  misc_feature (655)..(655): n is a, c, g, or t
cttgtctctgccccactaggatgagagttccaatgaaggacagcaactcggctcgttccagccaggtccctggagcatagagcagataagctagctatcacagactccgtcgcctggtcaaaggctgatgaggatgagatgcgagccctgccccttatcctgtatcccacttcctgctggtgtggctgtggcttgtgccttttatttaaaagaatttgggttggcctggccgaggggcacagcaggtctcatggtctcggtagactgggccagtcaggcccttgagtttggtctccatggagacgaggcattccggcactcgaaggttacatccacatgggcccaggagtggctgtatctgtgggtgcagccagggttccaggacacacnnnnnnnnnnnnnnnnnnnnnnnnnnnnnnnnnnnnnnnnnnnnnnnnnnnnnnnnnnnnnnnnnnnnnnnnnnnnnnnnnnnnnnnnnnnnnnnnnnnnnnnnnnnnntagaatgaatcctgaaatgcacctctgggatcgggaatggtctgtgtgttatcagctgcgactggttcactgcgtctggacaagcctcatggggactggggattctggccagtgtaatttctgtcaaccacggacgtttgccttcatgtgtagaatntagtccttcagtggatgct

SEQ ID NO: 133243 - DNA, 1010 bp, Homo Sapiens
  misc_feature (846)..(872): n is a, c, g, or t
  misc_feature (926)..(956): n is a, c, g, or t
gttctgcctcaaagctcagtttattgaagacatttgtaagctattggatcatcacttgaatcaagattttgactagtgagcttaattgtccatttcttacaatttcaaagttacagtctcagaaatggttaattttaataactgtcctatcataaattaatgttggaataaattgaagttgttgataaatacttcatgaaaactaaagtctgaaataaattacttgttttatgtccaatagctactacatttgatagaacagttttgaggaacatttcattcttgaacgcagcatctgacatggttctcagcaagttggaatagtaaggattattggcttgtttcgatgagtggaagcggcatgtttgtagcatacaagttattcaataatcttgtgctgatgacctaaaaatatgtcttaactattcatcaaggaaagcctggtgaagcctttacttgttactacttcaacagttggaattagttgctctttttacttgatgaaacaaaactatacctctgaatatttatggatactttttactaaatcaggcttgtgttcttaatccaaattagtaaagttttatggaagctgaaatgtaatacagtagtctccccttatctgtaagagatacattccaagacccctagtggatgcctgaaacctcagatagtactgaaccctttatcaactatgttttttcagtctgacaaccaaggcggctactaagtgactaaggggcaggtagtatacagtgtggataagcaggacaaaggggtgattcacatcccaggcaggacagagcaggagatcatgagatttcatcactcaggatggcttgtgannnnnnnnnnnnnnnnnnnnnnnnnnnctgagatggtgtcattgcacttcagcctgggcgatagagcaagattccctctcnnnnnnnnnnnnnnnnnnnnnnnnnnnnnnntcttcattgtgtaaggcaaagtttctaataaacagtgattttttttactagcat

SEQ ID NO: 133244 - DNA, 926 bp, Homo Sapiens
  misc_feature (85)..(85): n is a, c, g, or t
gataccacataggcctgaaagggtaatttccataccaatattttaaataatttttggcatgaaacaaagtgtgggatacactganccatcagaaagcaaaaggtgttaacatctccgccacccatgtggacgatctgtgattgtttggcatcaccatcattcctgattctgaatttatatgttaccgataagcaatcatttttttacacttattcacacataagtacttaacagtaaaaaaaatgacataccagtaatacaacgaaaaaaatagtgtattcaggttaagtaagccagcacagtagtgtcaccagaatacctgtatcagctgttaagcaacaataacaaataacagtaggctttcagtttccaagtatgatgctgttttgactaaaaggttactgtacactgtattttattttatttttaggtgagaagaagcatcagaagcagttgagggaccaagaagtgggtcctgtagagaggaagaagcattcctctggatggcttttttaaatgtttctttcagagtcatctgcctcattaatgatgctttttgtcttagaagtctctctttgattttataaactgacatgatttcttgctctgttatgaatgcatgctgctctagtcctttaataagcccatcacacatttttaccatgtcgtctataggcactttttctgcagtgttaacatcatcttcattatcattatcatcatgatcatcttgattcagaaccatttttgttacttcaccattggacaatgaatgaacaactggagcctcattattactgttaaaaacatctttgatatcctcttcttccagcttactgacagtctctggatgtatattttttgtatatgttaggaggtcagacattatttttttctcacttgacatactcctcgtgccgaattct

SEQ ID NO: 133245 - DNA, 490 bp, Homo Sapiens
atttcatactagtttttgcatgtattcacggtgtgaaaaatcacacctgtacacaatttgtgtgattttctgtatgtaaattatacttcaataaaaaatttaccaaaaagcaaccaaacagcaagtgagatatcactacacacgtattaaaaagcctaaaattaaaagagaaatcaatcaataccaagtgccagcaaggatgtggagcaacagaaatgttcatttacagatagtgagaatataaattagtataatcacttcagaaaaatggttggcagcctctatatctaaaggtgaatatgcacatattctatgaaccagtaattccaccccattacatacccatcacaaatgtacacatgcgtgttctcaaaagacatgtacaggaatgttcatagtagtattatcccaaactgaaaataatccaaacgtctttcagtgctgttggagcttattaaagtcaattacagctcagaattgcagtgaagtt

SEQ ID NO: 133246 - DNA, 492 bp, Homo Sapiens
  misc_feature (77)..(85): n is a, c, g, or t
  misc_feature (285)..(298): n is a, c, g, or t
tttttactttttaaatgtctttattggatacataattttaaaccaaaagacaattaagttgatataaaatctagtcnnnnnnnnncttcataattgttagagggacttaaatcaggtttaatcattcaggttcttccaaacttaaaacaaaaataacatacttttctaaaatatgtgtctggacaatttcaactaattataaatgaatttattcccatattccaatatagtaaacttttatttgatgcacactgtatcaagtagaaaataatcattctcacagannnnnnnnnnnnnncatacacattccaaggacaagggtagctaaaatctgcacataaatctaatttttctcagatcgatcccattaaactaatgaactcaaatcttatggaaagtttgagaatctagtaaacttcaaatgtattgattagtagatatgattttattgactgttaaagagcaaaccatttgcaatcttctgtctttatc

SEQ ID NO: 133247 - DNA, 961 bp, Homo Sapiens
gaaagcaaactcaggctttaatgatcagtttcctgttccttggtattttctttcaaacaaaggccatgtttttgtaatactccctttcaatggactgttctttcggccccagcaaacattcctgagtggtaggtttgaggaggtgttccaatttattgtttccggtgtccaataaccttggaggagtatctgtcttcatgccctccaaggccatgttatttcagaaagttacagcatttgaaatcattctctaataaaagcaagtgccactaattctaagtaaagtgagctttacaaataagaccagctatgaatgtttaaaaaaagaagaaaacaaaacgaacttcaacaacaggagtccataagtgcaactgtatgcagctgaacttcaggaattttagcatccatttaaaaagatatcttcggcaaattcatctaaattagctaaaaatgcttgacacgatgaacatgttgtgtctctaggccagtattcaatccaggtcaaggaatctaaagggtagatgtacctgaaactgaaattgtattttatctggagggcttctttacccataattaagtactgtcttccttttaccagctcagcgttagtacaggttacctttttaatgaaggtaatctcagagtctttctcagcaacagcttccccagttttgtagatatccagaagggttgccttgtacttgacaaaaacattttctacagtgatggatgtgatgctaactttataagcatatgcaatctctggtttacatgctgtttgttttcttgtctctgcagagattgtcagatccaattcttcctgcatttgcccacaatcagcttctacacacttgcacgcggctccttcacagactttctgaattttgatattggaagtgctataaaacatggtacactgtttatctggtctgtggtattcgtacactgtgaaagtggcagg

SEQ ID NO: 133248 - DNA, 1006 bp, Homo Sapiens
  misc_feature (804)..(804): n is a, c, g, or t
  misc_feature (813)..(813): n is a, c, g, or t
  misc_feature (823)..(823): n is a, c, g, or t
  misc_feature (900)..(900): n is a, c, g, or t
  misc_feature (983)..(983): n is a, c, g, or t
tttttctgtttttgttttaaaccactttattgacatatgattgacatgtaaaacgctgtacgtatttagcatatacaacttcataagtttagcagtaagtatacatccatgacgcatcaccatcttcaaggttataaatatccatcacctcccaaagtttcttcccacttcctttttattaatctgtgtgtgtttgtgtgttagaaagaattaacataagacctactatcttaataaattttaacaataaaatagtattgctacctatggtcactatgctgtatagatatccagaacttatcttgaataactgaagcagttagaaactgttagttaatgttctgaaaggcataagttctttaattattttattttatccagctgtcaatataatgaatacagacaaagtggattcaacttttgaatttttatataatgtttcttattctaccactttgattacataggtaaaaatgtttccaaagagtgcataaaataacttaatatactttaagtgattttggcaagatgactaaatatccaataattttttaaagtaaattttaatagttcaaatatacagatgaaatttgtattatgttacttttcattctgactaccatacagtcctagattacctccaagaagccctttccagttgaaaatgatgatagaaatgtgatgttttgcatcagacacctgactaaagtatctctactcatcagacttctgagactcaacctgcaggtggtcctgcatttagatgtctgctatatttctcccatcttaatctcgttcgagtanacaacttanaggatatcanggagcatttatgggagattatgtcttattttatcagcatagagaattactcaatgactggtatacatcgtctggatncagctacattctgggctcgtgcggattcttgggctcgaggggcaattcccttaaggagtcgcgataaatcggtatcatgtcanagctgtttctggtgtgaattgtt

SEQ ID NO: 133249 - DNA, 1377 bp, Homo Sapiens
cctttgacttcatcagatactgcatctgcctagaggagcaatctatccgattcacaggtttgtgatgatattcaggaaagtatggtttctctgccacacactgcaacacggtaggtcttcatgtaatactcaactcaacaaatagttgatttgtatattgacatatgtttctgtcattggaacttaactatgtcttttttcagtgtattggcagcaaaatgaaaatagaaatctacacgttgtattttaataaatatcaataattaattaaatagaatcacatacacatgcttagctaagcagaagaacacatgtcatttccatggtggctactctggaggcacatcctgagactctgggagggaggagacctagaatcacagcagaggagctgctattttcctctaagcccaaccgcatcgtagagccctcttctcccctaaaaggaaggcagtgagtcagaaatctaatttctcattctttgatatggaaagaaagaaggtctcatgtctctcagagatcacaaactgcccctgtgagcaggaggagggtgcagggagcctgagactgccctgtactgcctgctggggcttagctgggataagccagtcctgagaccctttagcttatgtcctgcccctctcatcttcctatcattacctcaccttccttctcagggaggatgccaacacctcattctgcttagccctttgtagattcccaagagttttcccacacttaattttattttgatatttctaacaacctaatgagagtggtgacaccatgggtgacatgattgcatcttatctacaaggagacagactaactgaaattattcatgaggacagctcaatgggtgcaatgtttaagctaaaccccgtctacaggttttccagcctttgctccccaatcccaagtcactacaaggagttgaaacaaaaggaggaactgccctgaatgaaagctctctggtctctaattagagtggtgctggctggcatctagagtatcaaatgtgaccatgtcccttgattgcatggtagtcgattcttaatttctgatatgattggaatttgtgcccccacccaaatctcatgtcaaattgcaatccccagcattggaggagaggcctgctgggagctgactggatcacggaggccggcttcccccttgttctcacgatactaagttctcaggagatctgggtgttgaaaagtgtgtggcacctcccgcctctctcttcctcctgctctggccatgtgagaaatccccccttcctcttcaccttccaccatgattgtaagtttcctgaggctcccccagccatgtttcctatacgacctacagaaccataagccaattaaacctcttttt

SEQ ID NO: 133250 - DNA, 824 bp, Homo Sapiens
  misc_feature (43)..(43): n is a, c, g, or t
  misc_feature (53)..(53): n is a, c, g, or t
  misc_feature (73)..(77): n is a, c, g, or t
  misc_feature (79)..(79): n is a, c, g, or t
  misc_feature (85)..(85): n is a, c, g, or t
  misc_feature (87)..(90): n is a, c, g, or t
  misc_feature (93)..(96): n is a, c, g, or t
  misc_feature (98)..(100): n is a, c, g, or t
  misc_feature (498)..(509): n is a, c, g, or t
cccgcggcgggcaaaacgaaatgggttttaggaaagcttcctncgaagggccngaaggcggcccgacaatggnnnnntntgtttntnnnnttnnnntnnnttgggatctgagaatttgttattcaaaaatacataaaaaattgttaaaactaaccattaggttaaacagccccattaaaaatgcacacagatctgaacagacgcctcaccaaagaagatctacagatggcaagtacacttacaaaaagatgctcaacatactagagaactgaaaaccacaaaaagatagcacagctggtctatatctcttagaactgctaaactctttaacaaatgacaaattgctggaggaaaaacaagaactcttttcattgccggtggaacacagtgtataagaccaaaatatgccaccccaaaatataatggtaggaaaccagaatatgcaaccccaaaatatgtccctttggcttaagaattattccaagctaattattttgnnnnnnnnnnnntgctaacaaaggaagttgtgaaaacagagaagttacacttgtgtaaggaaaatttacatctataaaggaaatcaccatttaaaagctacctctctcgacaccaagaagagaaggataactaaatcactaaagagtcttatcaatggagaatgcatggacttaagtctgtataatgaaccttacccttgtctaatgtgcttttgctggttaactccccaatactgcacctcaaatcttctttctttaagttgaagacagtatttatgcttgaattgaaagccacctgttggagatttactcatttttccctgaacc

SEQ ID NO: 133251 - DNA, 644 bp, Homo Sapiens
attcggcacgaggcaaaaattgatttgattctttcttagggaaaatatacattattattaatactctcatgctacaaaaggttttctggttaagctgcagccatcatcattcctaaaaatgaaacattggagacatttgtcaagatactcagtcttcaaacagaaataaaagtagataaaaaaggagttaacataatcagtatagagctattattgtctggtggtgaggacatgaactctggagctggaagtcttggatttggttttgaattttattctgctacttattagctcattggccctgaacaaatctcatgtttcagagccctcagttgtgaaatggagttaataatattactgcttcatggggttgttgtctgaacttagaacaaataatagctattatttgtaaatggttattttatgtagataacccaggagaagtctgggtgttgtggctcacacctgtaatcgcttttggaggcaaggcagcaggactgcttgaggccaggagttcgagagcaacatcagaaacatagcgagacccccatctctacaaaaaataaaacactagccgggcatggtggtgtgtacctgtaatttcagctgctgtggaggcttgaggggaagaccacctaagccca

SEQ ID NO: 133252 - DNA, 1315 bp, Homo Sapiens
ttttttttaaagttggtaaaagaattttattattatgtggcttaggtaggtttttgcattctactaacagaaaagcattttccacaccttattcaacctaacacattatacatttgtgattttatctacatcgctgcagtattacactattgaaaaccttcctttcaaatgtactttggtgcaattatacagtagatatctctgccttcagaaaataaaaatattctcaatctaaactcaaaatggaataaagacatcaataccaagtttgtgcaccacttggtaaaagattgcaataaaaatcagaagagtatgctgcttaacatataaagaagatgagacatctgccacagtttcagtcaaacctttgtaggaatgatttagcatctgggtttatttttactgcagttttcacatatgataggtggaattgtaccacaaagaatagtctcatttgcacgagagactcaaatattggactctagcacaggaaatgtctcttggggcttagtaatatacaaactgatagaaaagaaaattgccttaagaaaaatttcacaattgactaaacatctgaaacatttttatcacagctttcatatattaaaaaagtttcctccagagatgaagcttattgatgaaataaaacctagtcactatcatctgacccatgttctgagcctctatctgaggcctcattgttggatccctctggttccgattcatttccagagccttggccagaaccctcattatcagatcctctctccgattcgtgatctgattcggcacttggagaagctgggcgagagtcgttctcagaaactcctgagtggcttctccctgactgcacagattcattgtcagactgctcagaaccggagggccttctctttctggatggctggtcactgtctgagtcctgatctgaccgctgtcttcgtggcctccggggactgccggcctcgctgccagacttgttctggttctcatcggaatcactctctgatgaggcacatttctttcgttgttcgtcctcgtctgagtcactgttgctgttgctgttcctgggatgtccttcatcagcaattttaagtttatcctcatccgaagagtcatcacttgatgaaattatggctttggattttatttttcccttcattgatggaggcagacgttctggcttgggagcctttttcttctctgcttttggtggacgtcgtttttttggtttggggccattttctgtttcatcatcatcagatccttcttctccctttggatgtcttctcctctttttcttctttctctcacc

SEQ ID NO: 133253 - DNA, 2265 bp, Homo Sapiens
  misc_feature (158)..(188): n is a, c, g, or t
  misc_feature (275)..(371): n is a, c, g, or t
cgtatttcgtggagttcccctgcttttgtttgccccgtgttctttggtgtcccctttttggccatggtttcattttcagtcttgtgtgtccccgcgttctcctctatttgttctttttaccgtgtttctggggggcctcgttggtggccgtgccgcgnnnnnnnnnnnnnnnnnnnnnnnnnnnnnnnccgggtgtcatggagtgtatgtgtccgcgtttccattcccggtgaaactacttttataaatttacaatcaggcctggtgtggctcannnnnnnnnnnnnnnnnnnnnnnnnnnnnnnnnnnnnnnnnnnnnnnnnnnnnnnnnnnnnnnnnnnnnnnnnnnnnnnnnnnnnnnnnnnnnnnnnaaaattattatacaatcaatgcaagtacaaagattcaatttttaaaaatcaccagagtacaaagacggccacagcccctgcccgggtttaacttacatatatacagagtgggcggggcaggcatggccacagaggtggtattacaaaatatacaaagtggtttctttctttacatttcatagaagaagcctgcctcatttccaaatgagagcactagaagcacaaatcatgcagaccatttactatataacttatgaaaaatgctgtacagggctgtgactatagatatagagtatttggctctgtttgggaattgatatctacaagggggagggtcaggggaggactgtctgatatcctgacttgctgggatggtggagaagctgggatgggggaggccccaatcttgctgcacggctacacccactcctcctttcctagataaggctggagcgcactggccaggaagaattgggatggctgagggtggggcgggggcagtggtgtaatcaggcaggaggctgtggaaggcacagagaaggcatctaggatgagaaggaacacacccctttgacccatgcacacacgtgtgctcgactgtactcaatgatcccagttcactgggcagtccagttgggtacagctttccccaaaaatctggagctttgcaggcatggagagaggacagctaatcaaagcccatctgtgggaaaatggaaaaatgtttggaaagagattccagtgggtgggtggatggaaagaaggaagttaacccaggaagtcatcttgcacagaaagtaaggaggcagagaggggtggagagctattccaggtgcagatactccctgggattcaaggtggcagcatgcaggctacgagcctggataacttgcacgttttatttcaaaagatccaacagggagggcttttgttatctgaccaagagaggagcgttagactttagccacaatgcttttgaattgggcttcttagtttgctaaattaagaatctggggcccttttggcagaatgctatgctactcattcctcactttcttctcctccatctgccccactctctgtctcttaggaagacaagagcagcaggtgagcacatgtatccagcctgaactctagttcaggcgtggctcccatccccgaagcatgaggacaaggaaactgcaagtgaactgcctggactagcacacctgtccacgtgaggaagccctgatggggaatgtggggagcactaggaagtgggatagacccacaccttgtggtctgcagtttccaaacaatgacactatgtcccctgacccaggctgatctggggcaaggaggccatggagctgctgctcttggttgccagactttggtttaaaaaaagggagaggcctgagcttgatagtcatagagagtacacttcctcatctgggagagcctctcatacattccttccctgggccttttctttctgaagatggtttttgagtctgaaaataggttctactgaccaacccagctaggtgcaggattagacatccgtcccgccaggttcattctctaattctctttaggtaccatcctgtgccttcctggagtaaaagattactgagtgaccaggggttggaataaaagtgccctgcaggcctacccaccaagccaaagggaatcgagttaggtaggactgcatcaatttcattcgctaatggggagcaaatctcctcgaggtggtgaaagggtgcagaagtgggagggaggagagcatgcaaaactcaaggaccatccccccatccctgacaatctggggcgtcccctacaaggccgtgcattcggtctttgagtccgaggcagggacctcaccctgagcctctctgctaatggttatgttatc

SEQ ID NO: 133254 - DNA, 1049 bp, Homo Sapiens
  misc_feature (82)..(147): n is a, c, g, or t
  misc_feature (539)..(923): n is a, c, g, or t
  misc_feature (926)..(926): n is a, c, g, or t
  misc_feature (936)..(936): n is a, c, g, or t
  misc_feature (945)..(945): n is a, c, g, or t
  misc_feature (951)..(952): n is a, c, g, or t
  misc_feature (981)..(981): n is a, c, g, or t
agatagagtcttgctgtgttacccagggtggattgcagctgatcatagctcactgcagcttcaaactcttgggctcaggccnnnnnnnnnnnnnnnnnnnnnnnnnnnnnnnnnnnnnnnnnnnnnnnnnnnnnnnnnnnnnnnnnncttaggagtatagtcagactaacttctagtagttatatttctaataattgaggatgtaagtaaggatcaaatcttaaatcagtataatgcattgtcattccagagataaatcctagacccttcttggcctccttctgacataattctaatcctacagtctcagagatgctgttgtatcctgccccccaaccccatgatagtgatagtggtttttgccttgaaggaattgctttgtatttagcttttccccctctagatttctagttccttttcagtattggattggatttgagatttgattaacctagtactcaggttcagatgcttgcctctttgcaattttaacactcattcgacaataaagtcagtaaaaacctcgtgccgaattcttnnnnnnnnnnnnnnnnnnnnnnnnnnnnnnnnnnnnnnnnnnnnnnnnnnnnnnnnnnnnnnnnnnnnnnnnnnnnnnnnnnnnnnnnnnnnnnnnnnnnnnnnnnnnnnnnnnnnnnnnnnnnnnnnnnnnnnnnnnnnnnnnnnnnnnnnnnnnnnnnnnnnnnnnnnnnnnnnnnnnnnnnnnnnnnnnnnnnnnnnnnnnnnnnnnnnnnnnnnnnnnnnnnnnnnnnnnnnnnnnnnnnnnnnnnnnnnnnnnnnnnnnnnnnnnnnnnnnnnnnnnnnnnnnnnnnnnnnnnnnnnnnnnnnnnnnnnnnnnnnnnnnnnnnnnnnnnnnnnnnnnnnnnnnnnnnnnnnnnnnnnnnnnnnnnnnnnnnnnnnnnnnnganatgtgagcanaggcagcanaggcanngacgtaaaggcgcgtgttgcgttttcaangtccgcccccgacagaccaaatcagctaataaagggggaacgacgcataaatcagcgtccctggatcc

SEQ ID NO: 133255 - DNA, 1053 bp, Homo Sapiens
  misc_feature (43)..(61): n is a, c, g, or t
  misc_feature (656)..(833): n is a, c, g, or t
  misc_feature (927)..(927): n is a, c, g, or t
ccctcaactaaagggaaaaagcttgcggccgcggctgtaggcnnnnnnnnnnnnnnnnnnngtatgagaagtaatatttattgcaacaggttatgaggtggaaacaaataattagtcttacaatttgctagaagcatgacagagcttactaacattttgaagaaaaaacagcaaagaaagaagtcatcaaacaagatggtatcttgacaaaggcacagcgctccacaactgcttcatactctgtgcacaagaaatcctctcaagagagaggagaggagtgatgccaaatgggcttacattagagccgtggacactaccactggtattattcatacaaccaaggctctacaacacccctctggagaaaaagtgcaacacaaaatctgtgtaacaaaggaaagcaaaagtagcaataagggcccagaggaatacaaacagtgcaaatacagtactgcaaactcagtaaaaggagtttttgattggagtatgaactttcaagttgaagatatatttcacaggaatattcacccaaagcttgagagctagagcgaggagagacttgcagtcggtaactgagtagatgaaatgcataatttttcactaggtgataattccctttgggaagaagtgctttatctcctcgtgccgaattcttnnnnnnnnnnnnnnnnnnnnnnnnnnnnnnnnnnnnnnnnnnnnnnnnnnnnnnnnnnnnnnnnnnnnnnnnnnnnnnnnnnnnnnnnnnnnnnnnnnnnnnnnnnnnnnnnnnnnnnnnnnnnnnnnnnnnnnnnnnnnnnnnnnnnnnnnnnnnnnnnnnnnnnnnnnnnnnnnnntgcccgcttcagtcgggaactgtcgtgcagtgcattatgatcggcacgcgcgggagagcgttgagtatgggctctcgctctcgccatgatcctncccgtcgtcggtgcgggacgtacactctcaaggcgatacgtatcaagatcgggaacgcagagacagggcaaggcacaagcagacgtaaagcggtgtgggttcaagtcgcctgaagacaatcagtag

SEQ ID NO: 133256 - DNA, 1002 bp, Homo Sapiens
  misc_feature (86)..(120): n is a, c, g, or t
  misc_feature (159)..(311): n is a, c, g, or t
aaagatgtatagactcactatagggcgctagctcgccgagacgaacgaccgagcgcagcgaagtaggtgagcgaggaagcggccgnnnnnnnnnnnnnnnnnnnnnnnnnnnnnnnnnnncagtcgacggtaccggacatatgcccgggaattcggccnnnnnnnnnnnnnnnnnnnnnnnnnnnnnnnnnnnnnnnnnnnnnnnnnnnnnnnnnnnnnnnnnnnnnnnnnnnnnnnnnnnnnnnnnnnnnnnnnnnnnnnnnnnnnnnnnnnnnnnnnnnnnnnnnnnnnnnnnnnnnnnnnnnnnnnnngaaggaccactctcagtatctgatttctgaagatgtacaaaaaaatatagcttcatatatctagaatgagcactgagccataaaaggttttcagcaagttgtaacttattttggcctaaaaatgaggttcttttggtaaagaaaaaatatttgttcttatgtattgaagaagtgtacttttatataatgattttttaaatgcccaaaggactagtttgaaagcttcttttaaaaagaattcctctaatatgactttatgtgagaagggataatacatgatcaaataaactcagttttttatggttactgtaaaaagactgtgtaaggcagctcagcaccatgcttctcgtaaaagcagcttcaattatccactggggttatcttttgacaacttgccattatctgatgttacacaattcaatagcaagcaagtttgagacaatcgcagtttaaaagcatgaaccatttaacaaaaagtggaataattaaagataaagcacttcttcccaaagggaattatcacctagtgaaaaattatgcatttcatctactcagttaccgactgcaagtctctcctcgctctagctctcaagctttgggtgaatattcctgtgaaatatatcttcaacttgaaagttcatactccaatcaaaaactccttttactgagtttgcagtactgtatttgcact

SEQ ID NO: 133257 - DNA, 931 bp, Homo Sapiens
  misc_feature (672)..(683): n is a, c, g, or t
ccttctttgcagtttattatatgtaccttaagtgaaaactgttgtgatgttaaaattatacttgcataaaattagccctctacaagacagagcgatggaatccagctatgcagctttctggcaatttggcttagcacagtattaagcttagggaatcatgaagaagaaagggttaatgcaatccttatgaacaccaatagtttcagcaagactttgttaagtttggccagaaagtcactctggaagattccttagggggctgagccttttggctggctctttcccccttcactgaggcctccttgtggttggacagggagtgttttgtgttctccttcccttttcattttttcactcttatgctttcccatgccaagcaggtttttcctttgggggaagacacttaggcagagaatgaaattaagaaataatgtaatgatgatggtggtaattctttgcacagcctaagagcagttggctgctaattgtagaacggtaataaggggggccctgggccataaggtttgcatttggaacacctgtagttttcatttaacatcatggatcattaaacagctgctcagaatggccttattaaaacaaacacggttgcactgttttatgcacgtgttatattgcagtgagcagatcagatgcaaacaggattctgtnnnnnnnnnnnngacaccttaagcatactctaaaggtactatcccacaaagacgaatgtagctgagtatttttctgcctttatgaaactgaaaatgattgaacttgttggattttgctttaaaacttcttgctgtggctgaggggcatggaaagtgtgcaatgagcatcttctatgggggaggcgctcattgaagtcactggcatgctctaaaactggcctgacagttgtgtttctctcactgaaaaaaagcaaagtgtg

SEQ ID NO: 133258 - DNA, 1046 bp, Homo Sapiens
  misc_feature (712)..(712): n is a, c, g, or t
  misc_feature (773)..(773): n is a, c, g, or t
  misc_feature (785)..(785): n is a, c, g, or t
ccttttattatatcaatttattcaagtgattaaaaaacttcttggcagcaggatgacaaaacaggtctgtaaacatgatttcatccccccatcccttcttccaaggagcttcctatgacaggaaatcgaattctagttggcaaatccagtgatgaggtctgtagaaaaggggtcccgtgtcacagccaggaaggcagactcgtccctttaacccactccagccaggggtgctggccaggatgtgctgttctgtcatgacgtggtcactgagtctggttcgttggcagccccttccccaggaggagggagactctttggcagtgcggcagccctcccgggggcacgggcttctcagcagcagacacaggcaggcgaaaagcaggcagctgagcctctccagcgagcatggtattgctagggttgcaggtgccctggcaggtggccaggtgaggggctgaggcacaagtgctatcaggaacttggctgccccacaggggctgaggacacccagatggtccacgccagtggccttgaaatttcccctgcagaagccagaccgtggggaaacaagctttcgcgacgtgccaccccgggcagcttgaggcttcagtccttgagggggtgtgtgggcgccccctggctgctctttctctgcggccagaggctccccgttcatctcctgcagcgggtggtatgcatagtccccatgcangcgccggttcctctctgctctggacaggagcaaggacaggtttgctgcatgctgatcacangagggagggcancgcagggtgagggtacccagcgtctggtgaaaaagaaaatctcccgctcagggtgcttcagtggtggggaacgcttatctggaacctgcatttcatctgggggccaggaaatgggttcaactaaagctctgagccggcagcacaaggggatctcatgatttggccggcaccggaaaagggacgttcttcaatcttgggatttagggcatcatcataacggacccaatgcggattatcctcaccgctgggggaataggtgag

SEQ ID NO: 133259 - DNA, 103 bp, Homo Sapiens
ctcttatgcttcccaatgattctataattcatatgtttacttagaaaattgggaaatatcatttaaaacctttcatgtttttcatgtttaaaggtgattgctg

SEQ ID NO: 133260 - DNA, 295 bp, Homo Sapiens
aagatttaagttccttgagtctccgtctcctcctctgttaagtaaagcaaatgcttacctctcaggattgttgaaaggattaagtgaagtaacaaatgtaaaaataccttgtggaatgattgccacttagcagccactcaaaaaatatttgccaaacctctgttgtagagatgttgaaaatcaaatgaggttaattactgtgaatgtgtaacaaaaagtaaagcaccacataaatgcaagataatatcattactcagaccaacctgagcaacatagtgagaccctgtctcaattt

SEQ ID NO: 133261 - DNA, 1344 bp, Homo Sapiens
  misc_feature (82)..(100): n is a, c, g, or t
  misc_feature (286)..(294): n is a, c, g, or t
  misc_feature (1228)..(1262): n is a, c, g, or t
  misc_feature (1266)..(1304): n is a, c, g, or t
ggttggttaacgaacgggccaagtgccattgctcaaattaaccctcactaaagggaaaaagcttgcggccgcctgctcaggnnnnnnnnnnnnnnnnnnnaaaaagtttatttctagccctgaaagaacaaaattattgaacaaagtcaaaatacagcagttaatgtcaatgtataacaattaaataattgaacgggattaaattaaaaataaaaggcataaaatttgaagacaacagaaaagacaaaaactacttttgcttaattccatttctatcaaaacaagnnnnnnnnngccaatgcgttccaaccaaagatgttgaattccacacgtaactgtttctcttattacttctgttctcttagaaacacttctaagttctaagagaacagaagtgtgcttgacagaactatcatccatttctttctgcctctgtcttggcagctttctagagaattgaatgggaaagacttcggttctttcaaggccatggccagcgcttgcttcttctttcgaactccaacctcatccaccacagcatctttgccagagtgttcaatcaatgtgttgactgagaaaaaagaatgtgtgtatctattttttcttatatacacacactatcaaaaaactgattttaccagtttcaatacctactgtgggagcagcggagacaggaagacaatctgctttttgtattactatgaagttccactataaaaaaccccaaatgagtattaatctggattttagctataatctataatattttgacactgacatttcactagatgtggatctcagtatattttaaaagatttagactcaaaaatggatgcaaattctttaagcatctattttgtttttttctaattttagctactacctgatcagatctaaaattattctggctagaatacagtatatacaaacatgtatttaagtgagccctaaaagaaatactcataggtggtttagaatcgcttgttagaggcacaggttcgtttacagttgctggttactagactgtacgcagctggacacttctatgttaaagggaagagaatgaatactatgtgccaggcagtcaacacatgaagacagagttgtattagcctcagtgtcttatgcttcacaattactcgtttactttcaggtaggataaaatgttccatgtttccccggccgtaatggccgaattcccgggcatatgtccggtaccgtcgactgnnnnnnnnnnnnnnnnnnnnnnnnnnnnnnnnnnncggnnnnnnnnnnnnnnnnnnnnnnnnnnnnnnnnnnnnnnnctctagacgagctagcgccctatagtgactgtatcgactt

SEQ ID NO: 133262 - DNA, 2503 bp, Homo Sapiens
gtggaccggtccggaattccctggatctcgctcgctcgccagccgtccccgcgccccgcgtcccgcgcagccgcctcctggcctcgggcgccgcgcatccaggaaggaagcagccaccctcgccatggcctccccgcccgcctgcccctcggaggaggacgagagcctgaagggctgtgagctgtacgtgcagctgcacgggatccagcaggtcctcaaagactgtatcgtccacctctgcatctccaagcccgaacgccccatgaagttcctccgggagcacttcgagaagctggagaaggaagaaaacaggcagattttggcgcggcaaaagtcaaactcacagtcggactcccatgatgaggaggtgtcgcccacccccccgaaccctgtggtgaaggcccgccgccggcgaggaggcgtgagtgccgaggtgtacaccgaggaggacgccgtgtcctacgtcaggaaggtgattcccaaggactacaaaaccatgactgcgctggccaaggccatctccaagaacgtgctcttcgctcacctggatgacaacgagaggagtgacatattcgatgccatgttccctgtcactcacatcgctggggagactgttatacagcaagggaatgaaggagacaacttctatgtcgttgatcaaggggaagtggatgtgtacgtgaacggagagtgggtgaccaacatcagcgagggaggcagcttcggggagctggcgctcatctacggcacccccagggctgcgaccgtgaaagccaagacggacctcaagctctgggggatcgaccgggacagctaccggcgcatccttatgggcagcacgctgaggaaacgcaagatgtacgaggagttcctcagcaaggtctccatcctagagtccctggagaagtgggagcgtctgaccgtggcggatgcgctggagcccgtccagtttgaagatggagagaaaattgtggtccagggagagcctggggacgacttttacatcatcacggagggcaccgcgtccgtgctgcagcgccggtcccccaatgaggagtacgtggaggtggggcgcctgggaccctctgactacttcggggagattgcactgctgctgaaccggccccgggcggccactgtcgtggcccgggggcccctcaaagtgtgtgaagctggaccggccccgcttcgagcgtgtgctggggccctgctctgagatcctcaagaggaacattcagcgttacaacagcttcatctccctcaccgtctgagcacagctcccgccctgcagccccagctccccagtgtggtggccgtgccctgctcgtctgtgtcgggggcccgggagccgctgtgttgaggtgtgggccgggtggggctgggtcccggcagcgtgaggactgccccttccccggactcactttttggaataaatgatcaccttgtgcatttccaaatcaaaggacaagcggacaaaatgcatcccaagatcaaggaagggacaggccagcttcctccccacacgcctccccggctgcctctgtgggcttctcctggggggcccaccccacccctgccagtctcctggagatgcttgaggatcggtcctccccagaaccaggccaggacgttgcccctggggcctggtgaccctgtgaggtcaggtcccccagattgaggtctgagtgtgggcaagtgtgtcaaaaggggctgccccccaggggagatgaggctgagagcagggagttgaggccgaagaagtcaaggcccctcccgcaaatgtgtacccctgcccgcgccactgcaccccgccgcacccccacctcccccgggggccctgctgcggatgccggagtgggagagtctctgagctgtgagattgatcttgcccctaattggagaggaagccgggcgccaagacacacggggctcctgccttgggagccagggccgcggccgcaggtagaccccattttggggggccgggctcgaagttcctttgggaggggctggcgggactccagcaggccgtcctcacctttcttagaaagtccacccagggcaagttgatgttgggggaaagcagaagtcaagccagccgcgggccccacacgccccgacccgctcaaccgacttgtcccttaaatgtgtcttggatcccgcagtgatgacgtgagccagccaggcccgaaagggtgaggccagtgcagagaagcttcccaggggattcctgggttcccccgaaagacaagcgaggtcattgcagttcacccgatgttgctcctgtcccgtgcgtcccggggaggctgtccttggtccgaggctgctcgttgcagcccctcccctgctggcggttacgatgcgtggggtccccctccccacccagccccggccacgtcgccgtgtcccgcctgtgcctgtgacgtccctgtggacctgtgagccatccccccccttatctctgctctgaatactgcatgaagcattaaacgtgcaatgaagt

SEQ ID NO: 133263 - DNA, 954 bp, Homo Sapiens
acgtgccagtaactactaacggtcttaaggtagcgaggcctgggtggcgaattcggcacgaggcatcaccatccaggagatggtctggtgatccttgtagacagaaaggccatattctgtctcaaggggattgttctcctcatccttggtaggatagacagagctggagggaaaggagcactcctatgggaagctggtgcctgaggccgttggagatcagaaagcccttcaagaaggggaaggtgacctgagcatctctgcagaccgctgagtgagaagcgctctcccaacgactttgccttatggaaggcctctaagcccggagaaccgtcctggccgtgcccttggggaaagggtcgtccgggctggcatatcgagtgctcggccatggcaggcaccctcctaggggcttcgatggacattcacggaggtgggttcgacctccggttcccccaccatgacaatgagctggcacagtcggaggcctactttgaaaacgactgctgggtcaggtacttcctgcacacaggccacctgaccattgcaggctgcaaaatgtcaaagtcactaaaaaacttcatcaccattaaagatgccttgaaaaagcactcagcacggcagttgcggctggccttcctcatgcactcgtggaaggacaccctggactactccagcaacaccatggagtcagcgcttcaatatgagaagttcttgaatgagtttttcttaaatgtgaaagatatccttcgcgctcctgttgacatcactggtcagtttgagaagtggggagaagaagaagcagaactgaataagaacttttatgacaagaagacagcaattcacaaagccctctgtgacaatgttgacacccgcaccgtcatggaagagatgcgggccttggtcagtcagtgcaacctctatatggcagcccggaaagccgtgaggaagaggtcc

SEQ ID NO: 133264 - DNA, 3342 bp, Homo Sapiens
  misc_feature (69)..(78): n is a, c, g, or t
  misc_feature (133)..(134): n is a, c, g, or t
  misc_feature (257)..(257): n is a, c, g, or t
  misc_feature (262)..(265): n is a, c, g, or t
  misc_feature (267)..(269): n is a, c, g, or t
  misc_feature (472)..(508): n is a, c, g, or t
ccgttttacgtgcccgggttttttggtaaaaaaacggtgggcgccccgtttctttttcccttggggcgnnnnnnnnnnaaagaaaatttttatgaaaacttttcttggggccgggggcccccccaaaaagcannttcgcttaaaagggggtaggggaaaaaaaaggtcgggttgcgttagggcagggggtattaggacgtaaggtgttatggactgttaacagaggttagggccttgtggcggcggtagggtgtaanggggnnnngnnntaccatgtgtacgaaatggctaagtttattcaacatctcggatattcatctggatattgggtttgttttgtgatacaatacatattcaccttaactggtgctactgcaaagaaagctttcttgacctgcatgacgtgcctcagagcttctctccaccaattggaaccacccaaagcctagtctagaccaaagtgctctggagnnnnnnnnnnnnnnnnnnnnnnnnnnnnnnnnnnnnngttgtgcccccaaaagtactcagaagtcatatgttatttacgattgggtttgtgtgggatgggaagtagggcggatgagccagtgcttttgcaatgaagatgcaatagtcattgtcctctcccactgtctcctctttcctcaccccatggcagctttcatgacccattcccaaagggtccaccgagtcctgaactcagcttcatcaccaacattcctcgccttcagttgaattcaacactgttaagggagtagaggcaaagacttgggtcagggagagggtgggaaacacagaacaaactctctcggcacaacccaagttcagagacgaggcctcctcagatgaggaagatgatgccctcagacaccatgacctgattgtcatcctgcatcttgctcagagcagcctggatctcaactgaagagaagggctctttgctgtcccggttgatggattctgtgaggcgattcatgccgattgactgcgcatgagcttcccggaacacatccaagagggccaccttgaatgccttcaacctggattcactcaactccactttctgggattccttggtctcctgtgagtctgccgtctttggagtgtgtacttgaggcatttcctcctctgtgtcactgaagtcataggggtcgtatgaatccccatctttggcatctggctggcgagtcttccttctcttcctcttctgctcctggtcctcttggcttttctcctcttcatcttctgtctctgattcatcctcacttcgcttcttacgtttcttctccttctccagaaccttcttaaagtaagcatactggaccaactccacagcttcctctgcatcctgcaggtccacagtcttgctcatgcgggccttcgcatgggctgtggccagtcgaatcagagtttccagtgttcgggctgtaactggagatgtcctggcggtgtctgagctcatgctatcctggctgcgcaggcgtgaatactcttctgcaatgtaggtggccgactcctgtgtcaggacaggcttgatgattttggccacatggatgtacttcttcatgaatgctgcactcaccatcttctcctttttcttcttggtcccatgtagaaggttgtcatgcttctcataaatctgggtgtcctgctgatcttcctggctaaagttgggatcatctgtggccaggatatccacagcactacccaagggcatagcatcgccatcctgctccccaggtgctctgtaacggtgcatccgaaggacatggtctgagatctcccgatcctgctcaggatccatctgatccagcatgatgaagagcaagtcaaatcgtgacagcagtgagtcctgtagcccaatgttctccattggagtcttatactggtcatacctgccgtagacagggttggcagctgccaaaacactgcagcgggcattcagccgagcatggatgccagccttggcaatggtcactcgaccctgctccatcacttcatggatggctgtgcgatccatgtcagacattttgtcaaattcatcaatgcaaaccacgcctcggtcagccaggaccatggcccctgcttccagacggcgctctcctgtttcctggtctgtggtgacagcagccgtcagacccactccagaggagccccggccagtggtggggatagctcggggtgcagtgcaaagcacataccgcagaagctgagacttggcaacggatgggtctcctattagaagaatattgatgtccccacggatgtggctgccattttctaggtctcgttccacccctcccaagagcaagcagaggattgctttcttgacatagtcatgcccatggatacttggggccaatgacttggccagctggtcaaagatatccttggatcgggttttactgaacttcttgatcttggctatatcctcagcagagaaagagggctgagcatccttgctcatctgcttaacattacaggcaatcaggacagtcctgaaggtcccagaggtgtagcctcccttctttccaggaaggcaacggtaggttcccaccacctgaacccggtcaccaggcttcgctttatccaccaagtcatcatccagaatgacgtccacagagcgggggagctggccggctggggccttctccggcatctcctggatggtgatggtctggtgatccttgtagacagaaaggccatattctgtctcaaggggattgttctcctcatccttggtaggatagacagagctggagggaaaggccaccagggtggtgagatcagaataacgtcgctctatggtcttcttagtagcaggacagtagtggacactgcggacgactttgggacgaactagagaacatttagtgacaatgccctccacacagaccacacagctgaggaagcaggaggtaagagtccgcggggagacgtgcttggagccaaagctgccttccagtcctacgtagaactcctcatactgcttggcataggtagcatcaatggaggccacaaaatcctttaaggcccgctggaaggcaaccagctcctcaaaggcattgttcagaagccggttagccctcttctcgtttttcctgcgcaggtcattcacattgacaatcagccggtattggttgtcactgatcagctcccgaactttgctctgataaattccctggtcttcctcgtcgtccaggaagtccaggtaatctctctgagcctcccgcagctccacatcgtccagcaccacggtacccgccatgcccgctgccaaagaactacctccaccaaagtcgcgtggaggttcccaggatgactccaccccggcgcccc

SEQ ID NO: 133265 - DNA, 647 bp, Homo Sapiens
  misc_feature (48)..(61): n is a, c, g, or t
  misc_feature (647)..(647): n is a, c, g, or t
gaagaaaaaactaaacaaactgcgcaagtataaaatcagcaccaattnnnnnnnnnnnnnnattttatttaaaatttagatccctattcccacactctaataagctgtataatttttgtttagaatttttctgcaaacatactacaataagcttcttttatttggagacaaaatacagtggcattactggaaggaatatcacaacattacatttttatcttaaaggacaagcaaactttcagggttgataatgggataagcatgtttgagactggttaccttctggcagttcactgcatctggatatttctgaaaagtatagagaagctcttggattttaaaaatatcttaaaatacttttagatgaaaaaattgtaaaagttctgcttataagtttacttttctccacaattacaatatttaaaacaaagttttgttgattgacgttttaagcatttaaatttagaatgctaaaaacaattctatcctagactttcttcagggtaggggaataaatacatccttaacattgttttctggattgtaaacagaaatccagcagaggtcatcattatttagtacaaccagtaaataaatgtaagagaattcatatctgtaccaaatgcctcttcagattgttattttgn

SEQ ID NO: 133266 - DNA, 817 bp, Homo Sapiens
cataggggttcttttatttataaaagagtcacattcaagtcttaccagagagtagcaaagtcttcaattcctttcctttcctttgaagaaataaggtagagcaatcactcataaatccctctaattataaataaaatccaagatattatttgacaatgagatgctttattaaacttgatacatttactatataagaattctgtgaaaaaatggggtatgaaattattttggatctgaatctttgcattataaaatctaacccaaaactatgtcatttcactgtattctgtgactattagcagatggatgaccaaaggcaactacttcctttcctggcaaaacaagacaagtttcagctgacttccccatggtgttacaagttctcctagtgaagtaaaaagtcccaacccctctttctatgcatgtcatctccaggaaggtgagctttaggaagcacctgcgccagccctatatctgtgcttggcatgaggttcacacaggttcggccttgagatggggatgttcctctcaaccaaacaactctacttgaattattccgagactccttggaggggtgaaacttcaggcctgggtgtctctgcagtgagatgtctgtggttggtaaacagttctgtagagtcttgttctactgatctttcttctaggtctgactctgggattgtagtacaaccacctggcatgaccatggtctgtggggctgctgcatcggtacttaggcagagacggccacctttggataatctatcgcagagcaaggtgatatgtttcttcagttggcttgtgtctttgggtatgt

SEQ ID NO: 133267 - DNA, 849 bp, Homo Sapiens
  misc_feature (399)..(416): n is a, c, g, or t
  misc_feature (605)..(614): n is a, c, g, or t
actgttcttgacttaaattctgtcttatctgttacaagtattgctactcctgcttgcttttggtttctgcatgtgtggagtatctttttccatccctttacttctagtctatatgcattttactggtaaaatgagtttcctgtaagcagcatatagttggatcaggttttataatccatccagcaattctataccttttaattggagcacacaatctgtttacatgcaaggctattattgatatatgagtctttgcttctgtcatattgttttctgcttgttttatatattctttgttcctttcaatttcacattgattgttgttctgatagatttctgtagtggcaccatttgcatcctttctcttcttcctttgtgtgattactttaccagtgagcnnnnnnnnnnnnnnnnnnactttgatgtgttttcatgatggcaaaagtagtcccttcatttccaggtttaggactcccttgagcatttttctatggctggccttgtggtaacaaattctttcatcatttgcttgtctgagaaaaactcttcttcatttatgaaagatttctttgctggaaaaaatctttgtaattatggctgacagnnnnnnnnnnctttcagcactttgaatacatcattacattttcttctggtctataaaatgtctgctgaaaatggagttttctctataggtgactatgtgcttttctcttgcttgtttttatgattcattctttatctttgattttaaacagtctgactccatcttgaggaagaattttttacatattgtatctgcctggggatccctaaatctcctgtatctgaatgtctaaatctcttgcgaga

SEQ ID NO: 133268 - DNA, 1666 bp, Homo Sapiens
  misc_feature (738)..(809): n is a, c, g, or t
ggccccccagaggtagtacagttgaggctattccatcgcgcgtatgatataagtagagcgggggggtggcatgtatctagtgggagaagatagtgatagatgatggcatgccgggcgcttttttgtgcgctacatcgcgcgggagagtctttaattttgtgcatccggcgcgccgaggaaagacacagtagtgggggtgagtgacctagagggcggagtgcagcgcaggtttataacattagagatcggcacctggcgggatgatgggaggtcgtgccaataggcgagggggtcggagggagcgcggtttatataattgtgtgtggcagcgcgcaggcaacatagggtcgtgagtgagtagaggaagaaaggggcggcggcgggagctggccactgcatatattgattatagagggtgcggacctgggagtgttcgtcccggcgtctcgcgttataatatttcgacggtaaaatagggcgcttcgtggtggtgtagacgggtagaggggtgtggtagtatgagacgacgtgttccgtatgtggcacacaggcggaccgtgtttcgtttgtattggttgggggtaacaaagaccgtggggatttagtaaaagggggtgttcttaccgaaaacaacgcgttctcctcattgctcggtcagcgcactgggggggcgcgcgcggccgagccgagtggtgttgttaaggctgattaaatgggagggagcgggcggacagacannnnnnnnnnnnnnnnnnnnnnnnnnnnnnnnnnnnnnnnnnnnnnnnnnnnnnnnnnnnnnnnnnnnnnnncagttcaatacagcacacctttattgagcacctaaggatctatgctgccagaggagggcagagtcgacaaaacagtgggcaggcctcccctgcagctctctgtgtctgtgatgatggagctgggttggggaaatcctgctgtgacatttgccctgacgcagttccgcacagcatggtggcttccaagctatgctcttgatgggcacccgtaaggagcttctacatgcattagagatggagcctctcctatctttgcaagcctttgtggttcttccctttaaatctgccatccacggacctcaacaggagaataatttggtcttcagtttgctctgttttagacaaatacttcacatgactgatgtaaactgttgcatagtttcgcaaaggctttctcattcattcctgaaattctccatcagtcacaaacacaaattgttcagtatctggggaattcaaagccctttcctcaaaacagacatttctccttatcattgttccttcaggggaagtattgaaagtcattgaaagtcatccccacccactagaggagagaaacgcaagcccagaaaaggcaagaggtacacaggcatcctcgggacagtggtgatggggctgagcactgccttccagagctgctgctgggcattgagcgggcagcaccctctcaatgccatgtggaccctcctgcaatgtgattgaatgaccgtgtttcttgcagcaagctccttgtaagaatcgctttaggtctctctgatgaagtaaagattgatttctgcagagaaagtgagatacttgtggccttattcctggtctcacctctgtgttggggctgagatcccgggaattccggaccc

SEQ ID NO: 133269 - DNA, 1049 bp, Homo Sapiens
  misc_feature (106)..(115): n is a, c, g, or t
  misc_feature (747)..(747): n is a, c, g, or t
  misc_feature (770)..(770): n is a, c, g, or t
  misc_feature (827)..(827): n is a, c, g, or t
  misc_feature (846)..(846): n is a, c, g, or t
  misc_feature (875)..(875): n is a, c, g, or t
  misc_feature (921)..(921): n is a, c, g, or t
  misc_feature (927)..(927): n is a, c, g, or t
  misc_feature (934)..(934): n is a, c, g, or t
  misc_feature (944)..(944): n is a, c, g, or t
  misc_feature (956)..(956): n is a, c, g, or t
catgtttcaattataaattttatttaagaatactgactaacacaggaaacagatttaattcatggaattgtgcatatggtcatccgttacattgtgacatgttaannnnnnnnnnatcatttattggcactgtcaacagattacttgtgaacaagatcactttgtacgcttaagtctgcgatgctacttagctatggttttctaccatgagcttatatatagataggtgtaggtatgtagatacattaatgctatacacaattttgcatggttactgagcgtcagtaaaaattatgaaaaaacacccatttataataaaagtgaggatgtactaagacttgctattactggaccttgttttctgtaaaagtgatgacacttgctggacggttactaaactctatggcactaatgtatgatggattcatttccagactgtcggccacggaagcacttcttcatggcctctgccctggacagcagcctgtcctccgggctccccatgtttttaccagcttctgctgagtttctacaatcttgagctctgctgagaattcttttccttgaaattcttctacctaaagccccagcccccaaaagagcatgtctcaggaactcattatgccctgagtcaacacgaacttgttgataaatggcttacaagtttttacaagaagtacttcccttggtaaggagtacataatagctctggaattttccagataaaactatttcatttctctgtcnagtgcccatggggacgagacganatattggagccctctcccctacaaagagagcacttttctggttgtgccctggcttanaccctttggactccgaganacatactgaatattgcaccacatgctaangtttcaggagaaagcatacttagccataatgataactgtttggttngcattntgctgcntgttacatangggctatgaccnttggatgctgctgtggaactggctcccactgaagattgatgcatgactgaatgctttgcaagcgtcctcctgacacctcctgctgctgctggg

SEQ ID NO: 133270 - DNA, 1477 bp, Homo Sapiens
  misc_feature (13)..(13): n is a, c, g, or t
  misc_feature (98)..(98): n is a, c, g, or t
  misc_feature (132)..(132): n is a, c, g, or t
  misc_feature (153)..(153): n is a, c, g, or t
  misc_feature (176)..(606): n is a, c, g, or t
  misc_feature (624)..(638): n is a, c, g, or t
ctcccgatggtcnacgctacttggagcccagtcccgagggagcgacagttcgtagcgcagtcgacagaggcccgaggactccagggaaccctgatctntagctgtcggttcccactctgactggcgtgattnttgtgctgtcaggggcgagcntatgaaaacgccgcaacgcgccnnnnnnnnnnnnnnnnnnnnnnnnnnnnnnnnnnnnnnnnnnnnnnnnnnnnnnnnnnnnnnnnnnnnnnnnnnnnnnnnnnnnnnnnnnnnnnnnnnnnnnnnnnnnnnnnnnnnnnnnnnnnnnnnnnnnnnnnnnnnnnnnnnnnnnnnnnnnnnnnnnnnnnnnnnnnnnnnnnnnnnnnnnnnnnnnnnnnnnnnnnnnnnnnnnnnnnnnnnnnnnnnnnnnnnnnnnnnnnnnnnnnnnnnnnnnnnnnnnnnnnnnnnnnnnnnnnnnnnnnnnnnnnnnnnnnnnnnnnnnnnnnnnnnnnnnnnnnnnnnnnnnnnnnnnnnnnnnnnnnnnnnnnnnnnnnnnnnnnnnnnnnnnnnnnnnnnnnnnnnnnnnnnnnnnnnnnnnnnnnnnnnnnnnnnnnnnnnnnnnnnnnnnnnnnnaagaattcggcacgaggnnnnnnnnnnnnnnnccacaaatccgttctgacatacggataaacttttattgacataccaaagggaaaaaaaccaatattcactgaaggctgccgaatctatattcctaagagtaaaggtgtttaattgactctccactcttaaaacactttgtatgaaatatagctaggaatatacataaagaattcagattacaaaactctccaggaaatcaatagtgatcatataatactggaactacagttaaaaacaaacaaaccaatctttgaggattcctaactgtagtttacttgacagtgcagatcatctgtaccaactttctatagcaagttgtaataggcaattgtaagcaaacagtatcaatctgtgtaacttgtaaaaattcatctgaagttgtttggagctgtatgacaatggatgttattcttccggttctcccagcagctctacaaaatcagtgatataccatttggcgttatccttgacttgttgcctgatcacatttcctccaaagccaatgaaagcatccgattccttcttcactgatgaccgtgctgtcaacatcaaaacacacagcatctgctgagtagaaaagcttcctcagctctgagtgggagatcatccttggaagaattttcctcccaggctcaggtgaggcgagtgcgccgccggggctgcagctggcgctggccattgagaagcttctgcgctaccttgcgatcgtgcccgccacttcccgcaggacgggaagtcgtaaagctcctcctggtagcttataggcggcggcggccaggcagaagcctgcggacacccaacagccactttagctgacgccagccagggagcctgtccc

SEQ ID NO: 133271 - DNA, 1957 bp, Homo Sapiens
  misc_feature (707)..(717): n is a, c, g, or t
  misc_feature (1340)..(1340): n is a, c, g, or t
cagtcgacggtaccggacatatgcccgggaattcggccattacggccgggatttcagctttgtgtaagtaatttgaatatccaaagggttgtgatgatcagttctgaatatgcaactgtccacttaataaggacaagtattccagtatctcttatgactgtagtcataaatgatgttggaatgtacattttgtgaaatagttggtatccctttactatgattaatttttgttattccaggaaatacttgtgaagccagccaattaataaagcactttagcatctgttcaggtagttttgaaaacccacttttccccttcaggataagaacttccaggttacctaaaaatgcaataaaaatctttatagtctaagcttcttggcatataatttttcatcagggttttcttttattaattgagcacaatactgttttgatttaatttttttccctcaaaccacccagctccttacatagtttttaattatatagctatctgaaagaggtggctaagacatttgctgcacacacttgaactaatgttgggtcagtatcttcgtgttactgccctgatcccagtgtaattcaggtggaaaggtatttttatctcacagggatatgtagctatgtattttactaattgtgaaacactggaaattaatgatgcagacaacttggtgtggtctttgaacagctctctgcagtannnnnnnnnnncctgttaccataaattgtatttaagtgcttgctttccacttaagttgtactaatagaaccggtaactcccagccctccctgtttgacactccttagcttagattgatgtagttgtttttgttatccctataatgtgacttttatttttaagtcattgtgtactgcatttgtttgtcactagttgggcacgtgccaataatattctctccattccttatctgccatctctgttttgcctgatttctcttcaactgaataatggctttttgcatggaaaaaatagtttttactattagacgtgtaaagggaagagagagctaatgtattggactttgtgagcctacaaggaatattttggatccctccaataaataagggctatgtactatatgtactatatagagttatcatgtggtggaagatacttgcaagtcatagatttatgggcaggaggatttgttactccctatatctaggctgaatgtaaaatcccttatgttgtatcaatgggggtaaaaactatttttatttgcctatgatatacttggtttctaataaagtgccctaggctctagtgagaactgtctactttgaattgccatttactccctttcctcctttgngcgatatgctcttggctagctttttataagttgaatgtgtttccccaaaaagtttcactactttatattcatttgagtgtgatcctaaaacacctggatcaacagtacatctcatatgcaatctgcatcagctcctattctgtctggatgtctagaactgttggaagattttgacgtcttaagccctaggttttgctttgggaaataaggtttgaaatattgttcattgcattaagatttgtgtgtgtgtgctttgtaagcccagaaccaggttttggaaaatgcctgtactgtgaaagcaaattaggactctttctgagcctctttcattgtcagaaatagaatcactttccatcagcttccaggaaattgtgtatctggagtcgaagagatttgacatcaagaatccagatttttaaatgtaattgttttttaaatgctaatgtttgtaaagcaccttcagttcttcggatgaaaggtgctatattccctcagtgtaaattaataaaaagattacaggaagtttgtcaaaaaattcaatgcatagtctgtagtatgtcctgacaagaagttagcattttatataagaaattaaaaaatgcttattcctccaaaaa

SEQ ID NO: 133272 - DNA, 1006 bp, Homo Sapiens
  misc_feature (186)..(328): n is a, c, g, or t
  misc_feature (748)..(802): n is a, c, g, or t
caactcaggcagcttttattagagtattatataccaagtatatgatgaggagtccaaatgcaaactggatattcaaggaacttaggatttcctgggttaagcctattagcctaattaattttattccatttatacttacttttcacatgtccatcagtagctcccaaactttgctgcacaagttcnnnnnnnnnnnnnnnnnnnnnnnnnnnnnnnnnnnnnnnnnnnnnnnnnnnnnnnnnnnnnnnnnnnnnnnnnnnnnnnnnnnnnnnnnnnnnnnnnnnnnnnnnnnnnnnnnnnnnnnnnnnnnnnnnnnnnnnnnnnnnnnctgtagaccttactactcaaaatgtaattagaacagccacagcatcctcacctaggaggagcttgtttaaagtgcagaaatctcaggccccttctgtgtatgaacacagccctgatttatgagagacaagttaactgatggaagcaaataatcttgttctatgaactgatgaagcaaataatctgtttctatgattaactgtctgagtaaccgcttaatgtgagttcttttaattatgtggcaagtgatagaagttatgtactttcaggtgggagaaatggcctgctttgctagaatatcctaaaatatctgaaagggacaaatgtgtctactgataggtcaggacttcagtgctgactttctgagattcttgagtaaagatcattcccttccttgttcttccttaatagatcaaacggnnnnnnnnnnnnnnnnnnnnnnnnnnnnnnnnnnnnnnnnnnnnnnnnnnnnnnnaatacgtgagatacactgcagtatatatgtatgtctgattacgcatagaaaaaagatctggaagtttacatatcaaattataagttataagtttaccttgagggtgtggaactgtggtagggtgaggggactgctctcatttttaaattcacatcccggccgtaatggccgaattcccgggcatatgtccggtaccgtcgactg

SEQ ID NO: 133273 - DNA, 1074 bp, Homo Sapiens
  misc_feature (539)..(549): n is a, c, g, or t
tgagtatgggaaagttagtcacatggtacttttccacgtaatacttgatgctacaatgattgtgtatgtcggtgaatcagaggactgtacattagaggagccacattaagggacatccgagtttaaaagtcccctggatatagagccctcaagcagcgacccctcaaggtggatatttaaactgtaagcagtgcttgactctgcctggagtatctacatgaaaaataccacattctggagatttcacatttagaagaaagcttcatagaagtcactttgaaatgctaaaatagcccaaggccagaaattgagggtataaagactccattcagaacagattccaaactagtacactgaaaccttggtaatctatgggtgtaggttagggacatcttctgttttccagttgtttatcatttctcccaatttcccacatggctgctttatatctcaataattttaacctgaaaatattgtaattttagttggaaggaataaaattaattgcatctagattcattgcagatttgttttagttnnnnnnnnnnngagaacaatttgagactcactattttccattattcatttttttccacataattatttctagctacttaataaacatttggggattgaatccctgaagttacatatttaaaatttgaggaaatcctttttctcctcttctagttttttctttattgaagtcactagagatgacaaacttttttattataaacttttttccaacaaaaaagatattttaggtgactattagattgatagctaaatatcctcatcaaagtcaaaacatctgtaactaaaaagtgctgtcttttgcaagctacacaattaagagcttaactatcaataatgtaattttgtactcctggaagagtattcctgatctaggtatcaaaggtttacgtaggaatatatttactatataatatgagaaattcaaagagcagagataaaaagcacagatctaatggccataccatttttagaagttacaatagctcccggccgtaatggccgaattcccgggcatatgtccggtaccgtcgactg

SEQ ID NO: 133274 - DNA, 417 bp, Homo Sapiens
tactttaacatcatcttaatccagatcctgtttcaaaaccaaaactgagaaagatgggaagcaatgacaattgtgcaacttatcagaggaatatatgattaatttgaaagtgaagacttttcagctggccagaccagaaatcatacgttggtaactatctttttaatattaattaattaaatagaatgacaaaattaaatgcaactcgatctgggagaataaagttgaagtcaccaaggcactggggacttcgtggggttttcactccatcgggaaataattacacaatattttccagaagtgaaacagtgagcctaactggaaaaaaatgtggaaacatttagtcagaacagtagagcaaggtattaaagatcctttaaaggggttaactctgaagggaaatacgcacctcgtgcc

SEQ ID NO: 133275 - DNA, 1153 bp, Homo Sapiens
  misc_feature (67)..(279): n is a, c, g, or t
  misc_feature (1133)..(1133): n is a, c, g, or t
attcatgactcaggaatgtatggactttatttatacttctatataatttttataattaaaatgaccnnnnnnnnnnnnnnnnnnnnnnnnnnnnnnnnnnnnnnnnnnnnnnnnnnnnnnnnnnnnnnnnnnnnnnnnnnnnnnnnnnnnnnnnnnnnnnnnnnnnnnnnnnnnnnnnnnnnnnnnnnnnnnnnnnnnnnnnnnnnnnnnnnnnnnnnnnnnnnnnnnnnnnnnnnnnnnnnnnnnnnnnnnnnnnnnnnnnnnnnnnnnnnnnnnnnnttataggcatgagccaccatgcctggctgcatcttacactttaatatccttactgttccataaaaaatgttttaaataatgcccacctaataaaagaatctctcatatctttggtgcagcaacaattggtcacatgctttcacatgtcaatatatcaggaatgaaaaaagagcataaagttatttgagagtttaattacatcattattcactaatttaaaaatcagtaattttttcaagataaaagtatactttaattgtaattataactgaaaatcttctacttcttttaatgttatatacaaataatttatccaccaagttttattttgtgttgttttctgtacttagcactgatttagtgtaatgtctgaagtgtccgcgccttagatatttctactgtgaattctcagatatttacataaacttaatttcggattaaatttttttcatttttactgcatctgcaaaaacatattttagtatgaaccctgtggtgttttctatgctgtggtttttttaaaaatgtttttccaaactgattacatttgtagggtttttctccaatataaattccctgatgttgaataaactttgtactatcaaccaagcattatagaccctcatgttttataagctgtagtttttcaaaactgtttttacaaatttattacattttccaggggttttttccaatataaattttctgatgttgaacagtatttgagcaactgcttcagggttttctttagtacaaaatgtgtacaataagatctgtgatgcaagtaatggtactacaaccctcttaatatttgtaatgtttgtcttcagaatgaattatcttcttcactttanaggcttttattttctgaaag

SEQ ID NO: 133276 - DNA, 749 bp, Homo Sapiens
acagctagtggtattccattgtgtatgtttcccataacaaatgttaatgacctgcagtgagatccctattggtggaaatttgagttgtttttactacttttatattacaaacaatgctgcaataaatattattaggctagtgcccctctgtacatattcaagcacttctagaagataagttcctggaagcagcattaatgagttagcggtggctacatatgccgtggtgatagctgctgtccagttgcccctccatgggcagaaacctgtgggagggtcagaccagactctttaagtcattcttgaggacaagtagaagggacgtgggcccccccaggatgttcaggtaactggcccatacccggagtcatcctggtgaaagtcaaggggagcaccatgatgtgtgcttcgggacggcggaggatctgccgtgttccctgtggcatgtccagcacctgctcactaccagtgctcaggagaccctcacgagtaagggaatggacaagatgtggtgaagaggagtccctgcaatctgcccttggactgggtgagccaccccagctcgctgagctttactttccttaggtttaccatatccaaagccaactgcagggctgtcaggaggatcagaaatactgtaacagacataatgcaataacatagatgactcttagaggtaaattaaaacagcactttatgcacagtacgatagcatattataaagctcaaaaacaaacctcgtgccgaat

SEQ ID NO: 133277 - DNA, 1046 bp, Homo Sapiens
  misc_feature (41)..(60): n is a, c, g, or t
  misc_feature (597)..(597): n is a, c, g, or t
  misc_feature (850)..(850): n is a, c, g, or t
  misc_feature (924)..(924): n is a, c, g, or t
ccctcactaaagggaataagcttgcggccgcctgctcaggnnnnnnnnnnnnnnnnnnnnagtgcaaaacaataaatttttatttgttcacagttaaacacaagcaactgccttgacattttagaacattctaagaaggacagcaaactcttttgattccaattcccattcactaagattgtaccattttatcctgcagttcatatttatggcatctgatgtggattgttgacatgcttttaggattgaggcgggaaagtttagaccttttgacaagagctgactttcttcaatttaactaaaagcagtccgttaaaaaaaatcagtttctttcactgatgggacccctttaaactgcaagtttgccacacatggttcattcatgattgagttataaaactagattatgtcttagcaaaatctgttcctccgtaatatatttgtggtccatagaagtcttctgaaaagtgattactgattcttcctagtgcaaaatgcgtggctgcctctttcataagccaaagtacttgctacacagagcagcaccataccctcctgtccaaacactgtaagaggtggggaaagggagggaagggnttggtctggggggttctcagactctcagggtttccactgaaaggtccattccaatggttaaaccagcctacttatctcagaggatggataatgtggcgctgcgaagtggggaaggaagctccctctgccatcattaactcgtttcatgaccagaagccatgggcacaggtgctcggctcttccaggcaggcttccttgtagctacagctactcctccctcaggcgagcagataggactgcaggacggcagggnagaacaggacacgctcccctgggcaatcgaagagtcccggacaggcaaacagcacatgggacagggtcacacancagcctaggggcagtcctcgactaaacttgtctttacctacaggcaaagctaatccagtgcaacaagctttggatcttggacatccggggggagggtccaaaatctgggggtaaaaatacca

SEQ ID NO: 133278 - DNA, 651 bp, Homo Sapiens
  misc_feature (138)..(146): n is a, c, g, or t
ttttccataatggtaaacatttacttgagttctttgtaaagcctggtactatgttaaacattctatatacatggtctcatatagtccttacgagtcaatgtggtaggtaatcctatattcctattttagagatgaacnnnnnnnnnggctttgagaatttatcaaggacccataataatccacagaacctaaattcaaatccttttgtccaactccgaagacttatctcttaaccacttcataagattaaaacgctgaaggggcacatactgttatgaattttaatggctcctacacatgcatcctttatatatacccttcatgatttttcaaaccatgtcagattctcatttttcaattctcaagatacagcatcttcttatagcatcttcaccacctttcccgtttactgtcttaaatgtgcccaatctcggaaatatcaataacaaaacaagcttgttgacattttgtgaaacatttaaggagacttccaaggaatgtaacatatgtagactttgtgacacatatattggcatgtggtcacagctctgttctgagatgagatgttactattttggctttgagacatgaaggatatgacatttaagtctaaacatgcaccagccaatcttgaaaagtcagcatactcat

SEQ ID NO: 133279 - DNA, 657 bp, Homo Sapiens
  misc_feature (475)..(527): n is a, c, g, or t
  misc_feature (546)..(546): n is a, c, g, or t
  misc_feature (564)..(564): n is a, c, g, or t
  misc_feature (585)..(585): n is a, c, g, or t
  misc_feature (612)..(612): n is a, c, g, or t
  misc_feature (616)..(616): n is a, c, g, or t
gggggcagacatgactttattggaggaagtcagtggggcgggggcagggccctcatctgctcccccgaggagacccgggcaagctccctggaacttcaacgggccaggcaaagcagggagggctaaggggtgcaggagactggagaggggtctggggaaggggctggggcaggaacagagggccaggtgaagggagtagggcggctcacacatggtgcccctccagcaggggcaggtggcccagtgccgagtggcagacagtcccgtaggcttgggagtagcctccaagcaaagccctggcacccccctgggcaccctgcaaggcagaggtgctgaacatcctccggccgggccgggcctccggaggaagccggggagggacctgtgtacagttgagggtcacataaaggggccatcagagggggtgcagtggaggggaggccttgaggtcctcgagagatttgaactggacatnnnnnnnnnnnnnnnnnnnnnnnnnnnnnnnnnnnnnnnnnnnnnnnnnnnnnaaagcagtttggagcaggngagcggagttctgcctgngaacgttcttggctgcacggngggactcgtgctcggcagggtcatggnctgngctgctctggggcctgggtctgggacctgcacaggtgtcct

SEQ ID NO: 133280 - DNA, 1038 bp, Homo Sapiens
  misc_feature (240)..(260): n is a, c, g, or t
  misc_feature (898)..(908): n is a, c, g, or t
gtagagacagtgtcttgccatcatgctggggctggtcctgaaatcctgggctcaagcagtctcccaccttagtctcccaaggtgttgggattacaggtgtgagccagtactcctggcctgaacttggttttctgtagaaggagggaggttgacaaattgctaatgtgatatagaatttcaagatctattcttgagaatcctaaaatttttccatgtttgaagcattagcaaaggatgttnnnnnnnnnnnnnnnnnnnnngaacaaatatagaagagaaactagtatatttgagttcctaaaaaggaggaacaagttttactaggcattaggggagagtaggagagattatgtgggtaaatgatgacaacaagcaaatagcaatgaaggataataatttattttctgtttagaattttgtagtactttggtagaaaagtgttagcaagctcaaggaggaaggtgaatactcagccaccctagattttgagtatatgtattaattcagttattcagaacattttctttaggagtatcatataaattggcgtttaattaatgtggtcaattaatgctatcttttaaagctatcttaatggattaagtaaaaaacagaagaatggatagagattaataaactggaaattacagaggcctcagtcaaagctgtcaggaatacgtcgaaccttcttttttcagagttgagtgtctagagggcaatagttggaggggtaatagatctgcaattctcagtggctgttaagtttatacagaatataaattattatgttggataaaggatcaagtctgagaaataggctgatagaggctatatttaagaaataagagtaattttaaaaatttatgtattttctagcatttgcctcaaggattgaaannnnnnnnnnnacttgtgtttacaggtagaattctttatttaaaaagtcagttgaatatcaaaactatttgatattcttcagactggaatattattctctagtgtagaagaatcaaattgaatcttttacttacctcttgc

SEQ ID NO: 133281 - DNA, 655 bp, Homo Sapiens
  misc_feature (343)..(359): n is a, c, g, or t
tatggaggatgtggtctgtgaaatggctgatttgaaacatgaaggaggctgcttatgggatgggttattctgggaagcaagcaagtgcgagggcaccagaaggtatgaagggccttggagtactgggctttcttatggctgcgagagaggatgagttggaatgagatgagcagcttatgaaaccaggaagacaggttattgtggaggagtgacttgctaagctctatcagatgagcaatgagcagtgaggaaacaggggagagatgaaatcatggctgcttttggaaagataagtggactagcatgcagcatggagaatggagaggtggagggttgttgttgnnnnnnnnnnnnnnnnncacgtatgacagagagagaaagaagagggaatatgaatggcatgggaaataagagaaaggcaggccaggtcagagggtttttaggatggcctgtgaggtgtaggagggtctggaggtcggccgtggagtggagaagagattgaggactcaggcactaatctaaggggaaggggaacactgtattctaagggggccagtcctgctgctccctgtaagcactttatgtatttgacatgaaatatactaagatggcccccatactttagggtgcaaatgctcccctaaagtgagagtgg

SEQ ID NO: 133282 - DNA, 1232 bp, Homo Sapiens
  misc_feature (61)..(69): n is a, c, g, or t
  misc_feature (73)..(73): n is a, c, g, or t
  misc_feature (124)..(133): n is a, c, g, or t
  misc_feature (156)..(169): n is a, c, g, or t
  misc_feature (183)..(334): n is a, c, g, or t
  misc_feature (378)..(417): n is a, c, g, or t
  misc_feature (424)..(526): n is a, c, g, or t
  misc_feature (597)..(621): n is a, c, g, or t
  misc_feature (1064)..(1126): n is a, c, g, or t
ccaccaagggggccaaaaggggttttgttccccccggggggggtatttcgggtgtttttannnnnnnnntttntggagggggttttccccattggggggggaaaaggggtttttaggaattttnnnnnnnnnnttctttctaataaaaattccccnnnnnnnnnnnnnntatttttttatttnnnnnnnnnnnnnnnnnnnnnnnnnnnnnnnnnnnnnnnnnnnnnnnnnnnnnnnnnnnnnnnnnnnnnnnnnnnnnnnnnnnnnnnnnnnnnnnnnnnnnnnnnnnnnnnnnnnnnnnnnnnnnnnnnnnnnnnnnnnnnnnnnnnnnnnnaaaactttggccccgtttcttttcctttgggggcccgcgccccnnnnnnnnnnnnnnnnnnnnnnnnnnnnnnnnnnnnnnnncccaaannnnnnnnnnnnnnnnnnnnnnnnnnnnnnnnnnnnnnnnnnnnnnnnnnnnnnnnnnnnnnnnnnnnnnnnnnnnnnnnnnnnnnnnnnnnnnnnnnnnnnntaattttttcatttgctttaattaattcatgagttaagttaaaaagtcaagtcgaaaattttagctggtcnnnnnnnnnnnnnnnnnnnnnnnnnacaaaaatattacagcagtataagcaaaattggaaaggaagagatgggaaaaacaagtagatgctaaaatgggataggtgaacttcaggtcatcatggttattgaaggaactgtaaattcttaagcttctagattttaccgctcttcagaaaacatttaaggaggctgcctttccccatgaatgagaaatgaaacgttccctaagcatttgagtctaaagacaagaaagcattgcttttcctactggaaaatatctctttacttcccattgcactgccctctcccgtccccctcgtagctttatgggatcaaagagagagagaagccttgagtttccaccagcagcagagtgagtcctgagcacaacacagggctgtcagtgacattcagactcactggcaatgggtccaactcatcttgaataaaatacacaaagaaagaannnnnnnnnnnnnnnnnnnnnnnnnnnnnnnnnnnnnnnnnnnnnnnnnnnnnnnnnnnnnnnacccgagaaaccgaaaattgtttttttatggaaggtttaaacaaagtcctcaagatttctttatgtgccagaaagtacatttctggacttaatcttttaggggggc

SEQ ID NO: 133283 - DNA, 716 bp, Homo Sapiens
acagacttcatattctataatcttttaaagagacaagttacacttcaaatcaaacaatcagagagctgtttcaaatcaagcattttaagttaagttgtattgacatggggagggagcagatgacacacctaatgagttaaaacaatgttcactgttaaattaggtataaattaatgtaataactaggggtagtgtgggtatccctgacaaattatggatttatctgaggattaatggaggaatccacagataatccataaatctacccattttctatcttctaaccgcttaacgagtaatttataaattgtctatttgtgtgctttttaagttacagtgaggggttcagacatattaaggaaaatgcaggctgtcaagagaaacagcaacaagggatctatagagtttgtaatctggaaagtcacacccgtaatttttatttgattgtagtaccattgctgtcagaggcctaaccagtggcactgaaggagttaaaacagtccccacccccactcccgatttctagaaccccacgataaattgggtaaatatgtattccattcattggtgcatctgaccttggtctgtgacagaggaaaggcgtgtcttctcatactgttccctatgaacaaaaggcaagcaaatgagggtgactcaggacttctcatggcctacacacaactgaacatttttctgaatgattccacgtatacact

SEQ ID NO: 133284 - DNA, 954 bp, Homo Sapiens
cagtcgacggtaccggacatatgcccgggaattcggccattacggccggggagccctaggttctcctgaatccctgcggtcccagcgtcgctccggacgctgccaacctgttctccaccgtcgctcgacttccacctctaagactcccacgaaactcaggttgaataattcatcaaattacacaactgaactcaagacatggctgcccagtgtgtcacaaaggtggcgctgaatgtttcctgtgccaatcttttggataaagatatagggtcaaagtcagaccctttatgtgtgttgtttttgaatacaagtggtcaacagtggtatgaggttgagcgcacagaaaggattaagaattgcttgaatccccaattttccaagacatttattattgattactactttgaagtggttcagaaattgaaatttggggtttatgacatcgacaacaaaactattgagctgagtgatgatgacttcttaggggaatgtgaatgtacccttggacaaattgtttccagcaagaagctaactcgaccactggtgatgaaaactggcagacctgcaggaaaagggagcattacgatttcagctgaagaaataaaagataatagagtggtcttgtttgaaatggaagccagaaaactggataataaggatctatttggaaagtcagacccatacctggaattccacaagcagacatctgatggaaactggctaatggttcatcggacagaggttgttaaaaacaacttgaatcctgtttggaggcctttcaagatctctcttaactccctgtgttacggagatatggacaaaaccattaaggtggagtgttatgattatgacaatgatgggtcacatgatctcattggaacatttcagacccccatgacaaaactgaaagaagcctccagaagctcacctgttgaatttgaatgcataaatgag

SEQ ID NO: 133285 - DNA, 689 bp, Homo Sapiens
  misc_feature (651)..(651): n is a, c, g, or t
  misc_feature (678)..(678): n is a, c, g, or t
tttaacagttaaacttttatatttacaatattctcttcatcttttgccaggtttaaaaatgtgtacagagccgcaaagggttggggtagggataagggattgtcgggattgttttggggagaggagctgggcattggagtccgtggctgaatcatggggtcccccagcccccctcccatgccccaattctgagggcatctgtctacagggttcagggcccaggtctctagcatttggagggcatggctgtttggagaggagctagaccaggcaggggaaaggatcagaaaataactaattttccatggatggaggtaggaagagaagggacagtcaagaggcaaagttctggggactcaagaccagggattctggatttgggtgtcagtggaagacagcaccccagcccctattcaagtttggcactaacaccccacaaaatgccagcagatgaggactctcccctcgtccactgtgtcccttaagcccttccagacatcattcttttcccaaatgcccaagcccaaggccctccggggagtcacctcacacatttcaaattattcctgctggtgtctgcccaagccctgtccccactgccccctccatctgttccccagcaccgctgacctcattctcccaacctgtccnggtgagacctttctccccactgcctcnctccaccattc

SEQ ID NO: 133286 - DNA, 259 bp, Homo Sapiens
ggctgtaggctttttatttattttaaatgggtgcatatgcagttcttgggctggatgcgcctttgtttacatgatcatttccttattatcagacattttgaacctgggtctcctgactttaaatttgctgctattttttgtccccacatatctgtctttatttcctttagcttcttgtttgcatttatttgggaattaattgtgatgattttgggggtgtaaaaaaccgtttaaataaatgtgtcttgttttactacat

SEQ ID NO: 133287 - DNA, 800 bp, Homo Sapiens
  misc_feature (731)..(731): n is a, c, g, or t
ctcattcaacacatatttattgaatacctactgtattcctggattcattcttggtattacatcagtgaagagtaacagacaaaaatacctgcccttgacaaagactggggcagattctccagcactactgtcctgagccatagagaaatagagcgtgactatacacacttaacacatgcacggaagcataaaaaacattttcctacatcatctgaatttgttcacatccttttttcttttaaaaaataataacatgcagttatagccagttaacaaatctaccttaatttcctaggaactgtctttgaaaaaatataaatacttccagataggtttatggattttcagttttttataccacttgaaacccttcagtcagattgcttttctcctaacaactaactggtatcacttgcactaagagtagaagtttttattttaaggaggaaaggtgatgttgaagtttgtaccatttacttgggtcacagacagcctggctctaatgcctcaaagaaaagcataaaatagaatgaaggagagacactgaatgaaggcagggtgctaaaaacaattaatgtccatgcagaaacatctaatgctttgccttagaaaagggaggtgattcttcttttcatcctgtttttctgtcattctcctgactccttgttttgagggtccacagttcagacttttaccactcattctgaggatcaccgtttctgtggttccangggaaacaggctctgagtctaagcagctagctccctgactttggagtgtacctgttttataatattaat

SEQ ID NO: 133288 - DNA, 1059 bp, Homo Sapiens
  misc_feature (698)..(706): n is a, c, g, or t
cagtcgacggtaccggacatatgcccgggaattcggccattacggccgggggctcaggcccgtggatgggatcgaagatggcggcgcgatctgtgtcgggcattaccagaagagtcttcatgtggacagtctcagggacaccatgtagagaattttggtctcgattcagaaaagagaaagagccagtggttgttgagacagtagaagagaaaaaggaacctatcctagtgtgtccacctttacgaagccgagcatacacaccacctgaagatctccagagtcgtttggaatcttacgttaaagaagtttttggttcatctcttcctagtaattggcaagacatctccctggaagatagtcgtctaaagttcaatcttctggctcatttagctgatgacttgggtcatgtagtccctaactccagactccaccagatgtgcagggttagagatgttcttgatttctataatgtccctattcaagatagatctaaatttgatgaactcagtgccagtaatctgccccccaatttgaaaatcacttggagttactaagcaattcggaagagaaacacattgaaatcactgtctttccctgagcaagggggctgctcattagatcttttgatactttaccatgtgaaatactaccagaactgttctctaaacccactttttctgtagaggaatgtatcatcnnnnnnnnnctcatattacaaatggacaaataacggactttctattttcatatttgctgaaaccattttttaaatgaaattaggtcattatttatgaaaagttttgagagggcactgtcaacttgggtttaagacaggaggacattgcaagttcacacctttcataagcataaagtagttgcaagaaagtattttcatcctgttaggattcatatctaagatagagttatgcattgcacatacacaaataaacttttattagatagatacctataaaagaaacataaaagtatgttgtgtattactgacagttctagattaatttcttttagaattaaagtagatttgttaaagtgcctcac

SEQ ID NO: 133289 - DNA, 1077 bp, Homo Sapiens
accaccaaattttttcttttattaaacaaactgatggttgccaaacaagaagtcagtaatctgacttttcagaggcagggagtttttatttttggcttctgtaatggaatttcaccaagtttttaaaggtattaactttattaacctgtaacattcatcattttaaaggagtatataaaaactgtcaaaatgggtcagaaacaaagtttgcgatgctcataatcatcttcagcagtggcaacatttaactttttgagtcagtcgcaacagactggcaatataactaacacaatacataacgataagtgttgttcttgataaaaaaccaaattatttttctatttacaatttttagaaaaggtttaatgtaaaaatatttttcttctttatatatttccctgccatgataatgttaaaacatatcaagatcctcctcaaactttaagggtgaaaagcataccattccattttagttgaaatattccttcacatagccaacacattttttcaaggcactctagctactacaggaaaaatgttcctcttgcctactgattattttccctcaaacttatctaaattaaacactgttataactgtttttttaaatttagttttccatggtacagtcctcaagttatttttcttttatgtggagccactccttcagtttcaacttgctgagcaggcaagcaactgcttttggtttccatggaaactggattcctgtggctgcgtgtaggcattctcgttccaccaatcttttgttgtgttgtggtatccagtgatttcggtggaaaagtacaaggtattcttccatgatggatatgatatggtaataacaggctgggatctaatgggactcagggaactgagagactggaaggtacaccaggaaggccgcaatgtgttttatacaattgtatgctgtcctagtaacttttccatcagaggccttataaatcaggagtgaagaatcttctgctgcatgagataacaagtagggaccctcctgcagctacttagtttctttagaatgtgttggaggatgttaaataaattggaaatcttgagtgc

SEQ ID NO: 133290 - DNA, 1007 bp, Homo Sapiens
  misc_feature (106)..(248): n is a, c, g, or t
ggttggcctcgtgcttggcgcctcttctggtttcgactcgccgtggtgctgtcgtcgcccgctggtcgtgcgtggctcgtcggggtgccgtgcgggcgttgtcgcnnnnnnnnnnnnnnnnnnnnnnnnnnnnnnnnnnnnnnnnnnnnnnnnnnnnnnnnnnnnnnnnnnnnnnnnnnnnnnnnnnnnnnnnnnnnnnnnnnnnnnnnnnnnnnnnnnnnnnnnnnnnnnnnnnnnnnnnnnnnnnnccattcctacatatatttatttggtattgatgatgaggaaccccgtcaaaaattcctgtaagggagactactactcgactgttaggggtattgcaacatttacatacatgtagcttatcacatacgtaaacatttacacaaatagtacagcggtgaaccaccaagttctcattccacattcctttcccacactgcgtttacctgcccattcttgaaactggatctcagggcagcacattgcatttcaacaggcctagtgctgcttctcagaggcagtcaactcaatggtgcaaaagcacaggacagcgacaaggcattcacactacacagacatgtgatctcttactgacagcaggaagggaagagagatggagatcccgggtgggaaagcgacaacatgcatcacaggagccatgtgagatgcggtgaggaccgctggtacgcagcgtcccttgccaaggaatgcctcacagccatccgagaatgacaggcacgaaacatgaggaccttcctcgggtcagtcaagcatcatgctgggaggactcccacgtgtcccggtacacaggtcctggcactcatccgaccacagcttgctgtttggtccccaaaatgggcccacacccaggcgctgccaacacggcggctccgtctgagtcccttcgggtctccatcccatgggggtgcacgtctcagttttcctctaaccactgcttgagcagcctctgaaacattattttgctccccttctgtcgtcttctc

SEQ ID NO: 133291 - DNA, 678 bp, Homo Sapiens
  misc_feature (606)..(624): n is a, c, g, or t
taccaacaaccaaagtgaagattatgtgacaaaggctacaaaggagtcatttattaaaaacaaaaccccagaaacccctcagcaggaattgatgacaacaacagaggaatccaacaccctgactgcttcagactctgttgactacaggatgggtgccccctgtgagctcgatccacagtgacttcaagccacagtgacacagcacactaattcattacacaggtcaagacagaggcagccactggggcggggacccttggggagaggctggaactcagggcccttctccagcctttgttgtcaggcatcctcatgccaaccgcaggcttctctttgcctctgaacaatgggcaccttcttaccaggcaggggctgcttaggtaaaggtcagcagacctaacactagttactcccagaaatctgggcttgcagcagagaccacagcacagggccaggctctcaggacacagcagctggttctttccccagttactggaatttagggcccatctcagaggggcatttgacatgtgtccccaacacccggttgtcaccacaggtaaaccaagactataatcacaacagcaaggacaggattgtgttgcnnnnnnnnnnnnnnnnnnncttaaaggagtgagggcatggaaaatatacagcacaccaatgaaacaaaatgtc

SEQ ID NO: 133292 - DNA, 458 bp, Homo Sapiens
  misc_feature (445)..(445): n is a, c, g, or t
  misc_feature (458)..(458): n is a, c, g, or t
gagcttggttggtgggtctgagtgccccctcccactccacttgatgtgggatgaggcggcaaagctatgaggtcgtggggtaggtgcacacgtttccagccctgctttggtgctggtagccactggcccaggagcattttcctggcatccaggtgagtgcgcagccacacgtgcatgaagccaagcctgagtgtctcctgagggaggtgggctgaggaaggaggatgacctcacaggctgggtagagggatgaggttccttactggtccacagcgatggagactgcctcagggctccaccagctccacaacaccccctcactgaaatgacattcattcagcactgactgttgtgtccactggggcgcacacccttgggcctgcctttgggacagagatcccttcccttttatcttgtgcaggcccagaattgaggaggtgccccnacaattgtgtgcn

SEQ ID NO: 133293 - DNA, 985 bp, Homo Sapiens
  misc_feature (692)..(692): n is a, c, g, or t
  misc_feature (706)..(706): n is a, c, g, or t
  misc_feature (726)..(726): n is a, c, g, or t
  misc_feature (802)..(802): n is a, c, g, or t
  misc_feature (824)..(824): n is a, c, g, or t
ttttagatctctaattttaatagttgagaggaaggttataaaataaaacagacaacacagagcttcatgacggcctcggattggcagtcaacccagggatacagaaatgtaaacaaaaacagagcttccagataacattactgtgtgctatgtgactttcagaatacagcagcgtcccagacactctaaagtcaagtgaaacaagagattttagaatcaatctatacacatttcagagggcagtccaggaaggagccttcctctcaggtcagcccagggctgggcctgagcctgagcccggggacgtgtagacactacccattttgggcaggggaggccaaagtggttctgcttcaggtggggtttggctttaaggggctgcccagctggctgtgttctggggacctcttttgcatttgcctctggcaggctggctctgacccctgcctgtttttccctttggcccacaagacgcacacctctttacacccagaacccctttcccagctgcagcaagggagcaagggagccagccagccagccaggacgggtctccccacagccactccaaaccccagcctggtcaggtgaaaaagtcagaaaaaaggcaacagatacaattttggtagccatcaaatcctctcctccctctggaagtttctgaggtgctggtcatcattctgtcccatttnttgccactgtgctnaggttttgactcaacaaganaaggcggtcttccagctggcctgcagagtgtctatgcttcagaatgatggcatctcatcgtccacttctgcccctnagcccagagaaacctcacacangcactctcggtactgggctggtactcgtgcgatcttgctcaggcaatcctaaggagcgataatcgtacatctactttctgtgtgatgtttcgcaatcaacaaacaccgacaaattaacgggggcagagagatactatggtcgtacgcctcatcgaacgtgg

SEQ ID NO: 133294 - DNA, 1059 bp, Homo Sapiens
aatctaagcatttcttaactgagaggggtctaaatatcactaaagcaacaggacatctttaagggaaaacagctgcaaaacagctttgcattctagagtgaaagccttagttttagcctatggtatattttgttcccttttaagaccacagtggtagtttttttccaaagagaactaataaacatattaagctatatggtaatttttctaacacccacattggtttcggtcagaagaattttactggaacctggaggtatcccattcttcataataataaaaaagaaatgtagtgtataaaagctccaggttacattactaagcaacgacatttccgggagtgaatatacttcctgtattccgcaagctgcttcaagtacatattcgacggccatctgtgcttttcaacaaaactgcgttcttccactgaaagatcctgaaattcaggcttttgactgaagatgaggtagttagtagcaatgaaatgaagtagccaggttgaaaggcaatcagagtggtgaaacttggcctttttaagcaggtcaactatatcaaggttcatggatgccagttccctgcttggcatgctctgcagctgggtaatgatgaacagctcacagatgtgctgcagtctggacacttggtacatctcggcacagatcaggagacacatggcctggaatatgccagctgggcagcaggagtctgtgtacaggtattctaaaaatgacaagaaagtctctttggaaacaccataaacgggaatcaggacactcttttgcttccatgtaattaccattaaacatggctgccatcacttcacaacgggccaccaggatggccctgtgggctggcactgtcgtaccttgaatttcgaagacaacatcggcaagcatcggcttattaaggaaaaacttgagggaagtgttataaaaccacaaaggttttctggcttgataggttttgcaattccttaggcaattaatctttcctggtgtttttaaaatgcatttaactttctcgattacatttgaaacatccccagaatctttcaacttc

SEQ ID NO: 133295 - DNA, 490 bp, Homo Sapiens
gcatttggtatatgctttaatttcatgcatgtataagatactctttttactttctactttaacactgaaggaggatagaaaacttgtaaatgagtatttaaaagcctgatcctcttaagaactaaaagcagaatcaagtaacagttggctttcataaccaaatacagtcatatgctggataacgatgttttggtcaatgatgtaccgcatatacaatggtggtcccagaagattataaaaccatatttttactgtcccttttctatgtttagatacttaccattgtgttacaattgcctactgtattcaatacagtaacatgttgtacagatttgtaccccaggaccaacaggctataccaaatagcctaggtgtgtagtaggctataccatctaggtttgtggaagtacatgctatgatgtttaatgacaaaatcgcctaatgacacatttctcagaacatatctccatccttaagtgaccctcgtgcc

SEQ ID NO: 133296 - DNA, 1069 bp, Homo Sapiens
  misc_feature (630)..(1004): n is a, c, g, or t
  misc_feature (1009)..(1009): n is a, c, g, or t
ttttaggttgtgttagcaaatgctaccatgtggaacactcaactttatttgctttatttatatatttaacaattctaaagtatttacttcttgctttgacaaaaaatgaaaaatataggagcactgactgactcctctttaggagaaaagggttatatgtacagctatggagagttacggttcctcctttaacaaaggaaaatattaataaaaaagtgcttcatcgatcaaaaaagagctaagagctgcaagcatttattcacactgtacatcagacccaagaaacccgtatcataacctcttggcacctgtcactaggaaatgcacaatcttcaattagaccaactttttccctacctgcacgactagatgacacagaatgtggaaaagaactacaccctgtttcaccacgttcaaactgtgttgccactggaagtcagagacgtgctcagatgctctgggctttgcctggactgagagcaccagggaagccttctgggccacgccttaaccacacccaggcatgcacagaaccaccttcctgagacacaccttgcccttggtcagggaactgctaccaaggggaagaggaatacagggcagggccagagccctcgtgccgaattcttnnnnnnnnnnnnnnnnnnnnnnnnnnnnnnnnnnnnnnnnnnnnnnnnnnnnnnnnnnnnnnnnnnnnnnnnnnnnnnnnnnnnnnnnnnnnnnnnnnnnnnnnnnnnnnnnnnnnnnnnnnnnnnnnnnnnnnnnnnnnnnnnnnnnnnnnnnnnnnnnnnnnnnnnnnnnnnnnnnnnnnnnnnnnnnnnnnnnnnnnnnnnnnnnnnnnnnnnnnnnnnnnnnnnnnnnnnnnnnnnnnnnnnnnnnnnnnnnnnnnnnnnnnnnnnnnnnnnnnnnnnnnnnnnnnnnnnnnnnnnnnnnnnnnnnnnnnnnnnnnnnnnnnnnnnnnnnnnnnnnnnnnnnnnnnnnnnnnnnnnnnnnnnnnnnnnnnncgcangaagacatgtgagcaaagggcacaaaggggcagacgtaaaaggcgcgtgctgcgttttca

SEQ ID NO: 133297 - DNA, 1055 bp, Homo Sapiens
  misc_feature (387)..(388): n is a, c, g, or t
  misc_feature (390)..(394): n is a, c, g, or t
  misc_feature (396)..(407): n is a, c, g, or t
  misc_feature (409)..(411): n is a, c, g, or t
  misc_feature (416)..(420): n is a, c, g, or t
  misc_feature (422)..(425): n is a, c, g, or t
  misc_feature (462)..(512): n is a, c, g, or t
catttcgagacaattacttccccccttcttcttcattgccttctctaggattttctcatgagtcgacttctctttgtcatactgtgccacaattttgtcaacttgcgtgcagtgtaacttctgcatggtactgtgttcctttgcatgtttcttctttaaagaatttagctccttctgctgtttctttaaatgcttcaagtaagccttcatctgctttaagtcttctatccttacttgagggataagttcaatacctttcttggcttccacaccagaggccagggcagccgtggtggttggtctgagctcagagctactctgaggggtcacatttgctttggcggtgttggcctttcctttcttgtcatttttggaaagtgtcactgnncnnnnncnnnnnnnnnnnntnnngtcgnnnnncnnnngcctcctcttttgttgttgcgtcccctcttccctgtnnnnnnnnnnnnnnnnnnnnnnnnnnnnnnnnnnnnnnnnnnnnnnnnnnngccgcgggcgtctgtttttctgtcctggctcgtgtttcgtttgtttttgtttgttgcgcgcggggtgcgtcgctctccccggtgttgtcccctcccggtgtccgggccggcggtttgtggggcgttggttgcgggtgcttggcttgtcggggcgcggcgtggtgtggccggtgttgtcttgcctttgtgtgtttttcgtttttgccttgtggcacccttgccctggtggtccctttgactcgtgtgtttgtgttttttttgcacctgttgtccttttgtacactccttttcccaccccttttgttccttgtgcagcttttcaccttgtctagaaactgagctcattgctggcttgttccggcctttgcccctgagactttggacacttgtctgatgacgtgctctaaaccctctgtacgttttggtgtgttgttgatttgtgcctccttgatgatgggttgtagactcgcggtgtggtgtgttgttgcttgtgttgttgtcgagccatcgtgggatgtcgtgttgtgcccatgtgtgtgcgcc

SEQ ID NO: 133298 - DNA, 467 bp, Homo Sapiens
tgcttaacagcaggactccaatgtaaacaaataaaataaaagcggtattttattagtattgttaaatgaaatgtataggaagctattgttttagattaaacccctgcactaggcccaacagaccaggccaaatcagaatggagttgctggtgctaggtgtcacataatcaaacaacttagaaatgggccagttgtcaaaaaatccagaagatacacagcaaggagtcaaggaggcctgatttacctgagccagcatgataaagaagtctctcctccatttggtctctgtgaggaaagtttaactttgaaatgaccaatctgtcttttattctctttttgcttcttcaaccgttttcagcccacctctgctcagctaatcagaacaccgtttctaaatttttagttgagatgctgccagattcataaattgctaataaaagccatttacatctttaaatttgttcaaa

SEQ ID NO: 133299 - DNA, 867 bp, Homo Sapiens
aaataagcaagttaagcttcagggtcctagaatttttctgatttctataatccttcagcagaatattaagaaataaagcatgatctgcaatggaaaggtttttttggcactaacttcatgcagaatttcacagacatctatgcattaatttaaattcttggtgcaaatgtgtgctttgtagttcaaccttattaaaaattcttcagccagttaggatttcaaaatacattagtgagagtaacagctagcagaataattacaatggctaaaacgtttttatagagaatcttgtttttcaaaaaagaataaaaagtttgaatagctattattaaagaaaagccatgtcttcaacatctgagtcaccaagaagtaacactttttaaacttgttagaaatccctggaggcatttcaaattcatcttctaacctacctaagcactttaaaatacagcctccttctgttcctctgttccccttcatgcctccttttgaattgatatctcagctgtcaatatttctttgacttcagcattgttattttatttctctatatcaatgtgtccttagttttcttagcctgttaatttaaaaatccagacttgggggtcattgtgttgctacccaagagaaaatgctacagttttatagattgcacatcattctttaaggcatacttttacctcaggaaacttactctagtatgttctcatatattgaattctcaactaagtaactatttctttatacctataaactagtacctaattcactgttagttaaatgagctatagataaggcagctaaatttctgaaagatagccagagtaagtaagcagccactgcaagctctgaatcagttttttaaaa

SEQ ID NO: 133300 - DNA, 1499 bp, Homo Sapiens
  misc_feature (1484)..(1484): n is a, c, g, or t
agttgtataaatcagcaagtatttattttaaataataaaactacagttttataccatacatatttacaaaaatgctttgctatagaaaaatagaatcaatcactgaatccagaccaccacagtggagaacctcctggtgaagctgtgttttttcccacactggaaacacagagtagccctgtttctgcacacgttagtgcaccgctgctacgtgtggccgcccagctgtctgcaggctgtgccgaccactgcctctgtctccaggaagcagaggcagaagtgatccttgctgaggagggccatcgagtctccgcttaaatgccagcacagagagagcactgcaaagtcgccttccccaggcacctgcaccgacatgcagcccgctggggaccacaggtagagcctgctgcctcccgtgcagatggccagccgcggctgctgcgggtcccactgaaacgcgcgcactggggacagctgctcgagcaccgcgaacagcctcagcttctgaatgtcccagacccagacggcattgggaatgttgtcgttccttgtcgccaggaagtagctgtcaggactaaatgccagcattcctatgccgattttcgggtttgctctgtcggtaacaggtttcagtgtctgtaaggagactgggacagaggcgatctcatatttactctctgagctcgggagagggccggccccggcccggggcggcgggaaggagaggcagcccagtcccagctgtgggctcttctcggcctccttatacaccactattttgggatcattaaatggctgcagggatgcccaaaactccggtgatcatttttccaagtcacgtggattaaggatgcgcacctttccatcataggctcccaattgccaggaactgactggctggggctccaggccacagacttgatgcccaagggaccactcgtaagcgctgtacgtggacaacaaaccggccatccaatgaggtacagcagaatcttgtactccaagcaggtgtcccacactgccagcacacagccgtttggggcccactcaatccctgtgagatcctgggtgtcccgtatcaaaatgccgcaggagctgccaatcactgcagacgaagatgctcacgtaatctttgcagtcgcgccgttctgccagcgccatgtagcggccgtccctggtgaaggtgattccctgcagacaagctttcgggtatttgatgtaagacacggattttgtgcacaaggaccagacggttatccgcagatggaattccgtggtgttgagaatgtggcgcccgtccgggctccagcacgaggccaccagcccggctgagccctcgtctattttgcagtgccattcgggctgctctaaagaccagacctgcaccagccctcgcttgtacatggcgcacaggatgaagagcgagtctgccgaccactcgatgtggggatctgtctaggcacgcctcgtctcgagtcgccacncaggctcgctcctag

SEQ ID NO: 133301 - DNA, 476 bp, Homo Sapiens
  misc_feature (454)..(454): n is a, c, g, or t
ttagccctttacaaatggagaaacccttaacaaaaggcgggctgcagtgtgcccagccctgctttctactcagcagagtggagcaagtgagcagggtggaggcctcctgactcatgcgcggacctgcggctgctgcaggacaaaggcccagcgcctccaaggagcttctgtgagcacctcggctactgcagaaacgtgaaaggaggtgacgtgtcggaaacccccaacttcattttcttttccagtcgcttctacacctggggccacaggacacagtaaagggtgagacagcacctgcgtcagcacaactgaccgttccttgtcgccaggaagtagctgtcaggactaaatgccagcattcctatgccgattttcgggtttgctctgtcggtaacaggtttcagtgtctgtaaggagactgggacagaggcgatctcatctagaacaccaacangaagaacacgccattgtcaccc

SEQ ID NO: 133302 - DNA, 867 bp, Homo Sapiens
gtataaatcagcaagtatttattttaaataataaaactacagttttataccatacatatttacaaaaatgctttgctatagaaaaatagaatcaatcactgaatccagaccaccacagtggagaacctcctggtgaagctgtgttttttcccacactggaaacacagagtagccctgtttctgcacacgttagtgcaccgctgctacgtgtggccgcccagctgtctgcaggctgtgccgaccactgcttctttctccagggaagcagaggcagaagtgatcctttgctgaggagggccatcggagtctccgcttaaatgccagcacagagagagcactggcaaagtcgcctagagagagacagggtggccagaggattgcagcaggggaggcccagattctggggggatgggcacccccttgtcctgcaggccagcacagtgcctggagtgacccacataggcagagccagggtggagccccagagctgcctcaagtcagggagaggctgcttctagcccataaagctgagggcagcgggtcccctgtgtgtccgtcttgaggtttacgcaaagactctgagggcagtttccctggagtgctgccggagacagcagctgggcttcaacagttcagcccgtgtgatgccagactgcacacagcaaggctgccacgtccgtggcctcggggatgtgcttaccttccccaggcacctgcaccgacatgcagcccgctggggaccacaggtagagcctgctgcctcccgtgcagatggccagccgcggctgctgcgggtcccactgaaacgcgcgcactggggacagctgctcgagcaccgcgaacagcctcagcttctgaatgtccccc

SEQ ID NO: 133303 - DNA, 556 bp, Homo Sapiens
tactagctgcagtccagctttacacgccacgcggacagtcatgccagcttttgctatctgcaccaatgtcactctgcagcacccgcgtctgtggtgtgttcctggcgacgggggtgtattcattattaactgaaatgtctcatctgcagtacaagattctgctgtactcattggatggccggttgttgtccacgtacagcgcttacgagtggtccctgggcatcaagtctgtggcctggagccccagcagtcagttcctggcagttgggagctatgatggaaaggtgcgcatccttaatcacgtgacttggaaaatgatcacggagtttgggcatcctgcagccattaatgatcccaagatagtggtgtataaggaggccgagaagagcccacagctgggactgggctgcctctcctttccatcgccccgcgtcggggccggccctctcccgagctcagagagtaaatgtaagtagcacatgtgatgtcatttgttttccttttttaatgcaagattcctcgttgtccagataaacttcggatgttccttatgttt

SEQ ID NO: 133304 - DNA, 1050 bp, Homo Sapiens
tctgtataggcccggcccgtcccgggctgtcggaagtataggcaaccagttccaatgtgggttcttttgggcccctgtatacacccctatctggggatcattaaatgggctgcctgtatgcccagaactccctggatccattttcacaagtcaacgtgatttaaaggaatgccgcacctttcgcattcataagcttcccaactgcccaggaaactgactgctgggggcttccaggcccacagacttgatgccccagggaccactcgtaaagcgctgtacgtggacaacaaccggccatccaatgagtacagcagaatcttgtactccaagcaggtgtcccacactgccagcacacagccgtttggggcccactcaatccctgtgagatcctgggtgtccgtatcaaaatgccgcaggagctgccaatcactgcagacgaagatgctcacgtaatctttgcagtcgcgccgttctgccagcgccatgtagcggccgtccctggtgaaggtgattccctgcagacaagctttcgggtatttgatgtaagacacggattttgtgcacaaggaccagacggttatccgcagatggaattccgtggtgttgagaatgtggcgcccgtccgggctccagcacgaggccaccagcccggctgagccctcgtctattttgcagtgccattcgggctgctctaaagaccagacctgcaccagccctcgcttgtacatggcgcacaggatgaagagcgagtctgccgaccactcgatgtgctggatctggtctaggcacgtgtacagctgaaggatctgaagggtgttcacatcccggaccactaaccggtactggacacaggaagccaggtacttgccgtccggggagaacttgcagagtaagctggagagcttgaatacctcggagaagttcatggccgccgcctgccgcgggcgccaccctgcgcccgaaaacccgcgggacccctgggcgcgcagcaggctgcaacagccgaccctcgtgcggaattcgccacccaggcctcgctacctaggaccg

SEQ ID NO: 133305 - DNA, 1100 bp, Homo Sapiens
  misc_feature (269)..(320): n is a, c, g, or t
  misc_feature (327)..(367): n is a, c, g, or t
  misc_feature (589)..(589): n is a, c, g, or t
gtttctcgttccttttactttccagactttgaacaacgttgttatgccactttttaatctgaaaaacaattctgccttcaatgccatttatcctcccaggggcccttcaaatgcagaccctctgcaaagccagcccctctgatcataatcatccccagaagacagggcacttgcccgagccccttacccacgggctgcagggcagagtggatacagcactgggctgacacccctaccccgtctccagacaaccccagggcacagctttnnnnnnnnnnnnnnnnnnnnnnnnnnnnnnnnnnnnnnnnnnnnnnnnnnnngtaactnnnnnnnnnnnnnnnnnnnnnnnnnnnnnnnnnnnnnnnnntaatgatgggtgcaaagcagctttaggtgagtaagaaaaagtatttgattgatagaagcttaaattccttttattggatataattagagtcggtatcttggggtcttgatgggtccggatagcttgcacttgtctacaggtctggcaggagaggaaacagggagggaggctgagggggaaagagtacacactcccctgaccccctgcctcgatttggatatntgagcacaagagagcagactgtgcccagagctccggctggctctgagcgtggctccggccttccagcctgcacccgatggcagagattacagagcaccaaaggcacattcactcgggagggtattggtttaccgtgtgttccatgggcagaggctgctgcccaagcatgccagctgcctcgcagagcagggccagctaagggtccgagggcattgagacaaacccagcgctgctcgacagagaacagtgcaagcaggtggctggcagatactgggtcagtggtgtcatctttttacccgcaaggtcaggcttgccttgtatttgaattctcaagactaattgtgccagtgagtcaggagaggactcccctcttgggggaggcaaaagaaccgagaatcctccttaaggagctgtctcatccaggcctctatcttggcctctatgcagaccagcacacactaagatccacccctcttgtccctcaacatcactgcccaagggggccaagagg

SEQ ID NO: 133306 - DNA, 801 bp, Homo Sapiens
atcatgtccagcccctaatttgtttttataaaaattgctgaaatacacacggcacagtcagcagtgattaacctgggggaagggtgagatgtgggggaaacttctgctttctaggttacatattttgaagcagttaatctgttctttgaaagcctattatgtcctgatcagacttttaagtgttttgcttctcagatcttcttatgtaatcttcatttattaaaatcctagctacatatccttttttcccctgtttcttagctgaaggtatctttgcttggggtgagttatggatccctgtgaataaggatatggacttctttctctcattggctgctactgacctgaccatttgtgtctagacaaggaggagacagccaagcttgaagatgctgagcggaagttacaagatgctgagagtccaagtgaatatcaaaggagacttctaggacaaggcctttccttggttttgttcagcttgggaaacttttggagctaagaagacatttatctttgttttcaggacacccagtctgacattatgacataaagaaaatctcccaattctattagatagtttttgcctccattcaagttaccctaatgcccaaaatggcttgaaaatgggggcactggtctcatcaccaacatatacgaaaaagaagaagaaccacactggcggaaataatgctgggttcagttttggaaatgctatttttgaggtgctgctggttcacccaggcagaactttccagtaacttggcagattagtctgactcttgaaggagaaatatgagctag

SEQ ID NO: 133307 - DNA, 1176 bp, Homo Sapiens
taatactgtccaggtacaacactgttacacacaaaatctaacaagtgtgaacttaattttcagcttctatttgaaatcagatgaaatggcttttgatacattaaccaccaggggaaattttgagggaaggagtgcttaattccatatgtcttggacttggatttcttcagctgagtccacaaaccctctttatgcaaggttgtgtgttctgtagctgtgtgcatttcttaaaaaccagagtctccaggggccgacctgggagcctaagaagtgaagcctgctggtgcagaggggccagcaagccctacctgctcggcacacctgcctgcatgtgcagtggaactgagcgagtggagcagagtgtgagcactcacaatgctcaccaaacctgggaacgtggcaggccattttcccagggactaggaaagacattcccagtggcacaaccgtttagctacctccattatgaccccacctgtgtgtccacacagggtcagggctacctttcagtttacttgagaaggcctagacctcaggaccggccatctcctatgctaccatgcccagcctgacctggctgctcacaagtacctgccataatgcttggcctcctggaagctctaaagcggtgcaattgtcctgcagaacatcgcagtgtcagggtatcctgcatgcaggtgaggggtgggcaagtagggctagcaatgtcctgctccatgttcctgtgagcaagagctcacagggacccaccagactgtgtaggctggtcacagtccccagggctgtgcaacagcaacttgaaacagactgaggaagctgcacaggccaatggcagggatgcttgtcactcgtccttctcctgtggcagagggagatgccagtctggaggggggctctgcctcggggcccacaccaggatgtgcttccgtgcagcccggactcgtgcccgctcgctctcacagagggattgctgggcctcggcgttccggcgctcctcccagtcgcggcagctggccaggtcgcgctgccactgttcgcaggccggccgctcgccgtggacgtagtagtggtgtaggaagtgcctggcgctgcggcagagcttccactcggcgcggtaggcctcgcaggggcgcggcggctgccagccgctgccgtccgccatgtctgggcggccgc

SEQ ID NO: 133308 - DNA, 579 bp, Homo Sapiens
ggcacgagggtaagctaagccaacccaacctccatcttgcttttctcttaattattcctgggctattgggtcaagctaactttggaagacatttaggctacagtttaaatgataataggccttgcccaaaactcagccacttttgtaaagctgttaggggcccatgagggtgcggggaggagaagagcctgaatcctactaagctgcagacattattccgaaggttataatatatgcaactttcccaattgctcctgtgaataacactactattacagattggccttttgaaatatctttccaggttttttgcatgtctgacacccatgactccacctggaccttatggctccacccagaagcaattcagcccaacaggaggacagcttcaacccattacgatttcatctctgccccaaccactcagcagcaagcacctgttacctgtccacccccaccccttcccccaaactgcctttgaaaaatccctaacctatgagctttgaataagatgagtacgaacttcatcgcccatgtggcgtggccggcctcgtgtctattaaattctttttctactac

SEQ ID NO: 133309 - DNA, 1089 bp, Homo Sapiens
  misc_feature (564)..(943): n is a, c, g, or t
  misc_feature (948)..(948): n is a, c, g, or t
  misc_feature (950)..(950): n is a, c, g, or t
  misc_feature (952)..(952): n is a, c, g, or t
  misc_feature (1000)..(1000): n is a, c, g, or t
  misc_feature (1010)..(1010): n is a, c, g, or t
tttttttgagattcagaagtttcatatctttattcacacaaaaaaagtcacagcatttcagactattcaaacacacaaacaggaacagagggtgcccaccagtgacagcctcgtccctaagtctggatcaaaggccacgctggagggtggggtgtcctctcgggcctcctctctcagcatcccgtggctccctgctcccagcctcactgacatccccaagagcagttacaactgtgcagaaacaaagtcactttagaggaggctgggccccacctcattgccatggaaaaaggccagattctgaggaaaagacagaatcagtgctactgtgtcatcagttgggggatgctgggcactcctgggcctggctggcatcacctgcgtcccagacctggggcagagaaaaaggcaggaccctccccacttggcagtactgggcagcagagagtgtgggtcactggtcacgtgacagccccaaactgccacgcagacctctctgatgtgatcagccagacactcagagggcacaacgctttcaagcaagaacctcgtgccgaattcttnnnnnnnnnnnnnnnnnnnnnnnnnnnnnnnnnnnnnnnnnnnnnnnnnnnnnnnnnnnnnnnnnnnnnnnnnnnnnnnnnnnnnnnnnnnnnnnnnnnnnnnnnnnnnnnnnnnnnnnnnnnnnnnnnnnnnnnnnnnnnnnnnnnnnnnnnnnnnnnnnnnnnnnnnnnnnnnnnnnnnnnnnnnnnnnnnnnnnnnnnnnnnnnnnnnnnnnnnnnnnnnnnnnnnnnnnnnnnnnnnnnnnnnnnnnnnnnnnnnnnnnnnnnnnnnnnnnnnnnnnnnnnnnnnnnnnnnnnnnnnnnnnnnnnnnnnnnnnnnnnnnnnnnnnnnnnnnnnnnnnnnnnnnnnnnnnnnnnnnnnnnnnnnnnnnnnnnnnnnncgcangnangacatgtgagcaaaggcagcaaaggcagaacgtaaaggcgcggtgtgngttttcaaangtcggccccctcgagaccaaaatcgagtaattaaagtgggaaccgacggcattaatcaaacgtcccctgggctcccttc

SEQ ID NO: 133310 - DNA, 813 bp, Homo Sapiens
tctctgaaagatacgactggatggatgcctgtgactcttgaaggggtggctgcttttactgaggacggcagttcatctaacactttacagctgtaaaatgtggcgcataggtgtgtagacgttgatgtgtcagcagaaacccctgtataccgggttctatgctatgctacagatacagagaaacaaggagactgagggtcctagggaaaagttatgccatctgggcatggtcaggtcagaagctcaaaagacatttggcacagtctgcagtcatttccagaaactactacccagacgtaccttggcaagcaggtgagctgtggagcacacaggacatcacttctgaaggtgcccaggagcacctggctcgaggaggctttcatagaaggagaagtccccagagccccttccctttctctgtgccatctgccatactactgaaagttattcggggcagacagggtcccctggctctaccgcattccatgactgctcagcgagacccacatgctcggagagaaagtgtggacacaaactctgtggatgcagcccgaaagagggtgctgccgcatccggatcctcgccagcatggcactccagaaaagaaagtaatggcgggggtcaggggggtggtcagagacacagggggtccccagactgcctagcacatacatacataccactggggacagtacagaggggagcaggtccgccaaggttagaaaccaagagacacaaacggacgcgtggtcgacgatatcccgggattccggaccggtacagctgctttttgaccactgtcatagtccatgc

SEQ ID NO: 133311 - DNA, 1068 bp, Homo Sapiens
  misc_feature (67)..(67): n is a, c, g, or t
ggggggggtccgaagaacacaggggggttccccaggacttccctagccccataccatacatttcccnctggggacagtacagaggggagcaggtcccccaaggtttgaaaccaaagagacacaaatattgcacattcagtcaaggcatttctaagagagtcacagaaataactctctctgagacacaacgtaacacatgtggcaactttcaaagaaacagccttccccactccaagccatcaaagggtccataagtgccttcatctttggtccagttgaaaaagccagggaaggaagacagggtcaatggggagtaagaagaggctgcaggtgcagttcctacagctcccacttgtctgtctgactcagtgcaggatgccgcctgtctcaaacctcttcttggagggaaaacaagctctccagagggtcccggctgctggagaaaggtgaggcaaagctgcatgtggtggcagccgggagccccaaatccagagcaatgatcaccaacctccaaccacaacaaaggacaccccatcctccctttccttggaggctctattcatgggaatgcggggtactctggcaactctatgctttacctataacctcaattcgacaaactgcagctagaaccctttgcatctgctgcaggtcttggagggtgcataggagggacggtgttccgaagcagctgctaacgtccattgtggcacacatagggtgaaaccatggcacggcacgggaacaatcctcttggctccagcgtccttaaagtacaggccatttccaaggagctaggccttccgccctcatcccccagatccccgaaaggctccgactgggaacccagcccagctgctgttgtaaagatctgttctaatactggctaagcaaatgaaagcaggtttctgaaaaggtattctgcagccagaagtcgcactgtcttcggagtcctgcaggtggggagggagttcctttagttttgaccagaacacttcttcacagggggccaggatcagccctcgtgccgaattcggcgcgcctcgacttcatactctctcgccctta

SEQ ID NO: 133312 - DNA, 1387 bp, Homo Sapiens
  misc_feature (160)..(160): n is a, c, g, or t
  misc_feature (1292)..(1300): n is a, c, g, or t
gtggcatttcagcttgcacaagtctgtgcaatggacagtctcaaaagacaaaaactgagaagagggctttaaaacgaagacgatctaaagtccaagaccaaggaaaattgataaaaactctaatacagactaagtcgggatcattgccgagcctgcatgncataatcaaaggaaacaaagagatcaccgtgggaacatttggtgttacagcagtctcgggacatatctaaaattaattgaacttttcatacagaagacttttttgttgttgttctttgaagaacagtctgtagtatttgaagggtttgggggagggagaaaatattaatgggaaaggcattcagaaattatggtttctacctttttaaaaagtagatgggattgtgtcaatcttggttaatgagctacagttttacaaagctgatcacttcctataaggacaatggtagacattttataaagatgttttttcacaagattaattactgggacaaaagtaatttggaagcccagttccttaggtgggataggaatgaaagcctaaacctcttcctttagctttgttcctatttcttgcaccttcccatatttatgtgccttttgtctatttataatgccactggaagaggagggataactttttctgttatttgatttcctttataactttgttaggtttttgaagctgcaaacactacaatgctttgagggggtctgtgcctgaagctcaggagtgtggatcagacagtctaaagatcctaaaaacttgccaactggatctttgtttagcaaactcactggaaatgaacacttaatggaatttttaagtctgttctgttaggtagatggtgatgctcttgttattttcacttattcagactggattacttcttacttagttactaactcaatgaggaaaaatccctacaggatctttttttgcaaacaactgatatatgcagacaaatttttgacaaattcacctttttaacacacttaaccatttgtgaaggttttctttagcttacattttaaacatacacaataaacactaatcctccaaactttcactgtttttattagtatgaatataaaatttgaaggtttggccaattagtacaagtctcatgatataatcactgcctgcatacatatgcacagatccagttagtgagtttgtcaagcttaatctaattggttaagtctaaagagattattattccttgatgtttgctttgtattggctacaaatgtgcagaggtaatacatatgtgatgtcgatgtctctgtcnnnnnnnnngtctttacaaaataattggcagcaactgtatttgaataaaatgatttcttagtatgattgtacagtaatgaatgaaagtggaacatg

SEQ ID NO: 133313 - DNA, 1006 bp, Homo Sapiens
  misc_feature (67)..(67): n is a, c, g, or t
  misc_feature (96)..(324): n is a, c, g, or t
  misc_feature (495)..(503): n is a, c, g, or t
tgatgactgatacgctcccgcagccgacgaccgagcgaggagtcattagcgagaagcgaagagcgcncatacgcaaacccctctccccgcgcgtgnnnnnnnnnnnnnnnnnnnnnnnnnnnnnnnnnnnnnnnnnnnnnnnnnnnnnnnnnnnnnnnnnnnnnnnnnnnnnnnnnnnnnnnnnnnnnnnnnnnnnnnnnnnnnnnnnnnnnnnnnnnnnnnnnnnnnnnnnnnnnnnnnnnnnnnnnnnnnnnnnnnnnnnnnnnnnnnnnnnnnnnnnnnnnnnnnnnnnnnnnnnnnnnnnnnnnnnnnnnnnnnnnnnnnaagaattcggcacgaggactgcctgcatacatatgcacagatccagttagtgagtttgtcaagcttaatctaattggttaagtctaaagagattattattccttgatgtttgctttgtattggctacaaatgtgcagaggtaatacatatgtgatgtcgatgtctctgtcnnnnnnnnngtctttaaaaaataattggcagcaactgtatttgaataaaatgatttcttagtatgattgtacagtaatgaatgaaagtggaacatgtttctttttgaaagggagagaattgaccatttattgttgtgatgtttaagttataacttattgagcacttttagtagtgataactgtttttaaacttgcctaatacctttcttgggtattgtttgtaatgtgacttatttaacgccttttttgtttgtttaagttgctgctttaggttaacagcgtgttttagaagatttaaatttctttcctgtctgcacaattagctattcagagcaagagggcctgattttatagaagccccttgaaaagaggtccagatgagagcagagatacagtgagaaattatgtgatctgtgtgttgtgggaagagaattttcaatatgtaactacggagctgtagtgccattagaaactgtgaatttccaaataaatctgaacacttgaatttatta

SEQ ID NO: 133314 - DNA, 759 bp, Homo Sapiens
  misc_feature (705)..(706): n is a, c, g, or t
  misc_feature (746)..(746): n is a, c, g, or t
aggggtaacgacctactttattgcagttaagaaaagaaaaattttttgtgagaaaagaaatacgacacagagacaaagtatagagaaagaacagtgggcccaggaccggcgctcagcatgtggaggacccgcaccggcgctggcctctgagttccctcagtatttattgatcattatttttactgtcttagcgaggggagtgtagcagggcaacaggtgggaagaaggtcagcagggaaacatgtgagcaaaggaatctttatcatgaataagttcaaggaaaggtactgtgcccagatgtgcacgtaggctagatttatgtttctctttacccaaacatctcagtgtagcaaggagtaacagagcagtattgctgccagcatatcttgcctctagccacagggcggttttctcctatcttagaatagaacgaatgggaatggtcggctttacactgagacattccattcccagggacgagcaggagacagaagccttcctcttatctcaactgcaaagaggcctccctccttcactattcctcctcagcaccgaccctttacaggtgtcgggctgggggacagtcaggtctttcccttcccatgaggccatatctcaggctgtctcagtgggggggaaaccttggacaatacccaggctttcttgggcagaggtccctgcggctttctgctgtgcattgtgtcnnctggttatcgagaatggagaatggcgatgacttctaccangcatacagcctgc

SEQ ID NO: 133315 - DNA, 775 bp, Homo Sapiens
taatctgtaatttagccccaactctgtgcccccagaaacatgtgctatattgaatcaaggtttaatggatttaggctgtgcaggatgtgccttgttaacaatatgtttgcaggcagtatgcttggtaaaagccatcgccattctccattctcgattaaccagagacacatgcactgcggaaggccgcagggacccctgcccagaaaagcctgggtattgtccaggtttcccccaactgagacagcctgagatatggcctcgtgggaaaggaaagaccttacatcccccagcccgacacctgtaaagggtctgtgctgaggaggagtagtgaaagagggaggcctctttgcagttgagataagatgaaggcttctgtctcctgctcgtccctgggaatggaatgtcttagtgtaaagtcgaccattcccattcgttctattctgagataggagaaaaccgccctgtggctggaggcgagatatgctggcagcaatactgctttgttgctctctgctagttagatatttgtgtaaagtgaaacataaatctagcctatgtgcacatccaggcacagtacctttccttgaacttattcatgatacagattcctttgctcacgtttccctgctgaccttctcgccacctgttgccctgctacactcacctcgccaagacagtaaaaataatgatcaataaatactgaaggaactcagagaccggcactggtgcaggtcctcgcatgctgagtgtgccggtcccctgggcccactgttct

SEQ ID NO: 133316 - DNA, 1028 bp, Homo Sapiens
  misc_feature (549)..(616): n is a, c, g, or t
ttttttgtcatttacatttcttcccattttatttattttaaaaaattcatgtccctaaagtaagatgtagatgtgccatatgtagtcatttaattccaggtagcattcattttaagtacctgttccggctttctacatgcttggcagttgactgcagggatgggaactgtgtatcactgtagatttctggtggtccttgtggtgttttccttgttgtggttaacctggccccaggaggcctatacacaccactagtcatcgctggttctggggtttctgtaacaattactggagcaggaggtgcttgtactggagctgttttattccagggacctgaagatttttccatacctccaccaccacctccaccttcttcccagttatcacctggatcttgtctcttttcattatcgtcttcttccttttcactgcttatttgcattgcctgaaccctgaggccgctgtaatcaacctctttttgctccaattctttccattcatcttcgtccttcgtcacagccttggtggcggcccctgggcccgcagccnnnnnnnnnnnnnnnnnnnnnnnnnnnnnnnnnnnnnnnnnnnnnnnnnnnnnnnnnnnnnnnnnnnnggctccactgcttccgccggcgctgcccgctgcgcccgcggcactcgccgcccggttgctccgctccttcttcttcttcttgtccctcttggcaaagaagttgtccaggctccgctcctccgtctcagccatggcctcggcctcctcgacccggatgggtggggccggcggcgggcgcggcccgcggggctccgagctcggggtcgaggccggctctgcgctcacgctgccgggcgcggcgacgcctcagccccgcggggtcgccgaggcgtgcgcggcgagacgggcggctccccctgcgtgctggcgagcggtggtacggtccgcccgggggctcgcgcgccgccgctgtcgcccgaggctgccggggctgccgctgctgctgcgacggcggagcaggattccgctctcc

SEQ ID NO: 133317 - DNA, 658 bp, Homo Sapiens
  misc_feature (319)..(580): n is a, c, g, or t
  misc_feature (582)..(595): n is a, c, g, or t
gcacgaggattcacaatggaagtttattgcaaggatacacacaaatgttgatgtggaagggtcctcccaccagcagcacagtatcacaggtcccatcctcctatcttctggaagttaagaagttcaaacctgttttacttgcatttatatttcccaaggacagagtgccaccctgtgggtaaggtcctagtcagcaacttttaccttcctaacaaacttttctgttcaagagatagcagctaaagggggcaaaaaacatgattggaaccacttttctcaataagaaactttgtataggccggccgtggtggctcacacnnnnnnnnnnnnnnnnnnnnnnnnnnnnnnnnnnnnnnnnnnnnnnnnnnnnnnnnnnnnnnnnnnnnnnnnnnnnnnnnnnnnnnnnnnnnnnnnnnnnnnnnnnnnnnnnnnnnnnnnnnnnnnnnnnnnnnnnnnnnnnnnnnnnnnnnnnnnnnnnnnnnnnnnnnnnnnnnnnnnnnnnnnnnnnnnnnnnnnnnnnnnnnnnnnnnnnnnnnnnnnnnnnnnnnnnnnnnnnnnnnnnnnnnnnnnnnnnnnnnnncnnnnnnnnnnnnnngaagctgtgtataaatgtttgcacgaaatctgcagaatgtgccttctggcacattctggattc

SEQ ID NO: 133318 - DNA, 971 bp, Homo Sapiens
ttttttatacccaacatccattgatctttatttgatttgacaaaatctgcatttttaaaagacaggtaacaaaatctgaggttatactgaatctgacaaattgagttctatagtatctagaatatcatataagaaatatcaactgagggaaaagagaagtaccacatgcagatgctcctggcaaggggggaactgtatctgcaggtgaggtccagagtgtgcagtgcataagaaaatcctacagaaaatgccgttaacttacttggatgaaatgtttttcctttgagggggaggaagaggtggtaaagaggggcaggaattcaaaggcatatgcagaatggcttctccatttcaaaatggtaataaaaatatttaaatcatggcactagggcaccttgtgaggaaaagaacatcttaaccagagtaggctcattgcataattctttagtaatatgtacaattttcaagtaattaagcagacttaaaggataattttgttttaacagcagctatctatttttcttctccccctctggggcttgatctgtttcagcatcacagggacacttttccacacattttctagggaaccaaccccttattcttgaaacaccttctataaaggaatcatcaagaattttgtctccatataaccagtatcgtaaacctcttgtggctaaaatgaattcccctttttgcagctgtattcgaggctcttcggtgcagggacttgtgaagaaggttttgattcctttattcagagggcagcaggcaccactataatcttctattactttatagcgaacacttctgactctcttatctgctttttgtttcaactgttctattgttaagctgtattggtgacagccttctcttactggccactcaagtccatctccttcagggacccctgaccacgtaaatacctgtttaaaggtccttcatctacttcccatatcatatggaaa

SEQ ID NO: 133319 - DNA, 636 bp, Homo Sapiens
aatattttacaggaatctttattgttcataaaaaaatacatagttctaaaagttgaggtacacctaaaaacttacactttctgcataacaaagtaattcaaaaagctgcttgtttgaacgtggcaactgattacttgaccgtacgcgtgaccgttcagaagtctggtttttcaacttcagattgaagaaacgtgatctgaatggaattgcagtctccatggccgtgcttggagtatgagtcccattctgcagtgaacctatgctttccttttggcaaaattctacgacagcatagagaccaaagctttcatagaagaaatgattattaataggtccaaattgggataaatatttaagaaacttgttttcactgattttctctgggcaatgtattaaaacagtccgctgtgcctgttctcgtctttcattttgcatctcagagaatctccttttgggaatcttgtcttcaaagcctgtctccacgctccctgaaggctgctcgtctctcctaaggtctttggccacagttcctgggcaactcaaaagcctgacgataggccgctggactcgagttcttctccgggcacacaggttcaaacgggtcaagagccccacgccgggaaccgccattgctaa

SEQ ID NO: 133320 - DNA, 934 bp, Homo Sapiens
ttaacaataaaatagctctttgtttattcactttgatttggatcattggaaatattaaacaataaataaaacagagcgggggctgaggaaagcaggatcttgctgaagtcattcgaatgcatcccaaccagtgctcagctgcgtaacgacatggagagaggcaggggggaatagaaagcaaatttaaaaacaccaacacccaaacacacaagactgcacacaagaaaaagtgctcaagaaactttggctttgaagggaattcagtgaagggaagcgattgtgcaggaggaagggaagaaacccacgatcaccctaaggggcggggggctggagggcgaggccctgagacaggctagggttaaagctgacgtcccacagctcaggacgtacaaccgatggcagttttgtactaggaagaagctgagtgatgaggctgggtgatgggatcgcttgacgggctgggagggaggacaggaggtgtaaaggtggctcaccttcccctaggaaattcagtgctcttttggtaagaaaaaatagtcggtaatgccctgatcctgacaagctgtgagatgctgtcttgcctgtctctgccttttcttctaagttttcctccttttctttgcacaggtgtcaggtagcaccccaggggtgcaggagctggtgttttcatgacaaacaaaaatggggaggttgactctatctcaaaactagctagcccagtccacagggcaggataatcctgatggcgtgtagccacatttgctgcaaaccagatgtctgcgatggatataatgatacccccggggctcttctcaggggtgaggacaggtgctggttcctgatggtgcatggctggtgtccagtcatctttagctgggcagtggcccctcgaggctcgggcttccctgcacaaggtattatgatccttccagcg

SEQ ID NO: 133321 - DNA, 811 bp, Homo Sapiens
gctcgcaccccgatatttgtggttctggcggtatttggcagcacctgtggttgtcattcctacaacctgggcatctttaagaatgtgcaggtcttcctggagtctcagctcggccattctttctgctgatgtgcggtactggcgttcatagctgaggatcttccggcgggtgtcagcctggtacaactgtagccagagcctataaagctgccagcgagaactgaggtccaggtgccaaacatcctcgatctcgttggcctcggctgcagtcatggtgttcagtttgcgaagctcatccttcactctttttttcattttctttttctggttgcgctgggtctgccactctcctgtggcttgctcctgtccagctgctgtcccagtgccacaatggtctagcctcatggccagaaccacaaatatcgaactcctggtctgctccactctcttccttcttccgccgctggggcctcaccacctcttcctcctcaatcacccggtctgcttgaatcaggtcagcttcctctgcgatctctatcagcgaactctcctcctccccttcttcctcctcatccccttctgcctgggctgtattctcaggtcctgctggagaaacactttgcgtgaaagaaccgacaccaagacctagccactccagcatcatgggaatgcttccagtgctgggaagcaaatccattcactatcctgcactgggtccattcatgagactttcccagtgctgggggtgagatgtacttctgcaggtactgttcccgtaggacaccacgcatggtgcactccagggtcttgg

SEQ ID NO: 133322 - DNA, 390 bp, Homo Sapiens
  misc_feature (18)..(18): n is a, c, g, or t
tgtagccagagcctatanagctgcaagcgagaactgaggtccaggtgccaaacatcctcgatctcgttggcctcggctgcagtcatggtgttcagtttgcgaagctcatccttcactctttttttcttagtattttcttagttgttaatgatctctccctcagtttttccacgtgtttgaaacagggagagcccttccctgtcacctcagctcaccatgttgattggaaactttattaccgccatcctattaaagaattttaagatatttttgtcaccaaattgcaatccctgatttctgcagaactttagatgttaagtattaattcagtgaatgggtgctctgcacatccctctactgagatgccagagccacaaatatcgggggatc

SEQ ID NO: 133323 - DNA, 929 bp, Homo Sapiens
  misc_feature (501)..(521): n is a, c, g, or t
  misc_feature (566)..(745): n is a, c, g, or t
aaagatgaatatttattcactttacaaagagaatggtattaaattgccataaacagctccatttatagacaaatataactgtacattacaccagcagctggttcaaacttgctttcccaagatgcttatatggctctggctcttaagatgagcacacaaatctctgttctgtcattggtattaaaaaccattcactttacaaagagaatggtattaaattgccataaacagctccatttatagacaaatataactgtacattacaccagcagctggttcaaacttgctttcccaagatgcttatatggctctggctcttaagatgagcacacaaatctctgttctgtcattggtattaaaaactccctcaaagataatggttttgttttacatattcacaggtgggaaaaaataaatccatctgcccagccctttcttagaggtgagcttccatgtgcatgtcccctagtgagcactaagccaatatcggctcattctttnnnnnnnnnnnnnnnnnnnnngcctacagccgcggccgctccaacatccctcgtgccgaattcttnnnnnnnnnnnnnnnnnnnnnnnnnnnnnnnnnnnnnnnnnnnnnnnnnnnnnnnnnnnnnnnnnnnnnnnnnnnnnnnnnnnnnnnnnnnnnnnnnnnnnnnnnnnnnnnnnnnnnnnnnnnnnnnnnnnnnnnnnnnnnnnnnnnnnnnnnnnnnnnnnnnnnnnnnnnnnnnnnnnngctttcagtcgggaactgtcgtgcagtgcattatgatcggcaaccgcgggagagcgttgcgtatggcgtctcgctctcgccatgatcctggctcgtctcgtgcggacgtacactatcaagcgtatacgatcacaacaggaaccagaaaagtggcaagcacaagcagacgtaagcgtgcggttca

SEQ ID NO: 133324 - DNA, 980 bp, Homo Sapiens
tttttttaaattcagaggtaacatttaactatgatttaaaaaaataccaaaaccataaattttcaaggcagtaattatctccttctcaacagtgctttgagaagaagcatgcatttgcactggggagggaggcacagagtcgagtctcggctgtactgctgaaccctgaaggcctgacagaggctgcctggaatgggatgaagagcagcaaatcagaaacaggcaatctgtccaattttcagtgaaacaagtttcatgattttagaacctctcaacatccaaaatcctagacacaatgttcctttgaaagaatatattttcttattgactaagttgatatgagaaataagtttcttattatacactttctgaggacctacatttctatggcatttaaatcttggatatttttaatgaacattgaatcccagggagctaacactgcatttcacaatctctgagcactgatcgatgttctttttaatcctgtagaatttctccacatattcagaacgtcctaaaagctccacaaaatcttcatcatgagtgattaccagaagctggaagttacgctgctgtgagcgactttttattatctcaaccagagcatgtgcaagagattcaatgttttctcggtcaagatttgttgttggctcatccaaggcaatgatgccacagttgaggcagaacgtttcagccagggccaggcgaatgatgagtgaggctaataccttttgtccagcactgcatcgtcctcgcatatccaaggctgtgtctcccttcagcatcaccactcggtagttataattccgccttttatcagaagctgatacattttcatcggcatcagaccgtatttctatgtattcaatatcttgtccacgataggtacttcgccacaggtcacgtataattttattgatttcttccattttcatactgtgaaatttcattattgcttggtcaagagtcttataata

SEQ ID NO: 133325 - DNA, 1195 bp, Homo Sapiens
  misc_feature (105)..(113): n is a, c, g, or t
acctagttaaaaaaatttattgaacaagggaaaatgacttacatcttgtgtgtcataggtaacagaaatttccagattcataaacgcaatatagtttaagaaagnnnnnnnnntgctggtgtctagagaccatgcttatttaaagacaactttatgggacttgaaaaaacattgtcactcaaatttcttggaagtaattccaacttacatttacatatcgcattaaagttgacaaaatgcagcccatatatcgtttgccacagtaacaccaatactgggagatggccattcccactgcacagctgtggaaactgaggcacgcactcatcaccatgtgttcatttacgaaacatacacacggagagccacgggcctggctttggtacagccacagaaatgcagtgcggtgtgtctgcctcaagcactgccaagctcagctcagtgggaggaggcagagagggtctgtttagtttcagatgttgtgactggtgcaatagcacgccaggatgtccagagagctggggggagtacaggggagaggcgggaacccagcctcctctggcgtgggagaggcaggaggaggagtcagagtcggccaaggctcccgggccgctcccctcaaccggagcctctgagaaggcaggaaaagcggcgcgcaggagcgcagcaccgtgaacgcacctcgtttggcatcgagtgccagcggatgacttgtgggcgtcaaatcacgaaatgatttgcatggcacagggaagcattgggggtgtttctggaggtaacagaaaattactgaaccatttcaaccaaggaagttgaatgatctgtgttccagcaaattcctgtggtagcaacacagagtgagctggggtgagctggcaggtgtgtaatcccaggaagaaagacccaggtagtccaggtagttcttccccagggtcaacacagaggacaaggccagagaggtggatggaagggaacgtagcattcatagatagatacataactagatctacagatgatatctcaatcgctcagagatgcacactgaattatttacagtcgaaatgacacaatgtctgagaatcactgaaatattccaggacaaatgacaacaaagggtagaaacaaaacttggtaaaatattgcaattgttgcatctggcgagtgaaaaatatatagaaatgtgcgtgtatgtaat

SEQ ID NO: 133326 - DNA, 681 bp, Homo Sapiens
  misc_feature (299)..(325): n is a, c, g, or t
  misc_feature (557)..(557): n is a, c, g, or t
ggaaggtggggagagaactttatttgttggtttacagatacagagcagaagggggaggccctggttcttgccaaggctggggattggccggcccctgggtaggccggcttcccagcctcccccggactctgcctgcaaaccctgctctggcaccaggctcccaggagagtggtaagagctgagagaaggccggtgggaggagggggctggcctggcatttctgctgccccctactctgtctgactctggaaatggaggaggaaggcagcagaggaggatgaaaagcgggcagccacctnnnnnnnnnnnnnnnnnnnnnnnnnnnctgccaggggaccccatggcagggcctgtgcccatgttgctcagggtggcttccagctcccggagcgtctcctccaagctgtccatctgctgggcagtggcgccccacgtggtgcggcctgagttggcagcagcctggccctgatgctccctactgcaggtttgggcatcatgtccagagtccttgaggatctcctctgggtaggtgtcagcagtagaggtctctggagtcncatcctgggctggtccctgaggacactgtactctggctcctccatcctctaggctgctgcctcctccacccagtctcttcagagctgccccctccttccggggcatgaagctgctcctcggccc

SEQ ID NO: 133327 - DNA, 446 bp, Homo Sapiens
aaatgacagttacaagtgcttttcccttgatgggcaatgacgtaactattttcagttattagtaatgccttaaaaagtaacagcattttgtctaaactgaacttatataattgcacaaaagtcatggaaagcattaagaaatgctggtaaagattgaagttttctcagattcttgcgcaattccaagaagccttgattccagtgggtcctctgattcaaacaataatgatgctcaaactcagtgacacacaggtagagaacagcagcacaaccaggagaacccatgtggtttgtaacagtgaaattctgctctactgttaaggtttaatgatgcattcattcatcttttcattaggagcataaaaaacacctcaaattatattttctcaggcttaaaacttgttttgagctatggattctacttcaggaaacaaaaattaaaaaaa

SEQ ID NO: 133328 - DNA, 994 bp, Homo Sapiens
  misc_feature (322)..(337): n is a, c, g, or t
  misc_feature (486)..(880): n is a, c, g, or t
  misc_feature (891)..(891): n is a, c, g, or t
  misc_feature (894)..(894): n is a, c, g, or t
  misc_feature (932)..(932): n is a, c, g, or t
tttttttcctttttcttaaatttaatttgtcatatataacgtttttatatacaatcagtgtgcattgtaacagtttatattaaaagtcaatcaagtttatctaaaatgttaacctggctgcatagcacatttgacattattgcccacataaaacgggaaaacaaacggatttacaataacttttggccgttttggattctgaaaagtgtttatacacctacccttttaaaccagatgcatctgaaaaaagtgtttccagagcatgcagtttagattttacatatctcgccattttttaaaactacaaacacaatattgactnnnnnnnnnnnnnnnngggaataacatgtatctaataaaatattcagtataaaaagaggactaatggaattaagtggcccctttccccatttttacattctaaacaatgattccatcaagacaaatcattaaaaagtgttattacaccctcgtgccgaattcttnnnnnnnnnnnnnnnnnnnnnnnnnnnnnnnnnnnnnnnnnnnnnnnnnnnnnnnnnnnnnnnnnnnnnnnnnnnnnnnnnnnnnnnnnnnnnnnnnnnnnnnnnnnnnnnnnnnnnnnnnnnnnnnnnnnnnnnnnnnnnnnnnnnnnnnnnnnnnnnnnnnnnnnnnnnnnnnnnnnnnnnnnnnnnnnnnnnnnnnnnnnnnnnnnnnnnnnnnnnnnnnnnnnnnnnnnnnnnnnnnnnnnnnnnnnnnnnnnnnnnnnnnnnnnnnnnnnnnnnnnnnnnnnnnnnnnnnnnnnnnnnnnnnnnnnnnnnnnnnnnnnnnnnnnnnnnnnnnnnnnnnnnnnnnnnnnnnnnnnnnnnnnnnnnnnnnnnnnnnnnnnnnnnnnnnnnnnagcaaaggcancanaggggcagacgtaaaaagcgcgtgctgcgttttcatangtccgcccctgacagcacaaaaatcgagctcagtcaaagtggcgaaccgacagactatagaa

SEQ ID NO: 133329 - DNA, 561 bp, Homo Sapiens
catctttggcctttgcttgtctcttgttggcttctcttctggcttccctttctttcagtcttttctcccgatgctttgccttaatttttttcctatattcttctttgtcaaatttgtcctcttcctgaagtctttcctttgctttatgtaagttgataccacctgtgtcatcatcttcctcagcatccttgatggcagatttctgcatttgtggccactgctgaaccaactccccttcatcagtaaatgttatcttcttattcactttaaaatttctcttcattactttttttgcttctgcaactttggtcatttttttcttgatgctggatttagaaggttctttcttctgtaatgttttctcgtctttaaggtccaatccaaacacattatgccgcttcaccttcaagaaatcagcatcttcttcctcctcatctctgtccaagaactgtgtaggaacttccttgatcttctgtgcctcactggtgttaggaagagatggggcttgagatccttttgcttttgccagtttctcttccatttcttcttcatcctcgtgcc

SEQ ID NO: 133330 - DNA, 1005 bp, Homo Sapiens
  misc_feature (439)..(448): n is a, c, g, or t
  misc_feature (890)..(890): n is a, c, g, or t
  misc_feature (980)..(980): n is a, c, g, or t
aaaaacaaggttttgttacaaaaaacagttctgaacagttaacattgtaaaaaggtataaaaatacagggactctgagcactctgaggaatttcccgacacatgctcttaactaaggcggagagatctctgggaagccgaagtcagggcctgggcctctgacccctgccctgggcctggtccccctcctctttcccacgatcccatgctccagggctgaccagagacaagggctctccccaatcctggctacggctcagcctctcaaggaggaactttaatgatctacagtggctcatcctaaaagaggggggctggactgcaggtgttgctgggaagcctctccaggcctggagctggagtacccgtcctcagcactgccagcagagcgcctcctcatcccaccccagcttgaggcccccaagggaccgggctcttgnnnnnnnnnnctgtccaaaagaagggtcctcccctgtcccaggcacaggggtgttctccagatgccagcaggagctcatttctctggggggccggagggtggggagaagggtgctgagctccttcgaagctcctgctgcagctggcccttcagtgtggacacctgctcctccagcccacgcaccctctgggcggtgggcccgctcccgagcctccagggtgcgctcagtctgcgcctgggcgctgcgcagccgctccacctcctgctgcagctccagctgctgctgctgcgcatccacctccagctgggccgggctgtggctctgctccagcacaccaaactgcgctccagctgctggatctgcctctgcgccctctgcagctcaagctcagccccgtgagggtgcggtccaggggcccttctctgcgctcagcgcactgtgtcctcatggntacgagcttctccgctcaactttgtcacgtctcctgagggtaacggtctttctcagcgcaaggtgaggctcactccgcttccaattcaantagcaggcgcgtgcagctccaaggg

SEQ ID NO: 133331 - DNA, 807 bp, Homo Sapiens
ttttgctatgaaaacaatgtacttttattaattaaaagtcaaaaacaacaaaagggaaatttcacaacctttgtttgcaactatataatctttatatagaaaaactataaagtgacagtctgatctggaaagcagctcaacaataaatctaatccttacattaaaagtaagtaaattatagaatcagttcacccaaaagaaattgtcttgctgtagaatattttagcccaactgatttcaactatattattctcatttctgacaaactgtctttcctgatatttcaaatcaccagagatgtaacagacaagaacccgttgaagtaaaagaataaaacacaaatactccaagcacaatcacatgtgacatgatgagtgcatttaatctacaatctacaaaactatacaaattaccaattatacatataatccatttacattgaagctccatgaggtggtactgaataaacactgaggcatcaaattttcaacaatggaacaaggctcacggaacagcagcacattcccaccttttagtctagcatcacaacacttcccctgggatttgtacttatttatatattatctaagtcctaggaagttggtaacaaaaattttaagtcaaaaggataatgaattaaacactccctaaaatctattctaaaacatgcgtgtgaaatatgaagagatcaagcactttgtaaatgtgagattttacagtcacatgttcctttaaacttatactagtatcttcactagtatctgcacaattttctgtaattaggcttttcactaaaacttaatagaa

SEQ ID NO: 133332 - DNA, 277 bp, Homo Sapiens
aagattaccataaatgtttatttaagaaagcattatctacggagttaagacagaccttggttagagttttaattctaacactagctaagccgaaaagctacttaccctgtaagtttcggcttgtttatatatcaaatgtgaataatacctactctgtcagttgatagtgaagaatataaaaatatatgtgcaaaaacctacagaagtatatacactagtaatattttccttatgactctcttccaccaataagtataaagccaatttaactttatat

SEQ ID NO: 133333 - DNA, 743 bp, Homo Sapiens
  misc_feature (172)..(172): n is a, c, g, or t
atttgaagctttgaggcttcgaggtccctttccccatttttttggcccaaagctatatccatcattgttctaacattggtgaaaaatgaatctgatgtagatgaagagatttatgtagctataggaagttcctataactctcctattaggattaaccttcttatcatcttgncaaattatgcaagtggctggatattttgggtagatgggtggatgggtagatgaatggatagatgagtagacatatagactgagtagtaatggagaagacaaattggcaaaactaattctttcactttcctgtcataaaatcacctctgaaaacacaacttctttacaaaaaagtcacgaatgacacgaactctcaggaaaacacatttctatggtctctggaaacacctgtaactggcacccaggtggtcactcacctgggggagggggtcagggggaaatcacctccaaggacagaggagaaataccagcccttatttgggcgaaaagccaattggcacttggacggccacaaagccaacacacagggcagggtagggaggggccgaggaggtgatttccccctgaccccctcccccaggtgagtgaccacctgggtgccagttacaggtgtttccagagaccatagaaatgtgttttcctgagagttcgtgtcattcgtgacttttttgtaaagaagttgtgttttcagaggtgattttatgacaggaaagtgaaagaattagttttgc

SEQ ID NO: 133334 - DNA, 1075 bp, Homo Sapiens
  misc_feature (259)..(274): n is a, c, g, or t
  misc_feature (1003)..(1021): n is a, c, g, or t
ctggcggacggaaggccaaacaacgccttcccgcgtgcgatcctatgactggaaacgattcagatgaagcagcagtggcaacgcaatattgatagctcaccctaggcccccaggttacattatgctcagctcgtagtttgtagaatggagcggtaacatttaacacagaaacagcttgaaatataggaattcatacgatcactataggaatttgccctggaggccaagaatgggcaagagaataaatacaggttgaaannnnnnnnnnnnnnnngccacattagctgcgcccctgaagtgtctccagcagaagagatggatgaatggaaggacacacagatggacagagagcaggaaagactgttagctttgctaacagtcaggactattccttctggactctgtgcctttgcctgcacagctagtgttgatggcttgtttgttgttttcaccagagtgagctccttctggacatactgcctggcagcctgccttcctagggagctggcgccaaggcctctccctgatggcacacaaggagcctccttcctgtagcagcgcccagttttcatgtggatggattgtagttcatttgaccctccccatccgcgggccatccggcttgtgtccagcttttagctcttgccaatggtgctgcagtggccattcttgtagttatagctttgcgtactcaggaaggcccttctcccgactgcggcccccagcctggtccactaaatgcagcctgtggtcgggcagacagcattggggtccattaggaagaccaggtttgctgggcataagcttcacaggacgggagaacctgcccatggtggactgtcgttctccacagctcccttcccttgccccttcgggcctccaggatatgtttgcgggggtgggtgtggtgtccagctgttaccagcttctgagctagagctgtactgcctcacgtacacccccacctctgtaaatggtccttgattaaatcgtcctcatattnnnnnnnnnnnnnnnnnnngcctacagccgcggccgcaagcttattcccttgtagtgagggttaattttagcc

SEQ ID NO: 133335 - DNA, 1035 bp, Homo Sapiens
  misc_feature (484)..(484): n is a, c, g, or t
  misc_feature (688)..(688): n is a, c, g, or t
  misc_feature (776)..(776): n is a, c, g, or t
  misc_feature (788)..(788): n is a, c, g, or t
  misc_feature (822)..(822): n is a, c, g, or t
  misc_feature (854)..(855): n is a, c, g, or t
  misc_feature (866)..(867): n is a, c, g, or t
  misc_feature (875)..(875): n is a, c, g, or t
  misc_feature (878)..(878): n is a, c, g, or t
  misc_feature (880)..(933): n is a, c, g, or t
  misc_feature (958)..(958): n is a, c, g, or t
  misc_feature (1015)..(1015): n is a, c, g, or t
gcaggagggtagaggctttgttttgtcagttgtttccccagccaaggctcttgactagggccaaccagagttaacaagcatgcaagggctcaatctagccagggcttctgcattaccatggcctgtgaggcccctggcagcccattggagaggtctctaaggcatctgggaggctggttctaagtatcccgcccctagcctggtacacagcgggcatcatcagaacatgtctgaggctgtgctgacctgctgtctgagagcagacactgcccgggcttcctggaccacagcaaagacgcttaagagaggggcaatgaattcccctgggccccctccccaaatggccctgaaactagcaggcagtgggaaaccagccccaggcttggcaggggcctggcagaggctcagtgccgagggccaagggcctgccaacctcactcccccaaacagcgaccaattgtcccagcggcgcccaagttccctngaagacctcccagcagtcactctctcacagagacacccgctctcaaaggggccagcagtctggctgcttccggccacgaccacaaccaaggaggctggaccagcatggtggtcccagcttcacaggaggccccgggacttccgagccctgctgggaacttgcagccgggtgcttggtgaggagcgggtgaggacagatcccggnggtgggccagtcctcttggcatttgtatgcaggtgcagacccatgaacatgagctggaatcttccagcctggtgagcagcactcttgnggcagttggttncctggtccaggctgcccaggagtccgtgctgttnttatttttatggtctggcttcacagcctcgtnngcgattctggnnctcgaggncanannnnnnnnnnnnnnnnnnnnnnnnnnnnnnnnnnnnnnnnnnnnnnnnnnnnnnttggtatcgctcacattccaaacanatacgagccggagataaagtgtaagctggggtgctaatgagtgactactcacattantgcggtgcgcaaatgccgct

SEQ ID NO: 133336 - DNA, 1378 bp, Homo Sapiens
  misc_feature (380)..(388): n is a, c, g, or t
  misc_feature (604)..(618): n is a, c, g, or t
  misc_feature (665)..(665): n is a, c, g, or t
  misc_feature (1317)..(1317): n is a, c, g, or t
  misc_feature (1324)..(1324): n is a, c, g, or t
cgccgccccccgcttgttttgcccacccagtgggggcgaattatttatttatttgccaacaggggcggaccaaaggggtgtgggaaaagcctcccctttggggcgtgtttcaagggttttcattccagtaccccgtttttgttggatggggtttttcaaaggttgggggcgggaggatgggctttaaaagtgagatttccacaccacgtatcctcccgaataaaatttgctccgagggcggggcgcgtgaaaatttgatataaagaggcttccccctgggggaatccctgttggaaagggatcccccggaaagcacctctcgaaatttcccttctggggattgttttcaaaaacgctttgggttcgacccccgggggggnnnnnnnnngtgggggagaaaaccacagcccctattctttggtcccgaggttttcctttggagaaccgactatggccccaggtttccctttttccctaggggggcccgcgcgccccaaagaaagggtttagaaagatttttgagggggcgagggcggggcccacaaacaacattttttttgcggtgagtttttgcttattatggtcgattgtactgtttttccgnnnnnnnnnnnnnnncatcgttaagtgatttttattaattacacatgtcacacaatatttgnggggaagcattaacaattagaaatcagataaacaaatacttaagtacagcactaatagtagtgattgctatatggcaagggataaacatggacagtttgtaaacttctagaaagaagtactatatttctgcgggtaacttacactgtattctctgagctgtttattctgtacttttcacagaagtgttttgggcagggaatgtcatcttagggaagacacgggctgctgctacctgccaactcatgaggctgtacctaactggcctggtctgttttgcgaagttgttccaacactggttcaataaacccacagtagaattcaaataggtctgtatagggtatgtcttgtaaaattctgagcaaatcactgcctgaacaagatgaatctcccttcctttccccaaccatctttggtaaagacaccaagcctggatgaaattaagctgtgataacccagtgtttccagttatttcactctccatcctctcaaaggtatagataaagcactcccattctgtttgtgaatctggcctgatgaaatcaaaggtagattccgtgatcaaggaacggcacctgcttgagtcaagagtggctttagtgagttactgggtaaagatgtgggcatggggatgttccaggaaagccttgccanagtgtanaggaggagtgggaatactgcttggtcatggcagctggcatctcacaggactatg

SEQ ID NO: 133337 - DNA, 1097 bp, Homo Sapiens
  misc_feature (113)..(113): n is a, c, g, or t
  misc_feature (265)..(745): n is a, c, g, or t
  misc_feature (776)..(804): n is a, c, g, or t
ctgggtaatcgttctccggtgatcagcgatatacagtaagaccacgtcagctaacggggttgtcacaccccaggtggaggaagacgtacccgaatgaatacgcacagctgagnttagaaagaacacacttccgaaggaagaaagcaaccagtatccgtaaccgccaggtctgaacagggagacccgaaggagcttccaggagaaacgcgtgtaattttatagtctgtcggggttacccacctctaactgagcgacgattttgtgnnnnnnnnnnnnnnnnnnnnnnnnnnnnnnnnnnnnnnnnnnnnnnnnnnnnnnnnnnnnnnnnnnnnnnnnnnnnnnnnnnnnnnnnnnnnnnnnnnnnnnnnnnnnnnnnnnnnnnnnnnnnnnnnnnnnnnnnnnnnnnnnnnnnnnnnnnnnnnnnnnnnnnnnnnnnnnnnnnnnnnnnnnnnnnnnnnnnnnnnnnnnnnnnnnnnnnnnnnnnnnnnnnnnnnnnnnnnnnnnnnnnnnnnnnnnnnnnnnnnnnnnnnnnnnnnnnnnnnnnnnnnnnnnnnnnnnnnnnnnnnnnnnnnnnnnnnnnnnnnnnnnnnnnnnnnnnnnnnnnnnnnnnnnnnnnnnnnnnnnnnnnnnnnnnnnnnnnnnnnnnnnnnnnnnnnnnnnnnnnnnnnnnnnnnnnnnnnnnnnnnnnnnnnnnnnnnnnnnnnnnnnnnnnnnnnnnnnnnnnnnnnnnnnnnnnnnnnnnnnnaagaattcggcacgaggcgcggctgtaggcnnnnnnnnnnnnnnnnnnnnnnnnnnnnnagaaaatgctgtgattttattcatagtatatacaccacaaaacagacactttccattattttgattacttcaaaatttaaaatctgcttgtttttcaattgatttttttcatgacagatgctgagttctgacccatttttttcccctgacagtatcaataggctgcccgactacatgatacaattgtttttagcatttaaatttaagactatggctcagtgtttgaaaaataaataagttaacaaaagagaaacattattaggaggaaaatgaaaacatattcaccacatgat

SEQ ID NO: 133338 - DNA, 452 bp, Homo Sapiens
ataaattaatggcacataagtgtttaataaatgatcacttatagtattataataggacaagagacacccatttgggacaagggccaggaaaagggctctcatagaaagcttttcctgattttggagagcatgacctcataactttatactggctgagcccaccattccactctacctggtaggcatagctagagggctcatcttctgaaagagctgtcttctactttcttcttattctggatcctctgtttctcccccatcctcatcttccatgtctctccatttagtcagggcagaaaaagtctgaaatgagctcttccagctcactgttttctcttcaccttcattagaggggatgggccacttgtcttgatgtagaaaaagtcactcccaggaaaggagcctgagatacgctctcagtaaatgttctctgtggtgtcatacctcgtgcc

SEQ ID NO: 133339 - DNA, 1245 bp, Homo Sapiens
  misc_feature (548)..(598): n is a, c, g, or t
  misc_feature (619)..(669): n is a, c, g, or t
aggggaatattttttcctattctcgcctaaaaggggtggtttttggaaaacagcggtgtttgtgtttttaccccaaaaccctgtgggggaaggttctctccccctccgggaggttaaaccggggcacaaattatgggacaacttttctttaaacccccgttttggcggccgggggggaaatatttttttaatgcaaaaggccggcgaagggctcttgtattgcccccgcgggaattccaaggttcaatccacccccctttttggtatttgttttccaattttgggcaggaaccccgggaggtatttttctttcggtggatggggaagaacgggcccgggcggggggcgttaattttattatttgaagcctagaatttgcctttcctttcttatattattgcagtgaccgccccccacaaaaacacattttggaataatttctttacacgcccgcgttggcgcccgggccctttgttattggtgaggaatccaatgccttagttcatgccccaggattttctttggaaacagcttatggccattttccnnnnnnnnnnnnnnnnnnnnnnnnnnnnnnnnnnnnnnnnnnnnnnnnnnngtgggttgtttgcggtcttcnnnnnnnnnnnnnnnnnnnnnnnnnnnnnnnnnnnnnnnnnnnnnnnnnnnccatgaattcaaagccttttaatgatgtgaacacttactccccatttcttttttacattgttacaaaaaatttacatacagttttctgaaagtggcattttgttggttgttattatactgatgacacatattaacactttgtattgaagaagtatcataaaaatcacagggcattacagatttttgataagaagtagtaatagcattgtcttttaacagctggaggctcccaggcatactctttggtgagaaatgattaattttatattttcattttgatgagaatcttttcttgtttttaccagttataaaaacaaagctttttctttgttgtgatactgtgcactaagacttagtttcttgagctgatgctaaataaaatgagatcaataggaatattccaggaggtcgtgagaagtttttagaaaggatggcatctacatatatatggagctctgaaaactgttggagagtatgacctgggactgaaactgtggagcacatagccagtgtcacaggctccgagagcagagagagtttgctctgggacctggaatgagtgatggagaaatgttt

SEQ ID NO: 133340 - DNA, 605 bp, Homo Sapiens
cattctgaaagactttattaaaagcgtttctattgtaagaacacaaaatattttaagccagtaacaacatttaaattaaaaagatataaacatgtcaaaggaatgaaacctagatgttttattatgtgtgaattatgagcgcttacctggccttgtgtataacgtataaaccttcacctgttgcatgtcattcagtctctgcagcaacattccttgtgtccatgtgggtgtttctatgtgtgactgtgaatatctgtatgtaaatggcttgtctcttgggtgcatttgtgggggtgggtatccaccgctattatcattgctttctttttcagaaagtgtttccaatctttgcttcattttactcaacagaaatgaggaggttggtttatatttcatgtcttttctctttcagatacagctggtcatgccacagatagtgaagaagaataaaactcttcagaagtcctgagatttaaagatggcataatcacttccaacatcccattccatactctggaagaagtagaccatgatgctttccagcagtaagccactcaacacggccaagaaggagagcttacggttgatgtttagggtcactctcc

SEQ ID NO: 133341 - DNA, 1344 bp, Homo Sapiens
ctgattaaaccctgcaaatagggcattttcttaagagaaagggcacattcctggcatactaccagatgaccacaaaggaataaaaacaccaggaaacttctttgtccatacacacttaacaagttcgttcttcttgcaacctcctcaattgttcttccagtgacagacctgagacatcttctgttggaatatacttcatattcttatccacaataagttcttatacaatgtagagtcaatttcttttaggacagtttttgaagaatgtgtgccgcagcatttcctttaaccaaaatggtatcaatcagttctctcgcttgtaaaggtatctgtgttttttgtttaataatatcatgttcctgtttattaattacattggcctttaaaagattatccaggataggaagcacacatgtcaattgttgaaagagagccattctgttcttccgaattaatgacaaatcatctgatgccatttcttcagcttgtttttccttctcctcttctcttttttcatcttcagcattaagaagtgctgacacaatatcattaactgttttatagttctctccagttgtcaggattttactttgaactgtttgtttcaccaggtctctattaaagcccatttccaaggcagatttaaccacaggtgtattcatcatgacagcatcttctgaagaactttctccaggtccaaaatgaataattggtgggtcagcattttcttctccagtggtatctgaagttgacaacagctgttcaagaagatgaggatatctaccttgaatctcatcaacaaactcttggcctttcattcgtatcaagaactcacaccttggaaaccacttggcatgttctacccatggatcatctccagattcccaacacctcaagccaccatcactacaaaagcatttgacatcatcattgcgacccacataataaaaaccagcacttgcaagctgctcaggctgaactggaacactagatggccagtacataaatgttctcattcgagctgcatgtgtctgcatgctcagatttgaaatgctaaacctcagagtttctagagaattttccaaaaatggacagttgggaaaatgcctccggtgttctgacatagcatcatcctttggttcccagttactgagcttcccaccacaggcaagcaggctaccctatctccaggtcctatataataacaaccagctcttgccattctgatggtgacaaaaaagttaatggccacatatggtaggtaagaaatctggcttcttcagtactcattgcataactgtaggggttagtcctcgatgaagagatgtcttcaactgctctaga

SEQ ID NO: 133342 - DNA, 611 bp, Homo Sapiens
  misc_feature (222)..(261): n is a, c, g, or t
caaaagaaaatgccactttggcttttattcatgagttctcaacattccccatacacaaagaaggaaattaactttattcaaacattaagtgactcagtctaggtggcaaatttgatttaaataatgagtttttaattccgaatggactgttttccctacaacacagggatagacaaccattaagtagcctttggggtaatttctggtctctatttccaccgnnnnnnnnnnnnnnnnnnnnnnnnnnnnnnnnnnnnnnnnggcttgaatcacggagaatgttttaatgtgattcctactggtgtatgtatgtagacatcgaagtgtctatagcatttcccttaagaagacattgcttagctactgaatgtttccacaatctatctgcctcctctcagacttgctttcctttttcttttgacatgccttcttttttcctgacccctacagactcacctacagctagaaaaaaatctttcctctcccctttgatattaaaaacccatcccttcttctagcactttcaaataagataaggcactccaaaatgccttgtatcatgctagcgttgtgcaaatgtaaattgtcattatgttggcattcctcgtgcc

SEQ ID NO: 133343 - DNA, 636 bp, Homo Sapiens
  misc_feature (86)..(126): n is a, c, g, or t
tactcaaaacaaatttaagctgaagatatatactgtataaagtgttcatctacccagtactctgaagtcttaagaaaagtcaatgnnnnnnnnnnnnnnnnnnnnnnnnnnnnnnnnnnnnnnnnncacacattagcaatttaagccttttaacatgccaattttttagatgctttattgggtttttttcccctttactactacttcctgttttcccctttactactacaatttaagcctttaaaaatggcaattttttagatgcttgagatagtttgggggatccctagctcttatcatggcactctgttgagtttgtgaaatgcatcttcaaagaggttgtcaataatatgcaaatttttgaaaactagtgagattactaattattgatgaataaaaaatgagtacttttaatctgccaagttaaagctctagaattccttttctccagtaataactcgcagcatcactaccaatggaagggacctaaggaataccgtgtacactgatatacacgaagctgctcctcatttttttgtcagattacaaaagctgggctcatgtagttatggcctatggacctctttttaagttattttagcagaagtagatgatggtctacaccttcctcgttcc

SEQ ID NO: 133344 - DNA, 633 bp, Homo Sapiens
aattaactgttccatttttttaaattgccaatttatttttctacccaatccagtatcaacgatatacaaaaggatataaacagactatcatgaatatttacaggatgacacaccaaacaattaccaaggaacaaatcctgcaaagtaacaaattgttgcttatccatgtccactcaactgtacaaggtttatttctaggacaatttcccagttctctgggaaggaagttctgtggatttataccttccataagggtcaagcaaacatgctaagagctgataccatcatgtttttatactaacagccgagaaaggcttttaaagaacactctctttcaggccaatgttacagcattagtgggctcatagacaggatgtgacttcatcaaaggaaatgcttctctcctcttggtctccctaaggtcctcctcctagtacacaggaggagttccccataataacaccctggttccaacagatggtgtgtagattatcaacacacaatgagaaaaagaaactgacccccttacctaccaaatacaatacagatctggggaggcagtttccagatcttcaacaggcagacactagtggcctgcctcgtgccgaattcgccacccaggctcgctccttg

SEQ ID NO: 133345 - DNA, 665 bp, Homo Sapiens
tttggacatgatttaagttttattctggacagagtaaaaggcaatcctagccggcatgagccacttttctgggaactatcagggccctggccatccccaaaggaggccaaaggtccacgggcggcagccatctttccccacccccctcctatttacaggaaccttcctaggctagggctgcgcccacgggcccttaccccttgattcccatcacaggtttgggtgaaggggcaggggtcttacaccagtccttcaaaggtccgattgacatgggtgggtccaaaaggggtcttgaagagggcgcctcgggggatgatggccacagccttgtcaatctggtcaatgacagacaccaagcgggtctcttccttgatctggaccactatttcttcttcaaagactttttcaccttcattcaccttctgcagctcagtgtgttcatattcgtatgatgggtcccccatgaagcggcccttcaccacagacgactgcgccaccatctcctctgtggcagggggcaagaggctccactctgtgcagttcaggctatagagcgtcttgcgcggtgcgagctggtcctcactcaggccctgcgcgatgtagtaatcggcgacgaggccaaggatgcggccccagaagagaacccgatcatagcggtagtcgcg

SEQ ID NO: 133346 - DNA, 478 bp, Homo Sapiens
ttttttttgaagcttaagaaaatcatgtttagactctgtttaaaaacatccaggctggctcccattctatagcatgaagggcaagtccatgttcttctcgccagtgcccacgtagacgtagccatagttcttggtgcggggagcatggtagaaggtgaggcccggccagagcaggctgcgcagcaccaccagggcattgcccctctccatctggatgctccaggaccctcatggacacagagcaggagtcccaggaacagggccaaccaaaaccacacctgctcagaagccacgtgaagtcaccctgaacaactgcctcagaccctttgggaatgtcatgctccaaggagtccatgaaatccagggaggggtccaggtcagccttctcaagcaaggtcttattctttagctcaacaggctccctgaaatggaagtaggagctgagcttcttggcctcagacaaggacagtccttcaaa

SEQ ID NO: 133347 - DNA, 486 bp, Homo Sapiens
agagacccgcttggtgtctgtcattgaccagattgacaaggctgtggccatcatcccccgaggcgccctcttcaagaccccttttggacccacccatgtcaatcggacctttgaaggactgtccttgtctgaggccaagaagctcagctcctacttccatttcagggagcctgttgagctaaagaataagaccttgcttgagaaggctgacctggacccctccctggatttcatggactccttggagcatgacattcccaaagggtcctggagcatccagatggagaggggcaatgccctggtggtgctgcgcagcctgctctggccgggcctcaccttctaccatgctccccgcaccaagaactatggctacgtctacgtgggcactggcgagaagaacatggacttgcccttcatgctatagaatgggagccagcctggatgtttttaaacagagtctaaacatgattttcttaagcttcagtg

SEQ ID NO: 133348 - DNA, 819 bp, Homo Sapiens
attctaagtataatttttattaataaaaagattaaccatggccatgtaaaatgagtggctgggcttagagtttgctacaccaatgaaattaaaaaattaatacttgagaatgttaacaataatttataatagcattccttgatagaggcattttaattttagcaattatttctcttaaatatataaactaatccttagtgtcatggaggagaatcatcatagctactgatcaatcaaaaaagaatttctgagagctgtttggtgggtgttatctcaagacatacaaccaagctgtaggaaaatctcccaaaaaagatctggaaaactgtccagtcacaacacaggaagaatatcactgtttgacacttgtggcaggggaatatcccacttgcaagtcaagcgtgaagaataaacacaaattaagaatgtacccaagatccccaaataaattagtaaaagtgccattaagaattatcagacatagaatgtgtttcaaatacaaatttgttaaatccaaaagatacagtaattttattacataaaatttctcctgtgtgctaaaaatgctaacttacaagacataatatttgtagtagagggaatcacggtcggctcgttgaattctttttcattattgaagaatagaacaataggtagtggacatagaagcactcagagtcctctgaaattcaaggttgttacattatgttccaccaaaataagactaccattctctaataatataaatgcctgttcatttcacctttcaaaaataaagtccatttcttctccattaaagtttctgcaagactgacaaag

SEQ ID NO: 133349 - DNA, 975 bp, Homo Sapiens
ttttttagaactgagcagttttactaatatattaagtggggtttacttagccctgtttcacagtatttttttcaggagataacatttcccaataatcaaatactttcctaaatcagtatctgactaaagaattagaccaagttttccacatcccagaattggcttgaaggaaaggtgatgatttttcttagcagcctcagatgtcctttcatggccaggctttggatccaattagaaagcagagctttactgagtactgtttttgagaattataaacagagaagtatgtaaaaggtgtgttaccattttttcctcattaaggttttatcatggattcatcctgaaagtcaagccacaatcactcggtgtagccagcccatggttggagtgagtggaaagcgaagcaaagaagatgaaaaataccttcaagctatcatggattccaatgcccagtctcacaaaatctttatatttgatgcccggccaagtgttaatgctgttgccaacaaggcaaagggtggaggttatgaaagtgaagatgcctatcaaaatgctgaactagttttcctggatatccacaatattcatgttatgagagaatcattacgaaaacttaaggagattgtgtaccccaacattgaggaaactcactggttgtctaacttggaatctactcattggctagaacatattaagcttattcttgcaggggctcttaggattgctgacaaggtagagtcagggaagacgtctgtggtagtgcattgcagtgatggttgggatcgcacagctcagctcacttcccttgccatgctcatgttggatggatactatcgaaccatccgaggattcgaagtccttgtggagaaagaatggtaagtttgggaccatcgatttcaactaagagctggcatggagataagaaccatgcagatgcagacagatcggcgtgttttcttcaatttatggacttgt

SEQ ID NO: 133350 - DNA, 1409 bp, Homo Sapiens
  misc_feature (74)..(94): n is a, c, g, or t
  misc_feature (1305)..(1305): n is a, c, g, or t
ttttttcatcattttgccttttactatatgaagaatatggaagttgaaaagtgatcaaggtaaatcagttactnnnnnnnnnnnnnnnnnnnnntggagaaagggatatcaaatgattttgatctgtcatgacatcaaggcccaatatatgtgatgccacagaatttcagtgttggtttgaaaactgatgttcctctgcacagtgagcacagagtgtatttctaaaatggttttaatattaccagatgccaaaaatttgtaacagcatttgccttttaatagaaacttgttcccactgtgaatccaggattgaagtattttaatattctttggatacttaaaagattagtatcataatcatgtaattacatatggagttacttcacttaagccacctgcactgctacagttctaaactcatcctagagagatttaaaataaataaagtgactgaactttctctcatagatgggttctaaattccgaagactttctactcatagagctgccagtgtaatcaagagtgtatagcaatgatgcccctgatcttacagtcctttatacaacagtttggacaggagtgacacactgtgcaggagagctggctctctctgaggatgaggttgatcggttagaaatctctctctgtagttcctctacttttttctgaagctctgctcgtttagccaagaagttctttgtaatctgttgtgaaataggttcctgtggtttcatccgtggattccaccttatgtaatatcccacccagagctctaggtggcgcatgctggctactggataaaggacatgattggaatagctcccatagagaggattagtgaagtcttccagctggctgtttatgtaagaccacagtgacacagtccttttaggaagattctcttttcctctctgttgttcactattacagaggaatgttccgaataagcagctgtataggtggtccaaaatggtaatgagaaaatactcattgaattcaaatgcggtaggaaactgtcttgtcatctgccagacacagtcaataaattgaagaaaaacaggcgatctgtctgcatctgcatggttcttatctccatggccaactcttagttgaaatcgatgtccaaacttagccattctttctccacaaggacttcaaatcctcggatggttcgatagtatccatccacatgagcatggcaagggaagtgagctgagctgtgcgatcccaaccatcactgcaatgcactaccacagacgtcttcctgactctaccttgtcagcaatcctaagagccctgcaagntaagcttaatatgttctagccatgagtagattccaagttagacaaccagttggtttcctcatgcctcgtgccgaattcacacccagctcgctaacctagtctat

SEQ ID NO: 133351 - DNA, 455 bp, Homo Sapiens
gcatggcacacaaacatttattgttgttgatctggagttggaatagaacagggatccctgtatttccactgctaagcctggcagcccccctcggagcagcactgagcggtaggggtgaacccccgctgggaggagcaaagcaaagaagcaggggctgggggaggaaggaggtgatgggcagttacgccccaggtggacggagatggctggggaacagtcaggtgtgtggcggggtgggtggggtcgtgggctgggggctactttggaccaccctgaggagctgagccgcatggggctgagggcgggctgatccctcacctggaaaatccagtggggagcagacattggagcagactcatttttctgaggcaggctcagcccaggacaggggttgggcaggtgtcccggggagaaggaagctcgacggcacaggggtgggtggagggcggtgtgag

SEQ ID NO: 133352 - DNA, 373 bp, Homo Sapiens
tttggagtagcaaaaggcattttaatcaggtttttagagattgcaatttgggagacacaagtctagcaagcagctaaatcatgttgcattcaggcaaggttaggcagagcttttaagggctactgtaaatttacgtatctggaaggttttagcacagtccatgataaatgatggctggttgtcagctcaggatgtctctagtcaatgatcaatatagttggatcctggtcacatacacatctagatggagtttcacctgctgaactgggccaaagtgtaaaactagctgcatttgacttgagttgtatatactgggcctgatcaaccgcctggagagataaccatacccaactatattgatcatcctcgtgcc

SEQ ID NO: 133353 - DNA, 1430 bp, Homo Sapiens
  misc_feature (632)..(663): n is a, c, g, or t
ttttggttttcagggatactttattgacatgaacaaggagtttactgaaaaacagcacatacaggcattacgttgttgagggcttaggtggtcaggaacatttccagagtttggattgtgttcgatggcagttcacaagcctgcaagcactcggccttcagcggcctccgtctccatcacacacactgctcagcagaggcagctcttgccaagccgtgacgcagggaggaagcacagagcattgctggctctgagggtcagctggcctgggatggagaccgagtttgatatataaatcagacttgcttggaagtgcttatctcctgcgtcctgctgcaaactcaactaagggggaggaagtgggctgaactaatcatgagctgtccaccagctgagattttagagattaagtaaggtttggatgatgctgcttttcagacctgtgactgcatggcacactaaaggtctaggctagagcttgacagagtgggtgcaaaaagatgttagtagaatgagtggatgatcagactggcaagcacaccaagcactattcagatacatttgcagtgactaggtgaattcactgaattagggatttttcatttacaaaatgaggtgagaggaaggcttcnnnnnnnnnnnnnnnnnnnnnnnnnnnnnnnncattttcatgttaaactgggaaaggggaaactaagatatattctgaagtgtgtctagctcttgcttctctttcttcctgcaaagatgcagtgacacagccttttccctcagatttatgtgaggaggactcacagattctgagatggatggaatttcttttttgatccaataattttggggagagaggagggagttgctgtctcctacttcccagcacattcctgctttgaaaagtaactttcctagtaatatttctagttggacatctaaggagaaacctgcaactcagaaggaagtctgggtgtgtgggtgtctgggaatggagaaactaaaaggtcatgccgttaaacaagtggtgagaataaaggctggggtagggacaggcagggagtgtttgggttggggctctgattcaagaccgaggtgacagtgaaggtcagcagggcaaggtgctctcagggccaactggattgagcaatcacattcatggctgtgaagtagtaagaatgggaaaatcagattgagccaagcttggcctttagtgaattgtgttattgaggatcagacatgggaaatatccagcaccaagacaacagatggggtttctaaagtgatattaatagcccttgagaactcttataagccctttaataagcaacatcatgccagataaagcttccagagaaacagacatctagtatgggtctctcgtaggattatgggaagagacaggagaaaaaggtggagattggaagtaggcggccgca

SEQ ID NO: 133354 - DNA, 297 bp, Homo Sapiens
taactgttaaaaatgtttttattttttagtaagcaaaattttacgaaaagtcagattcacccgtggagccagaaccttctttctcacgggtagactgtggtaccagtgcgtgttggtcgggtggttcatcattagtaagctcccgtgggccagcggcagcctgaccaccgccaccctcctggaggggcttttcccacgggaatccttatgccggaagacaaagtcttcaactcttggaaaatctcatctgcctcagctttgccaaacaggactgtgtaactgcagtccaggccctca

SEQ ID NO: 133355 - DNA, 845 bp, Homo Sapiens
tttaactgttaaaaatgtttttattttttagtaagcaaaattttacgaaaagtcagattcacccgtggagccagaaccttctttctcacgggaagactgtggtaccagtgcgtgttggtcgggtggttcatcattagtaagctcccgtgggccagcggcagcctgaccaccgccaccctcctggaggggcttttcccacgggaatccttatgccggaagacaaagtctctgcaggcaccgaaggagacagaggcaatggggctcccaggggccagttctctttcatcatctcggtgctccccgatgtggtcacagccatctttatacctgttgatgagcacaaagttgaaggtctgtccagtcaccccagagacgtgatcccggatgcgctctagaactgggatccagggctttggagacagcgtgaggcctgaaaatgtgtaggtcagcccagcgtcgccatacgttgcctgcttcctgggcacactgtgccacttcccgaatacctggactctggccagtgctcctgtaaaatattctacttctttctccaactcttggaaaatctcatctgcctcagctttgccaaacaggactgtgtaactgcagtccaggccctcagcccgaatgtgccgccagctagggcctgctgagtggcctccattccctggggcctctctcctgggcctcttccttgtgctttctttgtctcctcccaacacagctggctcttctccagttggctcttgctcctcctgcttcctcaaaaggcccccttgagcccctttcaccaggaatctgtccatcctcgctgccccccaccagtgttaaaatagcctcgtgcc

SEQ ID NO: 133356 - DNA, 847 bp, Homo Sapiens
ccatctgtatacctgttgatgagcacaaagttgaaggtctggtccagtcaccccagagacgtgatcccggatgcgctctagaactgggatccagggctttggagacagcgtgaggcctgaaaatgtgtaggtcagcccagcggtcgccatacgttgcctgcttcctgggcacactgtgccacttcccgaatacctggactctggccagtgctcctgtaaaatattctacttctttctccaactcttggaaaatctcatctgcctcagctttgccaaacaggactgtgtaactgcagtccaggccctcagcccgaatgtgccgccagctagggcctgctgagtggcctccattccctggggcctctctcctgggcctcttccttgtgctttctttgtctcctcccaacacagctggctcttctccagttggctcttgctcctcctgcttcctcaaaaggcccccttgagcccctttcaccaggaatctgtccatcctgtccccacaggaaagaagggacgtcagtggcgaggccaagacagaaattgctcaagttctatccccagtgcaaaaatctgtttgtccaaggggtctcagcaacattcctagtttcacattttcattttaaagtttaaaaccatgtcctcgctgccccccaccagtgttaaaatagatcagtctagtgatgctcaagtggatacgattcagaagcgagacgcaaagaggttaaacacgggtaaaccgcacgcaaaattctgatatcactgcaacacgtccgtggggtgggggtggcaagagtgctctagcatcgcagctccggcgcagatcggaatcccgcagtcaccctgg

SEQ ID NO: 133357 - DNA, 782 bp, Homo Sapiens
  misc_feature (667)..(667): n is a, c, g, or t
  misc_feature (748)..(748): n is a, c, g, or t
tttttacagtacatcacaaataaattttattaacttaaacacaaaattaatgaagaaaaattctgtacacaacggtggacacagcacacctttatacagtaaggccaagataaactttgtcttttcagtctgcagagtacaaaaacataaaatgaaaaggttaaaaattgtcaactgtttgcttcaagcaaaaaggaagaaaaaactaattcaattgtgaatttaaacaatttggataattcacaaatgactatttctagcagcaacacacaacttcagaaaagaatgaagtagctcttcaactacttcgggtcaaagctggtgttttttccgcccaatatatgattgattaaagaagactcatcctaagggtaatttcatgacaatggattgtgtttgttagatgagagaaaatattgcccagccaaactgaccacttttggagaaactcttatggtctgacaaaggtgataattttattatttccccagattgatgcctgtcatgtagtacataatgcaggtggagaggaacgttgtttccatggtgatgacaatggcaatgaaccttcctcagggtgacaggaagaaagagaaaatacgcacatagggagtaatgcaaagtttgctgatttccggattagcatcgtgtgtcttcctttatcganagaaaatgcagacacgataattaataattctgagcacatgacaactttgttagtctccgattcatgaaccattttattaantaaatatatctactatcatctatattctttgtgg

SEQ ID NO: 133358 - DNA, 519 bp, Homo Sapiens
  misc_feature (108)..(141): n is a, c, g, or t
  misc_feature (333)..(377): n is a, c, g, or t
cgttcctgcccagataatggctcaataactctgaggctggttgctcagcctctgagggcaatacaggcatttaaaaaattaaaatgaccaggcacagtggctcacgcnnnnnnnnnnnnnnnnnnnnnnnnnnnnnnnnnnagcatcacttgagaccgggagtttgggaccaggctgggcagcacagggagaccccctctctacagaaacatttttaaaaaattagctgggcgtggtgatgcgtgcctgtggtcccagttacttgggaggctgacgtgggtggctcacttgagcacaggagtttgaggctgcagtgacctatgaccacatcannnnnnnnnnnnnnnnnnnnnnnnnnnnnnnnnnnnnnnnnnnnntaaaatgtaaaatcactgaaaaaatgagtgttcggtgaaacaagtgggattttctgggccagcaagtcttccaaactgtatatgatgcatcctgtctccatgtgtaatatattttaatgataaatgtatttttaacagtgac

SEQ ID NO: 133359 - DNA, 715 bp, Homo Sapiens
ttttttttcactttagactttttaatatttcatacagcgattatggtgcattcaggaacccaaccccccaaacccactaggagggctcccacccctgccctcccaccccatttcagggccccagggcttagggtggaggaaggggaggtaaccacccatccagggactgaccctggagactgtccctgccctgcctcaccctccccaggagatagggggcaacacctgggcacaacccctcacacccccctcccccaaccctgcttgtgcacatatgcacattatggctcctcgctgagctggtcagttcctggcagggcccctacccaacagcaccgagtgggatgggagcaaggggactgggctggggagaccctgagaaggaaggaggccccagctacgggactgcaggagagaaagagtggggccccccaccttgtccatttcccagagtctctggtagtccccagatccccctgcaactggggatggcgggcgggggtaggaaggcgagtggctgtggcatgctttcccatagccaatcccagggtctggtgatgatcagggttccaaataggggctgtgtccctgtctctgaaaggctgggagcagggcttcattgcacaaaatactgtgggagggccacacgcagggggtgggcccagccagtctgtatacagagatatgcatttaaaaaaacaaatctcatttaaat

SEQ ID NO: 133360 - DNA, 1066 bp, Homo Sapiens
  misc_feature (225)..(254): n is a, c, g, or t
  misc_feature (514)..(988): n is a, c, g, or t
attctctataaactttatattaatagttttaccttccatttaagtatataccccaaatggagttgatttttgtgtgtgatgtgagattagggttaattgtttttacatggggatacccagttgccctagtgtcattctttgaggacattttcccacagtgcatagcagtggtactttcatcataaacaaactgtccacatacacaaaagtcagtctctgggctcnnnnnnnnnnnnnnnnnnnnnnnnnnnnnnctctcccagtgccgatactacactgtcctaaatactgtagttgcttataaatcttgatatctagtagagcgagttcagcccactttgttcttcttcagtgatgtttcagctattcttgatcctttgaatttccatataaatttttcagcatcatcttgtcacatgctgccatgaaaaaccttttgagtttgctctcttctcttgtttcaaagtatcaagaatagctgaaacatcactgaagacctcgtgccgaattcttnnnnnnnnnnnnnnnnnnnnnnnnnnnnnnnnnnnnnnnnnnnnnnnnnnnnnnnnnnnnnnnnnnnnnnnnnnnnnnnnnnnnnnnnnnnnnnnnnnnnnnnnnnnnnnnnnnnnnnnnnnnnnnnnnnnnnnnnnnnnnnnnnnnnnnnnnnnnnnnnnnnnnnnnnnnnnnnnnnnnnnnnnnnnnnnnnnnnnnnnnnnnnnnnnnnnnnnnnnnnnnnnnnnnnnnnnnnnnnnnnnnnnnnnnnnnnnnnnnnnnnnnnnnnnnnnnnnnnnnnnnnnnnnnnnnnnnnnnnnnnnnnnnnnnnnnnnnnnnnnnnnnnnnnnnnnnnnnnnnnnnnnnnnnnnnnnnnnnnnnnnnnnnnnnnnnnnnnnnnnnnnnnnnnnnnnnnnnnnnnnnnnnnnnnnnnnnnnnnnnnnnnnnnnnnnnnnnnnnnnnnnnnnnnnnnnnnnnnnnnnnnnnnnnnnnnnnncatcacaaatcgagctcagtaggagtgcgaactgaaagactatagaacaaggttcctctggagttctcggcgtctcct

SEQ ID NO: 133361 - DNA, 791 bp, Homo Sapiens
  misc_feature (151)..(167): n is a, c, g, or t
agttaagcatttatttatttctctgcagagcaatcactcgatcaattatccgagtaactgacaagtcagccagtactgatgtacaaaacaggtactaatcctcattaagagcaacaacctaaataaaatcattaggaaatagccatagacnnnnnnnnnnnnnnnnncatgatttaacagacaaatacgctgcttgaaaacatttcagacaggaggaaataataaaggagttaataatttgcctgttcttggctccttgcaactagatacaaaaagggtggaaaatagtacaccccaccaaaaaacccactaaaaattgatcatgttatgaatgtttaacaactgtaaattcagtcttaaattttatttaagattaatgaaaaaaccgcattcagatttacgaagcctaaacctaggatttaaaaaatattttttaattacttgcaaatattatacaatacagatgttcttataatctaaaatatatatgatttggatcaaataaaacgatggcaaattacagtaaattagaatatattcaaacataaaaaaagactttcaaaaatacagaactcagaatttaaaggaacattaattttcatttgaaaagttatctatttttactagtctttgtaaatttagtcagaaaattgtatagtaatatttacactccttgaaaagaactgtcttacttgctgtgtatcttcagaacctaaaagtgcacttgatatgtagtaaacattcaacattcaatttattttacaaataaattgtcattcaagaaaaatttg

SEQ ID NO: 133362 - DNA, 614 bp, Homo Sapiens
gtgagatctccagcacagaatgttcttggccaggtcctggcatgggctgatgggagaaaggtcctggatgtgcacagagcctgtggagggagactcaggctggctggccagaagaaagccaccactggttccacattgatactgagcactctgcttgcacctggttctggctgcagggcgctgtccctgggagctcatcattcattgcagggacagaggacagcagaagaccttataatgactcacatggccctttcccacccactccaacctcactttccacgattcccctcactctgctctggccatgctaacctgcttcctgcatcttgcatttgccaagaatggtcatgcttcagggcctttgcacttggcgttgcctccccctggaatgtggttctcccagctctgtccatggttgttgttttctcctccctggggtttaggaaaagaccccttttcagagacggcactttcaaacaccagcccctttatcggcagcctgtctgaagttctttgaagcccctgtcactctctgaaatgttctgtcttattcattaagtgattgatggtccctacctccactggaatataacagatgcctggagagccgg

SEQ ID NO: 133363 - DNA, 798 bp, Homo Sapiens
  misc_feature (701)..(701): n is a, c, g, or t
  misc_feature (717)..(717): n is a, c, g, or t
  misc_feature (738)..(738): n is a, c, g, or t
  misc_feature (745)..(745): n is a, c, g, or t
tttttttcaaaccaaatcattttattgtgcaatttccttctaccagaaaattactaaaaatataaatattaactctctaaaaaatactcagaatagatctgtaatcttcctcctcctcctcagaactggagccaatcttcttctttaaacgctgatggattgcatacatgtatgtcttccatatcagccacatacacaacattcagatacacttccgtctgtgcagggggatacaccagcctcctgccaggttctggaagctcaccttataatctaccaggataaagctgtgtgctgagtaggaggttatggtggggttggggagtaacaaggagataaaagaccttgtggtcccaacttccttatgtggacagagaagataggtcctttactcctcctcattaccctgccctctcatggactgggctaactgaaggccaagctcccagagaagctggactcactgtgcgggattactgagggtgtggctgccaggctacagtcacaggaaggccagactgttgagatggacatggaaaccaggtgaggctttggatggaaagctggtctgggccaaggcctctgcaggatgagtagtagctgttcctgctgggctttgggcagcccctagaccctagcaccaggtactatgtgcagcatctaagaccaagacacagtctcagagagcctcccgagggtancaacaacatcctgcancagggggacgggaggttgtangcattanatggagcagggtccatggactgtattcatacagcctcgtgcgatttctggctc

SEQ ID NO: 133364 - DNA, 911 bp, Homo Sapiens
ttcctaaagttatgctgaatgtggtacaatgtgtacaacttggttaaccagtgcctgcttttcatttccaagatttttccttatcttgaatcaaatcaccaatcttcaacctgtatcataatgcactggcttacagttctgtatataaagtccaactcaagcttattttggtttattgtacatgctttattaaaatggtacttgtatttacagtatctgcagaaagagtcccttccaaggcctcacacattcagacacatccatactgacacccactccacagccccatgcacccacaccagtgagatgtggagggtcagactcctaaaattaggcagctgttggggataagagttgatttgtttttcaatttttttgaaaacagaaaagcatgggggaatgcatttggccattacaatgctaattgagtttgtgtatattacatatatggcagttaacactgtaatattccttttacattctatatacacagaatgatatcaaggttttatggtcaacagaatattccaacttcagtcttaatgctgcttgtagtgatttctgaattcattataggggctttccctaaaaataattcaagtctatgttaagtgaaataaggcacaattaatattgatttgatttagggaaagggaaggaaagagaagggataaaaactggtttcaaatgatctttctgttggggaactagctctgacttaaacccacctgaaattccttctcctaatttccaaagatttctttataaagatatttttcttttccctgacaaagccaaaaagaaaagtttgggaattcacattttaatgtttcagtagcctgaacaactcaaattgatgtgtacccccacctcccctgatcaggtcgcctccctcacccatgttaaaaaac

SEQ ID NO: 133365 - DNA, 735 bp, Homo Sapiens
ttttactatttttgtctccactccattgttttattatgtacaaacgctacagaacgagggggacagacacgcgtggggtaagaagggcctggtgggaggagttcacagagcagacggtgcactgggaccaggagagcagaacacaggccataactatagggcaggtggggcaggaacgggttaaaaacgagatccaagccagccagatcgcaggaggtgcgggggcgtcgtcccccttctgttctccccccaaggtcacagtgcatgcaataaaatatatatacaggagctagatccgtcctctgcaggggctctgagggtccagagctcccttcgggtggcgggaagccagtggcgctccctggcggccaggccgggctggagccacatgcgtcgggggagcgggggtcagtcccagccgttgtctttgatcatgtggttgagttcaatgatgtacttcccctctttgtacttctggctgctctcaaaggcctgttcatatttccagcccaaagtggtcttgcagttctcgcagtggatgtcggcgacagcatggaggccggtcagcagcacccgctcctcggctggcccgcagcccacgttcaccactgagttgaagaggtaggcacgcccctgactgccctggaaggacttggagatgaggtcgtcgtggttggccaggtgagcgcggcagtgggcacagctatacctccggtgaccctcgtgccgaattcc

SEQ ID NO: 133366 - DNA, 1019 bp, Homo Sapiens
  misc_feature (156)..(168): n is a, c, g, or t
atccatgtaaaagaaaaccatgtatataagggaaaattaagtatgagcccaaccaaggccccagcttcgtttgctgtaactgaacaaaggctggtgacctgtgtctcatgggcagaaaaaacaaccccagagaaaaaatcaacactgcagagtttnnnnnnnnnnnnncaaaccttataatttattaacaaaattcacattgtacaaaagtacaacgataactgtacacctgtttctctgcaaatgtcacttggtaaattactatcatcttttatagacaggcaaaactggacacactttataatctttctgataaatatatcgccactctgcatccggcctggataatgctcttcaggacggcataggctggagccaattctgcatcatggtcgaggcctatgtcatggtgctcaagctcttcatcccgaaatttctttatcagctgaagaagttcctcgtatttttcagggtcctcctccatcagcgtcctgatctggttgttgtagtgatgtgctatgctctcttccaccgccacggtgcaggccatggcaccttccttcccgagcaaggcggtccccgcccccagtgcaaaccccagcacgttccacaagggcatcagaactgttggccggaccctgaacgtaaccatcaactcattgaactttttcaaatggtccttttcttgatcccacattttctgaatgactggcccgacgctggtccgacccaggacagccatctgcccggcatagatgcggtttgctccatattcgcctgcatgatccacccggattattcgatccacagctgcccgactgatattgtctaaagtcattcctgaactgcgaaatctgacactggttcttcttccataagctgagagggaccgccgggcccctgggcgcagccgccaaaggcggggagccgccgccgccccggcgcaactcattgccggaactaaaaaaagcaaccacttcgtgcctcgtgccgattcacaccaggcctcgcacctagag

SEQ ID NO: 133367 - DNA, 651 bp, Homo Sapiens
tgattagttcttcacttttctgtaaatctgttaaaggcggttctacatttaagggtcttagaatagtttcatttacttctgatggtcttggcagatctttctggacagctttatgcattcgtttcatttcctttacacgctctgcatctcgtatggcctgctttcgagcatccacatcagcagcatcttcaatgtaagtatcatctatttcacgttcttccagctccttctcggcattttctggtagaacaatttcaaaatcattcttaggggcaggaaggcccaacaaccctaaacggagatgttctcgggattctctttccatctgcttcacgtaagagggatcactatagtctgccattccatcctcgggattaatgtttaacttgtctcgaagaggagttctacccggagtagagttaataactggtttgggagttgttccactccggggagtcagcccttcagctccattagaaggagtcctgaatggagtagagagaactgtgttttgagtctgtaccacttgtgcgctgtggagttacacctgagaagtcactctcatgcaatggggtattaagtccacctttcaatggggtgtccacattggtgagggccatgaggttctgggcttcctgcagaatctgtcct

SEQ ID NO: 133368 - DNA, 652 bp, Homo Sapiens
  misc_feature (94)..(94): n is a, c, g, or t
  misc_feature (244)..(244): n is a, c, g, or t
gagttcagccaccccgtggagagcctggcgctgactgtggaagaggtgatggacttgcgccgtgtgctggtgaagcccgagatggaaaagtttntgcagaacaaggagctcttcagcagtctgaagaaggggaagatttgctgctgctgcggggccaagttcccgctgttctcgtggcgggccagctgtctcttctgcaagaagagccgtctgcacttcctgtagcataaagatgaagatgccnttctaagaaatttggacacatcccctgtctacacactgggctttgagagtcctcagagggtatcagctgccaaagccgcgccaatccagagaagagacatctttcagtctctgcaagggccacagtggcagagcgtggaggaggcgttcccccacatctactcccacggctgtgtcctgaaggatgtctgcagtgagtgcaccagctttgtggcagacgtggtgcgttccagccgcaagagcgtggacgtcctcaacactacgccacgacgcagtcgccagacccaatccctctacatccctaacaccaggactcttgacttcaagtgacagccccaggtggccaggcctccaggaggcaccaggcaggccctgtatcaggctaggacgctctgagctgtgcatgtac

SEQ ID NO: 133369 - DNA, 853 bp, Homo Sapiens
  misc_feature (237)..(253): n is a, c, g, or t
gctgagtagcatggaggcaccatagtttaacacagtttctttaaccattcacgcattgagacaaaaaaagttcttaattctgcgaacatcaacttcctgtgcccaggtgcaagtgcgggggcagctggcccagggtagagctttgccatggaccctggcgctcctggaaaaaaattcaaggtatttttcctcctcttggagcgtgtggcctacctcatctccatttgattactagcnnnnnnnnnnnnnnnnngttaaacagttatttaattttgaagagataatatatgtatacagtataaaatttaaaagacagaaaaagatataagtgataacaaaatatcttcttcctcccctgtttcccagaggctcagacctcatccctggcagctgctattatgttactgtcaatatgaccttatgtattcttccagaagtattctgtgcatcaaatgcaaatacttatattttctacttctcagtgtattttttggtgatgttccatgtcagtaataaagagcttctctgtttcgtggctgcatggttgttgtatagttctaccataacttatttcccagcccccagctgatgggcatttaggtggtttccagccctctgttctttcaagcattgatgcaacaagcagctttctgcctgtggcgttttgttatgggtgtccattgaatctggacagatgttgcccagccctcagaatgtgtaccagttggctatcctgcacgagtgcctgcctccttgccacctcagtgtagaactccttaaactttgctactctgatagatagaacactgtgtcttattgcggttttatttgagttggagttgaacctcgtgcc

SEQ ID NO: 133370 - DNA, 1150 bp, Homo Sapiens
  misc_feature (76)..(110): n is a, c, g, or t
  misc_feature (491)..(491): n is a, c, g, or t
  misc_feature (1092)..(1109): n is a, c, g, or t
aactgataatcactatagggctagctcgcgcagcgaacgaacgagcgcagcgaagtagtgagcgaggaagcggcgnnnnnnnnnnnnnnnnnnnnnnnnnnnnnnnnnnncagtcgacggtaccggacatatgcccgggaattcggccattacggccgggagcaatgaaaacgtcaaaggaaaatgtttatatacatccacatgtttatttaatatgtttctcttaacacctgaaacttgttttaaaacaaaaagcagtattcacttcaaatcataaacttagaattctgtatctcatgtcagaaatatgtttatggccttgcttttaagtggtgctgtttcccatagggcattagttctcagattttggaatgtgaaataatcacctaggaagttggtttaaaatgcacactagtgagcccaccttagacttcttttggggccttcgacctcactttgagaaataccttcttcaggttattctttatgtntgtcctgtggttaaatattagagtattcatgataaaacattttgagaaggggtaagcagtgagttattacccacaatttaaagcaaattttgaatgaatctttaagttaggtatctaccttcccaccaggcccccaaaaaacctctcagtagtttctttcagtgtacaaaatgatgagcatttttctatgatgaggttttaaccattattcagggtggtcttttgtttttaaatctttttttaactaataagatttacggtgtgtattttatacagaaatgcattataaatgtttttaattgtgttctgttttttgcagtctttaagtgccatgccaattgttcttatattctatagaagttcgctcaaaatactcaacaggggaataggcagcggacagtcagaatggttggaattttggctttctaagaaaaactttattttgcataagcatgtggtcagatcattttgtgcatatgcagcctggattggatgttaagtaaatgcttgttcagtgccggtacatttacttaaatctgtttttatttttgtcatgtagaatactactgtggtcatcataatgtaatctatttctgtaccnnnnnnnnnnnnnnnnnnactttgaagtctttaaataaaatgtataatacccaaaaaaa

SEQ ID NO: 133371 - DNA, 590 bp, Homo Sapiens
gtcttcttgtttcttgtaaagatatcgatccactgtctttagttttacttagaaagctagagatggataaattcaagtcaatactgctagtatcagcagtggaaccagtgcctgaatcattatcattttcctttggattctcagattctggtggcagaatagtttcagtttttgataaagaacctatttcttctttattttctccactgtcagagttgatattaatactgggtattagaacaggctgaggttcagtgggctgtgaaactacagtaacttcaggctcttttttaattgacactggaatttcttttttctctttatctgtctgagtagtgactttagaagcatcctgaacttcacttcctaaagccttttggtcagtatcagccaccacacttctgacctccatttcttcagtgctacttgactcagtgatttcttcaccttcagttgttcctggttcctcattgatgtccattatgttctctgaactgtttattgcttgttccttatttttaccttcttctatttcattcatttcaactatttctttaataggaacttccttagtaccaccagcctcagga

SEQ ID NO: 133372 - DNA, 2046 bp, Homo Sapiens
  misc_feature (124)..(145): n is a, c, g, or t
  misc_feature (574)..(599): n is a, c, g, or t
  misc_feature (706)..(741): n is a, c, g, or t
  misc_feature (1080)..(1105): n is a, c, g, or t
  misc_feature (1149)..(1182): n is a, c, g, or t
  misc_feature (2005)..(2005): n is a, c, g, or t
tttttgtgatgaacacttttatttacaaatataattaaaagctctgacagttatcatgctcttccttggaacctgaaaaatgttttgttttgtttttaaagtgcatgcaaaagaagtaaagccnnnnnnnnnnnnnnnnnnnnnnattgtaagaaaatacacagtttgaaagtgtgaataatgcaatatttatgaccaagaaatgggacttaggaaggggaagggagataaagaaaaagatcaagatgatctgattgagagacagtgttgaactccaaatactgaactggaaaaggagggaggtggggaggaacaggaggaggaagtaaaaaaatttgatcagagaaacagttaaaatacaatatgaaaataagtaatacctctccttaaattccttctatacacaaaatacacgatttgccaaagcccaatttgtgctactgggattctgtgagctccttaagtgtattcacatcctctgcaacagcagaaaatgattatgatacaatcagaatatgctgaagacaagttaaactcttgccagcaggttcttaaaaatcacaaggattttttnnnnnnnnnnnnnnnnnnnnnnnnnnaaaaagtaataatatgtcaccactgatatgtacatcacaattagtttctgtaaaatgtatcaaattttcaatctttaataaaactttgttttttttattcctgatgnnnnnnnnnnnnnnnnnnnnnnnnnnnnnnnnnnnngcagcagctagttaaggtgtaaggctgcggatattgtgtctctctcccccttggcatttattattattattttttgctttactttcacagattggtggtaatgagtgattgcttaaagcaatatacatccactttttttgttgttggtttattggttttgttaaaactgtctccaaagttttcactgaaacattttgaatcacatcaatactgtgacgtgtactgtgaatagaagagacggccaggttttggccagcactgaaagttgacacggggggaggaagggggcccctgatggagtaagaataaacaggcactagtccgacacgatgtcagtannnnnnnnnnnnnnnnnnnnnnnnnncaacgcccgttaaaatggggaatgtggttttgcagggtctgaannnnnnnnnnnnnnnnnnnnnnnnnnnnnnnnnngtaaatggcaaaaaatttaatctcatctgtagtcctccttaggaaaatctaatgtaaccaaattcccaaatcccattctgaggctctccatgtcaaaagtttcaatctctcgctcttgcctttccaataggttctttattctctcgctgcgttccttctgaagggcagccagctcctcttcaatcttctgctcaaggtgtgctctgcgcagagacactctctgctctagcttctggagctcacgttcatgttgtgcctctgtttgcatcttgattttgctctggtaggcgttgagcagctccatttcctgctggagctgtagcctcaaggcctggcattctgcttcttgagcctcatctagcccgtaacgcttgagagggcatcatttcatttatactctgttcatactgctctgccaaaatggcaagttttcttgtctgctcatctttcagtgtctttaagattgttttgtgctcattctttggagtaacttccaactggtgattcttgagtgctttatactgtttggtctgtactttgcaagtgtcctgaaactgttttttaatttgcatttccatggcctttaagttttttggctgttgccgaagttccatgacatgctttctgtttgcatcttgattttgctctggtaggcgttgagcagctccatttcctgctggagctgtagcctcaaggcctggcattctgcttcttgagcctcatctagccgtaacgcttgagaggccatcatttcatttatactctgttcatactgctctgccaaaatggcaagttttcttgtctgctcatctttcagtgtctntaagattgttttgtgctcattctttggagtaacttccaaag

SEQ ID NO: 133373 - DNA, 666 bp, Homo Sapiens
  misc_feature (541)..(593): n is a, c, g, or t
ttggggatggcggaaggcagtcatagcaccatttattgtccaaagtacacacacctgagggcccctccccacacagggaaacaggagaaacaaatgacaacaaaacagattctttggaaccgagaggggaaggggaacggggaggggagtttcttccttccctcagctttcgcctggaagcctagaactggcttccagccctagcccctcagtgggcagactggggtcagcggcttcacagagaagtagaggtgggcaggagaggcccaaagcccagctccggaggcccccgaggccctcttcttcccccaggctgaggggcagggagaactgtgcccaccatgcccggactcccggcggcattctagacaggccaccgcccactctgggcaccaacctccttaagggagggagaccagcctggatggcggggaaccctccagaagcccacaaaaccgcaaatggcccaggggagcaagcatgattcctggagtggggcatccaggagcaaagggaggcattgggttctgtttgctttacnnnnnnnnnnnnnnnnnnnnnnnnnnnnnnnnnnnnnnnnnnnnnnnnnnnnncagttaaaatggctccaacccacaagggaaaacgaaccactcaataaatacacagccagtgagggaatgcggc

SEQ ID NO: 133374 - DNA, 818 bp, Homo Sapiens
atatttcacaatatcatgcacagctacaaagtcccttttgtcataaaaggtagcattcataggttgtgggcatatctggggtgccattattcagtctaccccaatttaggcttaacagctaggacctaagaaatggtcatttatatagaggataaaatggaaataaattattttcaagattaaacacttaatgaaaagttcacagctgcctggaaactgttttgagagcaaacattcatttaaaaaacatgtttgccttttattttagatccagagggtgcatgcacaggtttgttccatgcatattactgcacgatgctgaggtttggagtacaaatgatcgcgtgacccaggtaatgagaatattagccaataagtagtttttcagtccatgcctccttcccttcctctcccttctagcagtccccagtggctactgctcccatctttatgtccatgtgtgctcaatgcttagctcccacttataagtgagaacatgcggcattaagttttctgtttctgtgttaattcacttaggataatggcctccagctgcacccacattgctgcaaagaatatgattttggtttcttatggctatgtagtattccatggtgtatctgtaccacattttctttttccattccaccactgatgggcacctaagtggattccatgtctttgctattccgaacagtgctttgatgaacatgtaagtgcatgtgtttttttggtagagtgatttatttgcctttggggatatatccagtaatgggattgctgggtcaaattgtagttctgttttcagttctttgcct

SEQ ID NO: 133375 - DNA, 796 bp, Homo Sapiens
  misc_feature (609)..(620): n is a, c, g, or t
ggcaagaggtttgaaacacttgatgtagtgagaaatgcattaacatgttgaatgcctaccatgtaccaaattttgtgcatatattttttatttaatctgaccagccacccaaaccatgggtatttttgtctccactttagagatgagaaactgagccaaggccacatagctacctacagtgacagaatcaaaattcaaactcaggtttatctagttccaaaacccatgttctttctgccacaccatgttagtagaaatggaaactattggatgaaatgaggaaaaacaggaaaagaattcactttttaaatgaagaaattagtgaaaaaattgacctaatgaaggaaacatttgtgctttcctatatttttaattttaagaataggatttcggaaggcgacagaaaatttagttcttagacatttaaatagaaagttgtgtgcccctatagaaaatatttgagaatttcttatactatcaagaaaaaattctgtgaattaagatgtaatttataaaataacatttcaatgggggtaaacaggccagaagagtgtgccaagttgtttgtgaatcattccaagcacctcagatgaaaactcacttttattnnnnnnnnnnnngacaagggtttatattcatatacactagtatatatgtacacagcagcatcctgcatgccaaagtagcttcaccgttagtaatccctcactttaatacctcttaggaaccaaagaatgcctctacaagcaaaaagatagttgaaaatagttaagatccaaagtcaaaaaaggccaaa

SEQ ID NO: 133376 - DNA, 659 bp, Homo Sapiens
cccaataaaagtttatttatggacactgaaatctgaatttcatataaatttcatgtcataagttttcttttttcctccaaccatttaaaaatgtaaacattagtcttagcttgcaggcagcacaaaagcgggtggtagaccaaatgtggacccagggtgtagtttgccaaacccttttattagatcaccaaagttacttttcttaaaataccttctatttttcacagaaggtataaatggtaaacaacatcttaaagcatcggtagtagtggataccttggatatcactgtcactctcttaccggggtttaattttgcatggctggtgtgggcgtaattgagtgtgcatgtagagcatctttataatattaccatcagcacatttggtacttgcacccttgtagttctaggaaaagtcctaaaaatctataaatgcaattacttctagggaaagtaaattgaaatgcacattggcttataagaaactcattcttctaaggctcaggaaacaacactgtttcccatttattgcttcaaacttcttttatatatggtgtcagaattattcccagtccgaaatcaaggaatattgggacattgttagtttctccaatggattgtaagttagcacactgattaagatgcatctgactctagtg

SEQ ID NO: 133377 - DNA, 666 bp, Homo Sapiens
taaaataaataattatatatatatttatgtatttaattttgctgtactagcgacacccacaaccctccacaaccatgtcctgatagttctttaatacaaccttttcattctcgtcaaggtacagcatcgagatagcactgagttctgtcgggacacagcatgccttaggaatcttagagttaacagagttgaccaacgtctgaacaatggcatgattagtggagttcagatgatcagccagaggaaaagggcattctccgtggcagtaaaaggcgtgataccccgggggagccacaatccagtcattccaccccacgtcactgaagtccacgtacaaagggtgtctcttacagctggacttaaggcgtttccgctgtttgtgtttggcttgacgtttttctcttttgtggagaggatgcccttttccatcatggccaaaagttactagcaatggccttatctgtgaccagctgtgttcatcttggtgcaaagacctgcttatcctaacatgtctcttggagacaccttgtttctactccaagtgggccacttacaccacgaatccatggttggcgtgtgcctgtgctagtcaccgcatacaacgggggtgacatcaaaacttgcccacctgcttgcattctgattcaccaacctggtgtgcgaaag

SEQ ID NO: 133378 - DNA, 1153 bp, Homo Sapiens
tttgtcttttgtctctcagattttgcccatctcattcccttgacaatgttataccccaagaaccacttggatctcacattccaccctccccgacctcagactgcgcctcccagcatcccctcacccaaacactccttcctggcctatctcggactgagagaaagagcagagactgtctgagggcagccatgttctgtaccaaaaacagagagacaaaaggaccacaagcacgaagaaaaataactgaaccacaatccttaaagagcacaaacccgccgagaccgggttgcttgtgtcttctggtcaaaaccctaatatgcaccccgaagggcgtctgacaacccttgcggtcccgtgcactacgccttaagcaccggaattggaagcaatgggaccctggggcggattcacacctcttggaaattgggcccggaaagtcgtggcatgatccccacctccttccaaaaggggaccctactgcatcatctcgtagcctcgcaaaagggcaattgacctcacaacagtgcacaagcgcagagacccaggtgagcaagcacccgacgctcccgcgaaactttgcacgcatgaaacggaaccccctggcgcagagggcaagaaccccaaccaacgaagacggtggtccttttaagtagcccaaccagaagtcgcgagtggatcagcccacacaactaacagggggcaacatgggggctaaccccggcggagggcaacatgcgcgcgtgatcgggcgcacgtaacagagagaacttacgaaaaacggaaaaagccgcgaggatcgaactgagacacagaacattgtcaatagggcgacatggagtggaacgggaccaccatgacaacagcgacagaaggctcccttcccacggggatagcagacgacagcagcgcgcaccggggagcacctaccacaacttcccacaggcacaccaggccgacaaatggatggcgggaggcaacccaagaaggcaaggagcccaacagcgcaggagaatgccgaacggacgaagagtggccgactgtgggatagaaggaaagaccgtgggcacaggcaaagtcgcaggcgcaaagaacagtgaggtacccgtaagaggggcaccacaaacggattattaagaacgaccgcgaatgagac

SEQ ID NO: 133379 - DNA, 1151 bp, Homo Sapiens
tgtgttgctcttgtgtgtgtgttctctcttctgttctgtcgtgttggctgcgcgtgtgtcttttcgttctgttgtgtcctgtgctctcgtctttcgtcgtcccgctgctgggtctgctggtggtcgcttttgtcctctgttcttctgcgtgtgtgggctttgctcttgctttctctgctgctcgtccgcgccgtgttcgctgcgttcttctcgccgggtgttgtacgttaccctgcctttccggattattccggctccttttgggggcccgcaagtttacccctggtgaccaggaacctgggtcccgggacccgctttgcccatgcccattcgtacctcgttttcccggccctgcattgtgcctccgaggtttttcgcctgtttccggcagcaggacatgctttattctgagcaggctgggcccttcggccagcggctgagagcacagactgggtggggctgtcgtccacaaggtccggcctagggaggcagggttcgtgcctcacagagcctccggcagggatgcaggtgtgcgggggtgaaggaggggcttagtttttccggaagatcaggcatttgttgttggctggcatgtccaccatcctctccaggagcaggccactggcctttcccaggtcctccaggagggctgtgtcccgaagcccccattctgggttccccgtaggtgatgagcagggccctgggtttgagcaggtgtcctgctgctctgaagagcccctccgtgcagcgcagggggctgacatgggccatgttgatgcagagcaacaggtccagcgactgtggcaggatcccgccccagtgctcccagccccacgtcacgtccaggtgtagcggggccttcacgttggtcaggccctgggcttgcgtggtggccgcgatgctgtccaggcagcgctggtccacgtccgacggctgccactcggccagggggaaggcccgcgcgaagtgcgctgcgtgctggccggagcccgaggccacctcgaggacgcggacgccacgctgggccggatccaggtactgccgcagcacgtgcaagatgggatccttgttccgctccgcggccgccgccaccagcatcgcggcagcaacaactccccgccgcggacgcggcgcgggtcgcgtcagggccc

SEQ ID NO: 133380 - DNA, 1480 bp, Homo Sapiens
  misc_feature (79)..(79): n is a, c, g, or t
  misc_feature (174)..(174): n is a, c, g, or t
  misc_feature (222)..(222): n is a, c, g, or t
  misc_feature (344)..(344): n is a, c, g, or t
  misc_feature (348)..(348): n is a, c, g, or t
  misc_feature (425)..(425): n is a, c, g, or t
  misc_feature (523)..(523): n is a, c, g, or t
  misc_feature (543)..(556): n is a, c, g, or t
  misc_feature (688)..(705): n is a, c, g, or t
  misc_feature (756)..(766): n is a, c, g, or t
  misc_feature (820)..(858): n is a, c, g, or t
  misc_feature (881)..(902): n is a, c, g, or t
  misc_feature (910)..(957): n is a, c, g, or t
tttttgtctctctcagctacaatactgcacgtaggcgatatctattatctaccgggcgcgcggagtagcgggtggtgcntagatcatgctatctctccgtacagcctcgcgattgtgtttttgttagagatgatatctcgccccgcggcgcgtggtggcggcgcggagacggantgctgtatggatgataatataagcttaccacacaaacggcttgttgtngcctcgcgctgggcagaggattgctatcgcgcggggcgcgcgggggcgagtgaaaacgagtgtgggtcatactatatagaaacgagcccggcccgcgatagaaacaaacctccctccgccgngcgnggccgtgaggagaaatccgcccccgtgtctactgtgcacatacacttctcagcgaggacgggcgcctctaaccactntggccgcgggggggcgtcgattctgcttcataaaaaaataaaactactcttgcgcgttgttgtttccgcccaccgcgcgccggcggggggcgtgtttntttatttattttacgtggtnnnnnnnnnnnnnnactattctgcacagaggccagctgtgtgtgtcttctgttgcggcgctgaggcggaggtgtgtatttcggtatagcggacacacacacaccgctatgtggcgccccaccggttgtctccccttataactccannnnnnnnnnnnnnnnnncgccacaaaaccgaaggcgggtgttaataaaaaagtttcttcgaaacgccnnnnnnnnnnncgcccaaaagggcgggtgtcctttttcccctgcggcgggtgtctgagaaaagannnnnnnnnnnnnnnnnnnnnnnnnnnnnnnnnnnnnnntttggcggacctaacgcccttgnnnnnnnnnnnnnnnnnnnnnngaggttcnnnnnnnnnnnnnnnnnnnnnnnnnnnnnnnnnnnnnnnnnnnnnnnncggcagcaggacatgctttattctgagcaggctgggcccttcggccagcggctgagagcacagactgggtggggctgtcgtccacaaggtccggcctagggaggcagggttcgtgcctcacagagcctccggcagggatgcaggtgtgcgggggtgaaggaggggcttagtttttccggaagatcaggcatttgttgttggctggcatgtccaccatcctctccaggagcaggccactggcctttcccaggtcctccaggagggctgtgtcccgaagcccccattctgggttcctgtccaggcagcgctggtccacgtccgacggctgccactcggccagggggaaggcccgcgcgaagtgcgctgcgtgctggccggagcccgaggccacctcgaggacgcggacgccacgctgggccggatccaggtactgccgcagcacgtgcaagatgggatccttgttccgctccgcggccgccgccaccagcatcgcggcagcaacaactccccgccgcggacgccc

SEQ ID NO: 133381 - DNA, 543 bp, Homo Sapiens
ccaccatcctctccaggagcagccaactggcctttcccaggtcctccaggaggcttgtgtcccgaagcccccattctgggttcctgcattttgagcatcaggtcaaagtccaccgttgctctggggggagatcttcccattgatggcataggtctgtgggcatggggacacagcccactggaccaaggtcggggtatttcccagagagcctgggacagacttgcaggctggggtttggagaatgaaagggcaccccctcccccgtaggtgatgagcagggccctgggtttgagcaggtgtcctgctgctctgaagagcccctgtccaggcagcgctggtccacgtccgacggctgccactcggccagggggaaggcccgcgcgaagtgcgctgcgtgctggccggagcccgaggccacctcgaggacgcggacgccacgctgggccggatccaggtactgccgcagcacgtgcaagatgggatccttgttccgctccgcggccgccgccaccagcatcgcggcagcaacaactccccgccccc

SEQ ID NO: 133382 - DNA, 804 bp, Homo Sapiens
  misc_feature (95)..(95): n is a, c, g, or t
gggcagccagggacatgctttattttggagcagggtgggcccttcggccagcggctgagagcacagaactggttggggctgtcgtccacaaggtncgggcctagggaggcagggttcgtgcttcacagagcctccggcagggatgcaggtgtgcgggggtgaaggaggggcttagtttttccggaagatcaggcatttgttgttggctggcatgtccaccatcctctccaggagcaggccactggcctttcccaggtcctccaggagggctgtgtcccgaagcccccattctgggttcctgcatctgagcatcaggtcaaagtccacgttgctctggggggagatcttcccattgatggcatagggcccgtaggtgatgagcagggccctgggtttgagcaggtgtcctgctgctctgaagagcccctccgtgcagcgcagggggctgacatgggccatgttgatgcagagcaacaggtccagcgactgtggcaggatcccgccccagtgctcccagccccacgtcacgtccaggtgtagcggggccttcacgttggtcaggccctgggcttgcgtggtggccgcgatgctgtccaggcagcgctggtccacgtccgacggctgccactcggccagggggaaggcccgcgcgaagtgcgctgcgtgctggccggagcccgaggccacctcgaggacgcggacgccacgctgggccggatccaggtactgccgcagcacgtgcaagatgggatccttgttccgctccgccctcgtgccgaattcgccacccaggcctcgctcctt

SEQ ID NO: 133383 - DNA, 1187 bp, Homo Sapiens
tttttcacactgaaacacatctttttattatatactaaatttaaaaatacaaatcttattaaaaatgcttatcaaacattgtatacataagtactgtcaaatactattgggttttgacattatgtacatttgctaaggttaattagaaacagaacaacgtaatatcactttgctgacactgaatttcagcagttaagtgttttaaaatttggcaactatgaagtagtgatctgcacaggaagatgtttggagaggtaaaataataagaaaacaaacggaataatgcagacatttctgcagtaagtgttaataagtagatttcttcctcatcctcttaactcattgtaacagaaattaaagtgcacaagaccaccaggaatacctgatttggtgtaccctaaatatacactacagccggctgtgctgccatattgagggtttcaattctttgtactgttcctgaggttttggaagttaattttgaatgtggctagcggaagggaggccaacactttctaaattgcaccaaatggccttaaagtgtagaaataccaaagaaaaaaatattaatttggaaatagattcaaggaaataatccctgtctactttgccctaggaataaaattagaataaggacacagttttacctctggaaaatgcttactaaaatctgtttcaaaagaccagacatgtacagcaagcacaatactgtcagttattgttcaccacttatatactgcatcataaataccaggtataaatacctgccgctaaagggtcactagaaatacaggtagaagcatgttatcactttacactaattttactcattaggtataatttgtaaaaataggtcaccaccccaccatacaatcaagaaagaggaaaagaaaagttgctattctacaaaagtgctccttttagctttcaaccccaatagcttaattttgggtaaaacaagattgtaaggtatggccatcagttctaaataagctgatgatgccatatatacatcctcatatatatatatgtttaaatttcagttctggtttaacactaatgtactagtacaaaccatttataggaaacattctatcggccttatttacaaacacacaatgaatgacaaagatatggaaaattttaaaaattgcagataaatgtagtcatagtttactaaagatacc

SEQ ID NO: 133384 - DNA, 473 bp, Homo Sapiens
ggtgtgtgtgtgtttaggatattcattttcttaatttgagaagcagtaaaccctggggacagagattatgcaagaattagagctggaagggagaaggaactaggaagtgaatgatttatatttgtttcactgaaatgaaaacaaaatgactgaaggaaaggcacagatttagtggaggaatcaaaactcaatggaaaattaaaacaaaaagcaaaggctagcttacggttcagttttataagcacgatggacttcctatgtgcccaatactgtgctaacaagtaggaataccaaaatgagtacagcttttgtgatgctgggtctaacagaggaatctatgacggaggccaacatgctttgtaaacctctccaaagatttaagggatgttatactgattcaacacttactacatatttttcctttataaacacctcacccaaaattattcttagattttatagctcctcgtgcc

SEQ ID NO: 133385 - DNA, 860 bp, Homo Sapiens
  misc_feature (420)..(682): n is a, c, g, or t
gacacaatgatttcatttataatagcacttgtaagaataatatgcctgagaataaatttgttcaagaaggtgccgtacttgtacacagacaactacagaacattgctcgaggagattcaggaagacctaaatcaatggacagacatcttgtgtccatgggttggaagttgtaacatggttaagataaaaatacaactcaaagcaacccacagattcaatacaatcctatcaagaagtggccttttttacaggaatgcctaagaagaacttcatattcctaaaaaatagtgtgtccccccaaaacaaaagcaatcttgaaatgcaagaagaaacattttctattccaaaggtctttaactgctctaagcagtacttggtagtcttcaatatataggctttcatatctctttttttcttctnnnnnnnnnnnnnnnnnnnnnnnnnnnnnnnnnnnnnnnnnnnnnnnnnnnnnnnnnnnnnnnnnnnnnnnnnnnnnnnnnnnnnnnnnnnnnnnnnnnnnnnnnnnnnnnnnnnnnnnnnnnnnnnnnnnnnnnnnnnnnnnnnnnnnnnnnnnnnnnnnnnnnnnnnnnnnnnnnnnnnnnnnnnnnnnnnnnnnnnnnnnnnnnnnnnnnnnnnnnnnnnnnnnnnnnnnnnnnnnnnnnnnnnnnnnnnnnnnnnnnnncgaagccaagcctggctggctttcatgtcttttctatgtagtttatgtttctggatgccattgagagtctggctggctttcacatatttgctatgtcgtttatatttcttgatgttattgtaaatgtttattaaaggaatcttttaaaaactttgttttggccaggtgcggtggtcca

SEQ ID NO: 133386 - DNA, 556 bp, Homo Sapiens
  misc_feature (485)..(493): n is a, c, g, or t
agggaaagaaatctgggttccttatttttgagccatagaaatagtatcttaggacttatttctagatgcagtttctttaatgtaagccaattctggttatttctacttggagctgaaagcaacctgaaaatagccaccttggttttcatgttagagatctaaaaactttcatgttagagatctagaaactttcatgttagagatctagaaactttcaagattctaaatgtaccaaaggtctaaggggagaaaataaaatccttcaaacaagatttgcacatgctgatactgctcattatttcattataacagcccttccaaatcttgaatttgcatttttaaccagtgttagcaaatcctgtatttccctctttgggaaatatgggaagcatgagccatggcatattcttgaagctaaatctcagggcatcacccctcacaaacaagagatcaagatgctttctgtatttatttaaaaaacgtcnnnnnnnnncagtacttctaagatcattgaatagcatatactgggttttgcgttttgtttgttgtttaattc

SEQ ID NO: 133387 - DNA, 549 bp, Homo Sapiens
  misc_feature (213)..(248): n is a, c, g, or t
  misc_feature (259)..(367): n is a, c, g, or t
tttttttgctttggcaattacatttatgttcttgggagcccagacactgatataaatttccagcaaaaaccaaagcagacccactgcctggataaattcagaccatacgtcttccctaattgttccgggaacttttgctgcttgaagaatgcgtgaattgctatattgttcaccagaaagacagaagttaatccccagatggaaatttcagannnnnnnnnnnnnnnnnnnnnnnnnnnnnnnnnnnngtagacatggnnnnnnnnnnnnnnnnnnnnnnnnnnnnnnnnnnnnnnnnnnnnnnnnnnnnnnnnnnnnnnnnnnnnnnnnnnnnnnnnnnnnnnnnnnnnnnnnnnnnnnnnnnnnncccccagattttctactttaaacagccacactaagaactggaaatctgtgcgtggtgctctcagagcaggggtggaaagcctgtttgtgtgtgacagtttaacagtctataagatgaagtcccgtcaaggcacacatgggcacacccatccctgcctcggcggattccttctgatccttccc

SEQ ID NO: 133388 - DNA, 669 bp, Homo Sapiens
tttttataatcacccaacctttattattccaagtgcactactgtcaagagacatgttacagccgctaaggacaatgtacttcagctttgaaacctgggcaagaagccacacgactgcatgagacaagccgtgagaggcactgctcaggaggaaacgctgggtctcttcaccaaaattagattacagcatattctgggagcacacgcccttgtactgcttacaaaccaagggagaaagaccaacgcatccatcatcccaacgccttccctggaacagggaaatgagcatcattctgtgggaacagcgtctttagactctgcatcagtttgttccacttcagcatccgcggcagctggggcaggagcaactctggtttgggcactttctgcctctgctgccattgtctcggcgccatttccagcctctgcagcctcacttctggccttggggacgcccttctcatgtgccgttccacagggcacctgctcttccagcagctgttcggcttgaggatcactaccggcctccgctgtgtccgtggggccttcgtcctcagccggctccccgctgctctctggagcgggcgctccttccccatctacggccctcactgctgctgtaatcacctctgctaagacgtccgcggccacctccttaggtgtctctttc

SEQ ID NO: 133389 - DNA, 595 bp, Homo Sapiens
aaacagctgggacagccggctgtcccttcaggctgtgtgaccttgggaaagtcatttggcttctctgtgcctgtttcttcatgcatgcagtgggattccagtaagtaccaactacctcacaggcatggcacggaggcaaaaggaaaaagcagcccgcatcaagcaagccctcctgggccacctgctgatctgacagtccatcgtagtaacaagagtggcagtctgcacaacctagaagtggccagaagggttgagacacgcccctgccctctctcctttgcccctcagtctcacagaggggcttctacaagacaagcagataacgatagaatcttgggcatcttggctttcggattctcagtgtggagggacgtagtaccccacacaccccttcctgtcatccttcctggcccataaagcccactagttggagagtaagtaccctcctggaagcagggagagatgatttgctggtggggctggggaaggcccatccctgagcctctgaaagtgaactccccgaccaggttggggaccagacatgcagagcccctggaagtattctctcaaatggaggcaacagaggtgattgtta

SEQ ID NO: 133390 - DNA, 820 bp, Homo Sapiens
  misc_feature (292)..(332): n is a, c, g, or t
  misc_feature (357)..(374): n is a, c, g, or t
aaatgtacaaagttctttattaaaataatagcttaaataaatcctctgtcaacaccagacagagtcagtgactggatctagactctagagcttagagctttttacatagttacatgaaaacatttgaatccgtcttcacagacagtgccacgatgacaatctggttaaaaccaataagccatcttccagatgcagcttaagagttcaggcgagaaaaggaactgaggaaaatgactgtacataatatggttctcattctatttgccttttttcgtcttggctgtcttctccnnnnnnnnnnnnnnnnnnnnnnnnnnnnnnnnnnnnnnnnnctctctctgggcttccttgaccatnnnnnnnnnnnnnnnnnnatcaatgtcagggtccgtggtgtgtttcttggggcgggcatggtctccctgctcttcagagtctgtgtcagagcactcagagcttccaatatcttctgaatcagaacaagtcctttcctccacttgattttctaggagtgcagggaccttctgaactcctgacaaatctttcttcaatcctgtaacagtctggtatagaatattatcttgttgggcattcatggccatgtcctcttccttcaatttcataattatgtccatatccctctcataatttttcacttcattcaaggttctaggaatatatgctcgcttaaacacctcttcatccacatgatcttggctagaccgttcttccttggtcctttgagatgctatttccatggcctttgagagataagcatccatgttctcatggtgtaatgggatgggatctgtgacaaatt

SEQ ID NO: 133391 - DNA, 789 bp, Homo Sapiens
gaggaattatctacagaacactgtttatttcaagtccaaaacacaaattactcatttttcttaacagaccgcataatttttactgcatgaatatttagggtttctctattcacaagtacagtttattactagactttaggcttgaatgattcatatatatagatatcagtttactacagaggacatgtacttttaacattttttgtttagaaaatattttacataaaaacacaaagcatttaccaacactccacaaccagtcttcagcaaagatttggctgaagataactttctacaaacactccaagactgaatagaatgtagtattttacatactttagcttattgttgcagttaaaagctcccccttgtttgatggcttctgcatgtatctacaaagcagaagtcttaactggtgacctgttaaataacattgcctttttaagtgaacttgtccccagcccggaacctaagtagtcataatgaaataaagtaattgatatatgaggggcttttagtaagggctttttcaacctaataaaataataatttagtatctatcagtgcaatattcttttactgttttgtgttcaataaccacctggagtgctaattgtctagtataatcagttggcatcaaaatagaaagtaaaaagatgtacatttaatatacccactcttacctgaataatcttggatttctggagaatcgacgcgtgggtcgacgatatcccgggattccgaccggtaccgcctgctttttgtacaacctggttcaagtaccatgct

SEQ ID NO: 133392 - DNA, 1559 bp, Homo Sapiens
  misc_feature (1023)..(1023): n is a, c, g, or t
  misc_feature (1437)..(1471): n is a, c, g, or t
  misc_feature (1475)..(1515): n is a, c, g, or t
ttattcttctgtttttaataactcatatatttagatatatatttattattttgcttatcttcatttcctcagcaaaaaagggaaataaaaatattgatctataaaataagccgatgataacacaatgccaaaaatagcttatgttaagtgcaaggggtgaagcttgaaagcaagctaaattgcaacaacatattgatttaacatttaaatacaagacttgcaataaaataattcttgaaatatgcttctcatttttagtttacttttgaaaaactactctatatacacatatccagttgtaacacttgacagtagcattatggggcatgatataactttggtacacattgcagatatggatgtttaatgtctgtaaatgatattccttcaccagttagacttctgtacatccaggtgaccagccacctggttctaagtcatatcccaccagaatccctggagtccttgccagagccatcagagacagcaggcgaaagcaggctcactgaatccatattgtgtttcctctctcggttctcctgggttccactgtcagttctccaaacgtggaaaaaaactgctccatttctttctgtagcatgtcatttcttttctcggcatcttcttttgctcgctcggcatttcgcatttttatttctatcattgtgaactttttcctctcctgatccagttcatcatggaggctcatcatttctgtttccaaagtcaagtttcgctgttctaagctctttatcctggactcatactctatcttctgtttggtcatttcctgtttcaggctggaaactaaactgtgcagtgcactgtggttgctgctgctgttgccccacaaatgtctcactgttgtcactgctactggtggcacgactacttcgacctcccacactcctgtggtcacttttgctttcatagtcctggggtgggaaaggtcgtcctgcgggggcccatccaaaacagggtcctcaaagttccccccaaaaaagtcttgctctgggcagtgtnggtagaagagcgacaggagttggagttctcagggagggagatttcacaggaggaagtggaccaggtagcactgtcaatgctctgcttgtcatcaaggttcatcatggagaactgttgatggacattatcataggtggacagtctgttgtgctggcctaactctccagcttgttctttctgcttgttatccctcagggtcacatagccatttggcagccagctcatgtttcgaacatttgtggggttcccgagtgtgtcgctgttcaaaatgcccatgcgcaccgttccattctgtacactgtgcgtgcccattttggtaccagataccttcagtgaagagctccttctggcctgtaggctccccccggccgtaatggccgaattcccgggcatatgtccggtaccgtcgactgnnnnnnnnnnnnnnnnnnnnnnnnnnnnnnnnnnncggnnnnnnnnnnnnnnnnnnnnnnnnnnnnnnnnnnnnnnnnnttcagcgagctagcgccctatagtgtattcaagtttttcctctc

SEQ ID NO: 133393 - DNA, 1018 bp, Homo Sapiens
  misc_feature (942)..(957): n is a, c, g, or t
gtgaaataaagtacagtttattaaaaacacatttgtataacatgatagatttgtaattgttgctccaatatcatttataatacagactgaacatcaactaaacacctaagtgtatttaattcctacggaaatgactgtcatgtttcaggagagcagtactgaagctaagcttcaggagcacgaggtagtttctttttaaaatttatttttccattaataaataaattgtccaacatatttgagatcccaggatgctgtgaaagggggcactccttggccaatgaactctgattcatatctttcagtaagtccttcagagcattcctcactgtggtgtgcgaccattgttcgggaggcaagtcttctagtttggggcaactgtgtaactgaattttcaatgtgaccacatgatacacatcttgaagcatatctgctactgtagcatcaggggcatctgtcacgtaagacagtggaactggattccactttccaacctggattagccctttggcctgggcagcagagctatgtgaataacctagagacagcaatgccatttcgatcagctggttgaaaagcatatcctttctcaccagcacaaattctgcatgctcctccttgcaatcatattcaatggcgttttcataatgttccaccacacagaaaactggcagcatggttcctttcctaaggttggttttcatcagatggcccgagtgttttaaaggcactccctgcatttttgcacctgtactcccaagccttcctcttcctagcgggctcccgttctgctccaggcgggcaatcttggctggtggacccttcggatcactcacattgttagacatttctgaatgttcttttcccctgagttgcctcgttcaaatgatccatactcagtcactgtctaaagatcaccacttcaaaacttgacagcacatnnnnnnnnnnnnnnnngagatttcctttgcagcccgggttcttgaagagaagttcaagactgatgttttctatgtcc

SEQ ID NO: 133394 - DNA, 408 bp, Homo Sapiens
ccgtatccttttattatatctttatatgtatagaagtactctattaatgggctcagagatgttggggataaagtatactgtaataatttatctgtttgaaaattactataaaacggtgttttctggtcggtttttgtttcctgcttaccatatgattgtaaattgttttatgtattaatcagttaatgctaattatttttgctgatgtcatatgttaaagagctataaattccaacaaccaactggtgtgtaaaaataatttaaaatttcctttactgaaaggtatttcccatttttgtggggaaaagaagccaaatttattactttgtgttggggtttttaaaatattaagaaatgtctaagttattgtttgcaaaacaataaatatgattttaaattctcaaaaaa

SEQ ID NO: 133395 - DNA, 1348 bp, Homo Sapiens
  misc_feature (554)..(565): n is a, c, g, or t
  misc_feature (602)..(612): n is a, c, g, or t
ggcacgaggttggatttcgcatttgagatgctttttataataaagttatgccaaaaatacagcaacaaatacagaaaaagtattaacaaacggagaagccccagatacacgtacagtaacaatacaaaaatgtgactggtcaaacagctcaagttcacatttaacactttcaattatttttaattacactatttctgttcaaaagaatgttttccttacatacaaccatgatcagtctttagtctcaatcgtaccaaaataaagctatatataagcactctgactaggtaaggtgtgaagtaccccgtgagttgctctgtggcttgagatgggacacatggtctcaaatgactcttatgcatgccttgccttaagaaagaaaagtaatgttgatggtttaaaaagtaagtactttttgaagcagcagatgaaatgtgtttactaccagcctaaatcaaagaacatggcaagagcaagattgttctcaggaaggaaaccataaatatggcatttatgtaaaatccttgcagcatctgaccatgcttttatctttnnnnnnnnnnnntcctcactttcttaaatataagtaacagtttattaannnnnnnnnnnacagtgagatatggctatgggaagcaggtgatactatttgtttaagaaactgggatgccaactaacacgtggagttccccaagactttgcaatctccatttgtgagtttctgtaaaaaagggaacccagctagaggattcacagagaccttgaatgacaagcgacatactcgaaatctgcagctctcctcccggagggcccagcgtgccaggagacacgctgcagtaaggcacttaccaagctcctttggatagagggaaagaagaaatcaatccaggcaacatgcaagtttcagtgaagtcagacattttatgggaatttaaagtcttgcctgttctcagtgcaccccagtcagttactgacatgtcagcctcagaaaccgcacatggcctcaggaaggtcaggccctcctgctggtgggcacgccattggctcttgatcgctgatggtctcgatgatggtcatatttcacaggaaataatgaggaaaagcaggagggtagctccttgaatagcagccagaaggaaaaagtaatagttcaaatagcagccgttaatattactatctatcttgtctttttcgtatcagaaaaggtgctgttaggaaaagaaaacgaaagtacaccaccaagttaaagaaagggaagcttggggtacagattcagctgcctcacgaagactgagctggacgggcgtggagaaggtgcttgtctgtcaaggacgtccccgtaaggagc

SEQ ID NO: 133396 - DNA, 713 bp, Homo Sapiens
  misc_feature (385)..(538): n is a, c, g, or t
gaaggtttcaaatgtactttatttcttcaataatgccatatcttaatgggtacacagtgctttaatttggcatcaattatgagctgttttttaaacaattcattattacaccagctgggatgattactgattcctccattcctttggggtaactctgccaacaggggacaggttccattctattccgacttgtgttgctacctgtaagaattaaaatgctgtcagttacgtgtttaaaccagagtacactctctcggagactatttcttgaaaatgacagatattctgttctataggttaaaaatacacagaaactcacctgggatctaataccctccatataggccaaacctgattgctgtcctaattttctagagcagtcctnnnnnnnnnnnnnnnnnnnnnnnnnnnnnnnnnnnnnnnnnnnnnnnnnnnnnnnnnnnnnnnnnnnnnnnnnnnnnnnnnnnnnnnnnnnnnnnnnnnnnnnnnnnnnnnnnnnnnnnnnnnnnnnnnnnnnnnnnnnnnnnnnnnnnnnnnnacttcacatttctatactacccactcaatacactgattccctcaaccacaactacctaagtaactgccagagtattttatattctctgtatcactaaggaacatttcacctccaaaagctcctctgatcaaacatttgttcaacatcggtttatccttctaattaagcacacttt

SEQ ID NO: 133397 - DNA, 654 bp, Homo Sapiens
  misc_feature (114)..(114): n is a, c, g, or t
  misc_feature (163)..(166): n is a, c, g, or t
  misc_feature (173)..(174): n is a, c, g, or t
  misc_feature (176)..(178): n is a, c, g, or t
  misc_feature (180)..(181): n is a, c, g, or t
  misc_feature (184)..(185): n is a, c, g, or t
attgggtgaagaattccaagcacttagtccatggccaggggatttccctagggaaaacagcctatgacccatgttcaacttaccctaactgggcccgcggcggccaaacagaantggtctagaaaagttctctgaggggccgagggcggcccgacatgttttnnnntttgggnntnnngnnttnngcttggaaggtttcaaatgtactttatttcttcaataatgccatatcttaatgggtacacagtgctttaatttggcatcaattatgagctgttttttaaacaattcattattacaccagctgggatgattactgattcctccattcctttggggtaactctgccaacaggggacaggttccattctattccgacttgtgttgctacatatgtccatgtaacaatacagaaagtggctccactagctaatacagcattaccgtatttgtcatgaaaatcaggtgtacgtttctggtggctctgccttgccattgtttgctgaatgcttcgaacttggagacgatttagtgcgcttttgaccaagggaaacatcgtgaaggtgaagctagaactgcggcaatacagctgctgctttggtgccaattcgcttcaggtacccttgaagtgagctgaaaaacaaaatggctccc

SEQ ID NO: 133398 - DNA, 692 bp, Homo Sapiens
gaatgagccactgcactcggcctacttctgcattccttagagtacatcctagctaggatatattcacttgtctttagagctaacagcagaagaaaggtacctagatgcttatctagctctttatctttctagaaattctagaagatgagaggggcagtggtggctccaagggagtgattttaggatggactgggacagagaggggctgcttacacatactcacacagaggccattaatttagggagttcaaggtccaggaggttgacggcatctaggcctgtggcagagtgcactcctgctttggggaatgtatgggcagcttcttgcctgtagttggagggttagagagagggatcaataatttcatggttggacctgagtttggagcgagtggagttagatacaaattctatgtttttggagaaagtatttgatcttcttggctgtgaggcaaagcgaggtttaaaaatatttttcacttaaaaatatatatatatgcatgtatatttaatactgtctatggattgtgccaatatctatttcatggttttgatattgtgtagttatacaaggagttaccactgaacgaaactgggggaagggtacacagaatctctgtactttttttgttgttgttgcaatttcctgtaaatctatgattattttaaaataaaaaagttaaagcatacgt

SEQ ID NO: 133399 - DNA, 482 bp, Homo Sapiens
acaaacacaagaagagcactgtattttcatgaagcggaaaatgtgctttacaatcgccagctactaagagccttaacggtgaagcgctctgcaagaaacaggaaatcgtcaacacactttctgcatgaattgcctggagagttgtgtccatagacgattcctggttagatgcttaattgtagcagactccataacggggtttagcgggtttccattcggcagaaagggctccacgttctttttcacagaaaggtttaaacttatttttcctcctcaggcggacgaagtgagcgtcgttccgtgaaggtatgaaacccttttccttcctttctgtccctggttactccggttcaaggctacgtacttccccggtttgctttgttttttcctcagagctaagttcctaggaacgtcacatactggtgccatccaacaacatgacgacgtgcggaaccgaagtccccttccacctagcggccgca

SEQ ID NO: 133400 - DNA, 722 bp, Homo Sapiens
cggcacgagggcttttgtagatgctgcaaaaccccagaaaactgtcccctcctgatccttttatgctcactatctaaaaaggtttggacccttgctagctctcaccctctcatgtgatcactcacacaaagcaaggaaatgtatagaaaaccattcctggcgcagagtaagttgatgctgaataaatatttactttccctctacattgtttaccaactgtgttacatatgctttagggcttaaaagcaaagacttgtcagttgggaagatctagattcttctaatctttgctctttgggctttctgctttgtgaccttggataagttgcttaacttctctgagcctcagttcccagcctcctagagttaccatgagtttaaatccaacaacacctttaagagattttgtatccgtgcctcggatgacactacaggcctttgggggcccagaatgccactactccagaggggcaccgctggcatcgtgctccagggggcgctgttcactgagactgccgcagcgtgtgtctccagcaacgggcagcagactacagaagcccattctggccgccttaatggccattccacactctctggagactgttatcagccccagcctttttcttcattcatctgtgccttgcacttccatttttaccttggtttaccttctcaaccctggctcaatccacttatatccaataaagcaacacttttccctt

SEQ ID NO: 133401 - DNA, 721 bp, Homo Sapiens
  misc_feature (666)..(666): n is a, c, g, or t
catttggtaattaattttattgattaaagtattacaaagttctacttttcattttttcatgtacaatgtattaaaatgaactaaactcaatcacttataatataaaaagacattattatgtattagcagggtgatgcttcataatcatgtattattcctacctctaagacaccagtctgtattatagaatcacagctgtcacctgtgactgtcagaaacagaaggtgcaattgggattcttaggttggtgacagaatagcactggatccacaggccagagactaggagtgcttatcaaatgaggttttaggctctgaaaggaaggaatgagaaggtgtgccgggacaaggaatagccagttcccataaaacttgggaaacgtagatttctcaaaagtagggtccgacacaattttttagttactttttgagaacatttaaaaataaatacattgaaatgctgattagagagcgaaagtaatttaggttgctttttcaatctgaggtttttttaaaaaagttattgtatgaaaggtattaaaaaataattatggtgaatatgttggcaggtaagatttgaagttctttcagagaagataaacggcatggcaattaagctttaataatatattagttttaaatagatatacatataaaaatacttcanatgattcatctcggattgaacactcttaaaaattaaaagggtcagccgggccgct

SEQ ID NO: 133402 - DNA, 1192 bp, Homo Sapiens
agatgtcatgtctctttaatctcctttagtctgatacagtttctcagtcttgcccttttataaccttgacactttttattattataagccagtctgaagaatttccttccaatttggttttctctgatgtttcctcatgataaggttccgagttgtagaaagaatgccacaaaagtgatgcatgctcctatcaggggcacatgatgacattctatcctattactggtaatactccttgatgaaagagcattacatcttaatcactaagatataccagccaggcttctctactgtaaaattactctttttttcctttgtaattagtaaagattttatggggaggtactctgagactatgtaaacacaccattcttcatcaaactttcaatttattaatttatgtcagtatagacttgtgatttcctatttcattcagaggtttgtaatctattattacttattttaatgaccagtttgctccagatttggcaagtgggagcccctcctgtgtgggttttgcggcctttaacaggttcctatcattctttgagcgccccttacttacacatataaaagaacgcagatttttatcagaggaaataataatagtagtaaaatatatattttatgtgtgtatttatgtatatgaaacatatttgatcagtccgcccctagaagaagccactatcccattactgccgccatactctccctggatagatacctcctcattgtgcacaagctacagtgcagtgctttaggcctaagtaactgcaccggcatgtatgcctagcttgctcagcccctaatggatttaggattacagtattaggaagagaagggaaaatgaagaatctttcctgttggggtgatcagacccaacaccaggtcgtgggggtgacaaagtccggcggagtcaaaggattgagaaaaagacagtttgagagagaaaagtgggaccggacccagggggccatcacaatcgtagaggctgcgaaggcccgagctctgggagcccatgctatttattggtaatccaacaaagaaacaggtggtgagaatgtggaggtcaaaagggcacattgcattaagtacatgatttacagctgtgatggtttagcatttgctctacttgagataatggagagcagattcttttaactcaagatacaatcaatcctgggagagcaag

SEQ ID NO: 133403 - DNA, 564 bp, Homo Sapiens
tttttttggatttacattttattcaaaggataaatacaaaattaagaaagagttcaaattcaaagtaaatatgcttgatatttcaaaacaattctacatacaaagtacaataggaaaaaaccaaaagcccccataaattagagtggctagacacattcaagtctagcagaaagaaacttgaaatttaatgcaacgttatttctcttgcctagaagctaaagccttaattgtctcagatatcttccatctccttatgggcattacttgaagataacaatggagcaagctttttaatgaacttgccatagtgaaaaaccaatgacagatgcgacactggaaagaggacaacaatgtaacctaaaagggagctactggcagaaataaaaactagtgatactgataacatctagacctttgcagacgtttagagtactgtacaatcttaaattattgtttatcaacctttgggtctcacagattaagaatgtactagttaagaaccaaggagttatacccagttcacaatatgtttccttcacttgccctttagatataatggatctg

SEQ ID NO: 133404 - DNA, 674 bp, Homo Sapiens
atattaagctgtttataaaaaatactttaacaaacttatcttctactttttacggggacagtcacttgatcaacaaacagattctgaatgaagaaaactggcaatgccaggaattaacctgcccccttgaactcatgtccaaaatgtcttgtccagtatgggagtgaaggtaaggggggctggggagaggaaagagttccaactgcggtttttactttattgtattttttttaaagccttcagaaacattccacctaagagtttctgttagaaaatacttcggcaacaaccatcaagtgtgctgtcccctatggccatctcccatccctgatctcctcctatctcccctaaatggtcgccctctgacatttcgatggtactgataaccttcatcccgacttctgcttggctgtcctttccaggactcctcacttctcacatgttgatatccacccctaccagaatagccccaatcacttttgtacttcctgcttccataagtttgattatagaactgcttggatctaccacttctcacaatattagacacttcattttcatcttctgaactctcttcttttggtctttgcactctgctatcaacagagttggccccagggctgaccacatcagcagcagtcttaggatcttttactttttctgttttttctttc

SEQ ID NO: 133405 - DNA, 989 bp, Homo Sapiens
ttttttactggtgaaactcaactttattaaacttaaacagagaagctacttctgcacatgttaaacacacatggaaccaaacagctcgatggagacaccctgcactgcttatggtgatgctgcaggaatggcggcagcgatgcccgctacactccatggcctgctgcacatgtgacaggacagttatttcatctatgcttacacctgcaggtcccttaccctagaaacactctatatcttcttaggtacttcccttgaaacaggatgagttctagaggaaataaaactgctgcacttacaaacctagaaatattcagggaccaagattagttgttcagtgacctaggaaaccttagaatcctgtaggttcctcaggagaggtgcttccaagtacttgagaatccacaggcagagatgcttccctttccatggtggatgtgtatgtcactccaggacaaactgcggagtcacggagtgtggaacacatctggttgtgtacagtacactatcccagaggaaaatcacaaagcaacacaactctgcagcaaaaactagtcccaaagtcagaagataaaactagcaaaaactttgcacaatatttagagaaaagctctagggtgtggagagtacgggtcttcctttttctccatgcaccaagcagagcacagtatcattccttaagttataagataaaactagcaaaacttttgtatcaatatttaaatagtaacagacacactgaactaggacaaaaatgacccactgggaaagaaagcctgaggtatccctttagttgccatgtttcttaaactgggttgcttacacccatgatcaacacagtccatcttcctacagcactgattttattcagagatttaggagaaatgttttgtcttagaatgaaaagggactggtagatattaatgaatacatgataggagtacaaaagaaaagactgaggaaatgataactttaccaagcagcttcaa

SEQ ID NO: 133406 - DNA, 996 bp, Homo Sapiens
  misc_feature (498)..(885): n is a, c, g, or t
  misc_feature (909)..(909): n is a, c, g, or t
  misc_feature (918)..(918): n is a, c, g, or t
  misc_feature (975)..(975): n is a, c, g, or t
gctctcagtctgttttgagtatcttgtgctattggcactggcaaggctctggggcaggcacacatctgggacagcctcactcttggcccttctagcatggatggtctcatttatatatggagatgcacacgtaaatcaagaatcctgctctactggaaatgcacttttacctccaaattgtccccttttataggaactgtaccttcacttccatacttataggacaggattttgtgccacgtgacaacaccacattatcactactaaccccagtcacaggggactggttcagggtgggcagcttctcaaatagaatcaatggctccctttcttgggcgttttcgactttagaccaagggagtttccaggagctgacatagtaaatcataaagcttagggcagagagcagctaagactctgcccagttcctaacgggtcattaactagtacccatcgcggcctgggggttggagacccctgcctcgtgccgaattcttnnnnnnnnnnnnnnnnnnnnnnnnnnnnnnnnnnnnnnnnnnnnnnnnnnnnnnnnnnnnnnnnnnnnnnnnnnnnnnnnnnnnnnnnnnnnnnnnnnnnnnnnnnnnnnnnnnnnnnnnnnnnnnnnnnnnnnnnnnnnnnnnnnnnnnnnnnnnnnnnnnnnnnnnnnnnnnnnnnnnnnnnnnnnnnnnnnnnnnnnnnnnnnnnnnnnnnnnnnnnnnnnnnnnnnnnnnnnnnnnnnnnnnnnnnnnnnnnnnnnnnnnnnnnnnnnnnnnnnnnnnnnnnnnnnnnnnnnnnnnnnnnnnnnnnnnnnnnnnnnnnnnnnnnnnnnnnnnnnnnnnnnnnnnnnnnnnnnnnnnnnnnnnnnnnnnnnnnnnnnnnnnnnnnggacatgtgagcaaagggcagcanaaggcaagnaccgtaaaaggcgcgttgctggcgtttttcataggtccgcccctgacgacatcacanatcgagctcagtcagagtggg

SEQ ID NO: 133407 - DNA, 1043 bp, Homo Sapiens
  misc_feature (641)..(663): n is a, c, g, or t
tttgtgtgttaaacagctttaatctcgctcattgcggcttctcggcacagtaagaaatattgcacatgatcaacatgttttgttctggggaagggggcaagggcagggggaatcaccttcttagaaagtacaacccaagttgggagggcagagggggtgaggagaaaaccctccccgtgcctgtggcaaagtgcaggagcccccacccccaaactaacctgagtccagcccctctggggaaaaaaggggtgcatgaactccccctattccacaggcgcctccctgtggcccaaggcctgcaccaccctccagcttgcagccctcacaggagccattttgcataaagtgaaaagctctgaaggtcacacgctccaggttatgtacaggggcttggaggagggagactgcccctgcagcccctcagctgccccccagcaccgggagggagcttcgagggaagggggtatttacaagaggagcaggcctcattccgccccaaactggagaggacgaaatggctttacccgggaggagataaccttcctgcccccacatactgtccatgtcctgagggggtactataagtcctggcatcttctcaggggtccctcacctgcctgtggcagctgtggagggacctnnnnnnnnnnnnnnnnnnnnnnnagccccctcccagccaggctgtccaggccccgactctgggggtggaggcagtggcggggcagcctgggccgtgccagagtccgagctgggtgaggtggggtcagggccccctgcggggctgggagtgggggcaggggcagcagcggtgccagtggggggcggtacagggagaggagcctcagctccagggggctgctccgtgggagtggcagcctgcatgatcttctggcgcacctcacggatcttcaactgcagacaaaccttggagggaaagatgtctgcatagcgggcctggaaggcggctgtggcctgggctgacgggaagaagccatggtccgaaagagctgcatgaccctcgtgccgaattcgccacccaggcc

SEQ ID NO: 133408 - DNA, 630 bp, Homo Sapiens
tttagagaagcaagacgaccgtgtgctaatgcactttatttgtagacattgaagtttgaatttcatgtatttttcacgtgtcactaaacattctttttcctttttcaaccatttaaagatgtaaaaaccattcttagcttgtcggtggtgggttgatgccccttggtttatgctgccaacccaagagctatgcctaattcatatccttcagcactaagtcatacagctttattttttttgactaaaaggcccctgaaaatgaaaactttacacatgcaagcagagaggagtccgagactttctgacgggcaggaggggcagaaactgctccctaaggccagggacagccagacccgtgctgatgctgccccctagtgactggccagcctaacgtccatctcccacccacggccacgctgtgacgggttgggggtgtgttccccaacacacgaaataagaacttcaaatcagttcaatcagaaagcgtaaagaactgtaaacccaataaatcatttaaagtgaaaaagtaggcttcaattcacagaattttagaactgaaaggaacttttgagatgactcagttctatttttacaccaatttaccaacgattcacgtagctttcaggtaaa

SEQ ID NO: 133409 - DNA, 508 bp, Homo Sapiens
aaagataatcaacatgccaagagccagatgaatagttcacacaatctgaatttaactgaaaaaaagagatcatgctttgaagcaggctagactggagctggactttagtggataggtcggattctgaaaaattagagcacattttaggaagagcaacagcacaaattattatgttatcaccatctttgtctttttatttccttagatttacaagcactagagattgtcctatgtgaccccgtttcctattttgctgggaaaatgggagcaattagaaaacttccacttgtttccatccaccaccaccactactttgcccccattgcccattactctgccttcctagtactggaattggactgtttctattcctacttaaagccagcctctccatttgttcatcagatcccttcttacggcctatcaagtgttgtttcagcaactttccctcttcagtcttttttccctcctgactgcattcccattaatgtataaacatcctcccatt

SEQ ID NO: 133410 - DNA, 620 bp, Homo Sapiens
acatgcaataccacaaatttattataatacacagggaaaaacaaactcaaactttgacaacatccacagaatgttccagtctttaaaaagttagcagaaataaagggtaatggaaagaatataatctcgtaattttatacttaaggctgtaaatggcaaagtcccatagatatttaaaaatctatatttgtatttatttataatatagatataggccctcaaggattcatagagatttatgtaataaactagattttggaactatttattttgttgttgttgttgcttgttaggtaagcaaacccaaacaaattaagtcctgaaaagtgggatgaaatcccaaaggaactctatgtgaccacacagaactcttttaataaatatggcccatacaaattccatatccagtgaaaatcattttgatccacaatcatgttgatgtttctatggaggatacttctagcagctgtgatttcttttgtagcattctggctctccacttctattcatataattgagtatgtgttttattacatgttagcttataggcaagttaaacattttaaagactacagggaggttaggagaggttgtatgatgaaggtcggaaagtatgcaag

SEQ ID NO: 133411 - DNA, 1112 bp, Homo Sapiens
  misc_feature (67)..(90): n is a, c, g, or t
  misc_feature (671)..(682): n is a, c, g, or t
  misc_feature (732)..(855): n is a, c, g, or t
cgggcagtgccaatctcaaattaaccctcactaagagggaataagcttgcggccgcggctgtaggcnnnnnnnnnnnnnnnnnnnnnnnngcattattttaagatctttattattaagtaactcactggggttgtcaaagtatgttataaaattacacagataattagagatatatgttacatagaaatgctgattttacactctcttctgagtacaagcatttgattacagaggctcatagcacaacaaaatgtatttcacgggacactgatgcccctattctgatattgacaaggcaaacatcagcggtagcagagtcaacaaagcaaagcaagatgaaatgaaactagatgtaggtaaaacaagctaaaaatatttttaagtgtttttgtttattgtcatggtggctgttttctacttacaagattgcagtactctaatttagccaagtaattgctgctgtaaaatccaaatctacagagcgcacaattttttaaatggagtgtgcattcctcaagcaagactaaaaacaatcttacttgggtctctaatattaagcttcagaacagttttgcaacttttgacctgaacaaatctcttatccataaaacaagaggaataaaagattgcatacgtgcatttaaaaagtaactttattactcccaggtcnnnnnnnnnnnntaaagcctacagccgcgcctcgtgccgaattcctgtgctcgagggccatnnnnnnnnnnnnnnnnnnnnnnnnnnnnnnnnnnnnnnnnnnnnnnnnnnnnnnnnnnnnnnnnnnnnnnnnnnnnnnnnnnnnnnnnnnnnnnnnnnnnnnnnnnnnnnnnnnnnnnnnnnnntgctattgattgagcgaactcatattagttgggttgcgttcacggcccgctttccagttcggaaacctgctcttgcagctgtcataatgaatcggtcatccgcgggagaggcggtcgggtatgggcgctcttcgctacctgctagtgacctctgcgtcggcttgtggagtgggagtggaccattcaccaatgtggtaattgttccaacttcaggggtacgcggtataaagtggcatatggagtatggaagcagttaa

SEQ ID NO: 133412 - DNA, 656 bp, Homo Sapiens
tttccatataaaaagaggtttatttcgatgttagaatcatctagtgatcgaacaagattggacatgaacccacccaggcccagggctgggctgccgagcagctgccgctgacatctgtgtggatttgacatgcaacagggagtagccacgtgctcgctcgctggccactgtgcttcgaaacgtttttccagcggacggctgtgattgcagttttcagatgtgctctggcctctaaggacgtggggccgaggcggtgtcctctgtataaaaagtgctgtcctgggagcttcccaacggacatcttggggcatctgagtgattcccagggagggcagcttggccttcctcaggctaccactgcagccaccgccggccattctcaccagcaatcaaccaaaaagcatcagagcctctgtgaacctggctgtgatggtaagaaccaaatgtttcctaagctaagacttgtatgcagaacacagaaaactgcagttaggaacaccctacaaaattgaacaacagtattttccaaaaatatcttttacatcactttaaataatttacaaaaagctacaaaaatcatatttaccaggacacgtctgttaaataaaagtttcatgttggtgtacatatatacagggctatgtataatagactgt

SEQ ID NO: 133413 - DNA, 1201 bp, Homo Sapiens
  misc_feature (134)..(210): n is a, c, g, or t
  misc_feature (496)..(520): n is a, c, g, or t
ggggaatccaaaccttgttcatggccaggttttcctgggaaacaattagggccaggttcctttccctattgggcccggggccccaaaaaaatgttttaaaaagtttttgtgaggggcggagggggcccgccaannnnnnnnnnnnnnnnnnnnnnnnnnnnnnnnnnnnnnnnnnnnnnnnnnnnnnnnnnnnnnnnnnnnnnnnnnnnntagtttgaaaggggtttatttctggtgcacacaattgcttcattgtgaatatacatgtgattctctgtacacaggaaatggaattatgttcaaaataatagacacagcaaacaagtttctttgaagttactaaaaattaatgactacataaaataaacattctaaaactaagtaagtattattaatttgaatagttagtaggtgtaagggaaaaggcatcacactacaataaacaaacaaaaacaacatgcattcctcgcattaggttaaagacaccttcaaatannnnnnnnnnnnnnnnnnnnnnnnnaattgtgggtattacaactcccacaaaaatgaggtgctgaattcagatatagtaagcaggcaccatgcaaaagctgcccagttttgccaatcaaccttgatcacaatctacaacacagtccctcggatggcaggccccatctcaagtgtgaagaaactgccaagtgaacaaaatggtcttctcaacagtatttccatgtaaacaattaggacacaacattagttcaattagacaagttactaacacactgtgaaggaagaatgcattttcttaatagtagtagtcttattagttgaataaacaatttatgcaatgcaaattttgaatgtatatgcacacatgtgtacatgtaagtataatatatttagaaagcagacatatgacatttttttcatgcttgtgacctgatggtgtcacaggtcactcaagttactggctgtctatctctgcctgaccctgaacgacgctgcggtacgatgcgtcctggggttttttcacatatctgtattgcaagttacatgactatctgacaaacaacaaaaacaaaaactcttcctcaagattaagggaaataactcgtgcgatctggctcaggcaatcctaatgatcgataatcgtacagtcaatgtccggtgatgtacgtcaatcacacatagacgacaaatgagcggggctagagcg

SEQ ID NO: 133414 - DNA, 603 bp, Homo Sapiens
tttttcaacagcaacacaggtttattactagcaaagccctgcggagggggaaaccagcttagtgtcagtgcccactgccgctcacaggctggggtaatcatagcgctgggagggagggctctggacagtatagcttgctgctcagtagaagatgataaggatgttcctgaagtcaggctgttgggcctttgcccagcaggatgtgataaggatgtttctgcagtcaggtggttaggacatttctcacagcccgagttcccatggaatgttttactccaaccaggatcaaaacacaggtcatgaagcatacccagcccctgaaggcacgtccagggctagaccagctggctgggctgccagcatcctagtagagatcccagaagatcagataagcttgctcggcacaagtgcatcaatgaagtccatagtcttgaatgtggccttggccttgaggacgtcaacaccctggctagtgagggtgcagtgccgctccaggatgatggtgtctagagttgagcaccaggtcgcaggcccgcagaagcatctcccctcaagagggaggtagtacaggaggtctgtgcacatgcagatctgctggtgcca

SEQ ID NO: 133415 - DNA, 811 bp, Homo Sapiens
tttttttacggcttcaacagcaacacctttattgctagcaaaaccctgcggaggaggaaaccagcttagtgccagcaccaactgccactcacaggctggggtaatcatgggactgggagggaggggtctgggcggtagagcttgctgcccagcaggatatggcaaggatgttcctgcagtcaggctgttgggcctttgcccgggaggatgcgataaggatgtttctgcagtcaggtggttaggaaggatgcttctcacagcccgagttcccatggaatgtttcactctgaccagggtgctgcaaaatggcattcaatgaagtccaaattcttgaatgtggccctgtccctcagaactcttgcaccacgaggtggcagcactcccagtgtctgggtgtcttctgaggggtaccaggatccagtagaggccactggctgtgctgtcatatccttgctcagcacaaacgcatcactgaagtcgaaaatcttgaacgtggccttggcattgaggaagtcatcaacaccctggctagtgagggtgcagtgccgctccaggatgatggtgtctaaagttgtgcaccaggtcgcaggccctgcagaagcatctcccctcaggagtgaggtagtacaggaagtctgtgcacaggcagatctgctggtgctgttacactatgagggcactgagctccaagatggtggcaatatattcactgggattcctgcacggtgaggttggagagaggaagcatctccacaacacatatgaaacctgcctcgtgccgatttcaccccagcctcgtacctagctattt

SEQ ID NO: 133416 - DNA, 475 bp, Homo Sapiens
  misc_feature (445)..(445): n is a, c, g, or t
tttcaacagcaacacaggtttattaccagcaaaaccctgcggagggggaaaccagcttagtgtcagtgcccactgccgctcacaggctggggtaatcatagcgctgggagggagggctctggacagtatagcttgctgctcagtagaagatgataaggatgttcctgaagtcaggctgttgggcctttgccagcaggatgtgataaggatgtttctcagaatgtggctgatgtccagggccatctgtggatgtttgctgggggcttcttgctgttctcctttatggtctgtagggcagggcaaggccaaaaggagaaaccaatccaacctcagaatggacaaaatgctcactgccacaaacggcaaccacttacagtcagcagtgcttctggaacaaaggtttcattctgcaaacgctccttgttggcttctttctgaagccagngaaggataccaagcccagcttacctgcagt

SEQ ID NO: 133417 - DNA, 364 bp, Homo Sapiens
gacagctggcaaatgaaaacagaaagtctggaaatcagtttcatagcagtgtatagtcgagccttaaagtacgttcgtatcttttgaccagcttttaagcccacttagagaaatttagcctaaggaattagtaggagctgaggaggcaaaggttacaaggatgttgcagcattttacaggatataaggaaagaaaaagattaatgcccaacagtagaagtggttaagtaagttacaacatatacataatgcaacatggtcgacagtgtctcagaagacacccagacactgggagtgctgccacctcgtggtgacagagttctgagggacggcaattctgaagacattgaatgccgtatttgcac

SEQ ID NO: 133418 - DNA, 1164 bp, Homo Sapiens
ggtctaaatatcaaagtttattgaaataaaatataatctataataaaaaatactacaggtgttattcactggttacagttttaagtatattaacaaaaacagccaacattttaacccaacaatgacactatctttgtggtacaataacaaacatgaaagtaaatgttgaataatactgaataattctgtcagaaatattttatactttaccatctatgtatgccttttaaggaatatcctcccaaagtgaaacttttgaaactgatgacattgtttttaagaattaagtagttttaaaataattagtatttaaaacaaatttatttcacagaaattcagttcaaccctaagctgggtagatggttttaggtatctttatgcaaaaaatgtatttcaatgctctttcctatgaatctctagggttgttattattcctcaattgaaattaaagctggtcataaagcaaaacagatgaattatttcagaagtaaaatgggtattaagataaaaaatgaaaggaggaggaaaaaataggcactcatacgtaatctatatattaaaacgctttgagaactcagtagccagtcttggcctggcacaaagagatctttgatatgtcacagcaaattgacccaattagtccaacaataaagtggagaaagaaacttgtttctcttccttgctatatttcaagataattttctctgtagtcattataccattccacttgctactcctcaaaatatgtgcctcaatccaattattctgcacaattcaaggaaaagattcacatgcactagctttaggaaatgactttcagggtacctctgaagtttcacaagcaaacatgattccttttgctgactgttttgtagcattcacacaccaatctcctgttatactgtcctacttgtaatgtgtgaatctgttaacaagttgtcatttattaagcaagatagtcttttaacaacaacctctgagggcttttcaaaacctcatctttaaaaatctgtaaaacaaagataccctatgtaccctgaaaaaactgcttatttcacatatgtgaaaaacaataataaaaattctgacaaaattgagagacatacaagacaggcccggccgtaatggccgaattcccgggcatatgtccggtaccgtcgactg

SEQ ID NO: 133419 - DNA, 614 bp, Homo Sapiens
ttttagaagataaccagcatctttatttttcatgcttccttaaatagttttgggagtaggagacttgtcctttggaagattgtcatccagaggcccaggaaagtcatctccaccaagagagccaactccctgcctcagtgtggtgttcagctggaagggggtgaacccagccaggccccaagagctgtcccagcaaagcccccgataactttagatgtcacagagagtccagctgcccccactgactgcagaatagccaccagactgccagcagcaactccgcccccgttggcaatggctgctgtagacatcatcttggctgctatggaggatgcggcgattcctactgaggtgaagcccatggcactgagcgccacgagcacagtccccacagccacaactcctccgaccacagctgctacagcagccctgcctgagtcccatccactctcctttcccatggttggccccttcgcctcggtgagcctccactcggattcttggacttccacgttactgtgcgggagctgacaaagtctctcgccggagggagcacacagaatttcaccttctccggccttttcccaagctggcaggagtaaagccctcgtgcc

SEQ ID NO: 133420 - DNA, 1103 bp, Homo Sapiens
  misc_feature (86)..(94): n is a, c, g, or t
  misc_feature (429)..(437): n is a, c, g, or t
ttttggcaaatgaattttaatatataaaacaacaaatatagattcacagcatttaaaaaaatcattcaaataacattgtaaataannnnnnnnnacaaaaaacttcaacaaaaatacatatcaagttacatcaatcttgtacactatactttggctgtcaacagcaaattcctcagttcagaagtcccattctttgacctatacagatgacacatcatcttgaagttaatgagctaaaatgttgcccaaagccttgcaaagtaggttagcgagtcatacagaatggacactaatatttacaaaaaaagattagaaagattaaaagtattttctaaatataaaatgtcagtgcctgtgagataactaaaggcaacaatgtaaagtatgttgtagctaagtaaacttgtatcaaatatttaagcttttgcnnnnnnnnncaagatcagtcatgttccacttatttttccaaagccttttgaaatccactttcattgcatcctgaaaacaatgagactttaatagaacaatttgcagattaggttattatgggaaagctgggtctgctagtagtttcacctagttgacttgggtcctccatttctggcctgtgagctggtgaaaggacatttattcatacttcttgacactcctttgagggacaattctaagtttcttctctccctgacaagtaatagtgcagaaatactccccctaactccaggtaattatgctgttctattctgactgggacaccaagttgatctgcatgaaggagtatcagcaatttggcttgcagagatttccacctgataaaatgctggttcagctggcttttacaaaatacttatattgtgaaccaattttgaattaaatgcactttgctttatgtctagataacagtcatgtaggatggggggattttctgaataagaatggcatcggttttcatctaggctaggtataaaaaggcacatattcagaaatagtgtttgatggtggtgaaatgttttcaactacaaatcagatcgacgcgtgggtcgacgatatcccgggattccgaccgtaccaccttgctatttgtaccacttgtttatagtcacata

SEQ ID NO: 133421 - DNA, 749 bp, Homo Sapiens
ttttaattctttttagtgcaataactcttatttatttttctgaaccctccccttctccacctcccaatactggaagcttacccatcaggcagaattcctaatctgcctcaaaatctacaggtccaagctctgcgaataccaagtgctcaaggcaactgcgacccttcagaaaactaaataccaacaacgaatggtgttactgtgtaaaaagtttctactgctgaatagtaagaagcaatgtaaattttttaatacaaacaatcccatagtatttattgccatcttgtagtaacacgagggtaatcaaaacaatatgaataaatgttcacattggacaaaggacatctaaaaacaaactgtatccttctcaacaatttctcacttcattgatcatttctagttggagacactttgtagcagagtaatattatctccttttagcatgatccgacccagttgttttcttgactttgttttagaatgaatctcttctgcatcatctaatacaaggttcatatactcatcaaaaccaatgatacagccttctatccgcatattcacttgctcatagagccacacctgaatccgcgatctattttgtaagtatctgaagatgaggttgatgggctgcaccataaccttctgcactttctgaccctggccacggtacgccatggtggaatttcacaaagagcacacccgcacgctgcctctgagagcaacttccggaataaagaaccggaagcctc

SEQ ID NO: 133422 - DNA, 931 bp, Homo Sapiens
  misc_feature (881)..(881): n is a, c, g, or t
gttcttgctccttaagtttttcttccttccttttacgaattctggcagctgcttcttccctctcttttcgatgttgttctgcttttaattcccggaactcctgctttgcctgtcgtaatatatcaacataatcttcaataaaatccctagttgaaactagggtcagtagctttccacagagagcatggagtatcttcattttttctcctggtgtcaaatcatacactgaggtgcttgacagtttcttcactagactgggattgctcaaacgaaactccatacaagcatcatctgtagcatcaaatcctcctcgtttttgatatctatactttgcatttgctgatgttacatcagcacctgaagctaagatgtgcagtctgaggatttctgaaagagtgcagctatcaagatccaaacttttcaaactgcagccctggtgtaactgtggccatgcagctgccaaagatgcaactgcagacagtgcagattttgtggggtctgcatcttcatccaaagcctctgttaaatctttggtgtcagcatcagttagttgctctttggctacttcctcttcttcttcagctattgcctggaagattgcagtcaggaagaaaaaaagcaattcacacaagtgggccttcactgtcatttcctacaagagcttcctctaatacttctagggttactccatcaggaaactcatcttgaagatcaaaaagttccccaaatgcattaaggaactccaaaaccatcagagcatcaccaaagatttcaggaggtagtctagttttcactggtgttggttctggaagttccttaaggtcatcacattccatatcttctctaggtttactccactgttttaagtattccacatactntcgcttttcttcacgtaacttctctctttccttttctctttctactttaa

SEQ ID NO: 133423 - DNA, 884 bp, Homo Sapiens
tatgtctcgatcgtgagtatcaaatcttccctttcttcctccccaatagatatatctggccgttgaatttcttggctcatcttctttcagtttgtctggtatctctttcatttttggttctggctccttaagtttttcttccttccttttacgaattctggcagctgcttcttccctctcttttcgatgttgttctgcttttaattcccggaactcctgctttgcctgtcgtaatatatcaacataatcttcaataaaatccctagttgaaactagggtcagtagctttccacagagagcatggagtatcttcattttttctcctgggtgtcaaatcatacactgaggtgcttgacagtttcttcactagactgggattgctcaaacgaagctccatacaagcatcatctgtagcatcaaatcctcctcgtttttgatatctatactttgcatttgctgatgttacatcagcacctgaagctaagatgtgcagtctgaggatttctgaaagagtgcagctatcaagatccaaacttttcaaactgcagcctatagttgttaaaaatgaaatagtcatttagaatataaacaataaatactcagccatgtaaaagtgcctttatgaaatttgaaattaaaagccctacccaaagaaaaaccatacccacacatagcctggtgtaactgtggccatgcagctgcccaagatgcaactgcagaccagtgcagattttgtggggtctgcatcttcatcccaagcctctgttaaatctttaaggaaataaatactttattctagtgccaatcaaagcttgaatatttgggaataatgcccgttttaaatgatgaaagaaaccgccagccttaacgatgcgaggacatag

SEQ ID NO: 133424 - DNA, 184 bp, Homo Sapiens
ggcacgaggcgcggctgtaggctttttaggtgggggtaggggtttcatgttgaagcctgtgctttgctttgagtgaatctggcttaatttctgtaaacatccctccttctaggatgaatcaatgcattttagccatgtctatacctgtagcagaatactggtgatgaaagtttacaggcagttt

SEQ ID NO: 133425 - DNA, 878 bp, Homo Sapiens
  misc_feature (646)..(656): n is a, c, g, or t
caagaaaaacagaataaagactttatttttatttaacaaatgataccatattaccttcatggtgggaacagcttctgcaagcattaaagggaagagaaaaagttagaattgccgcctcagtttcttggcaatattgaggtccagatattcatccagaaagctgtttgcaattcccagggcacctaggagggtcaacaaggccaaaatccccagactcagtcggaaaccggtgatccgttttttagcagcttctgaatatccccagaagtataggtgacggccatatatgtacaccagacccagacaagtagcaaaaacttggttgaaataccacccagccatccacaatgtaattatgaatataggataaaactccacacagttttgttgtgcccgaaatactctctcaaactctggtgacccagtgactgctgggggcgtaactttgtattttaatcttgcctttccaacttgcaaagcaaaataactttgctgacaggccgagagaatagagacagcagccagcaggatcgagttcccggccatctttctcacggaactatttgtagagcgcacgggaagataaatggcgcttcttgactttgaatgctgaccttccttatcgggtaaacaaagttggggaccnnnnnnnnnnnaaaaggcttgattcaagcgggctgaaatgaccctttgcctctggaaacagaagttcagggaagggcagggcagggtctgggggcctgccccgcccaccaaaatcttttttggggggcttggggaaattgcccttcccggggcgggtttggtttttaaaaggccttctctccccccggggccccagggggacatatctatattggttccccggggtgggccca

SEQ ID NO: 133426 - DNA, 813 bp, Homo Sapiens
  misc_feature (415)..(424): n is a, c, g, or t
aaagatcataatgctatcatttattgaagaaagaaagcaaaaaaaactaacaattgtgatgggggaggagagacagcttggcaacattccttttaaagttaagttagcataaagaaaacaatatttagtaaatgaaatagattttcaaggtaggaaaagtagtactcaagaatgtatttttggatacaaaaattcagttacacaatcagtagcattcaaaattagttatgagtatttatacaattacaaaaatggattcatgttttaacaacgtattttaaaagctcaaacattttaaaacaggcacaatattctaaaggcatatgcattcaccatgggcttttgaatgtcctcactcccaacttcacaatcaaaatctacagaagcggcaaaagatcagagttcagagggctannnnnnnnnnccctttccttacttaaggttgcaaacacattgacagaggcaaaataaacacgtttcatagcagaaagaccaaaaaattgaatgtaaaccatagctctcccttgggagattacacaaatacaaggttcatctgtacttagaacaaggctcataacttcttgtagcatggacattcaacaggcacagagcaacaacattcacccaaataccagctgcaatttgtcctttaaggatgcctcacaaggatattatgtccaggtagctagtccatttatatcggggaccagttgtccttttgttgtttgtggctgtttattaaatgtagtggcacaactttgttgtgaatatgtaccatcatttgctacaatctagacagatcatcctgtctac

SEQ ID NO: 133427 - DNA, 1020 bp, Homo Sapiens
  misc_feature (584)..(584): n is a, c, g, or t
  misc_feature (672)..(672): n is a, c, g, or t
  misc_feature (676)..(676): n is a, c, g, or t
  misc_feature (702)..(702): n is a, c, g, or t
  misc_feature (720)..(720): n is a, c, g, or t
  misc_feature (723)..(723): n is a, c, g, or t
  misc_feature (729)..(729): n is a, c, g, or t
  misc_feature (793)..(793): n is a, c, g, or t
  misc_feature (796)..(796): n is a, c, g, or t
  misc_feature (813)..(814): n is a, c, g, or t
  misc_feature (826)..(827): n is a, c, g, or t
  misc_feature (834)..(834): n is a, c, g, or t
  misc_feature (843)..(843): n is a, c, g, or t
  misc_feature (873)..(873): n is a, c, g, or t
  misc_feature (896)..(896): n is a, c, g, or t
  misc_feature (909)..(909): n is a, c, g, or t
  misc_feature (919)..(920): n is a, c, g, or t
  misc_feature (937)..(937): n is a, c, g, or t
  misc_feature (975)..(975): n is a, c, g, or t
  misc_feature (994)..(994): n is a, c, g, or t
gttgcatagcttgaacatttttatattgattaaattgtttttcagtagaatcactgacagaacaggtcagaatgaaaaacattccaaatatacagaaaaaagattactgctcagttaaggtccttttccaaataacttcacacaaatcctttggttgctccaaacagaatgagagctatgagaatggtggcccagcccggccatcagactcccaagcatttggtccccggtctgaggtcacagaatctttgccacctttaccgagactgctctcagctgaggacaacaggcaagaaccagaaggtggccatccttgtctttgcattcaacagcgccaaagtctgagggacaaactcttggtgacaagtctcagaaatgtgacatgtctctgtagcagccataaagctttggtttaggattaattttgattctctggaatatcagcctcccagaatggcaaatcttgacctcatctagtccagcccaaccttccctttttacatataagaaaactcagggttgagggcaacatatcttgcctaagtccaggtctagacccaagccctgcctctcacaatctttcnccatttctgctgcctctttgttgcctctggaggatgaagagggctttttcgcttgccctcaaatgctcatttctgaggtacccccccnaganaaggtcaggtagcaacacagcagcantagtatccacactaatcntanagcatnatttaatatgaattactgtggtagggaacgaaagacactgtgtgatccaaacactgcccctaancanagttgcatttttttccnntctggaagtcannacacaangtgcaggtncctagagggtgacacaagcagggatctctncatctgattaattgggacatcancatgtttaattanatctttcagnnaagtgcagacataggangtaatgtcttctcattatatgcagcaaattcccaaganatactatctccgacgagcncgtgcgattcttggctcagggcaatc

SEQ ID NO: 133428 - DNA, 123 bp, Homo Sapiens
  misc_feature (50)..(50): n is a, c, g, or t
ggcacgaggaagaaaaataggtttaatattatttaaagtaatacagcatnggaagaaaaacttccaacttcttatcatgactcaagcaaaacagattccaattctggcaaaggctataaccac

SEQ ID NO: 133429 - DNA, 954 bp, Homo Sapiens
  misc_feature (747)..(747): n is a, c, g, or t
tttaagcaatcatgttttattatacaactctatgaacagaaaatgaacagaaatacacaatatacttacctgtacatgtgaacctactttttaagctacagatatttattatagttcatactgactttaattttacagttcataactatgtataaccttattgcattaagggcaaattctacatggggagattcacaggcagaccacattaggcattaccagtacattcaaaaactgtacctcatatatgtatgtatcttccctgaacctgtaaatttggacttctttacagcttaagctcatttgctatttttgatgcaatgttcttaaaggcaatagatgtcccagatattcgcttgaagcgaaccccattaagtgacagtcgtggcaacttgcagacttccatctcccactgcacgaggctatcctgtctagcgtctccatggacacagaaaagcaaaaatctctctttttgctcataatcacagttatttgcatctaacacttttcggatttctctcatcatgtcattagggtccattgaactagtggtcttcatactccatgtgaaccgcaaagaacgcggcttagaatctttaccctcttccttgtctctttcttttggttcccctgatgtacttcttgaggtgtcggttctgccaactgtcgccttcacttggatccctgcgaacaaatttggatgtgattttgcttattataccagttgacgttccccttctggcattngcaaatgcacccgtttcatgggatggtgaagcaggtggcccattataagcaacgctgcgtcgctcccggagctgttcaccatggaaagtgcttcggcttgagctccctcggggaaaacgggtccggtctggagtcgcagtactaatactgtgagcagatggggaagcagcaggcactctctgggttgtaccaggccggtaagcttca

SEQ ID NO: 133430 - DNA, 721 bp, Homo Sapiens
  misc_feature (107)..(115): n is a, c, g, or t
  misc_feature (521)..(580): n is a, c, g, or t
ctatttttgccagactcttgatactcttaaaacttgtttgtggtcagcacaacaaggaacaaaacaaagctttgaaaaaactttaacatgaaaaaacgcactgacannnnnnnnnatttaatatagcctggactttacctgcgtatgcacatgctcagaattgtctactaggctgactatgtatcacctcttcagcttggatccaattgtggatttatttacaaacatcaaatgccttcaagccaatcctttttgctgtatgttttgcagcctactgtagtagatacgcaacagataatgtggcagcctactgtagtagatacgcaacagataatgtgggaaaaaaagagataagaggaggaagctaataagagactgtcaagattgtataccttcttggtttcttttaagaatttgttgcctttctactattacagcaaagctagcagttttgttactgactgcctataatcacttaatctcaggtgaacgcatcgcttgccaaactgttggaatgctannnnnnnnnnnnnnnnnnnnnnnnnnnnnnnnnnnnnnnnnnnnnnnnnnnnnnnnnnnngagagggaaatttggaaacgggacatacacaaaagttacacacccacattccctttttatcatgacatacaagaagaaactagcagagctaagaatggagtgaagaaaggcagtatggcaggcaccctcgttccgaattct

SEQ ID NO: 133431 - DNA, 628 bp, Homo Sapiens
gagtagaacaagggcagtaacagatggataaaaccccagctgctcaaaagcctgcacatatgtccacctttaaagtgctaataatacttagataagcttctagcatgcactgtcccaagaaaaggacggatcctttggcattaaaaaagcaaaagacaaaactgtaaaggaaacaaaccaattctgcactgtaaaactaatttcaaaactatatagttatcaggggaaaggacaatcattatgttttggggatggagaggttctgtttggaaatccactcttcagatttcttaaacttacatttacattttaatgaggctctagcattgcaaaattatccagaaaggaaataaacatttggcttcctaagtagactgagttctaaaaagggtcatttatctttggtggcttacggtaccctttattatttatctgttgaatgagggaacacagttaagaaaagaacatgcaggatctaaatatatggtggcataggttgattagaatacaagatgtgtgctgggagaaatctcaggaaaaaagacctggtaacagaggctcttaaagtcaagcaaaggaatgcatatgcaattctatttgggatgccaaactttgggctctttttgag

SEQ ID NO: 133432 - DNA, 513 bp, Homo Sapiens
ttttattgttaacaattataaacatttattaagcaccaagaatatactgtggtggttgctatatgaaaacataattaccaatatagtatccctgccattgagcttacaatctaaaacgaaatacaaggctatgagcctatctaaaaacttccttaacttagaaatggctactttggcaaatgagtgaggcaaaatgacctattattcaggtgcagtgctaataaggctttgaatatcatccaaagaatgttttacttgtacccattgttcctgattatgttacacttgctaagaaaaacagtacttagaattttggcatgaacaatgaattatttcaaattgtcttgtagccatttctaagttaaggaagtttttagataggctcatagccttgtatttcgttttagattgtaagctcaatggcagggatactatattggtaattatgttttcatatagcaaccaccacagtatattcttggtgcttaataaatgtttataattgttaacaat

SEQ ID NO: 133433 - DNA, 1168 bp, Homo Sapiens
gaccaatcctgccggtaggctgaacagaccatcctacggtcgtggttacggtgggaagtgtagaagacggcctgtctttcaggctataaggcccgtaagatatacaaaagcctaatcttatacaataagtgggatctggaagcctgcgtggatgcggccctgctggccacccagatggaccgcgtgaacgccatccccttcacctacgagcagctggacgtcctaaagcataaactggatgagctttacccacaaggttaccctgagtctgtgatccagcacctgggctacctcttcctcaagatgagccctgaggacattcgcaagtggaatgtgacgtccttggagaccctgaaggctttgcttgaagtcaacaaagggcacgaaatgagtcctcaggtggccaccctgatcgaccgctttgtgaagggaaggggccagctagacaaagacaccctagacaccctgaccgccttctaccctgggtacctgtgctccctcagccccgaggagctgagctccgtgccccccagcagcatctgggcggtcaggccccaggacctggacacgtgtgacccaaggcagctggacgtcctctatcccaaggcccgccttgctttccagaacatgaacgggtccgaatacttcgtgaagatccagtccttcctgggtggggcccccacggaggatttgaaggcgctcagtcagcagaatgtgagcatggacttggccacgttcatgaagctgcggacggatgcggtgctgccgttgactgtggctgaggtgcagaaacttctgggaccccacgtggagggcctgaaggcggaggagcggcaccgcccggtgcgggactggatcctacggcagcggcaggacgacctggacacgctggggctggggctacagggcggcatccccaacgggtacctggtcctagacctcagcgtgcaagaggccctctcggggacgccctgcctcctaggacctggacctgttctcaccgtcctggcactgctcctagcctccaccctggcctgagggccccactcccttgctggccccagccctgctggggatccccgcctggccaggagcaggcacgggtggtccccgttccaccccaagagaactcgcgctcagtaaacgggaacatgccccctgcagacac

SEQ ID NO: 133434 - DNA, 669 bp, Homo Sapiens
gcccatgaggctcatgaagcagagggtatcccagtcatagggagcagaaagagcaagtgggttaaggaagcctgtgggggacctggtggatggagttgaccaacatcgctgggtggctacggccctccttaggaagcccagaaggacctttattattaaaataatcattttgaaccctgctctatcccctgccctcttccagccccacccctccctggtcttgaaagaagactaatcagtgggcacaccaagggccctgaggggcagggagatgccaccatgcttctctgtcaccgtaagaaggctgaccagccacgcccacctcctctgtctgactgagttccttcctgtggccacagggaggggctggtccttcccctcggtgctggctctctgtcacaatgcctcaaaagacatggaacccaggcctacaaccgtcccaactgctaattcttttcctttcattttgctttctgaaagcagtttgttatactattcataacattgtagagtttaatttcatgtcattttggatcttatataaaaatgtgaggatttggatttttaaaaagaatgactccattttaggtagccacttttgatgttaatatatagtgagtcccaatgtatgctttagaagtaaagacattgaccgtcacagaccactgc

SEQ ID NO: 133435 - DNA, 570 bp, Homo Sapiens
taatgagactgtgctattcactgttcttttaggaatctctggctccccacaaacactattttgtgaagacatgctccagaccactgtgtatgccaatatctctttctccccagagcactgctgacacccctacacaaattaatgtccccatctctactgatacatctgataggtacaaacgatgtgtccgtgatgactggtggggctcatgtaatccccacctaagaaaagtagaaagtgcaactttatcttttaggttaataagtgctgagagatggaggtttttccttctcattttgatggagatgcctagaaaacctcgcctgacactctttgtccaacgcaggatagagaacatagcaacagaaagggtgaggcaaaaggcatggctggtgaagaggcactgcatgttatcaggatgtggggacattaatttgtgtaggggtgtcagcagtgctctggggagaaagagatattggcatacacagtggtctggagcatgtcttcacaaaatagtgtttgtggggagccagagattcctaaaagaacagtgaatagcacagtctcatt

SEQ ID NO: 133436 - DNA, 2092 bp, Homo Sapiens
ggcagtaactataacggtcctaaggtagcgaggcctgggtggcgaattcggcacgaggctccatgttgcctgcccctgaagacctttgagttcagtctacacctaagcaggtagacatccgcgaggtcagatgctttccaacatgacacctgaacatcttcctttatgcaacacccaaacatcttggcatccccaccccaggaagtgcggggaggaggttatgatccctgggcgcttcggcagaatggagagctgaggtgtccctcccctgctagtcacctaccaggtgtctgagcagctgcatgctccctggctcaagtgggcactgtaccttttgcctgcctttttgttccctatctccactccctgaggccacttagcctgagacatgatgcaagagctgcaggccggggggctcagtgccatggaagctactccaagttgcattgcctcccgcgcccagatcctgctttccatttcgagaacataaattgattgcccagcccctccagtacaatcccactggaagaaaaggcaatggcgggcttcagccagacctgctgagacctaggttgccacggtaacagccaaagacatcaagccaagtgctgggtcaagtgtctcatcatacttggcactgttgctggggtgacggcagaattcagaacttccaatttcagtgacgccaagcttgatgtgtttctgttattgttttgaagaaggtagctcttgtcggaggacttgggagaaggatggggtcttaggaaggaggtgacagcacttgcatggtcacttgagcccacacacacgctcaaccccaagtcctttatgctttgtcacagtgaagatgagacctctgacgtccaagccttgttcctgtgctgcatcacccactcagccttccaaagggaacaggaacaaatttccccagcaccactgtttgggtcccgcttttcctatcttctgctgcccctgagcacatccaagcagacagggaaagaggagtcagacatggcccagtcacatcctgagctgctcctggctgataaccacgatggagcccgtgttagtcctgccatctggcactgcactgagtgtggcacaggcaccgtcctgttgatctcacaacacagttctcaagttaggcacgttcttggctccgttagaccaggtgaggcaaactggcggccacagcagcaggtagatgtccatctgccctggtgtcaaatccagctcagcaagtgcatggacgcccagtctttcaaacccaaagggggttacgtccaggtggctgagttcccactacacctggtgctagagtgccatctgggcaccattgctccagacgtgttccgaaccgcttacccagccccacaggcgctcgcaagtggaaggaacagcaggccacgggaggctgggccaaagccccaagggcccagggataccacttgcgcagcaagccgtgcccagcggggctcagcctgccttcagcgcgaactggtgtcccatcccaaccactggaccccgaaccttcacgcccctctctcaacgctcagcgtcgacgaccaaaggcgagagccaaaaaaacgcaacggccgctagagccatacaccccgaagataccagcggcacccgcaaggcggaccgccacacacgcctgcccccgccccaacacctacgcaacggagccaaagccccagacaacgagatagcaatccacaacacggcacccagccacacaccagacccgaataagcacgaccatgactgcatgccacacaacacaacaaacccaacgccgaccacatacacactagcccaccacacctaggccaaacacccgggggcacaccagaaatgggacaggaacaggccaccgcgacgcccacagggcccacaaggacacacgacgacaaccgcacggaacgccaagcgcgcacacccaggacagagaccacgcccccaaaggacccccaaccagcacgcacgcatatacgccacgagcaagcaacaagcaacagcccacacatgaaacagaaccacaaccacccgaaaaggtgcacagcacgagagaccagacgcacgaacgaaa

SEQ ID NO: 133437 - DNA, 1272 bp, Homo Sapiens
gcaggctggtacaggtccggattcccgggatatcgtcgacccacgcgtccggtgtaggtggtatcattctctttctcactcagtgtggcccagagttgctcagaattggagcagagcctgagacgtatctgcagatcctgtcatcagctggcaagtccaggagactgtgtcatttagagactgtgttgttagttatccctcaacatcttctaaggtggcaggaaataatattggaaataacattttaaagtaaaaattttaaagtttaaagaagagttttgccacttaaacaggggagctttgtctggaaaatacactgagttgaaacacttcatccttggaaggattatataagatgaacagttgtgataaatgtgtagattagagggatgtgaatgggcagttagtccagtgccctcatttaagaggccaagatcctgattcagaggaggcatcctttgcccagagctgcttagctaatctgaccaaatgttgggaaaaatgtctcacctaacccactattccttaattatggattttgtgaaaaacaatagaacatgttaatgagtaatttatattagttcgatgtattacaattttttagctttaaattacagttttcttataatgttgaaatgttttagaatcctttgaatctaagtatttgtttcctaaatgaaacatttgtacaacatttgatgtttttacttatgaaatattctcctccccaagaaaatttaaactttttctctctatttaaaagctaagaaatgttttaaaggaaaaatgaaattatcttcctttagcttatttttaaggtaaaacagctttttactctgttattgtggtaatggacagaatattacatacaaaaatattctgggagagctttttcctagttggttttaaatcattgtgccacctgaaaggtttttagattttataggagctaatttgtccaccagcattaatgtaacacagtgtagttatgaaaattttttgaaggccaggaagtggacacgaagtgatttttgtaacctgagcagttaatgaatgtgccaacattttctaggaagggacagcaagactattttgctctgtagttaaaatactggctggcttttgatgtcttcatgcttaattgtgatcactttcttgcactgtgatgtttttacgtgaatatgttgaagtagaagtctaccatattattttataaaatgttttctgtatggcaataaactgaaaacatggatcaacccttcttttgaaaat

SEQ ID NO: 133438 - DNA, 1326 bp, Homo Sapiens
tgccggcacgtgagaggagagcctgccctgttcgcttctttgcgttatcctgggggtctgagtgtgggcgtgcggcttatcttcacaaagcggttggttgtctttctattaggcttactggaccggatggctgcatcctgtaacttgtccgtctcagccgatggaaggtatcacggtccttgtgtccttcttacgtctaggcctgtaggatggtgtgcacagagttggcagaactggtgttactccgtaccctaatcctggggggacccctctacgttcttctactccacttaggtgggagcattccagagacaagagaatggtgaccagatcagcagtgtcatctgaacgcctgctttctttcatcttacttcaacttgccagccctccagtgttcttgccttttagtgattaggtatttgaagaactcatacacagaccatgcgatggctgtggaggggatctggtaaattactctggcctgcacccgtcggaaataggcggtcaccccacctacttgatataccgtcctgaaggcactagccatgcctgtgatatgtcctgtaatgtgtgagttcaaagccaaggactcctgggtgttgagcagtgttttgcaaacgtccagtggggttgtggctgcggcaggctacagctcctgcgcaagctccagagaggacgtgggagcttgggttgtaccgtctctgggggttaaagtgctcctgcaggaattcataggtcatgaagtgaatggcttggaaaggaacgttcatggtcagctgggtggtgtagctgcggtaaaaggccccggccccttcattttgccacactgcccgtacacagtctgtcacccggtggtatggtgagttgtacatctgcatcctctgcttgaccacttccgcagggttcatggctgcatcatgaagtaatgttgccacacacccggccgcaccattggcaatatggctattgcccccagggtggattacatcactcaatgtcttttttaacttttcgtagcaggcaaaataaagggcgtgggcaggccctgcgcctgttgctgtgacgttcagccccctcatgggcctccataggccctccgttcttataatcctccagagggcctccaacacattgcgatagcgggcagctgggtcaggctgtagactctgcatccgggtcttgacgcagtcgatggggtacatcacgcagtgctccaggatccctgccacggcgcctgccaccatgtgcgtggtgacagtggctccagccggcagcgcctcgtagtccgggccggagtccggatcttgtcgtaccgggggcggccgc

SEQ ID NO: 133439 - DNA, 1337 bp, Homo Sapiens
  misc_feature (589)..(589): n is a, c, g, or t
ttttttttaatttaaaggctttttattaggaaccaggggaatgagctgcttatccctctataacagtctagagcaggtcatcaggcccaggatggagagaggttatcaaaggtgctgtggtgtgctttgctgcacgtgcttagggcctggaaggaaaggtggtggcaacagaggttggcaggaactggtgttagtcaaaacaccaaaatcctgggggagagcccctctaccttccttctaactccacttgaggtgggagcattccaggagacagagaatgtgaccaggatgcagcagtgtcatctgaacccctggcttcgttcagtgctacttcacttgccagccctccactcttcttgccttttagtgattaggtatttgaagaactcatacacagaccatgcgatggctgtggaggggatctggtaaattactctggcctgcacccctcggaaataggcggtcaccccacctacttgatataccgtcctgaaggcactagccatgcctgtgatatgtcctgtaatgtgtgagttcaaagccaaggactcctgggtgttgagcagtgttttgcaaacgtccagtgggngttgtggctgcggcagctacagctcctgcgcaagctccagagaggacgtgggagcttgggttgtaccgtctctgggggtttaagtgctcctgcaggaattcataggtcatgaagtgaatggcttggaaaggaacgttcatggtcagctgggtggtgtagctgcggtaaaaggccccggccccttcattttgccacactgcccgtacacagtctgtcacccggtggtatggtgagttgtacatctgcatcctctgcttgaccacttccgcagggttcatggctgcatcatgaagtaatgttgccacacacccggccgcacctgcaaacaagaaaacaactgccacatgtaaggccaagagagctgaccaactcattgaggtcccccagtgaaggggagtggctgtgctacactacagcggggaaaagtaacgttaagagctagtccaaaagatggggacccactgctcctaaactcctgtttaagaaggtaaagtatctgttcccaccaactttgtaaggtcattaatgtattccacatccatgataggaaggccagctcaagtcttatcaataaagatcattctgagaataaatgcagctcacaccccagacaggaagcagatacactgctgcctagggatgccagcacatcacctgccaccagtggagggagatacgggggccaggtggtcagatctcacaggacctcaccacagaatcccacctcagtccaaccgcatcacccgtt

SEQ ID NO: 133440 - DNA, 953 bp, Homo Sapiens
  misc_feature (170)..(170): n is a, c, g, or t
  misc_feature (258)..(258): n is a, c, g, or t
  misc_feature (308)..(308): n is a, c, g, or t
  misc_feature (321)..(321): n is a, c, g, or t
attaagcttttaggaccaggatggttctatcctcttacatttgacagtatcagccaggtgagggagttccaggtgttggttgcttgtgcagtgctaggcctgaggaaagtgtggaacagagttggcaggattggtgtagtcaaacacccaaatcgtggggagagcccctntacttccctttaactccacgtgaggtgggagcatccagggagacagagaatgtgaccaggatgcaccagtgtcatctgaacccctgcnttcgttcagtgctacttcacgtgccagccctccactcttcttgcttttangtgattaggtatntggagaactcatacacagaccatgcgatggctgtggaggggatctggtaaattactctggcctgcacccctcggaaataggcggtcaccccacctacttgatataccgtcctgaaggcactagccatgcctgtgatatgtcctgtaatgtgtgagttcaaagccaaggactcctgggtgttgagcagtgttttgcaaacgtccagtggggttgtggctgcggcagctacagctcctgcgcaagctccagagaggacgtgggagcttgggttgtaccgtctctgggggttaaagtgctcctgcaggaattcataggtcatgaagtgaatggcttggaaaggaacgttcatggtcagctgggtggtgtagctgcggtaaaaggccccggccccttcattttgccacactgcccgtacacagtctgtcacccggtggtatggtgagttgtacatctgcatcctctgcttgaccactagtagtgccatcaacgaggaaggaaatggtgacagcagccaaccggtgatggagagtatccagattcagagccccaagtcagcagatcagccttccgcagggttcatggctgcatcatgaagtaatgttgccacacacccggccgcacctgcaaacaag

SEQ ID NO: 133441 - DNA, 597 bp, Homo Sapiens
tcactagaggatccgtacagcatcctaaccaggatttaggacatcatgaaaggtctataatgacggatctatactacctcagtcagacagatggagcaggtgattggcgggaaaaagaggccaaagatctgccagaactggttcagcggaggataacatatcttcagaatcccaaggactgcagcaaagccaaaaagctggtgtgtaatatcaacaaaggctgtggctatggctgtcagctccatcatgtggtctactgcttcatgattgcatatggcacccagcgaacactcatcttggaatctcagaattggcgctatgctactggtggatgggagactgtatttaggcctgtaagtgagacatgcacagacagatctggcatctccactggacactggtcaggtgaagtgaaggacaaaaatgttcaagtggtcgagcttcccattgtagacagtcttcatccccgtcctccatatttacccttggctgtaccagaagacctcgcagatcgacttgtacgagtgcatggtgaccctgcagtgtggtgggtgtctcagtttgtcaaatacttgatccgcccacagccttggctag

SEQ ID NO: 133442 - DNA, 1083 bp, Homo Sapiens
  misc_feature (59)..(76): n is a, c, g, or t
  misc_feature (751)..(751): n is a, c, g, or t
  misc_feature (825)..(825): n is a, c, g, or t
  misc_feature (832)..(832): n is a, c, g, or t
  misc_feature (987)..(987): n is a, c, g, or t
gtgccaagctaaaattaaccctcaactaaagggaataagcttgcggccgctgctcaggnnnnnnnnnnnnnnnnnnactttgaacattagcattaagttggttaccgtacacatccaaaggcccagcatctcagaaaaatcattaggcggcacacctgtaccagagtctcacaagaataaaatatacaatgctacattgagtggttaaaaatacacaaaaaagtagttttaacaatctataaattttttatacttaaaatcatgattgagttgaaataaaaaagtgcatttcaattgctaaaaaaataatatcggtatagttaacacaagggggaaatcagtacattgagggatctgacaggatgctggaaaaaatgactcagggaagccgggcagcatgggctcctttggagattcaggagcggagctcagttccacctcactgcagttccctggggccaagcagccctcctctccccagtatctttcccatcttaagagatcctgtcctacctacctgtcacctccccaacccaaagactcctctaaacttctttgcagcatgacagctgcctgccctacactgagtctacttgaccttcaattgcgtctccgcagagaggtaggagagggacactgccccattctggacttgacataagtaccccagccacatggccttcatccttatgacctagcaggcagaacagggaccaagcagcttctattttgtcaaactccttttggacanatattcaacattcaacaacaagcttttgtaaacctaaacgctaacaagtcatggcaagcaactggttttcttangaatgangaaatgcagtgtctcatactgtggggaaacaaataaacaacagttgactggcactgctgctaacatcaagctcatttgtttttgtcagtgttgggtacagtaaactcttgtgctggatgccagtcaactggtgggggtagggcacgaaatcatanagcatcagtgtatgccccgtctcagggaattatgccttcctccaagtgtacgctgttttgggagggcgaaacaacaatcagcagactgtcaggagc

SEQ ID NO: 133443 - DNA, 812 bp, Homo Sapiens
gatcaacaacttaagataacttttttgggggggcaaataatactgcagcaaatcaatttgataaatgactctgaaagtattttacggaatagtttttgtttcatggtaaatgtttgcttgcaaggatgtatgggcattttgatgttgctgattactcacagggaggtgctaagtataggacgagagcttgctttcaatctgggctggaccgcctttttccaaagcaatttggttaaaccatgtgaagtgcgttacaaacacatatttcttgaagaggaaattcttgtactggaaaacgaccatgctgtatgcactcaggtcttttcaactaaatagaactcccaggctggccaccttgggagctggaacaacatctcaactaatacacatttaaggaattgatggctgggtgtaatactgaatgatgaatgaaaggatcatctttagccaaggctggacgtctgaatcaccagggaagcaccctcaaaccctcttttgagtcccctctctgctggcccaggcagcatccccctgcaaagagctgaggtatgtttctactccaaagctcctcggtgactcggctgcacatccctggttaacacccaccggggaagaatcccaccctcatttttacgtaggtagactcagcatcaaggctgagcaatcataacatgtatagtccagacagggcaatgtggtaggtgaaataggcattattaggaatcacaccaggtgttaactgggactgtcccaactgtggcatgtgatcacctttcagtacctgagatcttttgttgttgttcttaacatgg

SEQ ID NO: 133444 - DNA, 504 bp, Homo Sapiens
ttttacttcaacaagcatttattaaacgcctactatgtgctcagcactatactaggcactcgggggtgcagagatacaaatgtaaaagttattattcctgccctcaaggagcttacaatttaattttggaaataaatacaaatatgaaactgtaacacagagtgctagaaaataattacaaagcaacatattagtaagtacatggaccacagtacaaactcaaaagataagtgctgaggcagcacagaatgagggaggtcatcgcatgaggtgatgtcaatcagggagagctcagtcagaagatataaaggaagaaaggctttgaagggagtgatgaacatgagctgggaccaaagagcaatctaagcaaaaagaatagcatgagaaaggcacagaggcaagagcttgtaagacatcagtagaaggctgtaggaagtttgaatctgttgaatcaaggtgaatatgctagagagtaatgaaggctgatgaatattaggcatagag

SEQ ID NO: 133445 - DNA, 1004 bp, Homo Sapiens
gattacgggtgtgagccaccacacccggcctctcactggctgtttcaggtgaaccaaatcccatggccccaaaaagtggccagagtgcttcagatcactcagcaaacctttgagttgctgaaaagtttacttttgagttttaaactgtactttgaaaactatattgtgaactgtgttgacatgaggaaaggctgggctccctgaaaacatccagttccacagcagggcgggcccaagcccagccaatccccaggcaatgcagggcagggatcccacctggtataagtacgggcagagggcagagccaggctgtatcgaggggcggcgctgggaccctcctcgcccagagttcctactcatccccagcacagaagtgctctgtagggccagctgaggacaccccggttcactgagggtggcccacagtaagtcgccgtctggcagtaagttagctctgcaggtgtggaccccaagaccacacacagcctttctcaggtgcaggtcctgccaagcctcacttcgcagtggtgacaggcaaccccgtcagggcagggagcttccaaaggccagtccgagtccatgccaggcgtccactaaatctgcctctccctctccagcgagcaggtgcagccctcaactcctgcaggcctggggagcggagacagggcctgtaggctcggacacgacccggtcctgattttaacagtagacttgagaagccaggctcagcagacaggctgctggaggatccacccgctgtctcccgcagcggccccactgaagcggcagaaacacacagaagcaccaaatctgtcactctcttcccgtaggaagtccccagaggtggccctccggaggatggtcctgttggctgaagatatgaccacacctgtgcctgcccagggccaccttcagcttggcaacaggaactccgcacactggtaccctgcgaccccggcgcggggccgtcgccggctctcggcccaacttcagctgcggccgca

SEQ ID NO: 133446 - DNA, 502 bp, Homo Sapiens
  misc_feature (217)..(229): n is a, c, g, or t
cagaagaagcaagagttctcttttaataggtgctatatctagtcaattctctgctgctcccttcttcctgccccaagttaaaaatattgccctgtaagttttcctgatgtactgtgtgggaagcacatggttaagttagttgccaaagggcaattaacaagggtattgcctaattaaacaagggaaaagaaaaatcactgtggtctgtggtctctgnnnnnnnnnnnnngagtaagtgggatctgtgtgaggagctggtgtgcagtgttcttggagtaggactgtccccagatggagaaaagccggccaggctgtgccagcctctgcagcctgttttcatctctacagctgtttcgtctcgccagcagagcccagggatggtaccaagtacactgtgagagctgatactggagttggcagatgccctggggcaggcaccatgcagaacacacagaagtggggttagtgaaaaggtcccttcgaattccatttcgtttccctt

SEQ ID NO: 133447 - DNA, 685 bp, Homo Sapiens
  misc_feature (110)..(152): n is a, c, g, or t
ttctctttaatcaaatgaaaacaaaaagagactataaaaatgaagatttttcactgaaactgaattgtcaatctgcgaagataattttttgttgtcaaaaacttcttttnnnnnnnnnnnnnnnnnnnnnnnnnnnnnnnnnnnnnnnnnnngactaatcttatgtaccacatctggaagagaacagttacaaagagtttggtctcaaggtatatttctactcagcagattaacttttgcaaaattccttaagaatgtattagtatcagaactgtgaaaaatgggagtttcagatgtacacttattgataatcttgctcagttttatcctgcttgttctcccagaattttttgtaaactcaactcctctgtttacagagttttagtcacttttaacaattttttaaaattcagtttgtagactccatttgttaagggaatcaatatcagaagtaatactaaaatgttataataggaaaagggatccactaatatagcttatggttattagagctgggctacctttaatcatggaataatcttatgtataggtgtaagaatgactcactatatgaatacatactaatcatattacaaacattttgcatcccttttgtgacctagacagacatttaaattgtgttgcaattctgctttcttgttttacaaaaagctgtttcaggaag

SEQ ID NO: 133448 - DNA, 153 bp, Homo Sapiens
atctaattgggttaatggtatctgcagagaagtagcagctcttatttttagcttatgtggtggatctcctactgggaggtctgatcttctcagtagccaggtcagatggcaaccatgcatggaaggtggagaagtgaactaaagcctcgtgcc

SEQ ID NO: 133449 - DNA, 1024 bp, Homo Sapiens
  misc_feature (61)..(61): n is a, c, g, or t
  misc_feature (123)..(460): n is a, c, g, or t
  misc_feature (503)..(524): n is a, c, g, or t
  misc_feature (530)..(647): n is a, c, g, or t
ttttatctgtcaggggcgacctatgaaaacaccacacgcgcttttaacgtctggcctttgntgctttgctcacatgtcttcatcgtatcccctgatctgtgataccgtatacccccctgtgannnnnnnnnnnnnnnnnnnnnnnnnnnnnnnnnnnnnnnnnnnnnnnnnnnnnnnnnnnnnnnnnnnnnnnnnnnnnnnnnnnnnnnnnnnnnnnnnnnnnnnnnnnnnnnnnnnnnnnnnnnnnnnnnnnnnnnnnnnnnnnnnnnnnnnnnnnnnnnnnnnnnnnnnnnnnnnnnnnnnnnnnnnnnnnnnnnnnnnnnnnnnnnnnnnnnnnnnnnnnnnnnnnnnnnnnnnnnnnnnnnnnnnnnnnnnnnnnnnnnnnnnnnnnnnnnnnnnnnnnnnnnnnnnnnnnnnnnnnnnnnnnnnnnnnnnnnnnnnnnnnnnnnnnnnnnnnnnnaagaattcggcacgagggttggagcggccgcggctgtaggccnnnnnnnnnnnnnnnnnnnnnngtatcnnnnnnnnnnnnnnnnnnnnnnnnnnnnnnnnnnnnnnnnnnnnnnnnnnnnnnnnnnnnnnnnnnnnnnnnnnnnnnnnnnnnnnnnnnnnnnnnnnnnnnnnnnnnnnnnnnnnnnttcaaaagctcaaatactgcttttgaagacagcatgagtttatggatgttctgtctcctttcagcccataaagaagtctgaggcttttcttttgctctggaacatccaactaattgctttatttccatgtagaagtagaggaatcatccctccacttaaatttcctctcataatgcaatttggcaaattaaatctctaaatctcagttttttaacccatagtatgggaacggtaatatctgtttaccatgtttcctgagtactaaatatggaaatggtttttgaaaacaggaaaatgctatgtaaatgcaataatctgtttaaactattcattcttaattactgtatgtaagtagataaatattaaatgtttttgtt

SEQ ID NO: 133450 - DNA, 737 bp, Homo Sapiens
  misc_feature (307)..(366): n is a, c, g, or t
ggaatgtgccacactatacaaaataagactgacttctccctgtcccaaattagaaacctgtctctctctgccccgttcgttaaaactccgaaccaaagcacaaagttaaaagtcaagcagtgcaaataaattttagactgccttcctcccctgattccgtactactacccttacccaacctatcctccacaagccaaatttcgtgagcacaaaatttagacagcaaagggaagcatcctatcatatggaacctaactaaggcagctgccagaaatttctattcctgcccattatattataataatannnnnnnnnnnnnnnnnnnnnnnnnnnnnnnnnnnnnnnnnnnnnnnnnnnnnnnnnnnncctgatttcatttctccagctgccggatgcgaatgagcttgctgaatggcaccttcttacctacatttctccttcctcttgagtgtcaggaatgctacgaatgcagtgcagagcatgggcagtgcacactccatcagaaggcacacttctgagagggaggtgaattaggcaatacctcttgtgaaatacctgaggcttttcttccctcttttactagaaagtttcttgattcagctactccaatctccacatcttgagaactaagctgagctgttcttccttactccaataacacaacagatttgctgaccacgtctgtaatctaaagcacggaagtgtaccataattccaggatgtccagagtaagctcg

SEQ ID NO: 133451 - DNA, 1458 bp, Homo Sapiens
  misc_feature (115)..(115): n is a, c, g, or t
ggataccaaataagtaaaccagccagatgaagatacacacaggtgaggtctggacgggtcctgggcaaatgcttggagcttctgtcccccatggagtgggggtgcgccaccctcnttggcacatggacaaagttctcggttccccttcccttccacattgttcagctttttcagaagcttccccgtgttccatgggcctttttatggagaccgtcattggataggcatggctgaagcatggcagctgtgttgagatgaaactggacaaaaagcataaggtctaaacccagcaaggcctgtctgtccagatgcttcttggcctctctgtgcagcgttcctccttccgggtatggggcagcaccctctctggaatgagggtcttatgagctacagtcagattaaagtctggtgttgagcaagtgaaatggggcaggagaaggtcacagacagagattccgttttctgaggcctgcagtgtcccaacattataacaaagggttatgggagtgatgaaccaggaactgtggacaaaaacatctacacacgtataaaatatcacagtgccctgggctgcagctggagtgtgtgggtcataattcttgcagatgaaacagaaacagcaagactgtaggtactgcccaaggtctcctagccagtcaaggctgaccaggagtccacagaccatggcacagttctgggcctgacatggaaggtgggagcatccagatcagagaccattcccactgagcggtggccaaggacggaatgacagaagaggtgattagtaaccacatatggctgtttatttgatacagggctctgtacaaaatatttacacatattctttacagaataagtaaaccacctgaaggtaattagataatgctttcttctcaatgacagggagaatcctggtgtcagcaaagttagaaaacagataaacattctccttccgaggccacaactcaagcaaatgccacttgcttcctaggatctgaaaagctgtggccttgggaccctggtcacatgcacctcctttcctcaaccccatcaattccttcagtatttacaaacaggcttgagtacttgtggaaggaggggcagctggtgccgcccactgagaggatgacaagagggccagcttgctttgggagagcactgggaatatctgccgcatcatcacctctggaagaatttcctttgccctgatgaatacaccactgtctaaattaatccatcgacatcacacttaccccacagtggggctcctgagccatggacaatgatccatccctttgagctttttttggttttaaagtgcgtagtggtggctgggcgtggtggctcacacctgtaatcccagcactttgggaggtacgagacgggcagatcacctgaggtcaggagtcccggccgtaatggccgaattcccgggcatatgtccggtaccgtcgactg

SEQ ID NO: 133452 - DNA, 533 bp, Homo Sapiens
  misc_feature (55)..(69): n is a, c, g, or t
gcccctttatggatttatttatcaaaacactcggaaacctggcctcactcaccannnnnnnnnnnnnnnaccaggacacatgtgccaggccttatgaaaggctatcaagtactttgaaggacaggaaggaatgaacacccccaggtggacgtttggtttcatttgcaggggttcagggagggttgcaggggttcagggagggctcttgtcccacaaccggggaagggagagggcagagcaaggcaataaatagaaccctgggcccagcctgctttggtacatgtggccttggcagcatctgctcccggcccttaaccatcagcaggagtcaggagggtggggcccaggcagctggtgcaggcaggccagatgtgcagcccaaggtccctccaaatagccctggagccctgcagggcacgaggtaagaagggggcagatgcagcagaccctagctgtccacgtctgagggcacagtctttttcctcgtccgaaccttcaaggagcgcgaggtgccctggggaaaggggaggcac

SEQ ID NO: 133453 - DNA, 1697 bp, Homo Sapiens
  misc_feature (60)..(74): n is a, c, g, or t
  misc_feature (550)..(550): n is a, c, g, or t
tttttgcccctttatgtatttatttatcaaaacactcgcaaacctgacctcactcaccannnnnnnnnnnnnnnaccaggacacatgtgccaggccttatgaaaggctatcaagtactttgaaggacaggaaggaatgaacacacccaggtggacgtttggtttcatttgcaggggttcagggagggttgcaggggttcagggagggctcttgtcccacaaccggggaagggagagggcagagcaaggcaataaatagaaccctgggcccagcctgctttggtacattgtgggtgcatccctgcatgtggccttggcagcatctgctcccggcccttaaccatcagcaggagtcaggagggtggggcccaggcagctggtgcaggcaggccagatgtgcagcccaaggtccctccaaatagccctggagccctgcagggcacgaggtaagaagggggcagatgcagcagaccctagctgtccacgtctgaggggcacagtctttttcctcgtcccgaaccttcagggagcgcgaggtgccctcccgcacncggtggcttcctcttgaccacacgcaggctctggctgcggattaggggcttctctcggggccgggctggcgcccgggggactgcctcagtatctgaccaacactcatcctcggtgtcgctgtcctgcaggcccccggcccggtacccaatgggtggcctccggtgggacacctggtcctccaggtagagggggtcatggtaggcaggggcaggtgcgtcagagatggagcgcaggtcctgcatggagaagctccgcagcctgccggccagcgccccctgactcttggtggcagcctgcacagcagcggaggcggcaatgttgaggccccgcttcccggaagctgagcacggtctcgtagctgcgctccttggcctgcacgatgtacgcgtcgatctccttctcatggcgggacagggacgggtggacaaacttgcggtaaagcaggctggcgcccttggtgtagggtgagagcagccacagcacgaaggccatcttgatctcatagtagaaagggaaccaggagataaaaatgtctgtaacgatctctgctgccatgaagagtgcaaaaacaatccagtacatcatccaccgcacatattcacgaatgttcttggtcttcacagccttataggaagcataagctggacacagcatcccaaacaccagcaccaccaggcgacagatcatccaggacaccatcttgccggcctttgggacgtggggaggaccccaggaagccgctcagaaggacgttcactcaagggctgggacggggggtgatcagggcagttgcgggaagcagaggggcgatccggctgtccctcggcggaggcagagcccgccgcccacggcctccgactgtgcagttcaggggacctggagaatggggagacccgaggcaaagcggccccggcggggaggaagccgacttgggagcgggcgcgccccgcggccggggcagttacagctcccacccgccctttctgccgcggagaacctggcgctcggcccttgctgctggtcccgcgctggagcgggtcgccgcggttccagcgcgccgggccaccagcaccggcctacagggcggagttcgcaactcacttgaaagttgcacggaaccgagtgctgcccaaccccagggctccg

SEQ ID NO: 133454 - DNA, 971 bp, Homo Sapiens
cgcgccttgctccaaaagaggtcccgatgaccatcagcgatgcactgcaccgtttgttactcgacaacctgaccaccgcgaccatcctgcttaatgacgacttgcgtcttgagtacatgaacccggcggcggagatgctcctggccatcagtggtcagcgcagccatgggcagttcatcagcgaattgttcaccgagtcggccgaggccttgagttcgttgcgccaggccgtggagcaggcgcacccgttcaccaagcgcgaagcgatgctcaccgccctcaccggccagaccctgacggtcgactacgccgtgaccccgattttgagcaacggcgcgaccctgctgctgctcgaagtgcacccgcgcgaccgtctgctgcgcattactaaagaagaagcgcagctgtccaaacaggaaaccagcaagatgctggtgcgcggcctggcccacgagatcaagaacccgctcggcggcattcgtggcgcggcgcaattactggcccgtgagctgccggaggaacacctcaaggactacaccaacgtcatcatcgaggaggccgaccgcctgcgtaacctggtggaccgcatgctcggctccaacaagttgccgtccctggcgatgaccaacgtgcacgaagtgctggagcgcgtgtgccagctggtcgaggccgaaagccaaggctgcatcaccctggtgcgtgactacgacccgagcattcccgacgtattgatcgaccgcgagcagatgatccaggcggtgctcaatatcgtgcgctacgccatgcaggccatcagcagccagaacgagctgcgcctgggccgcatcagcctgcgcacccgcgctctgcgccagttcaccatcggccatgtgcgccaccgcctggttaccaaggtcgagatcatcgacaacggccccggcattcctgcggaactgcaggaaaccatcttctttcccatggtcagcggccgc

SEQ ID NO: 133455 - DNA, 1040 bp, Homo Sapiens
  misc_feature (811)..(811): n is a, c, g, or t
  misc_feature (819)..(819): n is a, c, g, or t
  misc_feature (847)..(847): n is a, c, g, or t
  misc_feature (858)..(858): n is a, c, g, or t
  misc_feature (997)..(997): n is a, c, g, or t
gaggaaccccagaaatgtgtttattaagttggactcgtattgctgtgtggggtcccagtgcacgcgtgtgcacccgctacaagatccaggaaagatggcacacggcagacgacgacaggaaggacacctgctccccacccttcccgggaccccgccatgtgcaaaattcgagctggggtctgcagctgcttggagagacccagggcctcttgctccacagcctgcaaggtctgagcaggcaacggccctggggcggtgaggcccccgcctggtcactccccgcgccccccatgcaggcagtggaggggaggacacgcaggaggaccagacgctaaaggtgtaaacgggcagccgtggcactcctcacctctcaataagataaataactaaataaataaacaactaaataaagacatgaaggaatggatgcagagacgtgaacggatggcgcaggacgtccctggtgggggccacggtccccttaaggcatgtgggaggctgcaggcctctggtggtaggtgggtcagaggctggtggaggacacggacagcgtcggggaggatggcggcgggaaattgagcagctccagcaccgccacacccacactgctgcgccgggtgaacatgcaggatgcggccacccacttgttggtcctcgggttgtacttctcgatggagttgaggctggagctacgtcgttacccccacggcgtacaacatccgtccatggccaccaggtcatgcgtgctcctgcggatattcatgggcgcacgcttcccaggctccagctttggactgttctctctacgganttgagganctggtgcgtccttgcccctgcacgtacnggcacctccancacggcacgccgctgactgcgtaggtcaacatgacgcacggcgacaacgtcacctgggtcaactctcacatggcagtgtgagactgttctacgcacacaacagtccacaacgtgcatcgacaacgctccgtgtcatgangacgcgtcactccgtagggcgtacgtacatgttagcagagcgt

SEQ ID NO: 133456 - DNA, 653 bp, Homo Sapiens
cctgcgcccagcaccttggccaaaccctttggcagcttgatgatgcaggccggcatcgacctgctgccggactgggccagcgctatgctcgggcaacaccaaagctcgatgcaacgcttggtgatccgcgcgggtgtgaagcgcagcgcgcccttgctgcgctgggcgatgcgcaacggttcggtgcaacgcgcccagcggcggatggggttgatgtagacggcggcccatagctgttaaacttcgcgccctcttttacccgcaaggcgcgctccatgactcccttgaatcaggcgctgcgcgccgctctcaaccatcgccaagacctgatcaacgagttgcacgtccaaggcacagactgctaccggctgttccatggcagccaggaaggcgccggcggcttgaccattgaccgttacggcccgcaattgctggtgcaaagcttccaccagtcgctacaaaccgaggagctgctggacctgcatcaacaggtcaaccagttcatggggctggaattgcagctcgtgtacaacgaccgctcccgtggcaactcgcgcatcgaccgtgaagacacggtgtaccgcgccgagcctgcggcattggcagatcaggtcggccacgaatggggcctcaactaccgtgtacgcggccgc

SEQ ID NO: 133457 - DNA, 962 bp, Homo Sapiens
  misc_feature (81)..(81): n is a, c, g, or t
  misc_feature (86)..(86): n is a, c, g, or t
  misc_feature (170)..(170): n is a, c, g, or t
  misc_feature (185)..(185): n is a, c, g, or t
  misc_feature (214)..(214): n is a, c, g, or t
  misc_feature (376)..(376): n is a, c, g, or t
  misc_feature (394)..(431): n is a, c, g, or t
cctcatctggtgatttttagtggtgaagcgtgatcgaacttggcttgtcaagagtcctagcgtcatgcctcctgtgctccntaatntcaatccgttgactctcttaatccggaccggtgtcactgggcaccactggctgggcgagccacctcgcttgggtctgtcgcgcncagccagcgccagcncagcttgccatggactgctcctggcgtangatgaatgatcgactcaacccggccgccacgtgtgttcagaacaccgacagtcgctcccaggcaaccagcacttgttgcgccccgtttccagcgacctccccaaccgcgtggactcgcatccacgtgcccggcggggccgcagcagaaaggctcggaccccncaggacgatcggccggtnnnnnnnnnnnnnnnnnnnnnnnnnnnnnnnnnnnnnngccaggcttccgggtcctgccccccgccccgtggggaacagcaggacggcgccgaggccgtttcgctttcctccgcgcccatttgccgggaggggaccccgtgctccgacctgaaggtgacggcagagcctgcgggaggcctaggccggtcccgccctacgggtcccgggggcgaccctcgcgctgacattggcgtccaggccgcggcccctgcctccgcgcccacccacgccgggcctggccctcgctcccccgggaaaagccccgccggcggccgcgagagcgcggaagcgcagccgtagtgaccgcgagacaaagacccggcggcgggggaggcggcggagagaccccgccagcgcggagaccccagggaagcttctctggaagacctggtgctggtccgctctcccgggacctcattttccttatttggacaacgggggcggggtcacagcagcccctcgggcttatagccgggttgttctttccttaaatctcctccctctgccaaaataaaaaaccccacagggc

SEQ ID NO: 133458 - DNA, 1126 bp, Homo Sapiens
  misc_feature (889)..(897): n is a, c, g, or t
tttttcaggtaaaaccacactgcctttatttggctaaagaacaaaatccaaaataactcagaacaaactaagaacagacaggaaaattacagactgaaccccacttgaggaagacttccccacggactcacactggtgatggggcgaacgttcaagacgaagccagcagtcctttccaagactcttttgtcttttagggatcctcaatacaaaacaacccaactaatccaggatatgtgttcaaaacagtcagttttccccctcaaaaggcgggaaggcccacttcaaacctccaggaacacaacccaagtcatcccagtgttaaacctggtgcttccgttttctgcctcaatccgagcgctaacataaaatcttggcagacaacaatctttcttcttcaagaaaattaacatttaatggtataatcccaagaacatgttctacttatttacttggaaaaatagaagctagggaccactctttatccgatggcagtctattctatgagagaaaacaagaacaatcattgttatgactttgaaaaatagaacctttaaaaatacttatattggtaagcttaaaaaaatatcatcagttaaaaacattaagggggctttctttttctacctgtattggttcaacttctggtgagaatgtgtgctgatagaaaatctagaagctatggcttttagggaattaaagaaaagcagcaaaatataattgatttggaaagattttggataagtgatctggaacaggattaaaaaggcaaagagctcttgaaaataagctacccatagtcaaaataatccaggaagggggaatgacgccctatgaaccactgtggaaagaacatctagagatggtctgaccagctgtgcagcctccnnnnnnnnntcactatcgctcaggtgcagccccccaaaaaccaccatcactcaggtacagcctccaaaaacaccaccatcactcaggtgcagcctaaggagtcatcagtgatcagaaagtgtctaagtttccttagcctccctcatattttttcgacgcgtgggtcgacgatatcccgggaattccgacccggtaccagcctgctttttgtaccacttgttctatagtcacctagttt

SEQ ID NO: 133459 - DNA, 989 bp, Homo Sapiens
gcggccgctgcttcagcctccgaacaggccaacctggacgtgatgatccgccagttaaatgccctgggaggacaccgcacgtcgtagcgctcaagtcgccgacgaacctggaaagcgttacttcttcgactaccaacgtttggcaggcgatatcgctcggattcgccatggcctggagggctacctgacacccagccgagcacagccccgcgatcctgttgagctgtcaggccaatacacgacagaaggacataagccatgagcatgagcggcgctcaagcctcggcctttcaagcagcgggaggatttccagcctcggctagctacctgtttttcgtcggccttgcggtggccatcatctttttgtggggggcctgggcgctctggagctgctaccgagggtgggccaccggcaaccttgaccgcacgattgcttcaacctcggttgttcgcattctgctgctttgcatgatcctcaccacgtttgttctcagttgactttatcggagattcaccatgtctttgctcccaaaaacacgtcgcttgctgatcggcatactgactcttccccaactggccatggcagccctgccccagtctcagccccccacacgcggcgaaggctcgaatctgatgcaaaccatgcagaactacgcctttgacggcttttctctgctcggcctcatcatctgcgctgtcattttcagcggcgtagcctggcatgcctttggcacctatcacgagatccagcacggcaaaaagaaatggatggaccttggcgctacagctgctgtcggtgtcgccatcctgggtgtcgccatttttctagtgaccaaggctaccaacattctctaaagagccttggccatgacagaactctcagacgacgggacgctgattttccttccagtgcgactgaacaaccagccagtcatcatgggcggtcttaccgctgatgaaatgtgggccacactggcgatcagtaccgg

SEQ ID NO: 133460 - DNA, 1055 bp, Homo Sapiens
ccgcgaccagcctcgcctgcccgtgcggcttcgatggcggcgttgagcgccagcaggttggtctgctcggcaatcgagcggatcacgccgagcacgctgacgatcgacgacacgtcctgctgcaaactgtcgagggacacgccgctgctgcggatgtcgttcaccagcgcatggatctgcgcgatgctgccatccactacccgcttggcggcctggccttcagcgtcggtctgttgcgcagccaccgcagcgccttgggcactgcgcgccacttcgtgggccgccgaagacatttggttgatcgcggtggccacctgatcggtctcgtggcgctggcgttccatgcggtttccgagcgctgggcctgatcggacacctggctgaccagcccggtgagttgcgcggtcatctcggtgatctggcgcaccaggccgtggatcttgtcgacaaagcggttgaacgcgccggccaagtcccccaactcatcctggctggtgatggccaggcggcgggtcaagtcgccctcgcccgcggcgatatcgtcgaggttggctttcatcaggctcagtgggcgcaagatggtattggccaccaacatgcccactgcagcaatcaccagcagcaccaccaccgccacgccaaggatgctcagcagcacaccttccatgcgtttttcgaccttggcctcgaccaccgccacctgggcttcgatgccatcgaggttcaccgacgtaccaatcaccatgtcccacttgggcaagtattcggtgtagccaagcttgggcaccagttcggtctggccgggctgggtcgagctgtattgcaggtagtgggtgccgtccttgccgaccttgaccaggtcgcggttgacgtagacaccgttggggtcacggttgtccttgaagctcttgcctacgccgtccgggctgttgcccttgaacaggcggatggtctcggagtcgtagccgaagaagtagccgtccttgccgtaggtggtgttggacaaccagtttgactacctgcgcccgcaccgccgtgtcgccgggggcggccgc

SEQ ID NO: 133461 - DNA, 682 bp, Homo Sapiens
  misc_feature (609)..(609): n is a, c, g, or t
aagggctaccgccgccttacatgcctcccaagctgtcagagcaggaaggacagaagacctcggctgcagctgccccagcccccgaccttcctcctgcccctcctcctcttcctggccttacagtagccaggccccggtggcggtaactgccccaaggccccagggacagaggccaaggactgactttgccaaaaatacaacacagacgatatttaattcacctcagcctggagaggctctggggtgggacagggagggccggcggctctgagcaggggcaggcgcagaggtcccagccccaggtctggcctcgcctgcctttctgccttttaattttgtatgaggtcctcaggtcagctgggagccagtgtgcccaaaagccatgtatttcagggacctcaggggcacctccggctgcctagccctccccccagctccctgcaccgccgcagaagcagcccctcgaggcctacagaggaggcctcaaaagcaacccgctggagcccacaagcgagcctgtgccttcctccccgcctcctcccactgggactcccagcagagccaccagccagccctggccaccccccagcctccagagaagcccgcacnggttgtcttgggtgtccgcaatccagggtcttggaagaacttcttgaagatgattgcatgattgccttccctt

SEQ ID NO: 133462 - DNA, 992 bp, Homo Sapiens
cttgcagcctacgttggctctatctacaggttcagtccgcacgtgcctcaggcagagtgccgcttcactctagggagctcactctttaggcttgcagcctgatgcgacacagcagcctgcggctctctgagctggggtggcaggctgctgtggcttgctggagtccagtggagaggcgggaggaagcacaggccgctgtggctccagcgggttctttgaggctcctctgtaggcctcgaggggctgcttctgcggcggtgcagggagctggggggagggctaggcagccggaggtgcccctgaggtccctgaaatacatggcttttgggcacactggctcccagctgacctgaggacctcatacaaaattaaaaggcagaaaggcaggcgaggccaggctgaggtgaattaaatatcgtctgtgttgtatttttggcaaagtcagtccttggcctctgtccctggggccttggggcagttaccgccaccggggcctggctactgtaagggccaggaagaggaggaggggcaggaggaaggtcgggggctgggggcagctggcagccgaggtcttctgtccttcctgctctgacaggcctgggagggcatgggtcaagggcgtccgggagctggagctcttcctgctgaccttccggccgcagaggtcatccagacagccatcaccgctgcccgagccgctgccgtcgtcactggcgtcctggaagtccacgtcgttgccgttgtaggcgctgcgcagccggttggtcatgatcttcagctgcatgatctgctgccggatggtcatgtccggcttggtgatgtccacctccacctcggggttgttgatctggttggccaggccgtcacccatgaccttagggaggtaccggcctgtggcgctcccgttccagcagcggtcatcactggcagtgctcagggccatcttctcactgcacagtgttcctgggaggctgatccaaaagtccttgacg

SEQ ID NO: 133463 - DNA, 969 bp, Homo Sapiens
  misc_feature (86)..(106): n is a, c, g, or t
tttctgtccataaatatgatttattgtacatttcacattgtattttcacattataagttaaattattttccacctttcattaaagnnnnnnnnnnnnnnnnnnnnnattgtggtaaaaatacatataaattttccattttaaagtgtacagttcagtggcattaagtacagtcacaatattgtgcagtcactagcattgtccatttctggagctttaccaaggcgatgaaaacttttagaaaggttaatagttacaagtaagtaggctggacttcactgatgatgagctaggatctgaaattaaatgacagaaaattcaacttgacacagtcccagaagccaagctcatttccctcactctaacttccaggcctaagatggcattaaagttaaaggattcagggctctctccaagcatagttcagttaatagagttgaaaaataaaagtataggcccttggttggggagatcctggtttccccttctcagcccatgaaggagctgttgcttatagtagaaccaagcttctggaaggaagagagcagtgtggcagagggtgtgtctgtgtgtataggcagtatgctaacaggagacttgagggtaagaaatctagaggctgactttggttctgtttttaggtctttttcatttaactttgacctaagttccttaatttaggaaatgatagctttccacttgacagtctttgaagtctcttccaattttaatatccagatttagagtatgaacatagcttttcttcctgattccagagtttcctgcagacttgtggtcttactgaaggccctcttgaaactgatttgtgatgtagcaagggatccaaaccttacacctgagtctgttaagagcgccctgctacaggaggccacagactgcctgattccctggaccgctgttctcaaggacgggtaaaggtaaggcagactgaaacttggtttcagttgggc

SEQ ID NO: 133464 - DNA, 1093 bp, Homo Sapiens
  misc_feature (941)..(975): n is a, c, g, or t
  misc_feature (979)..(1030): n is a, c, g, or t
ttttttccttttttctcccaaactttatttagaaatggaaggagttcaattttttcttgttctactttccctattcttatggaggtaaaaggaaagaaggaaggaaaaagcagctttcacttacaaagtttcgtgtaaaaatatctttttttcttaaataactccattcatacaaattgggatgggaagaaaatcctttcctcttgggaaagtaatacaagtcttaagttccattgtagggtgcgccttcagaaacctgctgcacttttctgatatagttcaccacttttctgtcttcacagctttggggaattttggccaggagaccctttacccgtccttgagaacagcggtccaggagaatcaggcagtctgtggcctcctgtagcagggcgctcttaacagactcaggtgtaaggtttggatcccttgctacatcacaaatcagtttcaagaggggccttcagtaagaccacaagtctgcaggaaactctgggccaagtatgttgcatgagaagttttagggtttccaatatcttcagtctagcttcctcctcaggtccatcataaacctccagataaccaatgatgactctctccagcctctttaagtgccggacagttaggatccccaacctgttcacgaaagccggcaggtttcttgcgtaggtcctgcgtaaaagaaggcggtgctctggctccatgtgggtcaggatcagccgcaggacctcatcacaatgggtggtgggtcgagctccatctcctttccagtgcagggttttctccaggatggggaataaatccagcagacacaggagcacagcctgaatgaggtggtgctctggtgtgtacaggtggttggaaatggcatggtataggacctgggctctcccggccgtaatggccgaattcccgggcatatgtccggtaccgtcgactgnnnnnnnnnnnnnnnnnnnnnnnnnnnnnnnnnnncggnnnnnnnnnnnnnnnnnnnnnnnnnnnnnnnnnnnnnnnnnnnnnnnnnnnntagcgccctatagtattacgcttagttgaattttggaggcgaaggggggatatggggagcggg

SEQ ID NO: 133465 - DNA, 801 bp, Homo Sapiens
gcggccgcgccgtgctcaaccagccggccggccatctggacccgcatgaaaccctcaccgaagctgccgtgcgtgaaaccctcgaagaaaccggctgggacgtcgaggccaccggcattgtcggcatctacctgtacaccgctcccagcaatggcgtgacttatcagcgcgtgtgttttaccgccaaggccttgaaacatcaccccgactaccagctcgatgaaggcatcgtccgcgcccgctggctgacccgtgaggagctgatggccctgcgcgacgactggcgcagtgagctgatcatccgctgtatcgatgattatctggccggccagcgccatagcctcgaattgatccgcccttctctttagccttgcgggcgtgagcctgttagaatcgcgtcctttttcaagacacccgttgaaaccctatgcgtgatccagccccttctgacacacaaaagaagcgcgtcatcgtcggcatgtccggcggcgtggattcttccgtttccgccgttctgctcatggagcagggttatgaggtggaaggcctgttcatgaagaactgggaagaagacgatggaacggaatattgcaccgccatggacgacctggccgacgcccaggccgtgtgcgacaagatcggcatcaagctgcacaccgccaatttcgccgccgagtactgggacaatgtgttcgagcacttcctggccgaatacaaggccggccgtacgccgaacccggacatcctgtgtaaccgcgaaatcaagttcaaggcgttcctcgactacgccatgatcctcgg

SEQ ID NO: 133466 - DNA, 754 bp, Homo Sapiens
cattctttataaattttatttaaaacaaaaggaactctaaacaaatttttgactatcgttaatgatatgttgctgaaatgtttggaggtgaagagtactgatgtctgtagttgacagtgcattaaaaaataagacgtgcattaaaaataatatgaatggatggatggatgacagatatgtaggtaaaacaaatatagcaaatgtttattgtagaatctgagtagcaggcatgtgggtgttcttcaacttttctgtatgctggaaatttttcataatacaatgtctaaaagaaaaaaacaacaacaatgaggagatactactgcctgtatctgtagccctgaccccagcttgggatagatgccattgatgtacatttggagaggcagtggcagatctctgctgctcaacccctgtgcagggaaaaagctgtgttcagacacactgagagcaattgtggcaaaggactggaaatactggctatgctggaccatcagttacttacagaggcttaagcctcctgaaggacacaaatcaacatggtctaaggttgccagtggcaactagagtagctaagagtatgaaagagatactccaagacttgaatttcaccattccaggccatacatgattcacaagtaccctaatgaaatgtcttgatagttaagatttaacatacatggacatagtttactagacatatctacaattctctatatcggtatctctagtaccttctgttataatttaattcata

SEQ ID NO: 133467 - DNA, 726 bp, Homo Sapiens
tttactgttttactgtagctgtcatggtggaatcaggaatacatagtccctagtggcattaacagaacaagaaccatacaaattaaagctcatagaaacacaaagggaagacagaacctcagagaacaatgccaaccatgacagtctgaaatagatgcttgggccacacatgaaggctagaaggaaaatccaaactgtacgtggatctttgatgcggagcttgtggagacaactgtggaaaccaacacatctctttgagaatggaagtcaagcagctcagggtgttttcaggatacttttgattggcagagaaaataaccaggaaaatgagcaggaagcaggctgtctccctgtatggtggggttccaatacctgactaatgtcttcttcacttctgcctggcaaatctcatgcaagtgaggctataagtgaatttcaacatggatctataaagggaacagattctaggaaatttacctgtgtcgacaggtagcaggagggccacgtccagctctagattttattgtcctatcacaggtgtccttcctgaattcaaactctactattcaaatcccagacagaattataaaaaaaaggcgaaaataataattcgcataagaatatatgataaacttcacatacttaccaacttatgccagatgtttaataaaaaggaaaatggaataaggctcttctagctgaaattcattttaattaattaattaa

SEQ ID NO: 133468 - DNA, 2797 bp, Homo Sapiens
  misc_feature (1379)..(1379): n is a, c, g, or t
ttttttttcctcaggaaatcacatttgtattagcaatattttagccagtactttctgcatctagatttatttcctttatgatcattaagattctcacctaaacaagctgccaaaatacattacctctgattttatttagattctaaaagttaggatacaaaaagcacataaacatctacaagtaccaaaacatttatgaccttataattttatagtgcaagaaaaaggacaaagacaggaatacaaataaattataatctaaagagttacatataaaatgtccttgattatttgttaaaatctgctagaaaagtaacaggaatgttatcaagcctttctagacattttgaacacaatctgacaccgttgcatttcctggttgtatcctcagcttaacaggcactggagacagccagcttcttcaaatggtccatgaacacctgcaggctaacatcatcagttaggatgggtgctccagtttcctgtccccaagcatacaggttattgtgtgtctgagatgggttcactttggacaaaaggaatcgagcctgactgcctccatgctccgtgttgatgtaacgtggcatcgggaagcgtgcttgcagaatttcttgagcatcatccagtggtgcctgcagaaggtgcttgaagttttcatactcgggcatgtcctggtagccagctttacgccactgggctatggtctcaccaagataaatgacaatttgaaagaaagtatccatcagcaaaattctgtcagctagaatgctgctgctatccaagagtactggctctggtggcccatgaaaggagtaagagtagagaatgggctggatcatgatgagggactgggtcaggtcctgccgggcaaaatgatgtctgtaatatgacgactcatcaggactgttgttaaacacttgaagaaatggagatcttctcagatggaacataaactgaggatatagagaaaaggaatctgataacctaaaagaagtggggtcttctttgttatactgtccaaacttttgacacagtcggatgagttgtcggtccagccaccggagcacatcgggcccctcctctgactccgctcggaacaccccaagccgtgccatcaacactgccgcagcctcctggtcaaatgctgcttctatgtgcctgagctgactctgtacatctgcccaatttcgggcgatggtggtcacgcggatgcgtctctgggtgctggagtgctgataatgcgtgacaaactggatggctcctctgcctccttgggggatcggggtgttgtgctgattgacaacttcaaaatagatgccaagtgtagatgtaggatctaggccacagattttccactgactcgtgccaccaacaccaangctcattttctgacacacacggtcctttcacattcagagatacgcatggaccaatggctcctgcaatcttcagttcccgagaggtctttacgtccaaagtagcaccaaatgccattcggaaatctccattaaaatctttagtaaagattctttggaatgtctgcttgaagagagaagtgttgaaagaatctcccattaccatgtagcctccagtaagatttgcacaacacttcatctccaaaagtccagtttgatcaagggcacaagcataaatatcaatgcagtgaccatttgcagctgttcgattagcaagcatctcatagtgcttggttgcctttttcatgaatcgtgcattatctttctctatatcatgccaagtacgaatagggatcttttatttcatctccagaccatccatgccaggcccttgggtagggggacctccagtaaacagcatgatcctggctcctggtgtttggaaaagtgccctccagcaagccaacagcaatggacaaagccccacccagtggatcgcaaaggtctcttcccctgagttactggccatgggtccctctgtagctccccaagaagatcagtgaggttcatatcaatcttgtgaacaggctgcagaaatctgcttgaagcaaaagggtgctcctgtggttgtgcaggtcgtgcttgctgcatgggcatggctggcttggtcaggcccaacatatcctgtatttgctttgcagttaaatccttggtccctcggaagacataacttttggagattccttcacagcttagctcatgaacctgcaccatccttccaaatgtgatcagacccaccagagcatctggaggaagaagactcagggacatctgcagggactctttgagtgcttgaaggtcatcttcctccaggcatgtgtcaaccacatagagaaagatcagaggggactgagcacctcgctgtatcacgtactcaattgtagaaaactggggcatcaattcggcaggttgattcacctcagatatgcctccataagctggaggaaactgatttctttgaaaacagaaattacaggcccaaagttttgctcgataatcaacctgacaaagtgggttgagaacagctttacaagttggcctgctgcaaagcacaggttcatattgtacaggaggtaggtctggacgttctttcaaaggagtaaggagacaagccaggggtacaaccattcttgtagcctccagccggctggaaggccacacgttccaactaaaacgcacaccatcccgttcttcattctgctggatgaactccaggtatgtcgccatagtctaaaagggaactggccggagccgctcacctagctagagccgtcctcacccacagctgcaacaagcagctccgcctcgtccattcaaccggg

SEQ ID NO: 133469 - DNA, 1208 bp, Homo Sapiens
  misc_feature (85)..(85): n is a, c, g, or t
  misc_feature (98)..(130): n is a, c, g, or t
aggcagagtctttaagagtattcatttcttctggaaggtggagcttacccaaaagtggaagttagccttgctcaaagatgtgttntgtggtaggtggnnnnnnnnnnnnnnnnnnnnnnnnnnnnnnnnngaaacatgtattggaggtaatttgacactgctgctggcagtagttctctattcaccattttaaagcccattcaggttctctcttcctgaaaagaactgattgctgtgtttacatgaaatgacattggagtcagatggtctgttttaaagatttccatgacagcctcttttcctgagttggagagattggaggtggtctatccgtacgatgtggaatcaaacggtgggtttcttagtagctaaagaagccatgtacttctagtgtgtttctcagaatatcaactcatgttcttcagatgcttttctttttttaatggtgagggaaaaggtataatttgggattccacagtgccttgcatatagtaggcgcccagtaaatacttgttgaagcaaaccaagtttcccaagtcctcatctcttatagtgaccaagacatctttctcctctgaagggcttggcagttgtggctaaaaaataagcagtatcattatttgcttgaaatcatatatacagtttgtatgaatttcagtatgttgccaagacatgattttttcttattgtattttctgtaaatatttctggcactgaactgtaaagtaaaggcaaagtgtaaatatgaaggcgtgcccgtgccccttgcctcctgtgtttcatcttcgtcggttagggaagaaggtccagaggtttgtttgtatttatgccgatcctttgtccagaagaagcccatggaatattgaatgtaatacatttagtcaattaaattttaaggagattcttatctaataactttgtgtgtgcttttggatacaggctgagggctttactcctacactgggtgctggtaattttacccttttcaaggggaggtctggctcggcttttggcttgcccttttataattttaaaatcctgggaggtttaaaatggaacactttaacggggggtattttcccgtgggaccccagagaaaaagagacctcccatccttcggatcccacgatccccgcgtacgtcgcgcgggcggccacagagcagagaggaactttgatccactgtgctcaacatgagcagataaatgc

SEQ ID NO: 133470 - DNA, 941 bp, Homo Sapiens
  misc_feature (67)..(101): n is a, c, g, or t
  misc_feature (467)..(496): n is a, c, g, or t
gggggaggaatagcgtcgtagaagcgaacgacgagcgcagcgaagtcagtgagcgaggaagcggcgnnnnnnnnnnnnnnnnnnnnnnnnnnnnnnnnnnncagtcgacggtaccggacatatgcccgggaattcggccattacggccgggacactcgcatactcatgcacattttccttcatttccagatcctttatttcagagcagcccattttcctctggattcattgatgaatacaagtacccacacctttggccagtaatgtcagttacctgctgcaggttctgtgtatgaggccttcatgaacggttaccttctccatacactagggaagcatttgtcagactctgcagactgggttctagagaggcagagtctttaagagtattcatttcttctggaaggtggagctttacccaaagtggaagttagccttgctcaaagatgtgttttgtggtaggtggnnnnnnnnnnnnnnnnnnnnnnnnnnnnnncaaagaaacatgtatcggaggtaatttgacactgctgctggcagtagttctctattcaccattttaaagcccattcaggttctctcttcctgaaaagaactgattgctgtgtttacatgaaatgacattggagtcagatggtctgttttaaagatttccatgacacgctcttttcctgagttggagagattggcaggttggtctatccgtacgatgtggaatcaaacggtgggtttcttagtagctaaagaagccatgtacttctagtgtgtttcctcagaaatattaaccttcatgttactgcaagaatgcttttcttatttctcaacggtgagggacaaggtataattttgggatttcccagtggcttgcatattagtagggcgcccagtaaatactggtggaagaaaccaggttcccaagtctcattcttaatagtgaccaa

SEQ ID NO: 133471 - DNA, 363 bp, Homo Sapiens
atttcgatattatttatttgaaataacatgtttagccactagatgtcaccctttttaagcaacaaagactacttcacaaagtgtgacatcaatagcagttacatttgttccactgtatttgatgttctccatatggttcttggctacatactggacactttaacagtgaaaaactctttggtctctctaaagctctaagagaacagaaaagtaagatgacagaaggcttattaaacatagttaaaccagctaatcttggaatgctaacaactgaataatatttatagttccacggtcaaatccaatttaaactttgagtaaactttagagtctgtatgactactgactctatttgccaattaa

SEQ ID NO: 133472 - DNA, 1650 bp, Homo Sapiens
  misc_feature (1363)..(1363): n is a, c, g, or t
  misc_feature (1380)..(1380): n is a, c, g, or t
  misc_feature (1432)..(1432): n is a, c, g, or t
  misc_feature (1437)..(1438): n is a, c, g, or t
  misc_feature (1495)..(1495): n is a, c, g, or t
  misc_feature (1518)..(1518): n is a, c, g, or t
  misc_feature (1521)..(1521): n is a, c, g, or t
  misc_feature (1527)..(1527): n is a, c, g, or t
  misc_feature (1549)..(1549): n is a, c, g, or t
  misc_feature (1571)..(1571): n is a, c, g, or t
gcttttgaaaatcaactatcattttaattacaatcttaaacacttttgtttaagggaatccaattttcctcttccaagggtcttccaaacatggaatatgtaggttttcatcataatctcaatgttgtttatccaaatgtatcacgttatataaatatgtagaggtttccagatgtcaagggcagggtattaggttcaagtgtggctggctctaacctctccactgaactcctagagtgagatttaagttttatttaatctaactttactaattcaacttagtcgtgtaagaaggatatgaagaatatgaattattgtacttcacactgctactttcatgtacagtatagtagaataatactgacaactatagacaagaagttaaaatttgtctcaggaaaattctttcaagaatttttaaacaattttgacattagcctactgatagctgaaagaatttcaagtgacccgtgatacatgtggtggccaaaactttaaatgtatggtaaaatatatttccttggttaacattattagctatttccctccccctttatatggtacaaaggcaaactttcgcatgtctagtctaggatataacaaactatgagttagtggaaggaatgaagtcgtactaggtttgtggttgcttttggatgttaccgtttaatttgcttctattccttaagagtaatgagaattttaacatatgggtggatttgaggttttgaatagtagttgatggcagagaaagttcttgaagaacaaatagcatgggcaagtgttattttaaattctttgtgacacaaataaacacccctatgtagtttatctctttgtgagccgatatgccctcatttcttttactatgatgatatttttatctttaaagcacagtcctttatcccattagcctgtgaaatgtacagttagggcagttggctgacctgacatggagtgtagtaaaacaccaggacagcggaagcgggcacgctgccctgagaacaagtggaaatactgttccctgtcctcccctccggcacctgcctgttgggctgacttggttaactggatgcactaaaaaataaaaatttgccccttggaagctcataaaagtgtactagaaaaaagtctctaacattggatccacacggactgcagccattggcttttggaacgggtagaacagagaagccttcacggagtagtggataaatataaagaaatagccacttcacatatttcagtgtcgtattggaaaatgaaaaaggcaacagattaggagtctttgtcactgtccactcctccatacatatctgcaagctttttgaaatcgaggtcccagtcactaagggtatcatangtcttgatctgcatccngtggtcactgactccagcgagctcaaggaaatccgcacggagccagtgcttncatanngcgtagtggccaaggagtcgtatggcggggcagtggggtccgtgtcatttcctttancttttggtatgaatctctacacngtnttgtcncagctgtgggatcgtcgggtangaaaaggcttcggacatgtccntcggattgtgtctctatgctaagatctcaaggtgcattaaagcgggttctctccacactccccttttatacagtatcca

SEQ ID NO: 133473 - DNA, 562 bp, Homo Sapiens
ggcacgaggcggattctgctcaacaaggccttcggcctcggtgacgtcaactggagcaccggccaggaacatatcgtctggttgatccgcgtgccgcgcatgttgcttggcgcactggtcggggccgggctggcgttgatcggcgccgtgttgcaggcggtgacgcgcaacccgctggccgacccgcacctgctcggcgtgacctccggcgccactctcggcgcggtggtcgtggtgttgcacgtaggggaagtcgtcggcttgctgaccttacctatcgccgccttcatcggtgcgctgctgagcatgctggtggtgctggccgtggccagtcgtaacggccgcctggagagtgatcgcctgctgttgtgcggcgtagccgtgtcattcgtgatgatggcggtggccaacctgctgctgttcatgggcgaccatcgcgccgcctcggcggtgatgttctggatgctcggcggcctgggcctggcgcgctgggaactgttggcgatccccactgcgactgtgctgctggggctgttgatactggtgggcatggcgcggccgc

SEQ ID NO: 133474 - DNA, 612 bp, Homo Sapiens
gcgatcggtcggtttcgattggccgattgcgacggttcacgaaagttagattgaaagcgaaattagaataacgccacttatataaaacaggcccccacatcgaagccaagtgtggggggcttttttgtgagggtggataccagatccggtatggctggtataccaatcccacctcaactggctaacactgaaaaacgggacggatttattcaatcgctcacttctcttggtgggccagtaagaaagtgcttacaccgcttcgtggatcaacacaggggtggcctgctcgccacaataaagtgacctcttaactgcctgatattagctggacacgaccggtttatttcgcaataaatgtgcagtttttgcacagatattgttcattcctgtgtgtatttcaaacatgaaagccccccttaaactcgacgccactcaccccgttacggtttaaggaaacgcacaaatgatcaacccctctcagcagaccatccgcgcaatgtctggcgcaacacccgtcacccagcttgacccagccaccaccgcactgctggtcatcgatttccagaacgaatatttcaacggcaagatgccgatccccgaaggtgcggccgc

SEQ ID NO: 133475 - DNA, 1172 bp, Homo Sapiens
  misc_feature (761)..(847): n is a, c, g, or t
gaggttagcttgtttattttatgaggaaacaggcacagaaaaattaatttacagagtcttggacaaaatcccaaaggaaggaggagtgggaagagcagagagcggataaacagcacaacgccatccctggacacgcctagttcttgcttttatttaaattttggtaggttctgtggccacatccactttaggctaggtactgggagacaacctctggggttttctggtaaccagttacattctccaagaggtggccattaccagctgaaaggttcgaggtgaactcacatcagcctctccaaaaggagcttgggaacctgtgttccctccgggcagtctcccagaccgggtttggtatcagcccctccctgccactgccctgcatctggtcagctggggaaaagggggcagggaggagagaaggccagtggagcagagccattcattctgtggcttattttgtcatcagcaggtcccattgctcccgctgattggggactgcctcttcctcgggggtgtagttgctgagatactgcttccccctcagggtggtgctcggcacacccaccatagcctctggcagggaaatgctggaatccagacctctgattctaccatcctggtacacatatggtgcagcgcagcgggtgaaagcacaggctctaggatccgagtccctgggtttgaatccgggctcccctgagaaacagctgtgtgccttgggtcggatacttaacctctctgagtcttttttcctcccnnnnnnnnnnnnnnnnnnnnnnnnnnnnnnnnnnnnnnnnnnnnnnnnnnnnnnnnnnnnnnnnnnnnnnnnnnnnnnnnnnnnnnnattcactccatgtgcacagcgttttctttgatctgtttctgaaccttcagataccccatctgatcactaggaagaccacgtgggagagtggtcaggtcagcatggtgaatcaatcatctctcctggaaaagcaagtccccatgcaggtccatctatgggtggctccaaagcatcttcccggcacccagcaaacagccagttcattcatccgctggggacctacaatcctgtgagctagggctgtctgtgcacacgtctgtctcaaatggcagtagcacttagtgttaccctaggaggcagtttgttctggcctttcagggacaga

SEQ ID NO: 133476 - DNA, 1855 bp, Homo Sapiens
  misc_feature (500)..(503): n is a, c, g, or t
  misc_feature (506)..(576): n is a, c, g, or t
gccccccccgggttttccaccccaaggggccaacaaattataaaacgcaaaggggcgcccaagggggccggaattccccgttgggcgaattcgggggtttctaccaaggcccgtcttggggaggggccgttcccaaatttgggccaggggaaggcccctaaaggaaattcccccacacgttccttccaatgaaattggcagaggccggggggggtaaatttgatatatcgaggcttcgcgtggggctttctcgttggaaaggattcacagtaaagcgccctcaggaactctcactttggggattgtttcaagaaccgcttgcggttcctcccggggcggttttttaatggtgggagatccacagccctcagttcctttccacgggtttctctagggaacacgggtaaggccacagtttcccctatcctactggggcccgccgggcccaaagaaatggtttagagaagctttttgagggtgccgagggcggccggcaaggnnnnaannnnnnnnnnnnnnnnnnnnnnnnnnnnnnnnnnnnnnnnnnnnnnnnnnnnnnnnnnnnnnnnnnnnnnntactttgttctgggaactttaatactgtgacaaagttctctaaaataggcaccttccccaccgtacctcatcgcccagggcaggcaggcagggcaggctagatctcgtaccgatacttgagcacgcctcctcctggtgcagaaagaaacctcttctgtaccgaaatacaagcagcagctgtggcctgggccaccaggtggagcatggggaacactctgggccctgggaggacgaagccagtgccactaggagcagactggctggggacggttgtccacacagactctggccccatctgggtgggcttgcagcaggcgtcctgggccagaggaggggccctggcatctatccaacaccaggacctctctttaggcctaggccaaactcttcagaagtcacgacacacagatgtgggccccggtcacgcctcatgagctgtctctgggaagaaaatctcccggcatcgctgcaccgtgtcctgaggagacaccacgctgtggccaacagtccgggggtcggcaaagatctcaaagtcgttcccaccagggctagtctcgttcccaaagaagtggatggtgtcgaagctgtcctggtccaggctatccaggcagtagcgcttgtcccagccctcggggaagacgtcaaagctgatcatgcctcctcgagagaacctcagccctttgccagcaaactctgttttcagggcttccacgaacttctcccggatcttctctttcttgtccagttcggagaactcgatcctctcctccagggtgcagctccggccgatgggcgagatgttcagcatgccattccggaactcgatgaaggttccacgcttcttgggcagcctgagcagggccatgtagctgaggcagaagttgatcaagtcctgcagcagctcctcccccaggtggttctggatggtctgcttggagagcagtcgtccgtgcttatactgcaccgtcccgttctcggcaaacacataatcaaacttctcaatgacttcatccccgtcacccagctgctcagcgatcttacagtagtcagagccgcccaccacaccgatctgcactctacttcgtagcttctgcaggaaggcggccacctcagggtcaattttctggcgagccggcgtgagggtcccgtccacgtcaaacaggcagaggacgcgctccttcctgcgggctgcctgggcggtgactgccatggctgcaggtccgcgcgcccccggccgtaatggccgaattcccgggcatatgtccggtaccgtcgactg

SEQ ID NO: 133477 - DNA, 1298 bp, Homo Sapiens
  misc_feature (54)..(65): n is a, c, g, or t
  misc_feature (82)..(135): n is a, c, g, or t
  misc_feature (172)..(182): n is a, c, g, or t
  misc_feature (237)..(247): n is a, c, g, or t
  misc_feature (292)..(304): n is a, c, g, or t
  misc_feature (316)..(443): n is a, c, g, or t
  misc_feature (446)..(447): n is a, c, g, or t
tgtgcggcgaaggtttttataaattttccccccctcttccccaaaaataccacnnnnnnnnnnnnaaattataataaagagnnnnnnnnnnnnnnnnnnnnnnnnnnnnnnnnnnnnnnnnnnnnnnnnnnnnnnttggtgttttttaaaaaccttcgtgttccccgggggnnnnnnnnnnnggggaaacccaacccctttcttttcccgggtttttttgggaaacaattttgcccnnnnnnnnnnnccttggggggccccgccccaaaaaaaggttttaaaaatttttttnnnnnnnnnnnnncgccccaatttnnnnnnnnnnnnnnnnnnnnnnnnnnnnnnnnnnnnnnnnnnnnnnnnnnnnnnnnnnnnnnnnnnnnnnnnnnnnnnnnnnnnnnnnnnnnnnnnnnnnnnnnnnnnnnnnnnnnnnnnnnnnnnnncgnnggtaaactaaaacttccaagttattattattctttttttatgttagcttagccatcatgcaaaatttactggtgaagcagttaataaaacacacatcccattgaagggttttgtacatttcagtccttacaaataacaaagcaatgataaacccggcacggtcctgagaggaaattcctttgcttcttaaagctgccagtcccggctttttgggggctcatgtgttataaattctggaagctcttttagctgcagtttgagcatcaggcaaatcttcttcctcttcctcggttcgcttgtgttttaaaaacaagtcagactttaagaagcggctgtagctgtcgtacttcatgagattaaagatctggtcctggagtttctggaacatcagagggtgcggttcttccaggatcttctcgttgagccgagactgcccctccacgttgacctgtgatgaggccttgctggacagaaaggtcatgtagatctcctttgccttttcctgcatctgcgtcttatcttgcattttcttaaaatcttcacatgctagccaaaacaaaacattttcttcactgaattccttttttaaaaattccctaaatcttttcacgccttctgggtcttccagcagattctccagggatgccgcccatttggctgtgctcttgaggctctggtggctgctgctggaactgccatcgctgtcgtggatgtctgacggcggccgcttcctgctcagccggctcacggcgcggttgaacatcgccgcgggcgcccgaggaggaagaaggagcagcccggcggcgcggcggctgagccggaggaaggcgaggaggaggaggagcggccgc

SEQ ID NO: 133478 - DNA, 698 bp, Homo Sapiens
gcggccgccagcagcacggcggccagcatggccagaatggagccgaagctcagcgaccgccgtgcattcgcctcgatgtcgctggtcaatttttcggcggttccggcgtcgatgaggccgctttccacccagcgcgcgatgtcttgcctgactctgcctacatagcctgccaaaggcgtcactccactattttagtcggattaccagccgaccggagcaaatctttgacgtcgcgtcattttccgattctggcttctttgtgacatcggtgtgaaacggctgccatgttgcattgcacaaaacgcattgctgccatgcgccattcgcacttttaaatcgatatgggtccacctatcttagcgtcgtacagaaaagatgaacgaacgaaacaaagacgtaaacgagcaagtatcatgaacctgatccgcaactaccgcaactggcgccgctaccgggaaaccgtttccgagctgagccgcctgagcaatcgggagttgtctgacctcggcatcagccgcagcgacattccctacgtggcccgcaagtcggcctaaggctttacgggtcgcctacgacccgaacgacgaactgaagagacacgaaaatgaacctgatccgcaactaccgtaactggcgcgcttatcgcgacacggtcgagcagctcggtcgcctgtcgaaccgcccctcgtgccgaattc

SEQ ID NO: 133479 - DNA, 779 bp, Homo Sapiens
gcggccgccatgagtttcaactgctgggcctgcccgcaccggtgctgtttaccggctcgatgctgccggccggtgtgcccgacagcgatgcctgggaaaacgtcagcggtgcgctggcagccttgggcgaaggcctggcgccgggcgtgcaactgtacttccacggcgcactgatggccccgacccgttgcgcgaaaatccgcagttttggtcgccacccgtttgccgcattgcagcgtaacggcggcgtcgccaaggcggatatgattccggcggcgctgcattaccgccagcccaaggcgctgatcaatgtgggcgtgctgccactggtgccgggcatcgccgccgcgcaattggacgggttgatcgacagcggcatccaggcgctgctgctggaatgcttcggcagcggcaccgggccgagcgacaacccgcagttcctcgccagcctccagcgcgcgcaggataacggcgtggtggtagtggcaatcacccaatgccatgaaggcggtgtggagctggatgtgtacgaagccggtagccgcttgcgtggcgtgggcgtgttgtctggtggcgggatgacccgcgaggccgcgttcggcaagctcaacgcactgctcggtgccggcctgccggtggccgaggttcgccgcctggtggaactggacctgtgcggcgaactcgcctgaggctggccaacctatatatccacccccaggtcagccaggcgctccctagcatgaaacccccgaggcatcgcctcgggtcgttttcatacg

SEQ ID NO: 133480 - DNA, 683 bp, Homo Sapiens
gcggccgcggtcgtcgaaatagcccaggcagatgacgccctgggtgtcgcgcagcgcgcgcgccaccttgtggcccagcggcccggcgccgatgaccacggccgtgcggcgtgcgcccgggtcgctggcccgccactgctggatgcgccgccccagtgcgatcgcgacgatctggatgacgggcgtcaggacggcccaccagatcagcaccttgtcctcgaaataatgcaggctgttcgtcgcatagccgcacagcagcaggatgcccagcagcactagccaggacgacagcacgtcgaccagggcgctggccgggtggtcgttgaagcggttgcggcccggaaaggtgagggcgaagaccagcaggcacagcgtcagcgtcgggcgcatgacgggctcgttgaattcgccgttcacgaccaggaaggtcagcacgatgatgccgggttcgaggaaagccgcgatcagcgactcgaccgactgcggtgcgctgtagaacgtcctcttgtagcttcggtcctcaaacatcttggcgttgctggcgtcccggagcacgggaggaggggctggcgaaaaggcgatccggcattctccatcatcaaatttgacagtcccatcgcgcgggcaccctgttcatggtccgctgcctacaatcccgcgcatgcctgcccctcgtgccgaat

SEQ ID NO: 133481 - DNA, 610 bp, Homo Sapiens
  misc_feature (550)..(550): n is a, c, g, or t
tttagtctttcctctgtttactctttacttcatttgatcaattccaatttttttcataatgccattattattgagggaaggggagtaacttcaaggtaatccagagagaagcaaatgcaatacagttctgactgagatgcagattcctttttgttaaatgctgactgtgtccttggtttcccattcacctgggaagtagaagaataaaaatcattccatagttccatccaaggagggcagctgcaacagtgtgctcttgagcaggctgtctgggtcatcaggaaaagccattccagttactcacgcattctctgagaaaccttgtcatctctgccatctgtctctgtgtaggaactgccaaagtccttcggttccccatctcaaataagcagtgcatgggttacttccctcattctaatccttcagtccctccttgtgtccgtttggatcttccaggaagcagctttcaagatggagttagaagtacgagtaatgaggggtgattaccgtgaaagataaaggggaaaggctgtaggggggaaggcctcanaccaccatgcaggctgactgtgaaggaaaggcaggggggatgagggaagacctcgtgcca

SEQ ID NO: 133482 - DNA, 866 bp, Homo Sapiens
ttttgaatttttaacagaaaattttatttcaataaatattttgccctccaagtgacaactacaatttcagggaggtaaaagtataacctagaagtaatttagaattattccacttttcaattttgcctgagtgaagaatacagtttgggcctgaagtctgctaagagactgcaccgcagtgacacgtgcagaaagtcaaaaggacacatggaaagcagtccatctttggtgcacgcacacagccatgtgcacgcacacgtgtgggtagaacgtatctgcacatacatgcgtaaaataatgggactcacgcaagtttcatttctctttcaacccttctgggctcccagaattctagcattaccaaggatttacacataaacttcatcatacattgaatcatttggtttacactttctttacaaagttatatcctaaatgggtagagcagcttgtcttaaataacaaggttagaattctgagacacaacgaaagttgtgcaagctttccgctgaaagaaatttgcaacgagacacaaataccactgcaggggctttgaatataggagacattgataaacagagttataagtcagtgttatcaactgcaaaatcatgactttaccaccacccaagccagaaaggcccaaaagcaccaccacgaaaattaatcctgtgtctgaaacttttcaagactaattaaaagggttgctgtgtccaagcatgaagaacgcagggacgcttctgtcaatcattaggcgaacactggcctggggacttgggacatcaggaatgtccatgccacattagtgcttactcgcccggccgtaatggccgaattcccgggcatatgtccggtaccgtcgactg

SEQ ID NO: 133483 - DNA, 1100 bp, Homo Sapiens
ccttcatgatttttataaatcaagacatgctctttgtagacaatttgcaagggatgtaaaaacatacaagcagcaccttcaaatcacttgcaatctcactcctctgaagtcatcaatgttaacacctcaacattttcccctctgtgaacatctccacctagcacatgcacaagtttatattttatcacagtaaatatacaatttcatattcttttcactaaaaatagcataagcaggtggacaatgaaaaaggtcttactacatgttatccaacagcctttttcatttcctcttttgcaagctgtcagctcacgctgcttgcccatttaccttctggctaaaccaaacactcgcttgggaccagctcatgatgagcatactttacttctaccatttatttttaggaaatgagaaaaattccattccaaagccataaagctttggtttaccaacatccttacattaaaagagaagtggacagtcttcttatgttcgatatttagaaacgacaagggtaagggcctgcagcaagtgcccagcatggggccggagaaatgcgcacatcttcacgtttcccacaccaggcagcctaagaacgaaggtcactcagcccagacgcaggcctccagatgacgccccaccctgccacctgttccgcctgtgtctctctacacagatgcatttctgccagctgctgagaacttcttcattaaaaggcatgtgctgggtgctaagattttcatattttttcaaactatgcttggaattcaaaaattatacgtcattaaactacatgcccaactcctggcccacacagatgaaagtgttagtgttactgtccgtgattcctggactatgtggtaatttaaacacttcttagaaagaaaaagcctcatcacaactcagtcagcagtagaaaagggtgagtcacattctgtttttagtgcatgatgtgacaagaccctactaccacagaagtactcccgcaaaaattctttgagatacaaagcaaaaaccaaagggaatgattcaatagatatgaaggaaacactctcctagagaaacatgacaagctgaatcgcaaaagggaggcaggaaat

SEQ ID NO: 133484 - DNA, 780 bp, Homo Sapiens
ggaacaatctttgctgtatacttttaacaaatactctgctatttctcttgctggaactgatgaaagaaaatatatcgaatgatctattgctcatcagctttattttttgaacatacgacttattttgttgaaattgtccaagactgtatttagatctcataatgcttttttaaatgtttacaagtaaatagtttgaattcagtaaatattattggttgttgtattgatcaatgcatgttacccattcaaccattttatagactaccaatttcttttatgttaactagaatgcttttgttaaaagttatttgttcattatttgtgctacccctttgattatgcagacaacctcatcagctgcctaacttatccatctttgaacttctgactacttgttgtatctgctggatatttagttcaactgtatagttttatttacttctgtatgtgtatttttgtgaagtattcacaaaggttaagttaaaataaaaccaagggatgtcttgcataattgattacttctgtctaaaagagctaagcatttaatttatttattttcttcctccttcgggggcagtttaaaccttagcatcagagcaaggcccagggagaagctgaagctttagattagtatttttgctaatggcctcttttgaaaaggattttataaatgcaataattccttccctctcataattgtgcagggcagatagataggacatatggaacatacgtggcagaatgacattggtaatcaaagtgagtgagacaggaacccaa

SEQ ID NO: 133485 - DNA, 993 bp, Homo Sapiens
ccgcaattggcggtgatgacgcccaacgcgcaatcgccggtacgcctgacccaaggcacccagactgcaccggcatccgaacattgggttttctaaggacgccattcatgagcaaatccgcctggctgtttttgtgcctgactgtcgccactggcctcctgggcctgggcgccacctctgaagatggacaaactgctgcaatggtcgcagccggcgtgttcacgagcctgcttgtgctgacgcttttcatgggccgaaaaatcaaattcgaccccgttttgcggtaatctctgcgccacctccctccctcgaccttatgtcgccccaccctagcaaatcggcaaattgccactagtcttaaagataagggcaaaaggccactttgctttaggatatgcggcctcaatccctgcgcgagcctggacttacgggaagttcccctgaggaatgacgcgttgaaaagttttccaaccagtccgcaaaaatgcaaatgagtgctggcattaagcctttagtcagttcaatatttgtcacagaattgacgccaaggaaatgtcaaatctgaggcatgatgcggcctctttgcaattcgggttgaactttggtcgtgagccttgtcttaacactcatcttgcggccaattccaaaaaccgctcccctgaactaaccggttaaatatatgcgcccattgaaacaggcaatttattccagccgtacggctgacaagttcgtcgtacgtctgccagacggaatgcgggaacgcattgccgaggtggctcgcaatcatcaccgcagcatgaactccgaaatcatcgcgcgcctggagcagagccttattcaggaaggtgcgttgggcgaagagttgagcatgcgcctggacagccctgagctgtcactgcacgaacgcgaactgctgcagcgttttcgtcagctctcccaccgccagcaaaatgctctcgtctcgcttatcgcgcacgacgttgaggcggccgc

SEQ ID NO: 133486 - DNA, 732 bp, Homo Sapiens
cggcacgaggcggaacgaggtcgcgttttcgacttcctggttctctggattttgcccattggcttattgttgcttctgagttcgctgtttttcgtcaacaatcgcaatgtcatgcaccgcggcttctatattttctttgccctgccggccttgctcctgctgtgcctgcgcccacgtgaactcaaagagttactgcgcgagccgctggtgcttgccttcacagcattttgcgcatgggcaatgatcacggtgctgtggagcccggaacccaccggcgactccaacctgttcaagatcccgttgcagacgttcatgttgtttgccggctgcgggctgctgctgcattaccgcaatgacctgttcaagccgatcttcttcagcgccgccgtgattgcgctggtggtgacgctgttaaacctggtggcattcgtcaaaggcttcgagccgagcatgcgcatgattggcggccttggcgccttggacaacccgctgctcagttcccacctgttcggctttttctgcgtgtattggctgtacctctgcgtcaccaccaaacggctacgggtactgtggctcagcgcacccgccctggcggtcatgaccctggcaattctggccaccggttccaggacgccattggttgcactggtgatagcagtcctctggatgggcctgctcagccgcaatcggcgctcggcgctgatggttgccgcccgtggtgctggcggccgc

SEQ ID NO: 133487 - DNA, 1035 bp, Homo Sapiens
  misc_feature (716)..(761): n is a, c, g, or t
gcggccgcgcaagaaattcgtcggcgcgcggacgcaggaataccgtttcgcgcagtacatcgaggactggcgacagaaggtcgaacgcatcggcaacctgaactacccgccggcggcgcgcggcaagctgtacggcaacctgacgctgacggtcgaaatccgtgccgacggcgagatcgagaagatcgacctgaaccgctcgtccggccagaaggtgctcgacgacgcatccatccgcatcgtgcgcatggccgccccctacgccgctttcccgccggacatccggcgcgaatacgaaatcctgtccatcacccgcacctggaccttcacccagggcgaccagctcgaatcacgctgataccccatgaccgaccgctacgccgtcatcggcaacccgatcgcacacagcaagtcgccggccatccacgccgcctttgccgcgcagaccgcgcaggacctgagctacgaggccctgctggcaccgctcgacggcttcgccgacgcggtcgccgcgttccgggcgagcggcgggcgcggcatgaacatcacggtgccgttcaaggaagaagcctggcgtctggccgaccgcctgaccgagcgggcgcggctggccggcgccgtgaacaccttcgtgttcggcgacgacgtgctgggcgacaacaccgacggcgccgggctggtgggcgacctcgacacgctgggctgccgccttcccnnnnnnnnnnnnnnnnnnnnnnnnnnnnnnnnnnnnnnnnnnnnnntcatcctgccgctgctcgacgccggcgtcgcccgtctgttcatcgccaaccgcaccgccgacaaggcgcgcgcgctgcaggcgcagttcgccagccacgacgtgagcggcgcgcttggcgccggcggctgggcggacgccgccgacgcgccctacgacgtggtggtcaacgccaccagcgccagcctcagcgacgaagcgccgccgctgccctccggcctgtacgcgcctggcagcctggcttacgacatggtgtatggccgtggcctcaccgc

SEQ ID NO: 133488 - DNA, 1147 bp, Homo Sapiens
  misc_feature (1070)..(1104): n is a, c, g, or t
gcgcaaaaaattttaaaaaggtttttacatggccttaaaaaagggtttccccaaattgtttttcaagaatttgttttttggaaaaatttttgccccagaaggttgggcaaagtgtttttcccttaataaaaatttaggttactgttttccaagggatagccatttttattaataaaaaagtccgggaaagtggttatttcttaatattttaattatcattataatttggcagtaaaaatcacttttcacaaagacattacacttaccattaacaaatcactcttgattcattcatttttgtttttccatttctcctggcagctttgtaagaatccataacttcaatatgtctaactcagttttgcttagctcatggtaaacatttggaaaactatgaaacttcgtggtcactcctagagattttaacattgagtttgtctcttctgcccaagaatgaagaactaactcatctgcagtaccatgacactgaaataattcaggaagtacaccattactcttctgaagagcctggtaaacagcagatgctttattcagaaaactagaaagagcaaatactcctgccacatcttgatgatttctatatgctaaatgcattgccatgcatcctcccatagagaatcctcctattaatatcctgttcttcttgatgccactttttacttcttcatcaatcaaatcagtaagcacttgacacatgacatcaattgattcaaggtgttctgggcagtcattggttattttaaatctgtcaaaccatacattggagattcctcctttcataggagtatatgatctgggaggagctgttggataaataatttttatgtgttggaatgttaaatcttgatttaaaacctgcttgatccacattcttaatccttgtccagaatcacctgagccatgcaggaagatcagagaggcgctatgcctccctgccggcgacacgatacagcgctgcagaaccgaccccgacgcagccgccatcgctgatgccactccccggccgtaatggccgaattcccgggcatatgtccggtaccgtcgactgnnnnnnnnnnnnnnnnnnnnnnnnnnnnnnnnnnncgcccgcttcctcgctcaaacggacttcgctgcgctcgtcgtt

SEQ ID NO: 133489 - DNA, 979 bp, Homo Sapiens
  misc_feature (112)..(114): n is a, c, g, or t
acaagttatgggccccgggttccacttaaccctgggggggcccccggggcgcaaaaagaaagggttttagaaaaggttttttggagggcccggatggcggcccgaccaaggnnnaaggggggaaaaacggggtgaggggtgccagaattattttaatgtatccatttaaaatttgggcagtaaaaaatccactttttcccaaaagccatttacacttacattagccaatccactctggattcattcatttttgttttcccaattctcctgggcagctttgtaagaatcccataacttcaatatgtctaactcagttttgcttagctcatgggtaaacatttggaaaagctatgaaatttggtggtcactcctagagattttaacattgagtttggtctcttctgcccaagaatgaagaactaactcatttgcagtaccatgacactgaaataattcaggaagtacaccattactcttctgaagagcctggtaaacagcagatgctttattcagaaaactagaaagagcaaatactcctgccacatcttgatgatttctatatgctaaatgcattgccatgcatcctcccatagagaatcctcctattaatatcctgttcttcttgatgccactttttacttcttcatcaatcaaatcagtaagcacttgacacatgacatcaattgattcaaggtgttctgggcagtcattggttattttaaatctgggaggagctgttggataaataatttttatgtgttggaatgttaaatcttgatttaaaacctgcttgatccacattcttaatccttgtccagaatcacctgagccatgcaggaagatcagagaggcgctatgcctccctgccggcgacacgatacagcgctgcagaaccgaccccgacgcagccgccatcgctgatgccactccccggccgtaatggccgaattcccgggcatatgtccggtaccgtcgactg

SEQ ID NO: 133490 - DNA, 681 bp, Homo Sapiens
caaagtagacctctgtcttggattactatgtacctggacaggtgaactcttgtatgtttctgttttggggatttttaggggttttccatgtacattcatagagcctggtcagcagcgaggagtccttgttgcgtatggacggaaggctccctggcacccagatgtttcccttcgtcctggctgacacatagcatggtggtcatctgctcttcatgtccagcaggctcagaaagaactcggagttcccctcgcacccttgggccaagcttttcaagtccgagtgccatgactggatgagctggggtttgtgtgtctgctggcggcacagtgggtgtgcacaagaccaccatttgggtatctaacaaacacaggctcacaaaagggattttggcatatctgacaaagctttttgtctgagagttggattgagcttcctttcaacttcatcttatcgtaggtgtagattaagttttcggacctggccaggccgagagccacctgcatggtcctcctggcatggatgctgtccctcatggcccccatcaggaatgggcagaggagctgcactgaccaggtgtcaggcagcatctgcagcacctgggctgcatcaaattcggtggcgtggcggttcagcaggtccacggcagccacggccagctcgtgggcagtggggccagcacg

SEQ ID NO: 133491 - DNA, 553 bp, Homo Sapiens
gagtgagccactgcccctgccctgggccacacatttctaaatgaaagctaatttccacttaaaggtgataacttgaacaggtgcactaatctctcctgagtctccaggtaaacaacggcagagaggaatggggagaatggaagcggggcaacaggtgaacaagggtgcagagagggaacatggagggaggggaggcgctggatggagcaggtggccaacagcagcctccagtgccagccatgagacaagaaggtggggggctccaggactgggggtcccagcctggtacagaaaaggctgggggtggagcagagggtggaaaccatggcacataactaggagtcttcgtccagaatagccaacaccctcagtccaaacacccgtggacatggcaggagagcaagggtttcgtccctggcaaaacccaacagttgaagagaggtttgcccaattcaggcacctcaattctgcctaacagccagctcctgtctggtaaccttgaggctaagtccacaatctagaagttaccccactgtgcccacccagcggccgc

SEQ ID NO: 133492 - DNA, 1612 bp, Homo Sapiens
  misc_feature (891)..(891): n is a, c, g, or t
  misc_feature (960)..(960): n is a, c, g, or t
tttatagtctggcttttttctcccactttattatggagcagaagtaagcctatcatgttcttagaaaggctcttaagaggtgtcctggagtccttgaatcactttagcatctggggtaggatgtgccaccaggaggatttgggctggagcgtgtgtgtttgcctttgacctggactgctgtctgatcttgctgaacactccaccgacatttcctaaagttgctcagtgccaatccagcaaagcagtccattttcccttggccaagattgagatgtattgttttagatacagaagagttcttggatgagccaaggacaagctggggtgtcctatattgaacagacctcgatgaaaatcttgaattcaccccagtgccctctgttggcaagggaaggtgaagattgaaaagttaaaaaagcttttggccacttgagaggatcagggccgcaactcttgaagaagcaaagggctcagtgcattggggtcagcgctggtacagctgaaggatgccggccttgtgcaggtccctccacagggcagcttccagggacagatcgtggtttgcataaaatatcaatggcttcatttttcgttcgaaatagtggtcggaaaatttccagtagttgcttgtgatgaatccataggcactgacctggtcacaggtatgcaaagctgtcagcagcatgagagccccggtactaggcatatataggtctccaaaatgtgtgttaatcaactttgatttcaagaacctttctgtcaggtagctgatgaagtccggatgtagcagcttgaatttactggcagaggcttctggtccaaaataggcgtgcggcctaggacccatgatagaagtggacagagcgcccagagccgtcgtattgcaagggngagatggaggggagggtcagggcgccggagtagccgcggtaccctgtcccctttatctaggccctcagngacaggcacgcccagaatggccgatctcagcatcacatagtcgcggatgtctgaggggatgaagatatactgcaggtcctgtcagaatagagacaatgagcccagaggggaaccaggacatgtttagctcctcagtgtggacagccctccacccaaccttgccccctgagccgactggagaatttcccttaaatacctttcattcccacccagaggtgctgtactggtttcagtgtaggtccacaaatcctctaatgctccttcaggaggtggcacccaattgccatcccctggagtatgggctggacttagcgactcatgcacaggatttttctgataaagaggaaagtgatggtgtgtggcttagagactaggtcataaaaggcactgtggcttcctttacgttctcagatcactcactctggatgaagttagctgccatgtcgtgaggacactcaaatagcctacagggggcccaagtggcaagggcccgtgagacgccatcttgatgtcagctccagtcaagcttttgggtctctcagatgatgcagcccatcatctgcacctgggccaaaacctcccactaagctccccagaaattcctgacccattgaaaccacaagatagtcaatatttgttgtttaaagccaaa

SEQ ID NO: 133493 - DNA, 949 bp, Homo Sapiens
  misc_feature (73)..(73): n is a, c, g, or t
  misc_feature (99)..(99): n is a, c, g, or t
ctcagtgccaatccagcaaaagccagtccattttcccttggccaagaattgagatgtattgttttagataccngaagagttcttggatgagccaagggncaagctgggggtgtcctatattgaacagccctcgatgaaaaatttgaaattcaccccagtgccctctgttggcaagggaaggtgaagattgaaaagttaaaaaagcttttgcccacttgagaggatcagggccgcaactcttgaagaagcaaagggctcagtgcattggggtcagcgctggtacagctgaaggatgccggccttgtgcaggtccctccacagggcagcttccagggacagatcgtggtttgcataaaatatcaatggcttcatttttcgttcgaaatagtggtcggaaaatttccagtagttgcttgtgatgaatccataggcactgacctggtcacaggtatgcaaagctgtcagcagcatgagagccccggtactaggcatatataggtctccaaaatgtgtgttaatcaactttgatttcaagaacctttctgtcaggtagctgatgaagtccggatgtagcagcttgaatttactggcagaggcttctggtccaaaataggcgtgcggcctgtcccctttatctaggccctcagggacaggcacgcccagaatggccgatctcagcatcacatagtcgcggatgtctgaggggatgaagatatactgcaggtcctgtccttgtggcacggaggtgaagcccagattccagtaggagacgagggagttcttcatcgtgttcacagtgaaaccatagaaggaagtcttggtgcccacatcgcgctcgaagcctttgatcacagctccattgagtctggttggcacagaggcccatcagtgtctgaacccacgcgtccgcggacgcgtgggtcgacgatatcccgggaattccggaccg

SEQ ID NO: 133494 - DNA, 1989 bp, Homo Sapiens
  misc_feature (212)..(212): n is a, c, g, or t
  misc_feature (354)..(363): n is a, c, g, or t
  misc_feature (425)..(425): n is a, c, g, or t
  misc_feature (567)..(567): n is a, c, g, or t
  misc_feature (569)..(577): n is a, c, g, or t
  misc_feature (920)..(989): n is a, c, g, or t
  misc_feature (1239)..(1256): n is a, c, g, or t
  misc_feature (1377)..(1416): n is a, c, g, or t
  misc_feature (1439)..(1451): n is a, c, g, or t
  misc_feature (1466)..(1478): n is a, c, g, or t
  misc_feature (1569)..(1622): n is a, c, g, or t
  misc_feature (1806)..(1861): n is a, c, g, or t
aaaggacaggtggggggtgcgtgcggggaggggaaaaacatgtagtggtgggtggggcgccggagataaacgggaaagaagctggtgtgtgctgggtggggtgggaaagaggtgaagcacactatggggtgtagtgttttatcccggcggggggaggaaaaagaaatgtctagcgaggtgaagaaacgaggggttggggagatgggggtatnaatatggttttaccggggaaaagtgtggaaatggtaagaagattatagaaaaaatatgatcatgtggggggggacatcgcgtttttacaaacccgcacaaaccgcacccgccgagataaggtggctgcgcacgttacggcannnnnnnnnnagtatattttcgtaaaggagtgggggggctctcagtggaaggggcccaaggaaaaaacgttnagctgcaggcgggaagaagatttatcttattgggtggggtgttttgtgggtataggggggtgatagggggaaagagatggtggtccccggagaaagggggggtggagggaggaagtggggacgaagcactccccggcgggtntnnnnnnnnnaaagggaacattaaaatttctctctcaagtggaaagggggggacaaaatcacgggtgtgaggatgaagaaaaggctgggtggataatcacattgagaagccgtgacagagtagaataataaacccgccgcacgtgggcgggggagtttaatttataattcgttacggcgggaggggagataacaaagagacggggtgggttatctaaaagggcaacatagtggggtatcatcttatgggggtaaaaacaacattaaggggccacgggggggtgaggggtacaacaaattgtggaggcggggccccgggaggggtagtgttgttgggataggaattattattcnnnnnnnnnnnnnnnnnnnnnnnnnnnnnnnnnnnnnnnnnnnnnnnnnnnnnnnnnnnnnnnnnnnnnnggagtagtaggggggagagaggcggataggagatagatgtttttttaggggctacggcacgttggtggataaaaaaagagagatgtgtttattccatgatcagtacagaccaaatgcatattcaccgtatgaaagtcaaaccagtcagtgactccagagtttggccaacactgaggcaccagcgtcgtggtgtagagggggttctcatggcacgcgtaacctcaccaggggctccaattataaaaatgtnnnnnnnnnnnnnnnnnngcatgggcaggagcggccagctggttggggctgggcgccaggtaggagagtctctgccttagtctgtggcgcccccagggcccggttcccacctcatcccttggcccttcctttctcagtnnnnnnnnnnnnnnnnnnnnnnnnnnnnnnnnnnnnnnnnccaactcaacagatctgacattnnnnnnnnnnnnngccaacaaatgggtnnnnnnnnnnnnntggaggggaaagaaaagaaattgtagctttctggttttataattaaaaatagactaataaagtttgaaactgagtaaaatataggcaggannnnnnnnnnnnnnnnnnnnnnnnnnnnnnnnnnnnnnnnnnnnnnnnnnnnnncacaccagtttggtggagtcaccaacaaacttcaaacaaagatatgccaactatgttcactatacagtacagccacggtcacacactacccacagcgcggtggcagccgctgctcaatgaggagacgatcacaccatttcggagataagcagtgccattgtgtctggaggagaagagagaattnnnnnnnnnnnnnnnnnnnnnnnnnnnnnnnnnnnnnnnnnnnnnnnnnnnnnnnncgaaacagaaacacaggtgggaaggaactgactttggttggtggcctcactccccggccgagggctacccacgcaggacagtcgcctcgctccggatgccatggacacacacacctccacggcactcc

SEQ ID NO: 133495 - DNA, 614 bp, Homo Sapiens
ggcacgaggcggcgtgcccattttcttaccaacccgcctcccttcagacggtcctgctattacgggttgacgctgtctttgagcgacttgcccggcttgaatgcaacggtgttgctcgccttgattttcactggctcaccggtttgcgggtttttgccggtgcgggcgccgcggtggcgttgcaggaaggtgccgaagcccaccaggggacgctgtccttgcggtgcagggcgccggtgatttcttcgagaacgtcgttaaggacgcggttggcctgctctttggtcaggtctgctttttctgcaatagcggctgcgagttctggtttacgcataagtgaagcctctttgacggttttttgttgttatgtccgtgctgctctctggtggagcagcgcccaaggcgccgcaggctctactctgcggcagacgggagtgaggatggcatgccctcgcacgctccgccagtctcgcggcgacctttctgggggtaagaaggtgctgattccgacagaacgaccggcatttacgccagcaatggcggaagttctttgttaagggcaagtttttccatgacggcgctgccggtcagcgcataacccagcaggcggccgc

SEQ ID NO: 133496 - DNA, 765 bp, Homo Sapiens
attcggaacgaggaagctgtatacccagtcaaggccctttagtgatctcctgttacccttgctacactctgcccctccctcctgtgctgctacagactctcagttccttgaaagtgcccttctcccttccaccactaggcctttgtgtgtgctgtgccctccccttgcaacacctgtgtcacatttacccctttcactagctcttggtcattgattacatcccaacataaccatcactacttcagggaaatattcttattgggcaaattgatagaaagggcttgaaagtcctttaagctgaaagaatctcctcttatttgcaatcaactgaaaatggatcctttatttgtgaagcatcctcatggctcttgcttgtgttacaccattgagcatttccaggcaaatgtagaaaagggcattgctgtttaatcacttcctgattaatatcatatagattacaaatgctctctaaagtgctagccaagtaatactcctcattcatatttcacgtgacaaaagtccctgattcttatgcagataaagatcttattcactcttttgtaccaagaaaactgggagtaaagtgaactggaggtggttactctcatttttactgctcttcctttccttcagactgaggtctgagcaaacataaatattttgttccaggtttctatgcctgatacaactcatgtttcctctgcctgaaattcttccctttttgaatcaccctgtgtactaccacctgcctacagccgcggccgc

SEQ ID NO: 133497 - DNA, 904 bp, Homo Sapiens
  misc_feature (372)..(380): n is a, c, g, or t
cactaaaaataaatttacatatgatttcattaatatattcactatctaaaccatattttttacactacgtaaaatacattgtatatgtacagtgagtgatgctttttgctttagttctcatttttcacattaaggggaggaaagctacccatagatagtattcttactccttttcacatgcttcaaggacagtttgcaagtggatataaatacatacacatcactagtgattatgcttttatttatttccaacttcttataggtaacataattttcagacaatgttagctgtttttaatccatcagtaaactgcattaagattcttaataaacaaacactgaaggcctctttcatatttgtatcatctgcannnnnnnnnatatgcttgtcatgtggctttactttcagcctcactcttttcttcttccaaatggattatccttaaaccttttacctttaaagagcctgagatttatatttaactcgaacaacagtttgcctctgttgcccctgtgttcatgttttcctaagccagagtttcccacgcctcctgttcctggcagcccaagtgccttcgctgggctactcccacctggcccttgcttttcattccttagggcagtcacttagcaccttccaaagtgcctgcacatgtttcttatttcatttcttaaacattcatattaccactatttagattgaaggaacagaattggtttgggcttgaagagaatacaaagagatctgtcttcaattatctgatagtagtaaagtttcacgggagaaagaaagatttcggttccacataaggaaaaacttggaaagttttgaatggaaagttcatagagagattcagtaaccacctgtcaggaattttgtaaagacgtctacggccgcggccgc

SEQ ID NO: 133498 - DNA, 662 bp, Homo Sapiens
agaattcggaacgagggcctcagaccccctgaggaaactgaaccccgccatttcatcgcaggccaggatgtcagccagggctttacgtaactgagactccgccggcgaatcgcgcagcagtttatgtgcactcaataacacctcggcaggaacaccctgggcgcttgccacgtcgatcaccgcaaagagaatgaatcgcagacgaacttcgcgatccgtaggccaaaccgtttttcgcttacccaaggtaggcactcatccgttgagaaaagtccgaggctattgcccaccgaggggtgtttcaagcgtggggacttaagataggccacttcctacacctgaaagggaaataccgtacctacattactgcaccggcaagaaattcatcagcagcaaactctgcgcgtagttgagcgccacacgtcggtagcgttcatcgagcatctgcgcgagcaagtccaggcgcgcaaccactttgccgaactcgaccgcaaagctcaggttactgccctcctccgatatctcgttggaaaacagcagcaacaccccgttggcatcctggcgctgactgagcagccaggtggctttttcgatattgcgtgcggcgttgctgacaaactgcgggttgatcgagtcagtcatatagaactgggtgcggccgc

SEQ ID NO: 133499 - DNA, 1331 bp, Homo Sapiens
  misc_feature (1221)..(1255): n is a, c, g, or t
  misc_feature (1279)..(1279): n is a, c, g, or t
tttttccatattgatcaatcatgtttatttaaggttttcttaacattagagatttttaatgggagtataaaattagtaaacaaccatttcattttttctctcttcctattctagccacataagccagtttaatccatgacacagatttcagctgtaatttgcaaaacaatccaagagctaccacagtccccaaaactacagaaaactgccatccacaaataaactaccaaggtaaatgtaaatacagcgtggttctaattttctttcacacaatcccagacaaccccaaataactttataaataccttatgaaaaaaagcaatttaaaaacctatcaaatctatttaaaatatataaatgcagacctctcaaatttccttcaatcaggccagaaattatcacaaaaattataatcacagttacaaacagaatgagtggaatgtttgtaagtttaggacaaccaaaaaagccccatgtaactttttaaaaatataatcattcactcaaatatactgtaaataggaatggcagtaacacaggaagcaaaaataaacttgcaagtgaaatttctagaagctcatgaaaacaataccatcccatattgcagatacaaaaggaaaaacagttctaatggggttaagagtactctggtcatcttcgttcgtttggtcgtgcaaggtgttaactattttcacttcccatatcacaaagttagtccacaggaggagctggtggatcttgtccattatgaggactggttggctttccaggtaggctggatcctcttagattaggaggtctcagtaagaacaagatcaatgcaataaccatccaggctaccaagatcattgtaacactgatgccattatcaccagagggtcccggtaattcctgaagacactctgtgtctgtgcagtaggactgggactgccgtaacagattgatcagtcttctcattgcatgttcatgagagcaaacacattcacagggatcaaatccaccttctgccatgattacccagcttgattttacttgactgtttaaatccgcccagacaacaaccgatggggcggggaggatgggggccgggaccgaggctcggcagaaagaccgcctggagcttccagaaggctgcggctgctccggacgctgctgccactgccgtttctccccggccgtaatggccgaattcccgggcatatgtccggtaccgtcgactgnnnnnnnnnnnnnnnnnnnnnnnnnnnnnnnnnnncgccgcttcctcgctcactgctcngctgcgctcgtcgttcgctacgacgagtagcgccctatagtgatctatacag

SEQ ID NO: 133500 - DNA, 812 bp, Homo Sapiens
  misc_feature (113)..(127): n is a, c, g, or t
atttgacaagcagcagtatcatgtttgtcattttaatgtagatacaattattaggttatctgtcatattacaatatttaagtttttaaattttatgtcctttaagatacattnnnnnnnnnnnnnnngacacatcaactgcaaacgtgaaggggagaaaaagcatggtacccaaccgaatttccacttttcatcaatacttcactcattcttttaataaagtttttaagaaatgtcattaatgacatgagcttgaaatatctctaggcattttctttgacgctcatgacgtggcactggtgatgttgtaaacagcagaaaacaggggctgccaaatgaccaaattatggaggcacagtcctgctttttcccacaggaacacaccaaatggtgatggcaatgatcttctcacaccacgctggaggagagcgacatcacgcgacgtagctgtattcatctgccgacgcctggctgcgttctatgtattgtttgtctatcagaacttcaatacacttcttaatcatgctgatactgggattaaacctagctcttgactggctaatcacctcttgaataagggcattgtgccgaagcacttttcgtgctttcatgatacgacctatagcagcttggagatacattttccggtcctcatcaactgcacttctagtctgctccattttcttgtggtgtgtctttctgcattgatgtagtaaatttaaattttgttcttttactgctaaagttcatatttaatgaaaacgaagattctgcatcaatatcttcccttttctaatcatggttaatcatttt

SEQ ID NO: 133501 - DNA, 1202 bp, Homo Sapiens
cagtcgacggtaccggacatatgcccgggaattcggccagtacggccggagtcaggaaggaatgataacgattggctctcgtaacagtgcaggttattagtactcttagagtgttaaattacgattactctgattctggtctgacatagtgtttggatgcttcaaatgtgagtatatgcatcaggtgagtacagatgggttcagggtaaaatttagatggagtacatgtttgatccatgttagtgaatcattatcaattagagaagttctatacgtgtatcgactatcattgatggtactgcgtatatgaatattcactcacattatcacggaatttatgtatagtttctctaatatagaagataaaatgggtgtcctcataactttaacaaagaaaaccctcagtcctatttattaatgggtagaattaaatatataattttatagctcagtttacccagtattcatctgcaaagccagattgctctcattgcttttatatttttaaattggtagcttttagagacctatgatcctcatggaacttaattttttattaaatattcaggtaacagttctgaattcatgtgataatggtggcattatatatgattaaacacttcagaactttctaagtgttatcaggagtattttgagggagatatgattatattgtattttctcagataagaaaaatgttttttaacaatattattttaatctgttttaagcatctcttagatttacattgtaactacataaagcagtgaagcaaaggcaaattaagataaagctagaaagtctgaacattttatttcaaaatcatacgaatcggggtcagttaagcctcagtattcttagcttttgttgattttggcactatctttatattattaaatatatttgttgtttggatatttcatataaagatggctataattacatatttcattcccaatttgtgtgtgttggggggtacttttaaaggtgactattgttttgtacatctaattttgggaaagcaagtctataagacatcttgtgatttcttaatgtttttgtttgtatgtttttcaaagatatcactgtcctttatcatgttttgaagattgtttaaaattcattttcctaaattaatgtgcaagtaatgttttgaggatatcagtgttttatattaaacatatttccaattcattaaaaaa

SEQ ID NO: 133502 - DNA, 562 bp, Homo Sapiens
  misc_feature (108)..(120): n is a, c, g, or t
  misc_feature (367)..(379): n is a, c, g, or t
tttgaggttgggaggacttgtttattcaaggcacggtcatagcattaacaagaaggttcagcattctggcacattccttttgtggtggtggccaaggttagcccacannnnnnnnnnnnngaccgggggccccagaggacgcaacgctgctgataggcactttgcttccaggggcagtggagggtcaggcaggtgggcatggggccactggaggcctgaggagggcccctcctggaggctctaggcaataccggttcctgggcggcagctccttccagaaaggattaagtcaggaggtgatttggtggatggagtggggtggggcggctgggaagtggctggcagaggagtgggatggcagtaggtnnnnnnnnnnnnncaatgggtgaggcaggtgtgggctgaggcaggaggtgcctgagagggcctggatgtggtggcggggggaggctaaaagatgccccctgctccaccatcctgtagtgaccatgggaggtccagatggagccaactgccatgaggctttgctggttcccctaagagtggactatggaaccttctc

SEQ ID NO: 133503 - DNA, 735 bp, Homo Sapiens
  misc_feature (701)..(701): n is a, c, g, or t
  misc_feature (708)..(708): n is a, c, g, or t
gtagttataatgtttaatatggaatagatatttcatatctatatttggaaaacacataatagggaaataactgccctataattgtatgagaagaataaaaacagttcctttagaattcttattgttttctctattctttttcaggctaagacaatgcatagcttttggttgatacaggtaaccctggttaccactaaagggtgatccccttcagataataaacccatttaactccagtctcactcccttcaccaggagggcagctcacagtcagcttggtggtgatgggggttttgctgccagatgggtttccttcaaaggagactgtgatgttgttgatcttcttgggccgcacagactctccagcgcgaatggtgaaggctgggttatccacgatgatggagaaggtcaccatgtgatagaagacattcttgaaggggatgattatgctgtacccggctcggatcgagaagggaccttggggcttgggaggcagagccattccaaagagggggatgatatactctccacctgcgagcgatgataggatcaggatgcccttggtctcacccaggtggctgggctcgaataagacttccacactggcttcagtgcctccctggcctcctggggctgcattaatgagtttttctgcgtggaagtctgtacagtcggtcctgcagtagtattctgtcctctgncgtgtgntattgatgaactcacaaggatgatttg

SEQ ID NO: 133504 - DNA, 579 bp, Homo Sapiens
ggcacgagggcggttacggccgcaaccacccgtttgccggtgagattcgcatcggcgacgtcgaggtgtggatcgaccccgaagagttgggctttcccatctgcctgggcagcatcgaagtcaccgagtgcgagatggtcaaccaatttgtcggctcggccactgagcttgcgcagttcacccgtggttacggcctggcgttcgggcatgccgagcgcaaggccatgggcatggcgctggtcgaccgctcgctgcgcgccggggagtacaacgaagaagtcgtctcaccggcccaacgcgaagagtttgtgctggcccactgcgacaacgtcgaggcggcgggttttgtctcgcacctcaaattgcctcactacgtggacttccagtccgagctggaactgatccgcaaactgcgccaaccggccgagggcaaccgccatgaatgacttgaccctaccggctgtgcgcgacccggcgtacaacttcgcctacctcgacgaacagaccaaacgcatgatccgccgcgccttgctcaaggccgtggcgattctcggttaccaagtgccgtttggcggccgc

SEQ ID NO: 133505 - DNA, 646 bp, Homo Sapiens
ttttttagaagcctgcatatttaacctttatttctttattttaacacaagtactcactaactggtaaaattcctggaagtctgcgtatttaacttgtatttctttgtctactataatgttgccagtgatctcaatgatcctgatctaagagaaggttgtttccaaagtgaaggtataagtgagccatcctctgccatgtgtcaagcaaattagtccaaagttttgacttcttcttggtcctctttatctgactctgataccactttctttgctttgtgttctttggcttttggtttatacggaagggaaatcagttctttcgagatcctttcttctctttgttttcttaagagttggagaatctcttctcttgttttagccttttggagatactttactttctcctcagattcctgtatctttagggcttcggcaaagatgtctctatttttgttactcgcaaggtgaaaagactgcgaggagtggctgttttcagaccctctgctcctcctgggccgcgccaccggcagacgctgactgctgtctctgcgcagcaccagctgagattcgctagggggatacatcgacgccgagatccagaactgcttagccagttggcatcttgttccgaggagccagcaatacc

SEQ ID NO: 133506 - DNA, 649 bp, Homo Sapiens
gcggccgctgccgcgcttgtaggtgtcgttgacgacattggcgtcggcccacagctcggactccatggcatcgcccgaggcgaagatgccgacgatggtccagggctggttgccgagcttcagcgtctccccgaccttcagcccttcgaactgccgcaccgcgcccttgccgacgatgatctcgcgcaggcccggctggaaggtccggtcctcgatgatcttggtgttgggacgcacgacgaaggcggcttcgctgacgccgtgcacctgggcgctgcccgagtcgccggtcttgctgcccttgacgggcagattggtcgccaccaccgtctcggccgagatgatgggctcgccctgggcattgtgggagatgtccggggcctgctcgatctgcacgatgtcctcgcggctcagcgaggaagagacctcgttggccgaggcgccgcgcatgacgatggcggtgtccaggctgccggaattgcgcagggtctggccatagccctcggccatggccagcagcgccaccagcacgcccaccacgccagcgatgccgacgacgatgacggccgacgagcccaggcgctgggtcagcgtgctgatgcccacggacgccaccgagcgggcctgcatgccggtacggcctcgtgcc

SEQ ID NO: 133507 - DNA, 756 bp, Homo Sapiens
cacgcagcttcaggcccaggtattgagctgacccaaggtacgaccccctcacagttcgacccggtcccggatctggtggtgatcggtaacgccatgtcacgtggtaacccggcggtcgaatatgtactcaacaagggcttgccctatgtctccggcccgcaatggctggccgaccatgtgctgcaaggccgctgggttcttgcagtggcgggcacccatggcaagaccaccaccagcagcatgctggcctgggtgcttgagcatgcgggcatgagtccgggtttcctgatcggcggtgtgccgcagaacttctcggtgtcggcgcgtttgggcgatacgccgttttttgtgattgaggccgatgaatacgacagcgccttcttcgacaagcgctccaagttcgtccattaccgcccgcgtaccgcgatcctcaacaatcttgagttcgaccacgcggacattttccctgatctggccgccattgagcgccagttccaccatttggtgcgcaccatccccagcgaaggcctggtgatccacccgaccaccgagccggccctgcagcgcgtgatcgacatgggctgctggacgccggtgcaaaccaccggcgcgggcgggcagtggcaggtcaagttgctcagcgaagacggctcgcgctttgaagtgctgttcgagggtgaggccccaaggcgtcgtcgaatgggacatgaccggtcaacataacgtcgccaacgccttggtcaccctggcggccgc

SEQ ID NO: 133508 - DNA, 627 bp, Homo Sapiens
  misc_feature (56)..(76): n is a, c, g, or t
gcccgcccggcctggcttcacagagggtctgcggattgacactggttcttttcatnnnnnnnnnnnnnnnnnnnnngcagcatgtcacgtccgttgtgaccgaggcctggtcgtcgaaggggaggccccgcctggccaggctaccttcccactggagacaggcagggggacaggtgctaagggacctggcaggcagggctggcaggccccatggcgcctgttccagcagatgacaagcccaggtcagggtagagcgggcaggaggggggacgagggctcccacaacatgattttgtgtaaaatatggcagcgacacacgctcagggccgggaggtgggggttagggtggggacggcggcaacatcgtgtaaaaaagtgtcccagttcccatagcaaagagagctgtgaccgggtgttcgagcttctccagtacaagggggaaagccgcccggcgggggcggcgggcagggacatcatttggtttcctggtgctgtcagtccgcggggcgggcccctagctcccgtagtgcatggtgttggtcgggatggacatgggtgacgccatggagatggcggggccgcccatggtgaactgggacattttttacacgatgttggagcggccgc

SEQ ID NO: 133509 - DNA, 1730 bp, Homo Sapiens
ggggggagagagtatgaagtcgacggcgcgccgaattcggcacgaggcgagcaggtggacatcatcatctcggagcccatgggctacatgctcttcaacgagcgcatgctggagagctacctccacgccaagaagtacctgaagcccagcggaaacatgtttcctaccattggtgacgtccaccttgcacccttcacggatgaacagctctacatggagcagttcaccaaggccaacttctggtaccagccatctttccatggagtggacctgtcggccctccgaggtgccgcggtggatgagtatttccggcagcctgtggtggacacatttgacatccggatcctgatggccaagtctgtcaagtacacggtgaacttcttagaagccaaagaaggagatttgcacaggatagaaatcccattcaaattccacatgctgcattcagggctggtccacggcctggctttctggtttgacgttgctttcatcggctccataatgaccgtgtggctgtccacagccccgacagagcccctgacccactggtaccaggtgcggtgcctgttccagtcaccactgttcgccaaggcaggggacacgctctcagggacatgtctgcttattgccaacaaaagacagagctacgacatcagtattgtggcccaggtggaccagaccggctccaagtccagtaacctcctggatctgaaaaaccccttctttagatacacgggcacaacgccctcacccccacccggctcccactacacatctccctcggaaaacatgtggaacacgggcagcacctacaacctcagcagcgggatggccgtggcagggatgccgaccgcctatgacttgagcagtgttattgccagtggctccagcgtgggccacaacaacctgattcctttagccaacacggggattgtcaatcacacccactcccggatgggctccataatgagcacggggattgtccaagggtcctccggcgcccagggcagtggtggtggcagcacgagtgcccactatgcagtcaacagccagttcaccatgggcggccccgccatctccatggcgtcgcccatgtccatcccgaccaacaccatgcactacgggagctaggggcccgccccgcggactgacagcaccaggaaaccaaatgatgtccctgcccgccgcccccgccgggcggctttcccccttgtactggagaagctcgaacacccggtcacagctctctttgctatgggaactgggacacttttttaccgatgtgcggggcgttccccaacctaaccccacttccggccctgagcgtgtgtcgctgcatattttacacaaaatcatgttgtgggagccctcgttcccctctgccgtctacctgactgggttgtctctgctggaacagggcctggggccctgccagcctgtcctgcaaggtccctagccctgtccccagagctgttcagtggaaggagctgccaaggaggactcccctttgtaaacagaggcctgttacacgggaaggtaagtaggcatcttaaacttattgttgaaaaaacacagtaacagagacctttaacagaccaggacggagagaccctcctaactagacggacgaggcctcaatatagaccacaagagggaggaacacgatatctaatacagtacctatattcaatacacaacaacacgagtacaatctatacaacgctacagag

SEQ ID NO: 133510 - DNA, 984 bp, Homo Sapiens
  misc_feature (50)..(71): n is a, c, g, or t
tgggcctggctccacagagggtctgcggattgacaatggttcttttcatnnnnnnnnnnnnnnnnnnnnnngcagcatgtcacgtccgttgtgacggaggcctgtcgtcgaagggagggccccgcctggccaggctaccttcccactggagacaggcagggggacaggtgcctaagggacctggcaggcagggctggcaggccccatggcgcctgttccagcagatgacaagcccaggtcagggtagagcgggcaggaggggggacgagggctcccacaacatgattttgtgtaaaatatggcagcgacacacgctcagggccgggaggtgggggttagggtggggacggcggcaacatcgtgtaaaaaagtgtcccagttcccatagcaaagagagctgtgaccgggtgttcgagcttctccagtacaagggggaaagccgcccggcgggggcggcgggcagggacatcatttggtttcctggtgctgtcagtccgcggggcgggcccctagctcccgtagtgcatggtgttggtcgggatggacatgggcgacgccatggagatggcggggccgcccatggtgaactggctgttgactgcatagtgggcactcgtgctgccaccaccactgccctgggcgccggaggaccctaaaggaatcaggttgttgtggcccacgctggagccactggcaataacactgctcaagtcataggcggtcggcatccctgccacggccatcccgctgctgaggttgtaggtgctgcccgtgttccacatgttttccgagggagatgtgtagtgggagccgggtgggggtgagggcgttgtgcccgtgtatctaaagaaggggtttttcagatccaggaggttactggacttggagccggtctggtccacctgggccacaatactgatgtcgtagctctgtcttttcctcgtgccgaattcggcgcgccgtgacttcatactcttccgccct

SEQ ID NO: 133511 - DNA, 1052 bp, Homo Sapiens
  misc_feature (716)..(717): n is a, c, g, or t
  misc_feature (764)..(764): n is a, c, g, or t
  misc_feature (791)..(791): n is a, c, g, or t
  misc_feature (877)..(877): n is a, c, g, or t
  misc_feature (881)..(882): n is a, c, g, or t
  misc_feature (895)..(895): n is a, c, g, or t
  misc_feature (918)..(918): n is a, c, g, or t
  misc_feature (946)..(946): n is a, c, g, or t
aagccatgaaatctagaaataagtcatatttctgagttgataaaatgcttttctgaacatacattttaggtatctggcacaattaaccaaatgtctgcccatttttgtgtagctttcatacagtacagatttcattgatgtcgctcccacatctgagtattaaaaacatttgacattgttcttctcagtcctcacaacacccctgtgaggtaggtggtattgaccccattccacagatggggaggtctaggcacggaaaggtttagtggctcctcacaggccgcgtggtggggcagcagagtggtgctctggccccgcgccgacgccgccttcacattcacacttcttcagtgccaccgcaacactgcatggcaggatctcacgctgaggccaagttcctgtctagtccagaatgaagccagcgtctcacctcttaaagcttcgatgtgtgactcaaagccaacttactctcccaaacttgcaaaacaaacatactgactgaatcttagttgggactatttgcagtatttaagattatttttgagagtcaatctgcttggatttgtagttgtatatgctcaaatccctttggaaaacagtttgaaatgacatgagggacaatgtaattttgagaacagaacacagaaaacaagagttctgagactggcattgaaattgagaatataagctatggtaaaatgagaatcaaatcccannataaacggagagcagacttctcaatgtttaaggcacgcacagggcanggcatttcagtagcactcttggatcanaagaactgatgctcctttgagccgctatcactgacaacaggagctgagacccccgggaaagccagccggggcatgatccccttggnctgnnggcacggtcacancaagcactcaggcaatcgtgtanagtatctaggcttactgctgcaggatanagttgactagacaccagcatgagctagatacccttttgatgtgtctgcacttataaaatagtatgtagcttgataaataataagggcaagatctagaaggatattt

SEQ ID NO: 133512 - DNA, 791 bp, Homo Sapiens
  misc_feature (684)..(684): n is a, c, g, or t
ggggggtagcaggtaccccttcttatcagcggtaaaaatgcatttacaacctttcatttaaccgaaaaacacagaccgctttaacctctttatttctgtcccccactgcatgaacatctatacaattttaaaaatacttcctcataggatgctttggcccttcatctatttaatcatagctacatacctattttttataagtagcagtacacattcaaaggggtattcctagctcaatgcttggtgttctagttcaacttttatcctgcagcaagtaagcctagataactctacacgatttggctgagtggctttgtgtgaccgtggccccaggccaaggggatcatggccctggctggctttcccgggggtctcagctcctgttgtcagtgataggcggctcaaaggagcatcagtttcttttgatccaagaagtgcttactgaatgcctgccctgtgcgtggccttaaacattgagaagtgctgctctccgtttatttgggatttgattctcattttaccatagcttatattctcaatttcaatgccagtctcagaactcttgttttctgtgttctgttctcaaaattacattgtccctcatgtcatttcaaactgttttccaaagggatttgagcatatacaactacaaatccaagcagattgactctcaaaaataatctntaatactgcaaatagtcccaaactaagattcagtcaagtatgtttgtttttgcaagttttgggaaaagtaagttggcttttgaggtcacacattcgaaagcttttaa

SEQ ID NO: 133513 - DNA, 732 bp, Homo Sapiens
gcggccgcgggcggcccgaagggactcatcctcggcccgctggaccggtttgtttttggtgaatggctgccgcagtcggcgcagccggtggacctgataggtgcgtcgatcggcgcgtggcgcatggccacggcttgcctggaccacagcctggccgccttcgtgcgcctggagcacgactacatccaccaggagtacgagctgccccccggcgcgcgccgcccgacggcggacgcggtgagcgcgcagttcgggcagaacctgcaggccttttttggcggccgtgtggacacggtgctgggccatgcgcgctaccggttgcacatcgtcgccgcgcgcgggcgccacctgctggcgcgcgagcaccgctggggcacgccgctgggctacctgggcgctttcgccagtaatgcgctgcaccgccgcgcgctggcgctgtggctggaccgcgtggtgttctccaccgctgcgccgggcgcactgccgtttgacgtgcgcgacttccgcacccaccaggtggccttgaccgcgcagaacttcatgcccgcgctgcaggccagttgctccattcccttcgtgctgcgcgccgtgcacgacatcgccggcgcaccgcgcggcgcctactgggatgggggcatcaccgactaccacctgcacctgcgttatcaggcgccaatcgctattaaaaatatagctgataccgctttacccgcgggtgttgccctcgtgccg

SEQ ID NO: 133514 - DNA, 419 bp, Homo Sapiens
gcggccgccttgctggcggggattctgttcaagatcggcagcgagatttttgtcgccgcgcaacatcgcactggcctggtgctggggatgtttttcacctatctgatcatcaagcgcctgtcgccgcgttatgcagtactggccgcgctggtaatcggcaccctgttgtcagggctgatgggtttgctggacttcagcggtttccacctggaagtggcaacaccggtgtggaccacgccgcacttctcgctggcggcgaccatcagcatcggtatcccgttgtttgtggtggcaatgacctcacaaaacatgcccggcgtcgccgtgttgcgcgctgacggctataccgtacccgcctcgccgttgatcaccgcaacagggctggcctcgctggtgctggcgccctttggcctcgtgcc

SEQ ID NO: 133515 - DNA, 1062 bp, Homo Sapiens
  misc_feature (939)..(999): n is a, c, g, or t
cgcgagccgcgccgccatcactgccgctgccaagtcctccacccgctgccccgccatgtgtgctacctgctgccacctggcgccccctgctgccccgtgctgtggagggtggtccccctgcaccccctcctaaacctcaccagtaacaggagactgtcagtcagacccacggcccaggtggatgcaggtggtggacatcatgagggtgaacgtggacaatggtcctggtagcgagaccagaatgctgtcggacgctggacgaccgtgcagatgcactccaggcggggggcctcccagtttgaaacaagtgcagccaagctcaagcgcaaatactggtggaaaaacctcaagatgatgatcatcttgggagtgatttgcgccatcatcctcatcatcatcataggtgagtagggtgagaatggccggggccctttccctggagaggtttccccagtggattctaggttttgaaggtcattaatctagtttttactcttcagccaaaaacacatatagctgctaatggcaattctgattcatctagagccaaaaactttgatgttatttagcctgcattttgcctagttcttggcagtcttgttaccatttggaaataggaaagctggtgtatccattgaggaccctttaggcctaagagcccagtctgagaaccctggaattgaggagtgggagaaaggaaaggaccaggggcttgagacatgaccaggaagccaaccaccccattatttgagagcttgcggtctcagaggctcagaggattagggtctgtggcttcaaggccataccatggagcggaagggacctcagaacctacctgtctagccccttgctttgtagatggaaaaactgagtccaagagagggtgtcagccagctggggagtggggaggattggagcagggccaggcctgacacactnnnnnnnnnnnnnnnnnnnnnnnnnnnnnnnnnnnnnnnnnnnnnnnnnnnnnnnnnnnnncacagtttacttcagcacttaaatccccgaggagtctgccctgcctagagaagggcctctccc

SEQ ID NO: 133516 - DNA, 962 bp, Homo Sapiens
  misc_feature (358)..(409): n is a, c, g, or t
  misc_feature (534)..(559): n is a, c, g, or t
tacatttggaaataggaaagctggtgtatccattgaggaccctttaggcctaaagagcccagtctgagagccctggaattgaggagtagcggagcaaaggaaaggaccaggggcttgagacatgaccaggaagccaaccaccccattatttgagtagcttgcggtctcagaggctcagaggattagggttctgtggcttcaaggccataccatggagacggtaagggacctcagaacctacctgtctagcccccttgcttatgtagatggaaaaactgagtccaagagagggtgtcagccagctggggagtgtggaggattggagcagggccaggcctgacacatctgctttcttgtnnnnnnnnnnnnnnnnnnnnnnnnnnnnnnnnnnnnnnnnnnnnnnnnnnnnacagtttacttcagcacttatatccccgaggagtctgccctgcctagagaagggcttctcccccaaccctcagccgttcctccacctctcagccatatctttcagccccccctctcctggatccnnnnnnnnnnnnnnnnnnnnnnnnnnccccctgtaaatagccagctgttatttatacatatataagtattatatatatttggtctgtttgtagttttattactagatgatttttccggttgtccttaacaccccttcctgaggttcccttcacccctctctcttgccttccttccctttccctttcttcctgactagccccaagtcccttcatttgcatctgctatgcaatagtccctctcctttccttcttcttccctcagatttagctgatccttcctcccaccctggccttcctttcctctttcctcctcactctccccgtcatgctccctctgccccgcctcaaaagaagacaagacaaaaaaaggcggggcatcaaaatattcccaaggggccaataagggaccggatttttggaaaggggcaa

SEQ ID NO: 133517 - DNA, 655 bp, Homo Sapiens
tttggttgcgatttttcttttttaatgatcaccatgaaatccactgggccaggccctggtgttctgctgccatagtcagagtcagagtggagggatgaccccaggaggggacaagaagccaagactgggctggggagccgagaaggagatagataagggggagagggtgcagtggggcaggcagaggaggaagtctggagccctggataacaacacagatataaggtgaaggcctccctctgccaccccagccctgagccacagacgttgaggtgcaagaagatggggattttggccacaactcctttcccatgtcaaagggaagacactgagagcagacaaaggccaagtgcccaggggcacaagaacaagttaacaagtaaaacaattagggacaccacctcctttccccagcccatttttcacatttacaactgaagcaatttgacaagatgatataaaaatctcaaacaaattttctagcccctggtcggggtgtggacaggaagtggtatcccgtgatccagaaatcaacacctaaaatccagaggcaggaggcaagccatgaagggtggggagggaaggaggagtcccacagtcactaggtcacctgctccgtgggcctcatctggatgtctccaatctggatgtgtgc

SEQ ID NO: 133518 - DNA, 1110 bp, Homo Sapiens
gcggccgcgtcgatcgcatgcctcgatctgctcgagtcgagcgacgagctgcgcacgcgcctccgcgcgaacagcgcgcgcttccgcgagggcatgcaggcggcaggcttcacgctcgccggcgcgggccacccgatcatcccggtcatgctcggcgacgcgaaggtcgcctcgcagatggccgagcgcatgatggccgagggcatctacgtgatcggcttctcgttcccggtcgtgccgcgcggccaggcgcgcatccgcacccagatgagcgccgcccactcgcccgagcacgtcgatcgcgcgatcgccgcgttcacgaagatcggtcgcgagatgcgtctcgtctcgtaggacgcaccgcgtcatgcaacaccgcgatcaccacggtgatcgctctcacgaagaccacacacgcgcgctccgcgcgcgcctcataactgccgcactcctatgaagatgaaggcgttgatcaaggcccgtcgcgagcccggcatctggatgggcgaggccgagatccccgaggtcgggccgaacgacgtgaagatccagatcgcgaagaccgcgatctgcgggaccgacatccacatctacaactgggacgactgggcccagaagaccatcccggtcccgatgcacgtcgggcacgagtacgtcggtcgcgtggtcgaggtcggctcgcacgtgcgcggcttctcggtcggcgatcgcgtgagcggcgagggccacatcacgtgcggttactgccgtcgctgtcgcgccggcaagcgccacctctgccgcaacacggtgggcgtcggcgtgaaccgcgcgggctgcttcgccgagtacctcgtcatccccgcggtcaacgcgttcaagctccccgacgacgtgagcgacgacgtcgcggcgttcctcgatccgctcggcaacgcggcgcacaccgcgctctcgttcgacctcgtgggcgaggacgtgctgatcaccggcgccggcccgatcggctgcatggcggtcgcgatcgcgaagcacgtcggcgcgcgtcacgtggtcatcagcgacgtcaacgagtaccgcctcgagctcgcgcgcaagatgggcgcgacccgcgcggtcgacgtgcgcaag

SEQ ID NO: 133519 - DNA, 722 bp, Homo Sapiens
  misc_feature (650)..(650): n is a, c, g, or t
gcggccgcggctgtaggcttcagatgcacaaccttggagggcagcaggaaccaccacctgctttttcgtcatagggtggtgggatgccgttaaacaccttgaggcggtcttgggcggcctggcttccttggtctcgcggggcagcatgcctcggggtccgccagaagatgcggctggggacccggaagtggtgggggcccagaagtggtaggtgcctcgggaagggttgctgttcatccacttgtggaggaaggccaggtacttcaacttctttctatagacattgccagaaatactgatgcccccgcagtgtacgaccaccaacttccggcctgcttagccaccatggccctcaggaagcccaggagatagctttgaccattgagcaccgggacctgcccctctgccatcttcggcagccgcctgggaaaggagttccctatttttagatgaaacagggaagggcatggggccccttcacccctgaggtacctctgccagatttccctggaaccctgtttgaaaaccacagatctagttcaatcctcgttgtccatatgaggaaactgaagcccaaagaatagaaagaaccaagacgaccttgtgcagagggagcagtaggattaggacttcaccctcctaattcctgnggttctgctattctctgctccctacactgctatgaagaacagagccacggtgtgaagttacaggggctgtgc

SEQ ID NO: 133520 - DNA, 773 bp, Homo Sapiens
  misc_feature (300)..(396): n is a, c, g, or t
accagctattttctttccatcccatctccttgtctctccaacatactgaaattaatttcctggtttttttatccagtagcgcctaaaataatagtcatataatattttccacaccatcaaaataaatccaaattgtaggcagattgattttatcttgttggtgttttccttctttacaaccttacttttgtacccatcccccaaacaaaataatgaataaaaagaaggaatttgctgtctataacctgcaattaaagtccttgttggtgctttaaatattaagtcaaggagtttaactgnnnnnnnnnnnnnnnnnnnnnnnnnnnnnnnnnnnnnnnnnnnnnnnnnnnnnnnnnnnnnnnnnnnnnnnnnnnnnnnnnnnnnnnnnnnnnnnnntgcattttcttaatataagtttccataaatgatttaactttttttcacatctgtatttcacatctcttcacttcggaaccagctatttttctttccatcccatctccttgtctctccaacatactgaaattaatttcctggtttttttatccagtagcgcctaaaataatagtcatataatattttccacaccatcaaaataaatccaaattgtaggcagattgattttatcttgttggtgttttccttctttacaaccttacttttgtacccatcccccaaacaaaataatgaataaaaagaaggaatttgctgtctataacctgcaattaaagtccttgttggtgctttaaatattaagtcaaggagtttaactg

SEQ ID NO: 133521 - DNA, 396 bp, Homo Sapiens
  misc_feature (95)..(228): n is a, c, g, or t
tgggtcaaagtggttggggcaaagtggctggggcaaagctacagatttaacaacatctcagcaaagcaattgtttaaagtacaggtctttttccnnnnnnnnnnnnnnnnnnnnnnnnnnnnnnnnnnnnnnnnnnnnnnnnnnnnnnnnnnnnnnnnnnnnnnnnnnnnnnnnnnnnnnnnnnnnnnnnnnnnnnnnnnnnnnnnnnnnnnnnnnnnnnnnnnnnnntgctggtcgctgtctctctggagctgctggatacaactgtagactgattatcagggcaggttccctgatagtgttgggtgatggtaatgcaatgatgaagatggcaggcatgcctctgccctccaggagtttctcagcaggtagctgtgatccactgcaaaggacatc

SEQ ID NO: 133522 - DNA, 1286 bp, Homo Sapiens
  misc_feature (125)..(159): n is a, c, g, or t
gcggccgcgcaggaactccgagcggttgcgccaccggctgtcggcggtgtaggcgagcgatacgcgttgcgggtcgcggctgttccagccgtcttcggcggcgcgcaccttctgcgcagcggttnnnnnnnnnnnnnnnnnnnnnnnnnnnnnnnnnnngtcggtcatggcaaaggctccgggggttgaaaagagacaggtctgtctacatacttgaacaagacaggtctgtctgtcaacatgaatggatgttcacatctctcgacgatctcgccggacccggtccgctgtccgaacaggatgcgcggacccgcgtactcgaatgcgcctaccggctgttctaccgccacggcctgcgcgccaccggcatcgaccgcatcattgccgagtcgggtgtcgccaaggcgtcgttctaccgccactttccgaccaagcaggcgctggtcgaggcctatctggacctgcgccacgcgcgctggatgggctggctggagagccggcttgctgctgcgccggatgcccgcgcctggttggctgcgctgcccgatgcgctggacgactggttccgcgcgcccggctttcgcggctgcgccttcatcaatggtcacgccgaagccggcacggacgcgccgccgatgacggtgacgcacaagcgggaactggcggcgcggatcgaagcggcctgtcgcgaggcgggtttcgttcgaccggacgaggttgccgccgatctgctgctgctcatcgagggcgccatcgtgcgcgcgcaaatggaaggcgcggacgccgcccgcgcgccgctggcacggatgtttgcgcgggtgctcgccggggcggagcgcgcatgcgtctgacacctgattcgtggccggagtcagggccggggttctgtgggaggggtcttgacctcgacagcagcctgcatcgaagtccgaggactgcaaaggccctgtcgcggccaaggccgctcccacagggatcgcgcctgattcgtgactgaagccagggccggggttctgtgggaggggtcttgaccccgacagcagcccgcatcgaagcccgaggactgcagcggccctgtcgcggccaaggccgctcccacagggatcgcgcctgactcgtgactggaaccagggccggggttctgtgggaggggtcttgaccccgacagcagcccgcgtcgaagtccgaggacggcagcggccccgtcgcggccaaggccgctctcacagggagagtggtgtgcgcggtaagtacagcgatggggcttgtcgtcagcggccggcgtt

SEQ ID NO: 133523 - DNA, 716 bp, Homo Sapiens
gcacgaggcgatgccgccgccgtcacccactgttgcccgtagttgaggctggtgtggtgcaggaacacgccgaaaaaacccaacaccagcaaccacggcagatcccgcacacgcgggcggccgatgcctaccgccagggcgatgccgcccatgaacaccgaggcgatcagaaacctcagcaacgccaactggccagggctgtagctgtgcagccccatgtgcacgccaatcggcgaataggcccaacagagaatcacgccagcgatgactagcgtaagctttacgggtgacggggcattcatcgacggcatccagatactgagaaggaataccgtcagtcttgagccgcgcaaggcgcaggacaattaagcgtttctgacttctgaaatcattggaactgagcaatggaactggcccaactgaaaatggtgcgcgccgtggcacaaaccggcagcgtggcccaggccgcgctgcaactgcactgcgtgccgtccaacatcaccacgcgcatcaagcagctggaaagcgagttgggcacaccgctgtttattcgcgcaggccgtgggttggccatcagtgccgccggggaaatcttcctcgattactgcgagcgcatcctggccctggtggatgagtccaaacgcgcagtggatgccaacgcgattccgcgtggcaccttgcgcatcggcgcggtggaatccagcgccagcggccgc

SEQ ID NO: 133524 - DNA, 384 bp, Homo Sapiens
ggcacgaggcggcacgagggcaagggctgattgcgcgtcgttgacggctgatcagtgaacgacagccgccgatcgacgacgccgatggtagaggaacactgcacaggcgatcaggcataacggcagcggtactgcgccaatcatcagcagcttgaggttgcgttccgttcgatgcaccgatgcatacgcctggaccttgagtgcctgcaactccatgggcagccgcaggcgttccttgttgagcgcctgcaactggatattggtgtccactgcacgggtgccgaagccaatactcggtgggttcaggcgttgccattcttgctcggtttgctccagccgtttttgcagttccccggccttttgtgcataagcctgtgcggccgc

SEQ ID NO: 133525 - DNA, 735 bp, Homo Sapiens
  misc_feature (63)..(63): n is a, c, g, or t
gatggctgtcaagcgggagcagctcaagaatgcgggcctgggcgtagtctccgacgccatctntgaactgggcaagtcactctctgcctttaacctggatgacacggaagtggctctgctgcaggctgtgctgctaatgtcaacagaccgctcgggcctgctgtgtgtggacaagatcgagaagagtcaggaggcggactccccgagctcctctgaggaggaaccggaggtctgcgaggacctggcaggcaatgcagcctctccctgaagccccccagaaggccgatggggaaggagaaggagtgccataccttctcccaggcctctgccccaagagcaggaggtgcctgaaagctgggagcgtgggctcagcagggctggtcacctcccatcccgtaagaccaccttcccttcctcagcaggccaaacatggccagactcccttgctttttgctgtgtagttccctctgcctgggatgcccttccccctttctctgcctggcaacatcttacttgtcctttgaggccccaactcaagtgtcacctccttccccagctcccccaggcagaaatagttgtctgtgcttccttggttcatgcttctactgtgacacttatctcactgttttataattagtcgggcatgagtctgtttcccaagctagactgtgtctgaatcatgtctgtatccccagtgcccggtgcagggcctggcatagagtaggtactccataa

SEQ ID NO: 133526 - DNA, 913 bp, Homo Sapiens
gccagctcagctgtgaactattggatttgagacaggaacagaacaaatcagagggccaggggagggttgtgggggagacagagtggtttaaataggggaggaggggaagttcggtgatgggggagggaggcaggtatttacaagaaggctcagggggccagaggctcatcttggaatattttataacaatataaataagattctggtttgcttttccttttcgtctcgtaaaggagagagaagtgcagagttcgattctgtacaagggggcagcggcagaaggccggccgggcgggtcactgggcgtccacccggaaggacagcagcttctcggaatgcatgttgttcagggtccgcaggtccggcagcttgagcagcagcttggtgaagcgggaagtctccaagggccggttcttcagcaccagagcccgaagagcccgcagcagcgtctcctggagctgctccaccgaagcggaattctccatgcccgagcggtctgcagagacaagcaccaccgcggtgaagaggcccagctcctcctcggtaagcgccagggagttgagcttctcgctgaagtcgaacatggcactgagcaggtctcccatgcccatggcaccaagctcctgcaggctgtaggtggtgcggcttaggaacatcactgtctggtccttcacggttgaacaacgaatgcaaagcgcaccatcagcacctcaaaaggtgccagccttaaagcagggtgacttggtcatgctgagaaagcgtcacggaaagcccgggatgtgtttggcaaaactctaccagcatctcgcacagccgggcgtttaagctcatggaggaaatcctcccagatctcctgcaccggtctgcccaactgcgttcactgcagggtacctgtacggacggacatgccagg

SEQ ID NO: 133527 - DNA, 978 bp, Homo Sapiens
  misc_feature (179)..(179): n is a, c, g, or t
cacccaggcgcacttctggggggcttcagggagaggctgcattgcctgccaggtcctcgcagacatccggttcctcctcagaggagctcggggagtccgcctcactgctgtcgtcttccccacagaccgctcgggcatggagaattccgcttcggtggagcagctccagggagacgctngctgcgggctcttcgggctctggtgctgaagaacccggccccttggagacttcccgcttcacccaagctgctgctcaagctgccggacctgcggacccctgaacaacatgcattccgagaagctgctgtccttccgggtggacgcccagtgacccgcccggccggccttctgccgctgcccccttgtacagaatcgaactctgcacttctctctccttcatcagcagcttgggccagaagtgcggaatgttgtgtttgcggtggttgacgtagtgctcgaacgccagcaggtacgcctcctgactcttctcgatcttgtccacacacagcaggcccgagcggtctgttgacattagcagcacagcctgcagcagagccacttccgtgtcatccaggttaaaggcagagagtgacttgcccagttcaaagatggcgtcggagactacgcccaggccgccattcttgagctgctcccgcttgacagccatctccccactcagcgtcagggtgtcgctctcagggtcgtagcggacagccgcccgcagggacatgatctccatgcagcaccccttcaggaggatgatctggtcttcgcaaggcagctcggagaacatgggcagttttttggcaaagtccaccacacgggtgatggccggggtgatgatcttggtaaactcgctgaaggcttccaggtccaccttgtctccgtccggcatggagacaatgggtgactggccaatgtcatcgggcaggaatttccgcctctgtttccaatggctgccctgggcattggtgctgc

SEQ ID NO: 133528 - DNA, 2074 bp, Homo Sapiens
  misc_feature (1695)..(1695): n is a, c, g, or t
  misc_feature (1835)..(1835): n is a, c, g, or t
  misc_feature (1843)..(1843): n is a, c, g, or t
  misc_feature (1853)..(1853): n is a, c, g, or t
  misc_feature (1891)..(1891): n is a, c, g, or t
cttttggttctaacaagagtttttgttttgctttttaataaagaagagaaaggggttccttggttttctccacagatgaatgtttttacaaaaaaagagtagttttggatgtatacatgccacttaggaaaaccttttgtccttgatcgcttttaaaacccttttttggacatcatcaggtcattttgcgtatttttgtggactggctgatttcccctgtgtttttgccaggtgaccgctctccttttcaatttcccctcccagaaagcaactcgtagggaagggagggccttgaaaagtgccatcggcaggatggcctccaaggaaacagagcccgtgggagtgggctctgaaggtgggtggccccatgggacaggagtgcctggtggccctggtttaccttggagacatctatgcagactggaaacgaagaaacagaaggaggcacggagtcgctttctcttatattgtggatattttatccctgtctttcacagcagcaattttaataaacagatgcctgcagcatttcaccactacacaagagctactcgcgctcgggcaggcgcacacctgcctgtgtacacaggtcctcgcacagcacggcaaacgcagccaggcctttgggacacaggcctctgaagtgtaagttagcagccctcaccccgacaagcttctaaagaccaaaaatacctctatcctccactacataaagcttgtgagtagcaaaacttgtaaaaatgaagtgtacaaaaggaaacatccgtataatacatttgcaccctgtatacaatgggtccctttgaaactggccaacagtcagcgatggcagattttcaatcatagaaaaagaagccagtggctgtcatgcgcactcaggtcaatggtttgtgtgggttctccagagagagagattttcctttacagttacagtacttgctggcgatcttgctgattaaaaggccagttgaatttcctggcatttaggcaagtaacatttgattgtcacaacgtacaattctgagacaataaatacaagtagatcagatgcatttcttcattgtatcaagtaactccagtttaatgtaatacaatttagtgcatttcagtatctcattcacagttcgacttctgtccaaatacttgtgcaacaaaaagttaagaaatggagacgaactccaggtgacattgtcattacacagcttcaaattctaagacaactcaatgatctttgaaaagcgtacgctgctgttgcctgggccggcgacaccaatgtccctggtaacttcctgggctccctaaaagtgttcccgtcattctatttcccgagcagtttgtaagaatgccaccattatccctgaattaacaagcagccagtcgcgagtgttcatgataaaactgaattcatgtgtccaccccactccagcagatcagtgtgacatcttttacgcaaaaattgtttttgcatcctggccccgataggcaggaatacggagccggatgtctgcatcccccaggtcggccccacggcaggggtatggggcagagccagggcggagtcaggggtgtggccggccccatcccccgaggcccgagggggcttgcctttggtttggggactagctcagtagagaaaggggcaggcacacggccggggacgtgctgtttccagaaagaaggcaggcaggcttttcngggctggccgtttgaaccctgagcctaggtgcagtgcaagggctagaacacatcgcgccgtggagcactagtattgcacgccaggggctgcatgcagtgagccacagggcagagggctgcagcgggagtctacgcatggnggctgacngtcaggtganatctgcaggctggagagatatacttggcttgtgtaaantgtctcaggtagaacaagatgcagaactactcattctcacccaatctgacccaacggtatcacacagcatggcagctggacagtactcatgccgtgatgaacaaactggtcaacacgttttctcaacacacatgtcacatacgcacgacactgggaaatctcagcaggtgccaaggatcggaa

SEQ ID NO: 133529 - DNA, 635 bp, Homo Sapiens
  misc_feature (537)..(547): n is a, c, g, or t
ataaacaaaagaggtttaattgactcacagttccatatggctggggaggcctcaggaaacttataatcatggtggaaggtgaaggggaagcagggcacatcttacatggcggcaggtgagagagagaatgcaggggaaatgccagacacttatcaaacaaccagatcccgtgagagctccctatcacaaaaacatcatgggggaaaccgccccccacgatccaatcacctcccaggaggtccctcccctgacacatgtggattacaattcaagatgagatttttgggtggggacacagagccaaaccatgtcagatctccaaatggtagctattatttagatgtccttttcttctgtcttgttacagtcactgacacagttcaggctcttattatatctccattgatgtcagcttccaatctagtctcttgcattctctgcttctgccatctattttccagtgtggtgccagaggaatccttgtaaaatacaaagatgcatgtcatgctactgcacagaatcttttaatagcctccnnnnnnnnnnnccctttttcgaatagggcctaaaatcttcaatgtagcatccttccagaaatagtcttctgaacttggctgcttctattcctcgtgccg

SEQ ID NO: 133530 - DNA, 964 bp, Homo Sapiens
tttgcagatgtaaagctttgaatttattgttcatgcaagtaaaaactcaggtagtaggaatggcaatgatgttacagtcttcttctttagcatgtttcaggaaatacgtaatgcaccattttgatccaaagtcctagtgacctaaatcctatggttatacagttttcaaaatcctcaacctgattcagttcgttataaagcactaaatttatgtcagagttcacagttgtcatcatctactatgctacttttgtaaatcattgcctgaaagtgatttctgtgatgatctgggggagaagatgcattgctctttgaaatcaaatttgtcactaacatacatacaatttccactggtatgtcgcaattaaatgatgcagcccttatccatgcagtcttgcacaatgctcactaggtaaatcagtaaattttgttctcacataggcaagtagccttgcacttttccttgagtaactcatgttcacaggccagctgtattcttcaaggaatccacagttacttaggagatcttgatactggcaactattggtgcatagtcctttgtcacagtcatcagggcaaccggcacaaggtgttccttgttggtacggggtattctttctattcatattattaccagcaggacaatattggcaaacatagtagtattttagactatcttgattgggacagtaggcaattccacagcctacctggtaagtcgagtaccaaacaagctgagtataatgtccaacaactgcattgggactctttggtcctacaccatagacaaaatctaggatctcgtcataccagctttggattgcagaagaccaggaagtagggtcacttgacatatagagattctcaccacatcttgtactggttttgcggtcctctggatcactatgttgtaaagtgcacttgtttgcccacctttgggcattcgttgttacctcgcggccgc

SEQ ID NO: 133531 - DNA, 334 bp, Homo Sapiens
tttacagccgagaatgattttaataatcacaaggcctttgaactaggaaatgagaggaaatctcaagccacaaatttgctccatgaaggggtcctttaaggagactgtggaggatgagaagctgaaaaatttggattgttgattggtcagggtaagggggatgtaatcatcaggatgttgaaactgcattcctccatgagtcagtttcttgctaggtcgttcagagcagctggcatcactagttttgttggtatgtggaactgcatagtcctttgtcacagtcatcagggcaaccggcacaaggtgttccttgttggtacggggtattctttct

SEQ ID NO: 133532 - DNA, 1108 bp, Homo Sapiens
  misc_feature (977)..(1011): n is a, c, g, or t
  misc_feature (1015)..(1056): n is a, c, g, or t
gttctgtaaccaagggcttcgttgttgtttcacataaccctctttggaagggattgcctttcagctgcggatcatgaaagatggatttgacgctgtttatcatggtttccgacctggttgttcttaggtgttcctctgaaccttcttctgattttttcttccttctcactaactgctgataaatacacgtttgttccccaagcttggaaacagtctgtttcccttttcttatgattattccagtctttctccataatgtcttcagccctgagttcttttcctgcttggcaaaaattccagcacttcttgtctttttggctagcacattggcatctattctcacggtctgttgcctttgtgggaagtacattctccaaggctctcttggacctagggcttccaagtccatacggaacaacgtgctcgggagtgttgacccaaatgatgtccaggtggcagaagtagacacactctttatccatcagggacgagcaggagcagcgcttggaccggcggagccgccagggtggactgggagtgggtttctccccgccgttctcacccaccgcgctgagctcagcgcctaagactgctgtttctggagctccttggcaagccacaaacagcagagagaaaatcatgagcaaataatccattctgaaaaaaagggatcaaaaacctcccgttcaaactgaacccaaaggaaaacgaagaaaaacagcttcaggtccctcaaagcgctgcgggttcctcagatctcaaagcgatccttcagcccaagtgcccttttaacggggagaaaaggcagcgcctgccaggagagaaggcagcgagcggagcgtctgcaggcgcacgcggcggtggagagctgggactgcaggaggcgcaggacccgttcgcctggcgcagatgcagaggcgcgtctccccggccgtaatggccgaattcccgggcatatgtccggtaccgtcgactgnnnnnnnnnnnnnnnnnnnnnnnnnnnnnnnnnnncggnnnnnnnnnnnnnnnnnnnnnnnnnnnnnnnnnnnnnnnnnnaaaaagagctagcgcccatagtagtctttcattttgcgtttggtttggagtg

SEQ ID NO: 133533 - DNA, 568 bp, Homo Sapiens
ttttcagcactcgaagagagacagcagtatttatttttgaagtgactcacaggagaagacaatatttaatccaaggaatgaaacaagaatgccaaattatttttgttcacaggagtcttgaatcgcatcaaagttagtcctagctagattgttaattacaaatgagccgagggagattaaaaacagacaaaccaatcaaccaaccaaacaagcagaagtagccaagaaaggtaagacattttattttacatacaaaaagggtgcaaactgagtcctttcctccccaaactggggaagaggtatacttaaagatcacatttgtgttttccatggtgccctaggaaatgggctactctgagatcacatatcagaacccattttccattttctccaaagaaggctacttcctctgcagagaagattttcctaatggtgcacaaatatctctcctggaggaaccatttcaaatacacttgaaattgacattcatgtttaaaaatactacaaatttcattttcacagctgagctttgtgaccagtgccagggtttatgaaacattatacatct

SEQ ID NO: 133534 - DNA, 1102 bp, Homo Sapiens
gcggccgctcatggcatcgccatgacgacggcgcagccaggcgtccacagcaaagctgaacagcgccggcagcaacaacaccatgccgatcaaggcgccgcgaccgaactgttgctggccgaccaccgccttgtaggcttccagcgccaacacctgataatcgccacccaccaccacgggcacgccgaagtcggtgatggtcagggtgaacaccaggcaaaacgccgcgaataccgcctgacgcgtggccggccaggtaatgctgcgaaacgcccgggccgggctggcgcccatgctggaggcggcatcgaacaggcgcgcatccgccagggacagcgccgacagcagaatcatcaaggcgtgcgggaaggtgtagatcacttcacccagcacaatgccccagaagccgtagatattgtccgagagcaaaccacgcaacatgccctggttgccgaacagatagaccagcgcaatacccggcaacatcgacggggccatcaatggcagcagtgacaggccgcgccagatcggcttgccgggaatcagcgtgcgttgcagtgcgtaggcaaacaggtaggccagcggtacgacgatggccgccacactgagggacactttcaggctattgcctaacaaccaatgaaagttggcgctggtcatcagctcccgcgccgcgaccagcccgccgccctgcccggcttcgctgctgaagccgcgccagaagatcgccagcaacggcaacaacaccgcaatgcccaacaggagtaaccaaagcagtttgccgccgaccacaaagaggcggtcgccaagctcagcgcgggaaacctgacgagccacgtggtcgggtatcggcagactcatatcggcagccatctcaggcaaacacctgcaggctgcgcggcggcagggccacccagatatcctgcgcgcccaggcgcggcatggcttcgggggccagttcggccaacagcgggtggccaggcagttgctccagctcaaagctcatgcggcagcggttgccgaggaaagtgatttcgcggaccttggccgggaacaggttttcttcatgcaccagcgggttgacgctgatggcttccgggcg

SEQ ID NO: 133535 - DNA, 582 bp, Homo Sapiens
ggcacgaggccgacgctgcgggggcggcgcttcctgaacgagctgctgcagcgatttctcgactgaggatgcctgcaggtcgtcgcagtgcgaggacccgcagctgcggcttcagcccctgcgccggaagatcacgtcccacacgccgtgacccagcctgaggccgcgcgcctcgaacttggtcaatgggcggtagtccggtcgcggggcgaaaccgtcggcggtgttttcgagcaagggttcggcggacagcacgtccagcatctgctggccgtaatcctcgatgtcggtcgcgcagtgcagatagccgccgggcgccagcttggcggcgagctgggcgaccagcggtgcctggatgagccggcgcttcagatggcgcttcttcggccacgggtcgggaaaatacacgtgcacgccggtcagcgaaccaccgggaatcatgtcgcgcagcacctccaccgcgtcatgctggatgacacgtacattggcgagctgctgttctgcgatcagcttgaacatgttgccgacacccgggccatgcacctcgataccgatgaaatcggtatccggtcgcgcggccgc

SEQ ID NO: 133536 - DNA, 1355 bp, Homo Sapiens
tttagaaagcgtgcattaagtggtctttattgatgtttcacattcagttattatcaattcttcagttaattgtacaagtatgataaattattttctatttgctgtgggaatttaaatgtaaaataaatacaaaatacatgtgtggtttaatgaacactcaatgaagcatctcttctgaggtattcctttcagtctggttttatcccagatctttttacttcccctaggaatagtctattaaaccacacaatggatctgtgaacttgtagatcaagttcactgtaaatctgtgaacttgtgttttaattacattagacatattttttgatctcatcatacaacaccaatacaaaagcaccgcccatgcctctcagcacattggaccaggcacctttgaagaaggccttggctccttcgtcttttgcaatcttcctccagcagtcaactgtccccgtgtacataatatcggcccctttccggccggactgcatcatcattctacgacgaacagtgtcaaaggggtaggacaccagccctgcgactgccgtcacactctgggcaatcatccagctcacaaaaatgtgcacgttcttggggtcaggcagcatccccttggcagtatcatagactccgaagtaggcagctctatagataatgatgccttggacagagacgttgaaaccctggtagagccccctcaggccatcagacttgaagatcttgatgatacagtcgcccagaccatggaactcacgctgggcggcgcccttgcccacatcagcagccaacctggtcctagcaaagtccagcgggtagacaaagcaaagggaggtggccccagcggccccaccggacgccaggttaccagcaaagtagcgccagaactgcttatgccgatccacaccccctaagaagagctgcttgtacttgtccttgaaggcgaagttgagagcttgggtggggaagtaacggatcacgttggccaggttacccctccagaaggagaggaagccctgctccttagggattctcaccacacaatcaatgatccctttgtactgcttctcagcactgatctgtttgctggcatgctggacctgcagcagcagtttgaccctctcgatgggggcgaccgcggtcttggagacggcagcggcgacgcccccggccaggaagtcctttaggaagctccaagcgtgatcacccatggtgacagctcgacgctctcagcccgcaggcagcccgttcgtgctctcgcccacgcccggcctggcaccgccgcgcagtccccgaccctgcgcgacgctcggacgcgtgggtcgacgatatcccgggaattccggaccggtaccagc

SEQ ID NO: 133537 - DNA, 804 bp, Homo Sapiens
gcggccgccgacctctacaaacagcaagtgcgccagcgtttccagttattggtcaacgagcgctacacccgccttcaggagcggttcgaagaccaggagcaacgcctggccagcctgcagcgtttcttcgtcaattccagtgacgtgtcccgcgccgagttcgatggtttcgccaagcctttgcttctgcgcgcccgcgcctatgcctgggcgccgcgtatatttcgcgaacagcgcaacgcttttgaacaggaaatctcgcgtcagcgtggtacacctttcgccattagagaattgaacacttcgggtgaactggcgccggcgcccgagcgcgacgagtatgtgccggtgctgtacagccagacccaaagcttgctgggttcgcccttggggttcgatctgttggcccagccactgcgtcgttcggtgcttgagcgggtgcagaaaagcggccggcctgcggtgtcccagcccatgcagttggtgggcgtagaaccggcttatgccgccggcgtcttgttggtggcgcccgtgagcaaacccgtcgacaccgagccccatggttatgtgatggcagtgatcagcatgcgccaactggtcgccgatggtttgcccaagcccagccgcgacaacctggtgatgcagatcgtcgacacttccgacacgcagcagcgcgtgctgtacgcgtccagcaacgcggtgggcgacagcggccttgttgccacgcgtcgtctcaccctcggcgaccatgtgtatgccttgagcgttcgcgccagccaggtgttcgaccaggccaatcactcg

SEQ ID NO: 133538 - DNA, 760 bp, Homo Sapiens
  misc_feature (191)..(200): n is a, c, g, or t
  misc_feature (477)..(477): n is a, c, g, or t
  misc_feature (628)..(661): n is a, c, g, or t
  misc_feature (724)..(724): n is a, c, g, or t
  misc_feature (728)..(728): n is a, c, g, or t
aattagaaacaaaatatatttattagaaatattacagtcatttatcatacactttcctatgaatagttaaatacatctaattagcatgtcatatccaaaagtgctgggtacaatctagtgtgctctttatagacacgaggccacagatgtatcaactacactcaactaatgtagttaaagttagtgtgctnnnnnnnnnnttagtgtgctattcaggatgctacagatttagcaaaattctaacctggatcagaggagtgaaatgccccgtgaattgaggcaactgtagatattcgaaatgcttctaaaaaggctgtgaggttatgtcctttactgcatgtcattggtaggtcatctcaaaatggcactcgagctttggaagggtgagaactattgctagatttggtagggggtctgcatctatgggcccgagtcctccatctccacaagctgcccctcagtggggaagaggagggnggaggctaagggagtctccgtaacgtttgtgggcagcagggaagagaacatggcagagattcctcaccgctggatggcttgtcccctggggatgtgtgtttttatctaacacccacctgcatctacttgggttggtctctacaaaagctgnnnnnnnnnnnnnnnnnnnnnnnnnnnnnnnnnngactaatattttttgaaatgagaaggggctaggacaagagaagctcctgagaatgttatcccngcanggcgggggccatgggttaccatcagacaagga

SEQ ID NO: 133539 - DNA, 1207 bp, Homo Sapiens
  misc_feature (467)..(701): n is a, c, g, or t
  misc_feature (1109)..(1126): n is a, c, g, or t
gcacacaaaggaagggaagggggggttgagggggtgggacaaaaatgaaagcgcaggtggatttggcaagagattggaggtcaacggattgctaggggggaggaatatcggcaaggtgtccgtgtccggagtttggcccactaggtgtcggcccttatcaaaaatatagtggggaaggatgggcggaaaaaaaagcttgccacaaggggttccccaaaaaaaggaaaagatgggttatggttgtaggaagggggattcgagcgagtgatggaaacaagtaaacgttgtccacaaaagaagttccagaggattttaacgaatggaagaaaaaaggcgaatagaaaggtataccgagccggggacttgccttagaaaaagggagttagaaaatgggggtcaggggtcatcgtaagggaattataaagataaataatggggagacagagtaattgggcggttggcccggnnnnnnnnnnnnnnnnnnnnnnnnnnnnnnnnnnnnnnnnnnnnnnnnnnnnnnnnnnnnnnnnnnnnnnnnnnnnnnnnnnnnnnnnnnnnnnnnnnnnnnnnnnnnnnnnnnnnnnnnnnnnnnnnnnnnnnnnnnnnnnnnnnnnnnnnnnnnnnnnnnnnnnnnnnnnnnnnnnnnnnnnnnnnnnnnnnnnnnnnnnnnnnnnnnnnnnnnnnnnnnnnnnnnnnnnnnnccacatcctagtaccaactttatcacttctgatggcattaggacacacaggccatttataagagcagtgtttgagacctcctgtgtgtcacttccaatcctcttggccttcatactaaagtcactgctgtggcaaccagtttcaagcagggctgaaccttgcctcttgctctggggatgtctcacttcctgcccctgggcttctcaccagctacaggaactgcctagcacttgggtatgtacaacctgggagaggtgtggggccgccccatcccctcctcaaagaaattcacaggcacagtatgaggctaaagtaacttccatcttggatgctaatctaccatgttgacttctgataaccagttcctggaatgccctctaagatttctacttttatctattaaaagannnnnnnnnnnnnnnnnntgtaaatcctggccttaagcaagttataggctaagttgtaaacagcattcttgcctttccctgaggaggtgacttcagtgt

SEQ ID NO: 133540 - DNA, 930 bp, Homo Sapiens
gcggccgcagttactttctggtcgacgatcaggatgaggttgagtcattcccgcgcctggatgacctgatcgagaccttgcgtggcctggggctcaagttcgccgaggttcatctgtagtacgcagtattacttgcacaccacgacgacgctgcggctcttgaagttgcctacgtctttgcccagggtcttgtcgctctccttgagtgccggcgtaccttcggtgccgacgatgcggtaaccggtgcccgcacacgaagcgtcagctttttcgtagcaactggcccatgaattggcctcgcccgagcagtcgatggtcaggccttgctcgccgtttttcaggtaggtgtcggacgtggtggtgcagccggtcatcagcgccagggccgcagtcagtgccagaatcttgttcatgtgttgggtcgtcgtcgagggtgtaggaggggcgcagacactgtcgtggggcgttcgtagcaagattatagcgaacggccatcaaggtacagacaaacacaaaaaagccccgtttgaccggggctttgtgcgcaagcaatgacgcttactttttgtccttggggcgcttgctcgatgcgtggccggcttcgtccacaaacacttcagccaccgcaacggccatgctttcgctcgcgaataccccggcgacgctgtcgccgtggaagttgatcaggtgccagccgtccgcacgcttggtgatcaggtagccgtttacgccttttggttctgacatctatcaatctcgtagtctggttcaagccagtaatgatagcgccaattggccccgaggcgcgcaagttgttgcaggtcagtgccctgccgcgaaaagcgtgctaaaaccattgaggcgctcgtaagcaaaggggcgatggctggttatgtcgcgccctgagtgaatgctcttcgtaggatcagc

SEQ ID NO: 133541 - DNA, 776 bp, Homo Sapiens
caggaatcagagtctctctcgggctggaacccagatgtaggggcctgagaggtcctcgatgacacgcttcaccttgtggtagatctcctcaaagctgtcaccctccacgatggctgagaagcactctgtgaactcctgctccagcttggtggctctgtcgaaggctttgcgggcttgctcctctgtgatccgcttgttaatctctagcacattctccagggagcgggggcggatgaagatggcgatggggtgcaggtgggccgcctgcagccgccgcacggcattggccgagacatcgaggatgcagtgcttcccctgctctgccacctctcgcacggactggacgctggtcccatagaggtggctgttgtactggccggcctcaatgaacttgtgcgcctgaatgtccttctccattttctcccgggacgacacaaagtggtaatcccggccatctatctcatactcccgcttgggccgtgtcgtatggggaacacaggatccaaacttgtcggggaactcggagagaagatcatcgttggcgcggtccttggtgggcccaaggatgatgatggggcgagcatagtgcacttccatctgcgtcactgtctcgtagctcagaaccgagtcttctcgaccctgcgatccagagctggagccccagtccttggcctttaaccttgaccactctcgtcgctcaacccgccgtttgctggggatgaacccaaatgtcgtcggtctcactgtcagagtggacccgccgtgcctgcggccgc

SEQ ID NO: 133542 - DNA, 1080 bp, Homo Sapiens
ggcgccgcggttgcgatcgtgtcgtgcgcattgtccatgatatgacccttcgtcttctcaacttgccgttttcgcggccagcgatttcggtgcggcgcccgcattctcaccgaacagagccaccgggcgaccgtgcggctcgacgccgaggaacgtgaaggcgagcccaatcagaaggcctgcgccggcgagaaagcagaacgccggcatcaccgccgcggcggttgcgctcggatgcacgagattgtcggcccccgcgatcaacgcaagacacagcggcccgacgatcttgccgaccccgttcgagagctgggcgaggccgaccgcgcgccccgaaagctggaccgggaagatttccgcgggatagggcccgatgttcgagaacccgccgtcgaagaacacggcgccgatgatcaggaacaccagaaacagcggcaccgaaccggcaaagtcattgtggaaataggcggcgagcgccagcgtgaccgcagtgccgtagcccatcaactgaccgcacggtttgcggccgatccgatgcgccaggaaggcaaagccggtccgaccgaggacgccggcgaggctgacatagatgaacatcttggccgcctcctgcggcgcaacgccgagcagcagcgccacgatggtcggtccccacaggaagacgccgtagttcgccgtgctggcgccgaaccagaccagaacggtcagccagaaccgccgctgctcggcgaagagatcggcaaatgttgcggagctcgcctgttgcagcgtgggcaacgcgaacgtgtcgccaccgacccggtagagtttccggatactcgcctgcgcctcgcgcacgcggcccttgctgatcagccagcgcggcgattccggcatgatgatcatggtgagaattccgaggatgatcggcaggaagccgaccgccgccaatccgcgccagccgaccagcggcagcaggaagctcgccgtcaccgacgccgacagcacgccgaaggcgaccggcacgaccacgaggctcgtgaccagcgtgcgatgacgggtcggggcgaattcgacgatggccggaaccgccgcggccgc

SEQ ID NO: 133543 - DNA, 724 bp, Homo Sapiens
ttcggcacgaggctgaacttcactttcgccctggccaaggggcgtgggcgctacatgtgcctgtccaagctcgacgtgttgctgcaggaaggccatgcgcaaaccgccactgcctccttgttcgaagaagaaggcttcaagatcgaggtggatgaagtcagccagaagctgtttaccagcatgatcgagaagctggccggcaataaatgggacggcgaccgcgacagctggcccaccgctcttgaagattcggactgggcacgcctaaccaccgaccacagccagtgcaccaatcgccattgccccaacttcggccagtgcgccttttacaaggcccgcgaaggcatgggcaaggtcgacgtgatcgtcaccaaccacgacatggtactggccgacctggccctgggcggcggcgcggtgttgccggacccgcgcgacaccctctacgtattcgacgaaggccaccacctgccggacaaggcaattggccacttcgcccattacacgcgcctgcgttccacggccgactggctggaaaccactgccaagaacctcaccaaactgctggcccagcatccgctgcccggcgatttgggcaagttgatcgagcaagtgccggagctggcgcgggagatcaagactcagcagcagttcatgttcagcgcctgtgaacaggtcgccgacttcaagcccggcgaagacgtggagggccgtgagcggccgc

SEQ ID NO: 133544 - DNA, 1150 bp, Homo Sapiens
agttgatgcagaagccgccgtcgccgcaccaggtggggcttggcgcattcgttcaggtccacgcacgagcgccccccggcgcccacgtgcaggcggtagccgcggttgcagtggcaattgtaggagccgccggtgttcatgcagatgcccctccccgggccacagggctctgcctcgcactcgttcacatccacgcagtagcggtgctggggatgtgaccggtagccggggttgcagtggcaggagtagtcaggggggcccggcacgcactctccgtggccacagatgttctggttcagtcggcactcatcagtttctgtgacctgagtgggagcgatctctacggcgctgcgggaaggaggcaagtccggcaggaaccagcgcatggtcgggggcgagggacgggagatcagctcggggtagggccgggcaggagtcgtggtggcagttgggtggctctgctgcactgacctctcctcactcaccggtgagtccgtggtcacccctctctcttcctctgtgtcctcaggtggtggagcctggctagggctctccggaagctgctggggcttgggtggcccgtcagggtgcaggaaaagggaaaagtcactctcgccctgaatggtgagcgtctggtgggaggtgagaatgtggtatcccttcccagctgggcagatctccttgaacgcagcggtgccatctgttgggcagcgctgacaccgcgcgccccaggccttgccgacactgcagcagcagagctggcgggtcaggcgggtggtcagtgggtgctggcactggtgctcagggctcaccaggcggaaacacaggctcttctcctccggtttgtctgcaatgcactgtgtacgggaggggcctaaactatggccaggtgggcagacacagcgataggagccagggttgttgaggcagtcaccatggcgacacacgcccggcattgcgcactcgttgatgtcctggcagtgggtgctgttaagcctcttgtagccctggggacagtcagcgcccacttccccacgtacaggccctggcttctgcactcctgtgtactgcagctggggacacttgtggcacttgctctggccccacctcgtgccgaattcggcgcgccgtcgacttcatactcttctcc

SEQ ID NO: 133545 - DNA, 1409 bp, Homo Sapiens
  misc_feature (253)..(314): n is a, c, g, or t
tttaactgttccatctttattagaaaagcaaccaaaaaaagggtgaggggtgagcctggccctaaaggacccctccactgtgacacaggcagagccggctcatcccggcgtcgaggggtggatatggcccacacacggtaggcatccaacagaagtgtcttgcctgactctgtgtcctccaggagcttcctcttgcggctgagccgggagagcggctcctccgggtggccccctgccctggtccctgtggtgnnnnnnnnnnnnnnnnnnnnnnnnnnnnnnnnnnnnnnnnnnnnnnnnnnnnnnnnnnnnnnactgatgctcagctcctccagggacagctcagtgggccggctctcggggccccggtcccttgcggggcgacctggcagcaggggtggtgtccgctccaagtctgagtggcaaacagtggcctcactcgtgtccatgggctcagtgggccctgcccgtgggctctctttatccttccgctccccgctttggtctgcactgtctcctgcatccatggccacaggccggtggttgaggaggcccactttgcctcctggctcgggccctggccctgagccatcagccagagggggcttcttcggctgggggaggccctcctggccatcctcaggactggccttgtgtgagacatcggtggtcatcctggctccggggaggccacagaccttgggcctgggcgttctgacccctctgcgagctcgctcagcgtgtcttcgagcaccttcacagtgaggatgaaggcccgctgcgccaggacctggcggtcagcatctcgcagatacttcttgccctggtctggggtccgctgaagcatggaggacaccttcagcagggtgctgtggtcccgcagctgggccagcaccttgagcagcagcacgatggagcggttcatgtgccaggcaaagctgcccggccggtcaatctcgtccacggggatccgccagatgccctgtgggatggatggcacaggtgtgtgaggggggtggttgtggcaggagcctcggggacaccctgtctggtatcccctggaaactgccacagtgccaaaggggacactgcccagccaggggcttcttggacccctctcactgtcccaaggagacagaagtgtatccccacccccttccttctcatgagtggcagcaaatgacagacagacccacagacggcgggaggtaccagtgtgtggccagcaatgccaatggggtcacaagggcatccgtctggctcctggtgcgagaggccccacaggtcagcatccacaccagctcccagcacttctcccaaggtgtggaggtgaaggtcagctgctcagcctctgataccccacaccccacatctcctggagccgtgagagccaaccgtgaatagtggta

SEQ ID NO: 133546 - DNA, 758 bp, Homo Sapiens
  misc_feature (46)..(63): n is a, c, g, or t
acaacgccctaggtacgagcctgggtggcgaattcggcacgagggnnnnnnnnnnnnnnnnnnaactgttccatctttattagaaaagcaaccaaaaaaagggtgaggggtgagcctggccctaaaggacccctccactgtgacacaggcagagccggctcatcccggcgtcgaggggtggatatggccagctgggtgtgggcagatttacaaagtcaacacttcatagaaaaggatgccgcctggcgtgcagatggcgaccaatccaccttcacatggctaaggcgggcccctcctcctctgggctcccatgtggtgtggacagcctgacctgggtacagggaggatgccatgaggaggtgggctgggcaggcctgggggctgtgtggggagtggcatccatgtgggcctctggtcctgcccagggtcctgcccagggggcattccaggcctggctggtcccctggggcgtggcggtggggctgcagtggcccctcaaatgtccatgtagtcgtcgtcctcgtctgtctcgctctccagcgaggactcctggctggatgtctccaggacctccagggctggctggcataggctctccttcctcacgttggcagcagactgggcagaaaggatggctgacttcagcttctgcttggtctcctccgagatgctgcctttgggggagagcagggttggggtgggtggcgtgacggcctcgtgccgaattcaacacccaggcctcgtacctagcctatatg

SEQ ID NO: 133547 - DNA, 809 bp, Homo Sapiens
  misc_feature (47)..(47): n is a, c, g, or t
tatgttctgtgtgttctcaatggatatcttgacattgctgcctactngcttggtcttggtttaaattaaaaagtagatgtagctcatcattttacttccaaaacggtggagctaaaaacggctaattgatcttgagataagaataccctttactaaggcaaagatttaattgaaatccaaaatgatttatagaaacgaaaggcattttccatttgttgtcttctgccgaaattctgaattgcatacacgcatgaaggataatgaatggtttcaacggtgctatattaggttctctgattttcatgacctatgtatgtttggaaatacaatattgtataaaatgtggatcgttttgttaccgatttaatattgccattttaatttggtgtaacaattggttacacttgtttttcaaagctatcctttgaggagaaagtcaaaatgtgttgttagcctacctccactcaggcctcttgctgtgtaatcattattccaggttatgatgtgcatagcttttaaaactgcgtgtactattattctgctctttcccatactcttgtcatgtattcagaacctaaacttatagcaaaagagccaagcagtagcagtttttgtaaatgtaaaaataattagatccagactttgtttccttcaattttaaaaataaaaaatacctcagtgctatgtttttcagttatcacctgcatttctcaaaaaataacacctgcttcatgtggcacataacttgtaagaatcacattttggattttaaagaaagactattaaatattttaagatcactatcaatg

SEQ ID NO: 133548 - DNA, 1134 bp, Homo Sapiens
agtgcagtgttcgtttccttcgtgacgcttctacccggcggtccctctttactcctgttggcttccactttggggacccctccttgacttcgagttttctgccgtgcccctttcaccggcacctctgcgcctgatcatcgggaaactagttccctttttcgctctgaagtcccctttggagaggacccacgttgtggtttctaataagggtcccgccagttcccctcgtcctcgatccttagtctgcctccatgaccctgggacctctgaggttagtttgccgcatccgtcaacctgttacagctccagcagctcctgcaggagcctctcctcctcctggagcccaccggactgctcctccagaccctgctcctcccagctgagccccctccttcacggatctgggtttgcccatggcttgcagcttctgagacaagcccttgcagctctctctctctgcccggctcagcaggcttaggttcagggtgaagcgcccagtgctcgccaggctgcataggatccccagcaccgctgcccggtcagccggccccacgtgatcagccagtgccaccagcagctccccaagaagtccaaatcccacatctgtctggaagaggcagccgagccttggacccccaagctgcagtagagcctggtagcgctctggcccacttggcaagtgtcgtcgccaatcacgatagaagtcagcagacgtctcgggctggaggggggctttctccggggagatttcagtggccacatcctggaaggtccttccctgaatagtgtgacagttccagggcacagttctctttcctcccatcttatccttccgctccagtggcttcagatgtgatgcaaggacaatacccctgaactcctcataggaagccaccctctgttccactgcccgtaacttggcagcattctcccgtttgtacttctcatcagcagtgagtgcagcctgcagctctttctccaaagccttgaagttgatgatgtcattcctttccatggcctgtgcccttccgtccccttactcagcctcccggaccttcaccccagcagtcccggccttggtccccttgctttccctcgtgccgatttacaccacccagcctcgtacctagcctt

SEQ ID NO: 133549 - DNA, 980 bp, Homo Sapiens
  misc_feature (110)..(110): n is a, c, g, or t
aagatgcactctcattcacagtgtgctcacccatggcagggggcagcagtgggtcctcgtctgagaagatggcacggtactgggtgatgatatcaaagagatggacacgngaggcctcgatggtttttgtaatatggaaatagggatcatcattaggaatggcagtcaggatggaccggagccaagcatctcgggccctgaagggacgttccccctcaactcagcctcagtgaagacgtccatgcgccgcaggtagccaatgacacggaggcaggcaggaagctggatgttggtcctcagttgctggatcagctggctcagcatcagctgcatggactggcgcacttcgttcacgatgccctggatgacagggatggaagagtatttcctctccagtcggcgtacgtaggctgcaagctccagggcctcttcataataactgttccggacacaggtgtccatgagctgaggaatctccagtatttccaaaatttctgtgtgccggtttagggtcaggctattcatccggcggttggagctgatctcctcggcttccttcacaaagttcctgcagctctgctggaagctgggcaaacggtcgagcaggcggccgagcgacgcctccacgtcgccaaacaggcggtggatgcgctcggtgcactcggcgccgcggatgaaggtcttgtagttagcgaaggccaagtcgcgcgtctgctgcagcagctgcgcccgctcctccgccaggcgctcgggctcgcgccgcagccgctccagccccgagccgctcaactcccggaggtagcggcccacatcgggccgctcgcgccactgggcctcggggaagcggtcccggaacagcgacgccaggagcccttcatcctccacctcgccgagagccgctgctgtggccgtggctaccgatgggatagtcgccgcggcctcgtgccgaattcaacacccaggcctcgcttacctagccg

SEQ ID NO: 133550 - DNA, 739 bp, Homo Sapiens
cagggacacccattttgctcttgacagaggtacatcccttcgttccttcttaaaaccatgccatgcatactgaagaggactgataccagagcccagaattttacaactctgatgttatcaacattgaaatggccggaatcaggaaaaatagatacgcatgcctgagcaataagcttggccagaaatacttcattaccatattgtttactcattatggaggtacgaagtagagatgagacttcatcaatatctcgaaggttttttgcagaacaacataccaaattaggaagaatctcatgagcttttctgcaggctatttcataaccttctatgacctctgaaactgacaggccaatcctcagaagttcttcagctaattccaggagagctccagcaaataccagaacaaagtttgtgccatctccaacttcttgctcttgcatatgagaagccattacaatcatttttgcagcaggatgctgtacttctagttctcttaaaatagttgctgcatcgtttgtcacaaacaacttctccaagtggttgataaccattttgttcattccatttggtccatatgctgtacgagtggtttgggcaagctccttgcaagcttgtatgtttctatacacagcctcttctaatcctgaaaagtgtttcgctccctccttgagcatctgggcaaagcccggagcctcgtgccgaattctccacccaggcctcgctacctagccgttat

SEQ ID NO: 133551 - DNA, 999 bp, Homo Sapiens
tgttcccaccgtattatgtggcagaggaacattggctttccccgtggcggacgtgcccggacgcaacgttgtatcgtgtcacccagagttttgttccctcgaagtcgacaattcagcaggcctgtagcgacgcgttccttgattctgtattcaggcatcaaagaccagagtacactgcttattgtgcatctgtgacagatgtgacatcaccttcggtttccttcttgaaaaccatgccatgcaatactgaaagagggactgataccagagcccagaattttgacaactctgatgttatcaacattgaaatggccggaatcaggaaaaatagatacgcatgcctgagcaataagcttggccagaaatacttcattaccatattgtttactcattatggaggtacgaagtagagatgagacttcatcaatatctcgaaggttttttgcagaacaacataccatattaggaagaatctcatgagcttttctgcaggctatttcataaccttctatgacctctgaaactgacaggccaatcctcagaagttcttcagctaattccaggagagctccagcaaataccagaacaaagtttgtgccatctccaacttcttgctcttgcatatgagaagccattacaatcatttttgcagcaggatgctgtacttctagttctcttaaaatagttgctgcatcgtttgtcacaaacaacttctccaagtggttgataaccattttgttcattccatttggtccatatgctgtacgagtggtttgggcaagctccttgcaagcttgtatgtttctatacacagcctcttctaatcctgaaaagtgtttcgctccctccttgagcatctgggcaagcccggagccttgggaacgtgaagcgccatggccagcctgcaggaagcagttcacgcgaccgctcggaagaccgcggagaaagcgaggagcacgccctcgtgccgattcaccacccaggcctcgtacctagcca

SEQ ID NO: 133552 - DNA, 886 bp, Homo Sapiens
  misc_feature (79)..(79): n is a, c, g, or t
  misc_feature (186)..(186): n is a, c, g, or t
ggttcttttatcaaaacaactggttcccctttaggttttctgtttatccatgcccatcaaaaagggacaaggagtaccnctgctattttttgcatctttgacaggatgttacatcaccttcggtttccttcttaaaaaccatgccatgcaatactgaagaggaactgataccagagcccagaattntacaaactctgatgttatcaacattgaaatggctggaatcaggaaaaatagatacgcatgcctgagcaataagcttggccagaaatacttcattaccatattgtttactcattatggaggtacgaagtagagatgagacttcatcaatatctcgaaggttttttgcagaacaacataccaaattaggaagaatctcatgagcttttctgcaggctatttcataaccttctatgacctctgaaactgacaggccaatcctccagaagttctttcagctaattccaggagagctccagcaaataccagaacaaagtttgtgccatctccaacttcttgctcttgcatatgagaagccattacaatcatttttgcagcaggatgctgtacttctagttctcttaaaatagttgctgcatcgtttgtcacaaacaacttctccaagtggttgataaccattttgttcattccatttggtccatatgctgtacgagtggtttgggcaagctccttgcaagcttgtatgtttctatacacagcctcttctaatcctgaaaagtgtttcgctccctccttgagcatctgggcaaagcccggagccttgggaacgtgaagcgccatggccagcctgcagtaagcagtttacgcagaccgctcagacctcgtgccgagttaacccgcggcatctacctagccgtagtta

SEQ ID NO: 133553 - DNA, 1025 bp, Homo Sapiens
cgtgtctttggccgtcttttaaagggttttggatgccccgttcagtgtcgggcccttgtgtcccccccttttgttggcataggagccttcccatgcccgtgccggcgttgcccgttccccatgctgtgattgtccaccagagtttcttcccgtactgaaattcgacaattcttcaccgtctgtgatacgcggttccctagtttctgttatcagccatcaaaggacaagagtacactgctatttttgcatctttgacagatgttacatcaccttcggtttccttcttaaaaaccatgccatgcaatactgaagaggaactgataccagagcccagaattttacaactctgatgttatcaacattgaaatgccggaatcaggaaaaatagatacgcatgcctgagcaataagcttggccagaaatacttcattaccatattgtttactcattatggaggtacgaagtagagatgagacttcatcaatatctcgaaggttttttgcagaacaacataccaaattaggaagaatctcatgagcttttctgcaggctatttcataaccttctatgacctctgaaactgacaggccaatcctcagaagttcttcagctaattccaggagagctccagcaaataccagaacaagtttgtgccatctccaacttcttgctcttgcatatgagaagccattacaatcatttttgcagcaggatgctgtacttctagttctcttaaaatagttgctgcatcgtttgtcacaaacaacttctccaagtggttgataaccattttgttcattccatttggtccatatgctgtacgagtggtttgggcaagctccttgcaagcttgtatgtttctatacacagcctcttctaatcctgaaaagtgtttcgctccctccttgagcatctgggcaaagcccggagccttgggaacgtgaagcgccatggccagcctgcaggaagcagttcaacgcgaccggctcggcctcgtgccgattacacaccggcctcgacctagc

SEQ ID NO: 133554 - DNA, 903 bp, Homo Sapiens
cgagtttttccccctataattcacattctcagcagtctttaccgaccctgtccccttagtttctgttatcatgccatcaaaagggacaagagtacactgctatttttgcatctttgacagatgtttacatcaccttcggtttccttcttaaaaaaccatgccatgcaatactgaagaggaactgataccagagcccagaattttacaaactctgatgtttatcaaacattgaaatggccggaatcgggaaaaatagatacgcatgcctgagcaataagcttggcccagaaatacttcattaccatattgtttactcattatggaggtacgaagtagagatgagacttcatcaatatctcgaaggttttttgcagaacaacataccaaattaggaagaatctcatgagcttttctgcaggctatttcataaccttctatgacctctgaaactgacaggccaatcctcagaagttcttcagctaattccaggagagctccagcaaataccagaacaaagtttgtgccatctccaacttcttgctcttgcatatgagaagccattacaatcatttttgcagcaggatgctgtacttctagttctcttaaaatagttgctgcatcgtttgtcacaaacaacttctccaagtggttgataaccattttgttcattccatttggtccatatgctgtacgagtggtttgggcaagctccttgcaagcttgtatgtttctatacacagcctcttctaatcctgaaaagtgtttcgctccctccttgagcatctgggcaaagcccggagccttgggaacgtgaagcgccatggccagcctgcaggaagcagttcacgcgaccgctcggaagacccctcgtgccgaattcaccaccaggcctcgtacctagcc

SEQ ID NO: 133555 - DNA, 1933 bp, Homo Sapiens
ttttttgacagtaacaatatgtttattataacatccagccaagaatacaaacacaaaataactcttaatttaaggagaataagaaaacatcaggtgattcttgagtactactacaaatacagccttcacctacagtaaaaattaagccaatttcaatcattttggtcatcatcccagtctttcttcccacttggaggcttgggcccaccagctggttttgccatgatgatctgatccactctaagtacagtgactgcagcattagtagcgagtttgatagcccaatattttcccaggtaagtatctagaataccagcttccagcatgtcctttacagcagggacttcagcctcaatatctaatccaacgtttttatttccttcttgatgtactgcataaagtttagagattacttcattggccttaactccagagttttctgccagtgcgcggggaatagcttcaaatgcctcagcaaacttcttaatagcatactgttcaagtccaggacatgtctctccatatgatgtgatctgtttggctaattcaatttctgttgctccacctccgggtacaagacgtttatcccttgtaagaactttgaaagtattaacaccatcgtctactgccctttctatgtcatccatcagattgtctgtagagcctcgaagtactatggtagaaatggcgccatcttccttttcatgcttaaaaaccaccacctgagtatctccaacttctgagaggtaaacactgtcacagtgtcccatttcttcaaggacaggaggtgtcaatctaggaagagctgtagcaccaacagttttacaaagtcttcggagatcccattttgagtttagcctcactaacatgatattatatttatttgcataatgaagagccatgtctgccactttgccacctgttactacgacatttgcaccagtatcagcaatagctttgacttgtgcatccatgaggttttcttctcccttactaaaattcatcaattcttcagcagtctttatcaacactgttcccttagtttctgttatcatgccatcaaaaggacaagagtacactgctatttttgcatctttgacagatgttacatcaccttcggtttccttcttaaaaaccatgccatgcaatactgaagaggaactgataccagagcccagaattttacaaactctgatgttatcaacattgaaatggccggaatcaggaaaaatagatacgcatgcctgagcaataagcttggccagaaatacttcattaccatattgtttactcattatggaggtacgaagtagagatgagacttcatcaatatctcgaaggttttttgcagaacaacataccaaattaggaagaatctcatgagcttttctgcaggctatttcataaccttctatgacctctgaaactgacaggccaatcctcagaagttcttcagctaattccaggagagctccagcaaataccagaacaaagtttgtgccatctccaacttcttgctcttgcatatgagaagccattacaatcatttttgcagcaggatgctgtacttctagttctcttaaaatagttgctgcatcgtttgtcacaaacaacttctccaagtggttgataaccattttgttcattccatttggtccatatgctgtacgagtggtttgggcaagctccttgcaagcttgtatgtttctatacacagcctcttctaatcctgaaaagtgtttcgctccctccttgagcatctgggcaaagcccggagccttgggaacgtgaagcgccatggccagcctgcaggaagcagttcacgcgaccgctcggaagaccgcggaggaagcgaggagcacgcacagccttctgcctcgtgccgaattcgccacccaggcctcgctaccttaaaccgtagtagttactgccg

SEQ ID NO: 133556 - DNA, 425 bp, Homo Sapiens
ggcacgaggcttctggagcagaccgaacgtctgaagttcctggtcgccttccggcccggtctggtgccacccacactcgccgcacagcaggctgccaccttccagcggttctccgaagggcgcctgctgctgaacgtcgtcagcggcggcgacgacaccgaacagcgccgcttcggcgattggctcacccacgacgagcgttatgagcggaccggggagttcctgcagatcgtgcgggagatctggaagggtgatcccgtcgactattcgggcaagcactacaccgtgaccgatgcgcgggtctcggagccgccaacaccgttgccgcagctgtatttcggaggctcgtctccggccgcgttgcccatcgcggccgatcatgtggacgtgtacctgacatggggcgagccgcccgccgcggccgc

SEQ ID NO: 133557 - DNA, 599 bp, Homo Sapiens; identical to SEQ ID NO: 119594

SEQ ID NO: 133558 - DNA, 643 bp, Homo Sapiens
ggcacgaggctcacgtccagcaccgagctgaaccgagtcaaatgccgcacctgccgcaataccgacgcctacaaagaagcgcgccgcacccagcgcaacgctgcccgccgctccgcgcgcaaagccaaaacccatactgccgttgactggcgcagtgcctggacgcaacgcctcaccgacttgcctgggctgcagcgcctgccacgcggtttcagtgggcagccatttgtctgagctgttcaggcgttgaaaacagattaacccggttcccatcgggttcctgcagcagatgctaggtgtcagtgcgccttgtgctcggctggcggtgcatcggcctgcaacttctgcacgtcgctgaccgccagctccctcgactggccaccccaaccctggcgcagatagttgagcaggtcggtcagctgttggtgattgagcttgtcggcaaagcccggcatcggttgcatgcgctcgaacccggtgaattgctgctcgccgatgccgtcctcgatcacccgcagcaggttgcgcgggtcttccaggcgcagcgtggtgttgccgcgcatggccaccgcgatgtgcggcttgccctcgccgttcggcgcgtggcaaccggcgcagacgttcagatagtcctggcggccgc

SEQ ID NO: 133559 - DNA, 594 bp, Homo Sapiens
ggaacgagggagtttgtgtattgatatatagctgggaaactattgcaaaactgagtttgaataactttttcaatcctagtttgtctgataccatgaactcaaaataataaaaccgcattgcttgcatatattcaataattgacatttcattaatccaaatttctcattcactggttaatcagaattttcacaaactgtactattatcatctgtttttttcaagaggcagtggtaatagctgggcagtcagggaaagtgagaggggaagaagggaagacaatattgaattcgtttcataaaaacactatttaggattcactgatttagcctagcagtatttttgattaaatgatagtttgggttctagaaattttttaaagaatcacataacacggatttctgcatattaataagtactgctaggagctgaaaaacggaccatttcactaattgaaactaatttttgggaaatatgaggatggatgcagggtctaggacaaagtaaaatgcaagatgtttctagacatctagggaatcttcatgttgtgggtcatcatagacaaaaattagttaagctacctttctattgcagtt

SEQ ID NO: 133560 - DNA, 1096 bp, Homo Sapiens
  misc_feature (547)..(590): n is a, c, g, or t
  misc_feature (965)..(965): n is a, c, g, or t
tttttaatttgccagatattcttttaatgagaattataaaagaccaaaaacattttttgcaaactgcctttttaaacaaatgatttgcttttaattacaaatactgtgcatgacgatgccttcttctgcaaaaccaataaatacaagaacaaattttaaaatatgtgatttgtccaagatatctgaaaaaggaaacaaaagcctgatttgcagtatttataaaaatcaatttattctctaacctttcaaagattaagctcaaaggtgtgactcatctgtagaagacagaaagagagcaccttatagatgctttaaatagcttttgattatttttccgatgtcacctttactttctggaactcatggcttcacaaaatagctgattttaaaatatttctaatgaactgattaatgggggaaaagaaaatattgaacacgttataaattttttaccataaacaaatatgcatatcaaaagatactaactttaaaatggtacaaaaaaaggaaaaacctgaattacagaaaagtcaaatttatttaatgnnnnnnnnnnnnnnnnnnnnnnnnnnnnnnnnnnnnnnnnnnnncacacagcagcactatgtattgactcacaaagggaaaagcagtggcccatgaccactcaagatggcttgtcagttaaaggaaaaaaacccaaacacgcacacacccacgcaggcacacactcccacgcaaaaacaaactttttcaacaatacaatcaatctacaacaaacacaaaactcagaattattttacaatgcttcctttcttaatacaaaagatgcccatcttgggtgtatatacatatattttttcagtggtttactgttgacttatttttaaatatattagtgttactacatgcaactgtttcctgtatttaacagcctttctttttatttaccttcatgtgtctagcttccacctaccgaaagagtnttaggttggcagacagatgggtgccttattttctgtgaaactgaagtttaaacactggccagaaaatgtttgattgcatttcacacatggaatagttacatgtgctaaatgcatttctgcaaagctggcaa

SEQ ID NO: 133561 - DNA, 525 bp, Homo Sapiens
gcggccgctgtcgcccgccgtgccggtgcagctctatctgctcagcgccgccagcgcgccgctgggccaggcctcgcgccgcctggtcaagttcatcaccgcggctgcccacgaacatctggcgcgattgccttgaacgacatccgcatcgaagacatcgccggccatcccgacttccggcgcctggacgcgctgaagcacggcatcgccgtcgacctgcgctacgccactgccgacaacttcgtcggccactcggtctatgccggcatcgactgcgcctggctgcgccgcgaagcggccgacgccctcgaggccgcagccatctggctgcatgagcgtcgccccggctatcgcctgttggtgctggacgccctgcgtccccagcgcgtgcagcagcgcctgtgggacgagctgcaaggcacgccgctgaccatgtatctcgccaaccccgagcgtggctccatccacagcttcggcatggccgtcgacctgaccctgctggcccctgacggccgccctcgtgcc

SEQ ID NO: 133562 - DNA, 706 bp, Homo Sapiens
gcggccgccagcgcaatgcggtgactgcattcctggtcgatcgcggcacgcccggcatgaccatccgccgtggccccaagtgtgtgagcaaccgcggttatcacacctatgaaatgttcttcgacgactgccgcgtgccagcctccaaagtgctgggcgaagtcggtaaaggttgggaggtcgccaacgcctggctcaccgctggccgggtgatggtcgctgccaactgcgtcggccaggcccagcgtgcgctggaggtgtcgctgcaatgggcggcggaccgcaagcagttcggccagcccatcggcacctaccagggcgtgagtttcaagctggccgacatggccacgcagattcgcgccgccgagcttctgaccctgcacaccgcctggaagatggaccagggcagcatgaccgatggcgaggccggcatggccaagctgtttgccagtgaaaccctgggcaaggtagccgatgaagccgtgcagatctttggcggcatgggcttgatggatgaagggccggtggagcgcatctggcgtaacgcgcggatcgaacggatctgggaaggcacttcggaaatccagcggcacattattgcccgtgaactgttgcggccgttgttgcgctgaccggcgcggagaacgcttatgtcccaggctattcgcgacaacctcaagcgcctgctggcgcccctcgtgccgaa

SEQ ID NO: 133563 - DNA, 502 bp, Homo Sapiens
gcggccgcacccagcgttgcctttgggagaagcctccccattgagtacaaacatcttcctagaccgatgtcgctcagaagaccagataaatacctcgcaccgtctcctccggggcgcttcagccatgcggcagccgtttcgaccgcggcgtctgtgacgtcatcaagccgaaaatgcagaacggcgtagtggaatgcttcaccacccgcgacagccccgagactatcctcgtattcccgacgctcagcacccaggtaactcagaccttcgggaatgttaagaatagaccctttatgcgatttccgcctttccgcaaccttcgcgcgaatagcatcttccctcgttgcatcataaacggcgtgacgatacatcctaaccgcgtcccgaatcctcctcgaaaaatagtatttgtgaggttcatatgcttggtctcgggaagattgcagtatatcttcactgctcgaaacgagagaatcgagaagctccgccggcccctcgtgcc

SEQ ID NO: 133564 - DNA, 467 bp, Homo Sapiens
gacattgttctactgttttattgactcgttgcatttacaagttttgctaatgatacacagtctacacttactaataaattatactcacagtgtttttagtgatgtgactttgtttcaatattttataataaaagattataggagtaattacagacaatgatagaaaagtttgaggcatcgtgacaaaatagtgcaaaagcctaagttatccaaaagatgtagtgatcataattataaagactgtgtagtgtccctgggaaatgcttacaatgagataccaagcagtcaaaacggaatctaaccacgcacctgtacagtagttacaaaggtattacaaagcttgtctctgcatgaacacagtaaagaagtcacacatacacaaacgactacaatggtgttctggtattgcgactgtttgttctttctttcttttaaatattattttgctttattgttgtaatgttatt

SEQ ID NO: 133565 - DNA, 1236 bp, Homo Sapiens
gccctggacctgagcgacccggcgacgctgctgagggaggccgctgcccggctgggtctgccactccagggaggcgagcccctcgtcgaagccgtcgaggcatggcgcgcagcgacaatcgcccgattcactcacttgaaggatttcccatgaacaacacccccagcggcctgcagttcgacgacaccgtcgaaggcgacggcaagcaggcgtcggccggccatgacgtcacggtccactacaccggctggctctgggtcgatggggccaagacgaccaagttcgactccagcaaggaccgcggcgaccccttcgagttcgagcttggcgccggcatggtcatcaagggctgggacgagggcgtgcagggcatgaagatcggcggcaagcgcaccctgatcatcccggccggcctcggctatggcgcacgcggcgccggcggcgtcatcccgcccaacgccacgctgtgcttcgtagtcgagctgctcggcctggccggcggccccgagcccgtcgagctgaacctgcacacgacctccaccggcctgcagtacgaggatcgtgccgtcggcgaaggtgccgaggcggccaagggccagcgcgtgtcggtgcactacaccggctggctgttcaaggacggcatgaagggcaagaagttcgactccagcaaggaccgcggccagcccttcaagttccgccttggcggcggcgaggtcatcgccggctgggacgagggcgtgcagggcatgaaggtcggcggcacgcgcatgctggtgctgccgccggcgctgggctatggtgcccacggtgccggtggcgtcatcccgcccaacgccaccttgctgttcgaggtcgacctgcttgcggtgtgaccgtcgtcaaatcaaggcatgatggggctgctgacaagcgcctgtcattcgcggatgctctgatccagcccgtccacgccccctgatcacaccatgtcgattgaccagcgccgcttcccccgggtcgagttcttccttgtgcccgaccagcatgagcaactgcctgtctgggtgatcaagcccgaaggcctgtccgaggcgcgcggcggcattgtcgtcaacctcagcgaggccgggctgcagatcctggccgccgccgagccaccgctggatgcccagcactacgagttgcgcctgctgctcggcgaggatgaaggcgtgcccctcttcagcgccgacgtgcgccgcgtgtggacgcggccgc

SEQ ID NO: 133566 - DNA, 573 bp, Homo Sapiens
  misc_feature (373)..(396): n is a, c, g, or t
aagttctaatttagcacagaatcctctcacaagttattccacagtgcttcttttccaatctggactctattgttagtagcctggtcagttctccatttgagtaattccatcgtatgtgcttattattcatatataattccggtacttgcagtcaaatatatgcaagtctgctgaggcccaaacttcaaaacgaactgctccacagtggcagcctcctgtgtgcttcaccaggccctggtattcaaaggtgtctagcaggagcttggcggcaccctcggaggtaagcttctgccgcttctggaacgtctcccagcgctcccgctgctcgcccaggtccaggttggacgccgaggacgtcggggtcgcgggagtnnnnnnnnnnnnnnnnnnnnnnnngagcaacgccagctcaggcggcggcggctcccccgggccctcctcctgggcccgcggcgacgagcgcctcagccgcggcttctccgacggcggcttctccaccgcctggctcttgctcccggcctggctagcggagcgccgtgtgcgggtggcgctgggtgccaaggcagcggccgc

SEQ ID NO: 133567 - DNA, 1152 bp, Homo Sapiens
  misc_feature (840)..(891): n is a, c, g, or t
tttgataaaccaaagtgactgctttaatgttaaaaatatttattttttttcctaaaagatcacacaaaagttgggaagagaaggatgtcaattagactacatcaaaatctgggcagagggaggacaaagagctgcctaaagaaactggtagctggagcaaactgcagagatcaagatgaccctagtcaacggaaccagcagcccaggtcagccacattcaggagcaccaccgaggcacggcagggagagcaaagttgctggccccaatcattcctccttttcagggcaggagaggcagaagctcactctttagacatgttcttgatggtcttgtgctctttcatggccttctcccaatcgctgccattgaattcctcagtgaccatactccgcacagtgccctcatccaggcagtggggggcaattccgaagcctccggggtttgatcgtggagtatagaagctctgaacgccacatctcttacagaaggtatgctgggctttgtgagtattgaacgtgtaagtcgttatgtgctcagctcccttcaggagcttgaagcgagaagctggaacaatgaagtgtctattctgcttcttcttgcaaatgctgcaattgcagtcaaatatatgcaagtctgctgaggcccaaacttcaaaacgaactgctccacagtggcagcctcctgtgtgcttcaccaggccctggtattcaaaggtgtctagcaggagcttggcggcaccctcggaggtaagcttctgccgcttctggaacgtctcccagcgctcccgctgctcgcccaggtccaggttggacgccgaggacgtcggggtcgcgggagtnnnnnnnnnnnnnnnnnnnnnnnnnnnnnnnnnnnnnnnnnnnnnnnnnnnntcccccgggccctcctcctgggcccgcggcgacgagcgcctcagccgcggcttctccgacggcggcttctccaccgcctggctcttgctcccggcctggctagcggagcgccgtgtgcgggtggcgctgggtgccaaggcagcggccgcggaggccgcgggggccgcggaggccccggaccgcttctgcccgcgcagcttggcgccgcagagctcctcgatcgccgcctcgtgccgattaacacccagcctctacctagcc

SEQ ID NO: 133568 - DNA, 601 bp, Homo Sapiens
  misc_feature (52)..(52): n is a, c, g, or t
  misc_feature (120)..(120): n is a, c, g, or t
  misc_feature (344)..(367): n is a, c, g, or t
gctttgtgagtattgaacgtgtaagtcgttatgtgctcagctccctcaggangatgaagcgagaagctggaacaatgaagtgtctattctgcttcttcttgcaaaatgctgcaattgcanttcaaatatatgcaaagtctgctgaggcccaaacttcaaaacgaactgctccacagtggcagcctcctgtgtgcttcaccaggccctggtattcaaaggtgtctagcaggagcttggcggcaccctcggaggtaagcttctgccgcttctggaacgtctcccagcgctcccgctgctcgcccaggtccaggttggacgccgaggacgtcggggtcgcgggagtnnnnnnnnnnnnnnnnnnnnnnnngagcaacgccagctcaggcggcggcggctcccccgggccctcctcctgggcccgcggcgacgagcgcctcagccgcggcttctccgacggcggcttctccaccgcctggctcttgctcccggcctggctagcggagcgccgtgtgcgggtggcgctgggtgccaaggcagcggccgcggaggtcgcgggggccgcggaggccccggaccgcttgtgccagcgcagcttggcgcc

SEQ ID NO: 133569 - DNA, 780 bp, Homo Sapiens
  misc_feature (32)..(32): n is a, c, g, or t
agcataagtgcaggtataatgatggttttatngaagactgaattcacatcaaactgaatcagtaactccagctgtatgaacagggtgaaacattaaacatttaatgaaaacaattcctttcttaggtcacagcaaggactaaatatgtccaattatcatgcccactaagaagatgtattgtaatatttgcagttaatcactcattcacttcaaagggtgtttattaattgtctactctgggcataacattaattggaagcagtgtgttcacatggaaacaaaacttacctgagactctcagtcacaactttccatgaccagcacacgtttgtaatttgaaatacatatctaaggcttcaaatgcataaataggtatcccaatctagaactaagtcaatagttgctttgaattaattgtttaaattaacctgggaatcggaaagatatgtctccatgaaacaataaaggctgtgttagaattagtaaactttagaagagcattttaatcctaatatataaacatactacctaggcacactgtttaaatacatctgcaacctactatttttagatttaagaaaatcattaaaccttaaatttggaaaagattccagtgttagacctctagactatgaaacttgaatgtttttctaaactctttgagttttatccagaaatacagattttcgtggcactgacaactgcaagaaatttcacttggagtctccacatagtcaaccatgtgatgttaacatcagtgtaatagatactatcacaaac

SEQ ID NO: 133570 - DNA, 991 bp, Homo Sapiens
  misc_feature (47)..(99): n is a, c, g, or t
  misc_feature (192)..(192): n is a, c, g, or t
  misc_feature (205)..(205): n is a, c, g, or t
  misc_feature (209)..(209): n is a, c, g, or t
attaaccctcaactaaagggaataagcttgcggccgcctgctcaggnnnnnnnnnnnnnnnnnnnnnnnnnnnnnnnnnnnnnnnnnnnnnnnnnnnnnaataacaacagtaggccccaaactaaaaaagtcggttcatcttcaaaccaccaagagcactagaggacttgtgactcagtaccttcatataancaccacataaatnactnttagccacagtcaatgttcacagcctggtcagtggaacaaaggaaatacttttctggcgattagacgtcatctgcagagagagctgggatattcatccgaggccgggtgaaaaatgccatcttctccctgaaagactgaacttctgggggttccttacagctctggcctcggagcctgtgcacatccttggcagctgccctcatcatcttgtctgtctgaagctcacccttgtgctccgctcggtccatctgccgcttctccagcatcctcagcagcaggcggaaacgctcgtcctcacgcaaccactgtggcagctccttctccccgtggctcttggcttgttccagctgctccttgagctccttcagcaccgagatctcctgggtcagttggctgtgccaggttcttgtcgcctgcaggtctaactccaggtccagcgaggtacggatcagacgctcggagcgcagcgacttgaccgaggaaggccgcttcatccggacgctgcgtcgctccagggagtttcgaacaaaaggtggctttttggacagagtggagctgtcactatcactccgattcagccggcacacgtactggctctggggtcctggggagaaggtcttagagcggatgatggtgctccctcgaagaaatggcccctgggacggggtgcccactctccggtccttaggtcgcaccactgtgggggatggggccggggtctccgtgttggtctcttttccaccctcgtgccgaattcgccacccaggcctcgctaccttgg

SEQ ID NO: 133571 - DNA, 508 bp, Homo Sapiens
aataacaacagtaggacccaaactaaaaagtcggttcatcttcaaaccaacaagagcactagaggacttgtgactcagtaccttcatataacaccacataaataactttagccacagtcaatgttcacagcctggtcagtggaacaaaggaaatacttttctggcgattagacgtcatctgcagagagagctgggatattcatccgaggccgggtgaaaaatgccatcttctccctgaaagaactgaacttctgggggttccttacagctctggcctcggagcctgtgcacatccttggcagctgccctcatcatcttgtctgtctgaagctcacccttgtgctccgctcggtccatctgctgggcaaagcaagcaaggcccctgagtcagtggagggggcctccagaaaggggcaaggagaactcgctatcacaacagagggggctactgtagggacggcaccctcactcttgctccatgtgggatccacttcattcagaacgataa

SEQ ID NO: 133572 - DNA, 436 bp, Homo Sapiens
ggcacgaggccgccgaagacaagcctacggcgaaaaaggcaccggcgaagaaggctgccgcgaagaaataggcttcattcgaagctgatcgagaaggccgggacgagcgtggctctgcccggccttttcattggttcgggctgcggatcgaggaacgcgttttcgcaggcgccatgccatggtatagcgatgcgccggggagaaatgccgatgcgccgcttgtcgatcgccgccttgattgccgtcgcagttgcccttcctgcgccggctgcggcgcagcgggcgggtgagttgattgcggccgaatcgatggccgacacgcctgccgggatacaggcatggcgagttcgatattggacgcgcggtcagagcggtaccccgctcgccgtcaccgggatcgtcgcggcgccgatggaggcgatcccgccgcggccgc

SEQ ID NO: 133573 - DNA, 1383 bp, Homo Sapiens
tttagttttttcaataccttctttattatgtctataaaattatatgtagcattggaaatgttattgaatatgacaccaacaacgtgctattgtattttttaaattttgacttcttttaaagaaggtgataacaatctgtggaaaatgcttttactgtatcatgccaatatactgcaaggagtatttcaaaataatataaaagtaattcacagacttagattaagtgaagatcaaatgaccccaaaatttttcttccttagtttttcacagcaactgctaaagtccataagctgatttttccaagaaaattattctaataattttgagtgttcaatccgtgcaatggtccagtcaggctttactccttgtgtgaactccctctgaaactcatagcttgccctaagaagttgtttagtttcccactttctgtttccccaacttaaacttggaatacactggctcctcttaaagtttcactggggatgttggcactggttagataccaaaagcacatcaggatgttaatcaaacttccttcctttctcatcatagtaaatggagatgtctcctgttgatgtaaatacaatttcatctatgttagcagcaagggcatttttatggttgtcaggtagtgaagtaaccttttctttcaatgcatgtagcacctctttggccacaagttcttccaacagatcaaatttacactgtgacagcaacttggatacatgagcaaaagcctgcttcgctccctcggagaactctgtgatgctgaactctttgtcgaaataggcccagataaggaaggccttaattcgagtcctaacccagttgatggggttggagaatcccaggacgatcatcttggttttctggtgctgctggggcttctcctccgtgctgtagctgcgctgagggcaggcagggaaagaagcgaaggctgcggggagtcccgggctgctgagcactggccaccgggagccctgggcaggtagcgccgaggctgccaaggccctagcgcttcgtggaaataacgccgctcccaagccgaggcgacagcggcagaagtagcaaagtgtggccgacggcagcctcacctcggccacagcaggagtccggagtcggacggccccgcagggcagcgaccgagagtgcaggaactggggtagcaaacgagcggccagcgccatttttatgacccttcaccccggtgcctgccggtgctgtatggaaaggaagtcggtgggaaaccgcctcagcggtgtcggagaaagagactggagagcaaagtggacctgttgctgcagcctctggtgagtcggccccgtccccgctctccagcacgcagcccaggccgaggcccttcggcaacccgccccgcgctcg

SEQ ID NO: 133574 - DNA, 1002 bp, Homo Sapiens
  misc_feature (914)..(914): n is a, c, g, or t
aacacacgaaaggatgtttatcgtggcctgtatccggtgccaaggggtcaggggcacccaggtgtcccccactttaggcaatgtgtgtaaactgcaattgacattgtggagtgccacatggcaggtcaaagcaatactgcatttctagaagagtcaatggggctagatcttagcacacattgagtgaaaacagcataagacctattgcacaatagcactatgtacagtaaaagcacatattcacacatgaaacgtggtattttacaaatacattcatattcaaagacatgggtgcttatgggagaggatggtgtaaagaaagggaaaaaagccataaaaccagagaatctttgcatgggactgtattcctgagatcccaaaccaaagggatgaatgtgctgttatgccttaaatgtgtgcaccaggaaatgcaaactagaaagggtggctctgaagggtcctcaggtgaggaagacccccagggctgagaatccaccaccttcatccttcaaaagagtacctcagttgtctgcttacgcttcagccagcatgtgtgagcttggtcatttcctgcaagccaggcaaccacaccagtgtataagcctcaagcaaatgtcactcccaagccccaaatgggactaaggcctctgctgggctaggcgtggtgtaaatcccaggcctggaagctcctacccaaccctcatttgtttcaactcactttcaatatgtgcatagtttcataaagcagacatttccatgaggaaaagaggatggtggtgaaaggggaggggtgaagggacatctccaagtcacagaggctgcaaaactcagcatgacttgtggacggagccacaggccacccagggcaacaacacccacataactcaccaagtggttaacggctctaaaccagngtcaacaggagaggggacaaaagtcactccttgattttgctgcagcttaaagataagtctacctcagcttatgctagcccttatgggg

SEQ ID NO: 133575 - DNA, 1440 bp, Homo Sapiens
gcggcccaccaaatttcttatagctcttgataaaccgcctaatttctgcatcactaaatcctttaatattctcccgaggaatagtccgtggtcttccacgtttctttggccttttcccttttgagatggaatcactatcagatccagagtattctcctacttctactgcgcttcccttcacttccattgaacctaatctgttttgcacaattttctcattcttgggagcatataaatttcttcaagttccttttgtcttctcttcttcttctaatcgtcttctttgatcttctggaataatttcctcccaattctttgaatttctttcagggttccaactcaatgtcatcctcatccatatttgagaagttggcaaccttgaactgggaaagcaattcatctcctacagttaaaggacctggttcattttcatgagtttcagctctcttcaagatttcatctatatccatttcctggggctcttgttcttctccttcaggttccttaaaaagttcttcagcaccaaactttaaaatggctgataactcttctttattgaaaggagtagaacttgatggggcagaacctgtatgtagtactgtcttcccagttgtgtccattctttgaattacaagatgatctaaaaccatcttctttttcgccctttcaagaatatcttcttcaactgatccctttgtaactagacgataaatattcacctgtttcttttgcccaattcgatgggctctagcctgtgcctgaagatcattctgtggattccaatcggaatcaaatataacaaccagtgtcagcagaggctaaattgatccctagacctccggctcttgtgggacagcaaaaagcaaaaatcctctgatccctcagcattaaaatgatctagagcttgtttcctcagttctccttttattgatccatctaatctttgaaaggggaattgacgatatttcaaatattctgcaagtatatctaacatccgcaccatttgtgaaaaaataagaactcgattgcctcgttctcttaggcgaattaatagcttgtcaagaagaatcaattttccgctactacgaattaagtgttgtaaggcctcctgtttattatagaattcattattatctggtggtttaatgaggtagcaatggttacaacatttctttagctccatcataatgttcaaaaagcctgaggtactgcccttggaacctttgctgagggctttgtaattcctagttaaaatccatttgtaatattgtttctgtaaagcactcatttccattcttaaaatctgctcaaccttggcaggaagagatttttccacatctttcttaactcggcgtaacagaaatggctcaagctccttgtgaaggcttgccccggccgtaatggccgaattcccgggcatatgtccggtaccgtcgactg

SEQ ID NO: 133576 - DNA, 1106 bp, Homo Sapiens
ccacgccgtcgaattcggccaggcgtttttcgaaggcctcacggttttcgctggcgctgcgcatgtggctgatcttgcccgcgtactcggcattcaacttggcgctgaggtccagcagacgctgcgctgtgctttcgtcgtaacgcacgtaatgggcacgcccgagcatcgaaaccagctcacgcgacgtgcaatgttgcaacttgcgtgcagtgtcgcggccctcttgctccacgatcaccttgtaagcctgcgccgcgatgggcgcctgaatacgcttgcccatcaggaagctggcgataaaccacttgaacaggctggcatcatcgtcgggcgcaagctcaatgcccagttcagacgccgtgatcgaacgggccatgctcagtggcccagcttgcgctcggccttggcagcctgctcgttgatggcgtcagtctggcgttcggtgtccttgatcgacgtgggcgtcaacactttgtccacggctttggtcttcgggttgggctgttccagcgtctgccccttggcaggttgttgacggcctttctgggcatcttcagagctgatgggttccggggttttgtcgacagtcttgggatcggtcatggtgagtctccaggcaatagaaggcccgcaaaaagcagcaggcgtctatgcagcagaggccagcgattttcgatagttcaggatttttgcaggtcggccctcctcgaaaaccacccaagaaaaaagtccaaattaatttaaacctttgccgcccacgctcgatccactctcccacaccgcatgattaatccatccagcaggagagactcgaccatgagctcacaactcaacggcaagaacatcctcatcatcacctccaacaccggcatcgagcgcgacgagctgctcaagcctctgcaaacattgcgtggctatggtgcgacggtgacgcatggctccagcaaaggcggcaccgtgcagacgttcgtcggcgacaccgagaaggaccagaccgtggaatccgaggtcaagctgtcgcaggtgctgagcagtgacttcgacgcgctggtgattcccggtggcaccgtgaatgccgacaccctgcgtcaggacgcggccgc

SEQ ID NO: 133577 - DNA, 824 bp, Homo Sapiens
aaatttacaaagcttttgatcattcccttgtcaacataattggcagatctactctcaaacacacttaagagtattccacacaacatgttcggaattcagatttattgatttccattgtattgactttaaaaatggtatgaagctgactgcaagaaagggaactggtaattttaagttaaaattaagctaatggtgaaagtacatcacctctggcttcagtcaccacatcacctcagattgaatatagattttttatgaacaaagttccagaactctgaaatccagggatgctgcaggcctctcccggcaatgtccttcactttgggtcagtctcctgggccagaggtgaaagtgctttcaaaaatactgccatttccccagcacagtgtctttgattgcatccacatattgagttggaacccagtacacccagtagtaagaggcttccgtggggcccaactgaaacgccatcatgtggtagtcttcatgtccttcgataggttcactgaccacattttttatggagcccatgggcaatttctcagtccgctagacttagttcccatccagacttctctgcctgcacctatcttcatggcagggtctttccaggtcagccgtagcaactgccttcaatgaggctgcccacaagcaaaagtagaggtccagcaagaggcaggaagtctatgcacttcagcaagtgaatgtgatgagacagaactaagcaaaatcacctgcaaagttgacagaggctgggcagcttactactgataaagggaagatggacaggctctacagaagagaatgatctagcagagggttca

SEQ ID NO: 133578 - DNA, 1119 bp, Homo Sapiens
gcggccgccgacctgctcgaccagaaataccatcgctacctgctggtgttttcaaccttgttggtggcgctgctgctgtacctggcgattcgcctgttgcgcagtttcgccgagatcaaccgagtcaaccgggctttgcatgtggtcaacgaaaaccttgagcaacgcgtcgaggagcgtacccgggaactcaaggatgcccagggtgaactcctagacagcgcccgccaggccggcatggcggaaattgccaccaacgtgctgcacaacgtcggcaacgtactcaacagcgtgaatatctccgccgagctggtgacgcgcaagctgcgcaccagcaaggcgctggggctgggcaaggccatgcagttgatcaacgagcaccgccgcgacctggggacctttctcaccgagaatgaaaaaggcaagttgttgcccgattacctgaaccagttggtcgacgccatcgccactgaacagcagggcctcaccgaggaactggcgcaactgagcaaaagcgtcgaccacattaaggacattgtttccacccagcagtcctacgccggcgcatccacactgctggagccggtgcatatcagcgccttgatggaggatgcgttgcgcatgaattccggggccctgagccgccaccatgtgaccgtggtcaagaactaccacgacgtccccgagatcatggccgacaagcatcggttgctgctgatcctggtcaacctgatcagcaacgccaagtacgccatgtccaacctcaccgaccgcacccggcaaatgaccctgacggtgctgccgctggacgacggcaccttgcagatcagcgtcagggacgagggcgaaggcatacccgcagaaaacatgacgcgaatcttcacccacggttttaccacccgcaaggaaggccacggctttggcctgcacagctgcgccctggcggccctggaaatgaagggccgcctgactgcccacagcgatggcccgggcaaaggcgcgttgttcaccttgctcatcccccttgatcccgcacggacttgagcatgaataaacccaaaccggcgaatcttattgatcgatgacaccccgtcgattcacgaggactttcgcaagatt

SEQ ID NO: 133579 - DNA, 676 bp, Homo Sapiens
gcggccgcgaaggcgggcggcgacagtgcgcctcagttctcgggtggcgacgcgcaaccgggctgcccgcgcttcctgacctggccgcgtgacagccacctcacgatctacgagacgggccgggtgggcgacggtcttgccatcatgcatcgcggcgagatcaccaagaccgcgcgcgaatgcacgataaacggcacgcaggtgacggtgaagtacggcttctcgggccgcatcctgctggggcctcgcggtcagtcggggccgatctccatgccgatcaatgtgttcgtcaccgacgcgaagcgcgagcggctcacgacggacaagctgcgcgtggatgcgacggtcgcggtcgagaatccgatcggctatttctcggccgttcgcacagtgaccttcgatgtgcccgaaggcgcgcgccccggcgagttcgaagtctacgtcggcttcgaccgcaacacgccaaacgcgggatagcccgctctctcaccgcaaacgagacagttccgcgtgcagggggcgcatgcgggcgcgggcccagccttgcagcgagtcgaagatggcggtcgctggccagcgcgggtccggttcggcgctctggcgccacgtcatatgcacctctgcaacgcgtccgcctgtgagggcgaagagggcgtcatccgcctcgtgccgaatt

SEQ ID NO: 133580 - DNA, 689 bp, Homo Sapiens
ggaaaaaagcgtagccgtaaatgaaccttggccattcgaccgcgttggggggtcaaggtgccggggaaaaacggcgggttgccataaggggccgcgtgagcggtcggcgacaccgcggagcgaaaagcagccctggaaccgctggaacacagccagatccggttacgccgctgtccggtccacgggcggcgcggaccaccagtgaggaccagatcatgaaatccctgctccgcgtcaccaccgccctcgcgggcgtcgccttcgccggctcggccttcgctgccgacctgccgcgccgcgccgcccccccgccggtcttcacccccgtcccggtcttcacctggaccggcgcctatttcggtatcaacgccggctacgccttcgacgccagcgaccgcaactccggcaacaccttcgcggtgcccttcccctacggcgcccccggcaccgtcgcctccttccgcaaccgcagccaggacggcttctccggcggtggccagatcggctacaactaccagttcaccccgggctcgggtgtcgtgatcggcttcgaggccgacgcccagtacctcgacttcggccgcagccggaacaacgccttcgtctccggcgccgtcgcccccggctactacctcaccgatccgcgcggcctctccagcctcgacttcttcggcaccgtccgcggccgc

SEQ ID NO: 133581 - DNA, 691 bp, Homo Sapiens
gagaagagcaaactgtttatttacaccttgggtctgtacagtacagctccccgggaggagcctgccaccaacagcctgttccttttggggcagaagcaggttggaggcaaagagctcagaccctggacagcctcagggcctcacccccactgtcccctccctggggcccacagggcaggtcccaccccagcactaaagctaagcctgtttccagacagagcctcctggggcaaaaaagtcaagttgaatcccacagagtcagaggccatctaacaaacccttgggcatgaggccacatgtgtagttcattccacgtaggcctcagaagacccagccaagaaagtgggaggagctggaagggagcccacagctgtgagtccttggcaatgcaccgtccgctccgtgacatcagttggtatttaatggcactctggtctgagcacctcagcagacaaggaagggctgggcaggtgttcacagcaggcaggggcagcagctagcacctcttccttctgcccaagtggggcccgcagctgttctagacaccagatgtggtggcctcaaggcaggcctgtggccgtgcaccaggaaccatggacagggcttcctctgggggcagagacagtgcacggagcggctgcggtcccatgatatccctgctggggccaatgcccaggttaaagagtgatgc

SEQ ID NO: 133582 - DNA, 1717 bp, Homo Sapiens
  misc_feature (852)..(929): n is a, c, g, or t
agttgtcgctctctttttcgacttgttttttcttctctatgtccttattttctttcgtctctcttgtttgttggttccttgctaccttctgttcttctcttcggctctgtcttacttttgctcttctgttcgtctctttcgtttgtccctgtctttttttattcgtctttgtccttcggctctgctcctctctctttgttgggtttgctcattcttgtcttctgtttggtctggtctttcgtgtctcgctgtgtttgtgtgcgtgtcgtttgtctttttttcggtgttcttttgtccgtctgtgttctgctgtttgtttgtattgtttccgtgtgctatcgggcgttgttgttcaggtcgtgcttctcgcgtgcgctggtatattatgtcggtttcctctccagttagcttgatgttgtccgtggttgtggctgacattgtttgtctgtttcgtgtctgtgtcgtgtagtttgctgctgttgcttttggttggaccccatgctttagtactctgttgttttgttctgtttcttgtttcctgtcctgctggggcgttttgtaagtgcttcgttggtgtgtgttttggttccctcactctttttgtgctcgtctccgcctttgtgattcaggttggtctgtctgttcctcatgattttcgctctttctactcgttgtttcctcgctgcttacattgtttctttttttgcttgtcctcctgtgcgtcttgtctgtttaattcatgcgcctctctcctatttgtggggccgccctttgtttttacgctaatatgtagtggtgctagcggtcggtgtgtctgagtggctccctctactgggggactattttgttggnnnnnnnnnnnnnnnnnnnnnnnnnnnnnnnnnnnnnnnnnnnnnnnnnnnnnnnnnnnnnnnnnnnnnnnnnnnnnncatctttatagtaagtttattgtatttttatttcagctcaggggagcaggggtggagagtgggcacaaatgcaaagtaagcaaatggggagccccagcagcaataggggggtcttcctggaagaggcaggctttaaagacaggaggagaaggaaatagggaaaaggagttgggactgagggaagtggtgaggaagggtaggaagagaggggatcctgagagaagtggatcaagaagatttgtaaccctgatttccctgtgtcctgaatggtctggaggagggtaagggagggtgtggggcaggcgcagagcctggcacaatcacctttgaggtcccttagagggttccctctcaggctagctaccccctctcccagcaaagctcgcttccaggaggttctgcacagggtcagtgactggtcactgggcattctctcctgcagtgcctgtgctcccagcttgcgctctgattagaagagccaaaggctttgtcctctggtaacagattctgccaccagcgggggatgaaggagggattttagacagggaggccttcatccctgctcgtaaattctctgagatggacccttcccatgggtgctgtgcttctgtgaacccaaaagtacacattgagtacccaccactagccactggtgagagccgtgtggcatttgtccctgcattcaagaggcagcagtggaacttgggacaagggacctgggttagtcccgactccagcacttgctagtccggcacttgggaatcaatcatctagcctcccggagctcg

SEQ ID NO: 133583 - DNA, 283 bp, Homo Sapiens
tcccacttttcagaccgagtacatagaaaaggccccgttcaatcgaattgaacggggcctttttgtttgccagtgcttaagggcgcttgcgattgctgatcagggtacccacaccggtgtcggtgaagatttccagcaggatcgcattcggaacccggccatccaggatcaacgagctgccaacaccgccttgcaccgcttccagcgcgcagcggatcttcggcagcatgccgccgtagatggtgccgtcggcgatcaggtcgcgtcttaattaagcggccgc

SEQ ID NO: 133584 - DNA, 783 bp, Homo Sapiens
  misc_feature (611)..(611): n is a, c, g, or t
gcggccgccaggaatacctcaagctgctgctcaaccagcagaactccggagaaattcgcgcgcaccctcacttactacgactacctgagcaaggcgcgcctggcacaattaaagggttttaatgaaaccctgcgccagttggccaatgtcgagcaggaaatcgccgaccagcagtcgcaactgatggatcagaaaaccgccctcgacactcagcgcgaccagttggacaaggtgcgcaaagagcgccagcaagccctggccaagctcaacaatgacgtgaaggcccgcgacgccaagctgcaggcccgcgaacaagaccaggccgacttgggcaaagtgctcaaaaccatcgaggaaaccctggctcgccaggcacgtgaggctgaagaagcgcggcaaaaggcgctgatcgcccagcaggaagcggaaaaaaagcgccagcgtgaagccgagctggccgctaccactgacgcgccagcgccgcgtaaaccggcgcgcgcagcgcccgggccgctggtttccagctccggcgagaacttcggcggcccttttgcttcagcccgcggcaaacttccatggcccgttgatggtcgactgctggcacgctttgngtgaaacccgtggcgatgacacccgcgccaagtgggatggggtgatgatcagcgccgccgccggcagccaggtccacgccgttcacggtggccgtgtggtgtttgccgattggctgcgcggggccggtttgttggtgattcctgacacggcaatggctatttgagcctttac

SEQ ID NO: 133585 - DNA, 812 bp, Homo Sapiens
atcgggcacgaggtgcgtacccacgcggagcgtgggaacgatcaagctgccggtagtgcattcctgcgaaatacttgcctgatcctccgacttatcgactggcggatagatagcccttgcgccgtggtctagagtgcaacgatgggctacaagtcccactcttcttataagggctcaaaagagctcagcaccaccaaccgatgatcagcaggtgaacccgccatggaattacgtatcaaccaaaagacctaccaggtcgatgccgacgccgacacgccgctgctgtgggtgatccgcgacgacctcggcatgaccggcaccaagtacggttgcggcctggcccagtgcggcgcctgttcggtgctggtggacggtaatgtggtgcgctcctgcgttaccccggtggcgggtgtggtcggccgcgaggtcacgaccatcgaggccattgaggacgatgcggtgggcaagcacgtggtcgccgcctgggtcgagcatcaggtggcgcaatgcggttattgccagtccgggcaggtgatggcggccacggcgctgctcaagcacacccccgcgccgacggtcgcgcaaatcgatgccgccatggtcaacctgtgccgctgcggcacctataacgccatccacaccgccatgcaggatttggcccagcagaaggagcgcgcatgatgaatacgcgcaacgaactgctggatgtggccctgggcgacccggtcaacctgtcacgccggcgctttctggccagcaccgccgtgggcgcgctggtgattggtttcggcctgccgctgggtggcggccgc

SEQ ID NO: 133586 - DNA, 1078 bp, Homo Sapiens
  misc_feature (258)..(258): n is a, c, g, or t
  misc_feature (321)..(382): n is a, c, g, or t
  misc_feature (658)..(658): n is a, c, g, or t
ccacaggagtctttattacagtgtaaatccaagctcaggcctcccctgggccccatgcaaagccccggcgttggggctagtagcatccagggagacaccaacgcctcacggcgcctccagcggcgggtccggaagtgcagggtggtgccctgtctaggcaactacaagtcccagcaggccccgcggccaaggtgcctcgtctttcctggactcctggagcagagcctcttgggaaatgtagtcctggtcgctcaggtnattagcgcaaagtccctagtgggagtgatcctgacacccaccgggaaaaggctcgggccgagnnnnnnnnnnnnnnnnnnnnnnnnnnnnnnnnnnnnnnnnnnnnnnnnnnnnnnnnnnnnnncaggcgtcctgcgggcagagacaccgttctcattcggctttggctttggatccggagactgcggctgctgcagaggccagggctccggtccctgggattttagctcggatcttagctttgatgtggctcaactgattggtcaccaaccccacatattggtcgatctgagcctggtgctgccggtacagcagggggatggtgaatagaccaatcactcccagaatgagaagagtcaaaccattgaagatggcacccacgaaggtcaagatgtagaangaggaggggcagcttgagggaatccacgaggtctttctaccaggaagaagtgccgcagctgcgtggccgccgagaccacgcgggaggtgatctggtgggacaaacgttccgtctgctcccgagtcagggtgaggtccacatccaggtaggcctggaaagggttggctccatccccccggtgcacggcctgcagcactttgcggtaaaccctgagagagatggtgccgcagagcagcaacagagccaagtgcgcggccacggacacgatgctaaagtgcaggaggcagaggagggagaccatcaggcctgtgaagaccactcctgacgtcctcgtgtccttccagtacagcaggtccgccactttactccccatatcggctccgagtgagaggctggggacaccgctgcttctcggggaat

SEQ ID NO: 133587 - DNA, 447 bp, Homo Sapiens
tttttgggttttccacaggagtctttattacagtgtaaatccaagctcaggcctcccctgggccccatgcaaagccccggcgttggggctagtagcatccaggagacaccaacgcctcacggcgcctccagcggcgggtccggaagtgcagggtggtgccctgtctaggcaactacaagtcccagcaggccccgcggccaaggtgcctcgtctttcctggactcctggagcagagcctcttgggaaatgtagtcctggtcgctcaggtaattagcgcagagtccctagtgggagtgatcctgacacccaccgggaaaaggctcgggccgaggaggggggtgggtgggaacggacaagagatggagggggccagagggctgcgggggctgggggcaggcgtcctgcgggcagagacaccgttctcattcggctttggctttggatccg

SEQ ID NO: 133588 - DNA, 1082 bp, Homo Sapiens
  misc_feature (1046)..(1046): n is a, c, g, or t
cggttttgagttgggcaagcaacgtcttgccggccgcttgggtgagatctgcctccgtcaatgcctcgaacaagctgcgtgacctcgccaacaggacgttgttggcgctgatcagggtggtgttcagttgttccagcgcatgcagttcggcaggtaatacgacaggctcctgggtttgcgtgcgcaggcccgggtcgatctcaagcaggtgtgtacgaatttcctgaaacgtcggtgacgcggatgtagggctcggcgtgctcatgggcacggtcctcatactgatggaatgaaccctcagcatgagacgcagcccgagcgtatctgcggtagatattgttgacctgcccgcgcctcagcccaatcgaaagcgcgccgtgtatcactcagcgccaggctgcccttgcgcaaggtatcggccgcctgattcaccgcccgtgcgccgtccagcaagcgccccgccgcctggtcgacctgctggatattgccgctgacctcatcggccgttgcagcctgttcttccaccgcagccgcgatctgcgccagggtgtcggtgacgtgttgcaccgcaccggcaatttcgcccaggcgggtgcccaggccggtgacggattcggcgtcggtcagtgcctggtcgcacgccgcgcccatcaggctgaccgcctggctgacagtcgcgcgcaaactgtccacggtgccggcgatctgtgcggtggacgcctgggtgcgttgcgacaggctgcgcacttcatcggccaccacggcaaacccacggccctgctcgcccgcacgcgcagcctcgatggccgcgttgagcgccagcaggttggtctgttcggcgatgccgcgaatggtgtcgaccaccgactgaatctgctggccctgctggctgacctgttccagggcgttggcggtgtcggtcaggcgctggttgagctgttggatgcttgccgtggtgcgctggctgtcgcggctgctgtcttcggcgatgcgccttgtgtgctgcgcgctgcccgaggcctgttcgcaactcttggccacgcccnatggaggtggcggccaaattgggtcgcggcggccgc

SEQ ID NO: 133589 - DNA, 1093 bp, Homo Sapiens
  misc_feature (188)..(206): n is a, c, g, or t
  misc_feature (217)..(226): n is a, c, g, or t
  misc_feature (328)..(336): n is a, c, g, or t
acattgactttaagaaaaaattaattaagatgtatttaacctttaagtatagaatgattgtataaattagatttcaactgaaaggacaattagcgattcagagaaagctcctagaaatagactgaaaacaaagccatacatagagtaagaaatagaacctatggaacttccatttttctaactatagnnnnnnnnnnnnnnnnnnncccagttgttnnnnnnnnnncaactcacagtttcaatattttctgaaccaaaaatcagaacacatggtttgtgtcaaagggtttttctgtgctacgtctgggagtgctgacctaagtgacannnnnnnnnaatgccaaatacagtaatctccaagcttttaatggcttatgccaagatgacagaatatgtgaaatctgattgtcccagagttacactctgcactccaaagctacaacagtgccacagctgagaggtttccctatacttcctactactgtgacaatttagcaatccttcaaatggaaaattcctaattacacgagacaatggtcctacagtaggcccgtgcggaataagttccctcgttggaaaaatgctagcatgaatagtttgataaatgcaatccatcagcaaaggagagcaagcaggcagagactgtgccaagcagaaactcattcgcatcaagttttccaataagtttccttcccccagtcccttttcttcaatcctgcttttaagccaggccccagggtaagtctggtagaacactgagcaggaaagcttggaggggttctacaccacttcaaaaatacctttgcttaaaaacacttatatagccagtgattagcaattaaaatgtgaaaataatcaactactcagtagttaaattctgctaattatcaaaagtcatagtctactgggatcagcagcattacaaaaggaagtcatatcgcatttcttaagctttttctgaatggtttaacaggtctctttcagtgttaattgcacttaaaacatctgctttttttcatttaatctctgaaatctgttcattttttccctccatttataaaaaggggtcaatttatcatttgctctatagccc

SEQ ID NO: 133590 - DNA, 1220 bp, Homo Sapiens
cctcttattattattcctctttccactattggaatgtgtgaggctaggggtggcgtggccaaattgcatctgtgatgacgaaggtccatgctaaggatgatggaacaagaagcctgagtccttggtagggtccgtaaagcagctgtatcagccttatactgtccacccctagacttgatgctacttgacaaaaataagcctctgtttaagccactgttattgggtttcggaatacatacgacaaaacataatctctaaccaaactactgcccctggaacagaagtgcttcatcccagccagaagatcactggcactggcaacatccagcctttctaggttaagcctcttgtttttgtagctctcctctttgcttggacttttctaacttggatctgccccctggaatactgtgctgcaaactggtttattgggtgatttttttctacctgctgtttgccctaaaaatctttgctctatttttctttctgaactcacttatcttcctggttctgatgtcatttttgtgccagaacgaaatgggtatgtccatataaggaaggtcttcagagctgagattagggcatgcagtgaattgcaaaggagtaaaatttaaggaggcactcactcgcaggtcgcaagtgaagggttggtgtgttaagaagttgagtaagtacctacttaaatttgctcacaagcctcatcctatttgccctagactgactgtcctttccctctacacctgtccaggcttgtccccactaccgccttcaagttcagtgcctttccaactgaagttttttactactatctttttgtgaaatctctatgatggatacagtgtttatttaatgttatgcaatagaattgaaaataccagaaagcatccgacatagaatacatatcattacttttgtttcagctatacagataagtatgaggtgtacaagtgcattactaggtaaaatgtaatactctaaattatagttcaataatttttttcaattctttttcctggcctatcctccgcctccatccaggtgtctcaccttctactcaccatacaagctatctactaaatttcacctgaaaacttagcttacataagcttatataacatttagcatatattagctacaatgagcttatgtatgtgctgctatgtaatgtccccagccccccaaagtctaatgttgttcaaaattatggattccttcataaa

SEQ ID NO: 133591 - DNA, 530 bp, Homo Sapiens
ttttttttcaagagtataatattttttattcactgataaactaaaagccaatttcttggtatttctcatgtatacttcatttattttattaataagcaaagccctgtaaggggagcctttgcctagtcctccgactctgattcatcttcatcttgactaatctggaagtaacgaagttcgtaggtctccttgtcagatgcaaccactcgaagccaatcacgaagattgttcttcttaaggtatttcttggtaaggtatttcaaataccttttagagaactgtttctcagaaacaactgtgattttattcttgaagcgttcaatgtgaacaacattcccgagatttccagttttgccattgactttaaccttctcccgtagaaattgctcctattttaaaacagaaaaaatgcaaaactagggaagagaaccctagatattcactagggaaggtaccaaaatttccagaatcaaaaattccatcttctactggatgagtaaggtccaaattaaacctccaggttgacctct

SEQ ID NO: 133592 - DNA, 1515 bp, Homo Sapiens
  misc_feature (155)..(155): n is a, c, g, or t
  misc_feature (191)..(191): n is a, c, g, or t
  misc_feature (196)..(196): n is a, c, g, or t
  misc_feature (242)..(242): n is a, c, g, or t
  misc_feature (293)..(311): n is a, c, g, or t
  misc_feature (336)..(336): n is a, c, g, or t
  misc_feature (492)..(492): n is a, c, g, or t
  misc_feature (571)..(572): n is a, c, g, or t
agaaaaaaaagtggtatcgttgtgcggcgggacaacctccgctaagttgggcactacgcgatcttattatagtgggtggggcgaaccgcgtgttttttgtcgtattttcctccgagatggtcggccgctcgccggctcacagaccgggttctggngcgcaggtgagttcccgcccgccgcgctggtgggcnacaanaaccgttgggcagggggggtgtctccaccctcacctcgccgtgggnggcccgtacgcgcgacgcgtgatatgcgtggaatcgccccccctactccannnnnnnnnnnnnnnnnnnccacacacgccgggatgggggtatntatataaatgagagggaatatattgggcccgcacacgccccgtgaggtatcccggggggcgcgctgtatcccgcattgtggtagttatcaaagagtatgcgtggtatgggcgcgacgcccggcgcaataatacgcgtccagaaaggtacatagtgntcgacgagcgagattatatgagtggggctgggttgagagagcatgaccccgctctccgcggttggttgagtatgatagnncgtttttctcctgtgtggttgcagggtggcacccgccctcgtccacaggagtgtgctctctctttctggtggagagattatgttgtttcacgagaggaacccacggccttccgctggtttcatccccaccgccgtgggcggctttattattatgttgcaggggtggaacggattgccacacgcgcgctcctttttttctggggcggccacgtgtttgccccaccggggaaacgcggtctgtggatcccgacgttttccgcttgcgtgggtcggggtgcccccccagggccccaaagaaaggggcgttttcagaaggttttttgagggcgccgagggcggcgccggcaggaattgttcgtttttcttatttgcggcgccccgccgggtgtttttcttcctgcgtgtttggctggcttgtggctcgggtggaagagtataatattttttattcactgataaactaaaagccaatttcttggtatttctcatgtatacttcatttattttattaataagcaaagccctgtaaggggagcctttgcctagtcctccgactctgattcatcttcatcttgactaatctggaagtaacgaagttcgtaggtctccttgtcagatgcaaccactcgaagccaatcacgaagattgttcttcttaaggtatttcttggtaaggtatttcaaataccttttagagaactgtttctcagaaacaactgtgattttattcttgaagcgttcaatgtgaacaacattcccgagatttccagttttgccattgactttaaccttctcccgtagaaattgctcaaaatttccagaatcaaaaattccatcttctactggatgagtaaggtccaaattaaacctccaggttgacctcttgggcttcctgtctttctgcggcgccatcttgcgagtcggccgcgagagcagagaggccc

SEQ ID NO: 133593 - DNA, 746 bp, Homo Sapiens
gcggccgccgcgcagtccgagggccaccagcccgtcgtcgcctgccccgaggacctgcgggcactggtccagccctcgcacctggaccaggtgctggccaacctgctcggcaacgccacgaagtacgccgggggcgccacccacctctgcgccaccccgacgcccgaggggcgggtggcggtggtggtcgaggaccgcggtcccggcatccccgaggacttccgcgagcacgtgttcacccgccgcgcccggcaccccgacaccgccggcacggtgcccgggcgtggcctcgggctgcacatcagccgcgcgctggcgctggccaacggcggcgacctgcggctcgccggcagcgagcccggtcggtccgggagccggttcgagctggtgctgcaggcgccggccggctgagcagcggggacgtgccacgaccccgaccaccgggagacggaccggtggccagggtcgcgcggaccgggacgcggagggaggggccgcgccccggccgctcccggggccgggtagcggcgccgaccccgggagaggggggtgcgggtcaggactcctcggcgtcggagtccaggacgagggtcacgacctgctcctcgccgtcgcgctcgtaggtcacctcgacctcgtcaccgggacggtaggagcggatggtcgccaccagggagtcggcgctggtgacgagcacgtcgtcgatccgggtgatgacgtcgccctcctcgagcctcgtgccgaat

SEQ ID NO: 133594 - DNA, 718 bp, Homo Sapiens
  misc_feature (494)..(507): n is a, c, g, or t
gcggccgctccccactaggcctctgctgacaccacactggctggggaagatcaggaatgccttgttattgctacttacatggcctcgattgacagcatgctgtggggttgagggtaacatcattactattgggaattggtataagtcctgaccccccacttggcttccactgaaaccacaccagtaaggaagaagagagatggctctgggtaggggggacgctgccagggcaatgtgtggggaggggtgggttttagaaatctgtctgctcagttggtcttctctgataccaccccagggtaaaggtggaggactgaggagccttgttacagcctggtgagggtggaagtataggcgtttgttggcggggataggaccatagctttcttctgtggtctttgaagtaggattgtggttttctaaacattttctgtcttgctaggctgctcccttcccagtcctttggctaaaaaaagcagatttttcttggggcnnnnnnnnnnnnnnggtctgtgcctgttggcgtttccgggttgccagcttctctagaacccgatctgggatagatgaggcaataagaaagcccaagaaagtcactgctgtgttcttcctcaggttctgaggtccctggccagtccattctctctccaccttttagaactttcttatgtttgctttgtatataatatcccggatttttagttgtagcctcgtgccg

SEQ ID NO: 133595 - DNA, 948 bp, Homo Sapiens
ttcgttgagcaagcaagattgcagcattttaagaattcggtggacccagctttcttctgtaccccagatggggaaatttgaatcacatgttaaacctcagttttataagagggggaaaaaaccgtctctacatagtaaaactgaaatgtttctaaggcgatatgataatgcaaacctatttcatcactctaaaagcactgacctcaaaaaaccttataagcacttagatttaattgcattttccataggttcaactactgctgaaagtctggatttcagaataaagcagaatgtaagtttcagttgaggccatggatttgattgttccatggctggaagttccctttagatttcacattttatatggctgatcaattttcatacattgagaaaccaagtcaatcaagcaggaatcatttaaaaaccagataaagccatgtttttcttctgtgacaatttatcagtatctttaccaatgagccttaatttttatataggtccaatattgagcttttacttaaaatttagatagaacttttttttggatacagcacaaactccagttgacagtaaaatgaagcttctaggtattttgtattgtacatatttcctcctactgggtgttcaaaagaaatttaaattcaagtaccttttgtgataaaatgttttagatttgtgcacccattggcaaaacaggaaagtttccagataggtattgtatcattgagaatgcagcacagatagtgtgggcttcacactatagacacagaatatagctttttcttaaagccaaatttgggtgataggacactttaaatatccttaattttggcaaccactagcaaaaaaacttgtcagaataatttaaccaagcccctctccacttcttttatttaaaagcactgattcaattgctaggaatatttttgcagatttttctttacagta

SEQ ID NO: 133596 - DNA, 984 bp, Homo Sapiens
gttctcgtccaggggttgcacttctccccgttttccgtcagacctcctcaggctggccagctgattccccacaccagcagcatgtccttcttgcctgcagaagctcagggggattgatggcgggggctggctgtggccgaagttggtgcgggattgacggtgtaaaagtgtgaggacagctcctccaggctttggccaccatccgtggggcctttcagggcctcctccagcgcctccaaggcctcgaaaccccgtgcaatctgttgcttgctcagctttcccaggggcatcttcttcacatccaggtccatgagggccatggtgttcttgaacatctccttgctgaagatgttagtgatgagcttctgcgtggctgggtccagggagcagggctgcacccgcttagtcacagtcctcactgggcctctgtccaccttcaccacagcttcctgggcctcatcctctgcctgtacttcgataagtgtgtacttgcccgggtgagacacaaagtggtcccgctctgcccagttgttcttggtcttttcccgaaatttcttctcaaagtccttctttgcatcttctagccttgtgaagtggttgatctttgactggccgacctctcccacacggccccagcggttccagcaggtgaagaagcggttgctgtcttggagcagctggatgatgtagaacttgttgttgttgttctcgatgttggtctggttcagggtgcagttgtagtcctcatacacctgggtcccggggttgctgctgagtggacatgttggatccacgcggattatgcgcttctctgcgggtatggccttgagggcctcagcggtggagcggaaggggtcctcctcccttcctgcctgccggcccttcttcttctcagggccctcagtctgtacccagggcttcggctttggagccatggctgtcctgtgtgtcctgaggggtagggaaagtgaaaggagcggccgc

SEQ ID NO: 133597 - DNA, 1093 bp, Homo Sapiens
  misc_feature (962)..(962): n is a, c, g, or t
  misc_feature (1029)..(1029): n is a, c, g, or t
ggctaataaatcttaattttataagtatattaatttctaaatacaacataaaagaggcagtattgtcagatgtacaattaaagtattataacagaaataacaacaatgaaaggagaaataggcttctggatagaaaattccttttgttgccaataaataagaccacctgagtgtatttcagattcttttcacttaagggatatccaaattgattgctaagaatattaaatagcttttggaaaaatgagcaacagtcgtgcagctgtggcatttgcttgttcttgtactgtggattgctagagaataaagcagaactcggagtgttgtaagttttaaaaaattatttttttatcccattttgttgaagccggcctcttcacaatcttctgattttgctaggaaatgggagtgagggggtgggaggaaatgggcagaaagagggagggttgaagggagtaggggtggcggtggggcatgacagatcagggtgacatcaagggacatacatcagctgacactcaactgagcaaacccaatcagcttcacttcatcaggaatctccgacccatcacagccagaagccaacttaaatgtcaatgtttttaaagctttgggatcatctacaatcttctgtaaattagcagccactataactacatcgtgaccatccaccaagccagcagagaagagctcctggagatacaccatctgctgtatctcttcctgggagtaaactcaaatcgtatgtcattaagttcctttctggagtttcttaatctcaaaacgaggttcacggggacaagaagaagcttctctgtagtcttcattagcattgggtgggccctgagagtcgtgcacagagagggactgtatttgttcggggatggtgctggcactcactgcaatctctggattttcttcttttactcttcgtgacttttcctgagaaaaagctgctttcncttcttcgctcttctcatccatctcgtcgtcactccactcccagtccccgtcttcggttttatgaanggtgacacttgacccaggaactcttcttacctttttggctctttgggctatgtctggtgttctt

SEQ ID NO: 133598 - DNA, 528 bp, Homo Sapiens
ggcacgagggggccgttcggtggtcagacgtcagggtcagcaacgcaaggtgctcgcggacgttttacccggtaaggtagctacttgtctcggggcgttagctcagccggtcagagcaggggactcataatccctgggtcgcgggttcgagccccgcacgccccacttcatacgatcctgcaatttacccgggtagtccttggctagcgcccgccactgcggttatgggttccgtggcgtcgaagtgtgaaatcgtccgtcgagcccggaatgaatgtgctgtaggtggtcattcattcacatgatgaaaggaatcattcagtcggatgctcaagtatcaggtaaatgacgtatatgggcctgtcgtcaagcgagaaactgtgcgttgagatgctgcaggggctgcaccattatcccagtagcgtgattgttaccttggcataggggccaggttatttatcgataaggagtggcattcctgagatctaccaagctacgcaggtcggtcctcgctgtcgtcgcggccgc

SEQ ID NO: 133599 - DNA, 1107 bp, Homo Sapiens
cagtcgacggtaccggacatatgcccgggaattcggccattacggccgggatagttgaaaactaaaacctcaaagacagatgttacagaatcagccagttctgtaaaactgatactgtctattggttattgatcttgccatctttatttaaaaccatgtcccttctatgatcccttaagaaagctgcaccaaatcatctgcctgttttttcttgatacttactgaaatagaaggttttattgcagggtttattttggtttgtttatatctttgttgtgaatgatgcttttttgtatttattaatatcaaattcacttatgaataaacttgataatggaaacggacaaaaaaaatcaagtgcgtgtgtgtccttgaccgtcttctgtttctcacgtaataaacaaattatcgagacatgggagtgaccagcaccttttctttaaatggtggaacctggtttccttttaccatgaaattgtcttacttgaaaatattgatcctgatgagagagaagatggtgccaaggctgtctttgtataatgggctcaaattctctacctcttcagggctaatacttttaactgagctgctgcctatagtgtcttttggaaaactacttaaagggtgattttctgttactttttagcaaatttttttaatcacctcttgctacacccattcttttcatgtgcagccgactcaaaaattaccagttttggtgaaaggctaaattagataatttggaaccaggatactaatgatttctcatctttacttttttttaatcctaatataaagtgaatttgattgaaaaggcaaatagctattagggaagcagtttgccattgttgcagagttatctgtactttgtttaactgaaaaaaatgtagaaatatatgtaaagaatttaagacaagagtactgaatggatgatttgtcataggctttcccctttctttctgttctagcagcaggaaaagtttctctatatcctctccctctacctgtaacaattttgttttctactgttaattacattgtgtatttatagttctatgcttactgttgtgcatatactggcaataaaactgtacataacattacttg

SEQ ID NO: 133600 - DNA, 1049 bp, Homo Sapiens
  misc_feature (1008)..(1008): n is a, c, g, or t
tgctgtatgtcaaggcttactactgctttccaatccttggtgatatgaagacagataagcacgctgcctgctattaggaatctgagctgagtggaaggccaactattaaacctacattgtaataaacaatggtggatgctacggacacattcagtctgttcataaaacatggactgatgggtctgctccaggccacatttgttttttaacagtaacgtggctaggcttccatttataagtcttagcattatttcctttgtgaagtactatgtaacagatgattgtttgctagattttgttttctacaatcaaaatgttgacctgcaaagcagtgtaggattttctctcctcaagagcgtgtattattatctagtagaaaaagcattcccaaagacttggtccatgcagataaggataatgaaattgctcactctaatcctttttctaaatacagtgtttttcaagctggatgtaaattagagtgggtggatattgattaaattatttgatttatatgaaatcaaatgactggttgaggtttttttgaacatttacaaataatggattcctgagagctcaggaagtactgtaatgtcagtgacatatgaagctcctgataaagatccacctcattcatatatttgagcttcagaaatacatgtacctagtataatgcttaacagcacataatatttgttgatgagaaatacactgatgaaacaacacatttttttactggaatgaatggactataagtttggggttagaatcctaaaactcctctttctcaagagggtaagaaccttgtcatgaatctatgcatgtgtacttccaaccctatctcaattccttgcatatagagtatcatgatagagtaggttatgctgcaattaaacattaagtcggtgtggcgtaataaaatttatgctcatgaaatgtccagtgtcaactgggcaatcctccatttttagctatgccatctggacgcatggtctccaacatcgccanatcagagcgagcagactagcagatggtgtaggatattttta

SEQ ID NO: 133601 - DNA, 494 bp, Homo Sapiens
gcggccgcctctatctctacgcgctcgccgcggcgggcgaggatggcgtcgcgcgcgcgatcgcgctgctgcgcgccgagatcgagcgtggcatgaagctgatgggggcccggaccctcgccgatctcggcgccgataatctgcgctggcgctgaccttcccccttcgtcatccccgcgaaagcggggacccagttccagcgccgcatggacaaccaacttggcggagggttcccgctttcgcgcgaatgacgatggacgaatcctgccgtcgctcccagctttcgcgcaacaaaggggacggcctcccccgaagccgtccccttcgcgtggccgcggacccgctaggtcgtcagaaggacgcgccgagtgtgaacaccacggtcggatcgtacagcgtatcgaccgccttcacccccgtcttcgggacgtcggtgtcgatatattgcgccgagaaagtcagcggtcccgcggcgaaggacgcgccgagcgacc

SEQ ID NO: 133602 - DNA, 712 bp, Homo Sapiens
gcggccgcgttacgcagcgggatcgccgaaatctgcaaggtcgcgctggcgatggttgcaccctggttgggcgcacgctcggtatcgcccagaaccatcttgacctgctccatgctcaggtccagctcttcggccacaatctgcgccagcgacgtgcgaatgccggtgcccaggtccacatggccgttaaaggcatacaccaggccgtcatcgtttaccgcgatgaacaaccccagctccttgggtttcacggtcggtgtgccgcccttggccaccgggcctgaaggtggcagtacatcatcgacaatcaataagacgcccgacttggccagccattggtcacgggaaatatcagtcatggtcggccttccacgctcaagaggtgcgctgcacgcagtacggcgcgcaggatttcgatatgggtgccgcagcggcacaggttgcccgacaactcattgcgcacctgggcttcgctggggttggggttgcggtcgagcaacgccttggccgtcatgatcatgccgttgaggcaataaccgcattgtgccgcctgctcctcgataaaggcttgctgcacggggtgcggcgcctggcgtgtgccgagcccttcaagggtgacaatctcgcgcccggttgcacccgccagcggaaacacgcacgagcgcgccgccacaccatcgatgatcacggtgcacgcctcgtgccgaattct

SEQ ID NO: 133603 - DNA, 1326 bp, Homo Sapiens
  misc_feature (206)..(220): n is a, c, g, or t
  misc_feature (870)..(886): n is a, c, g, or t
  misc_feature (898)..(906): n is a, c, g, or t
  misc_feature (944)..(956): n is a, c, g, or t
  misc_feature (1053)..(1063): n is a, c, g, or t
tttttggtcaagcttgaggctgaataaagcctttgatgcacaaaatgggactgctgaagagtggacagttggaccttactttggtgaccccatacgtttgtggtcacatgctttagccatacacatggtaacattgactatggagtcttgtgaaagtgtaatgtgcgatggctatgtagacataaagaagaaacttgtaaatatcnnnnnnnnnnnnnnnaatgtttctgatttctgaagtgcttgtatagcttttatctgcggctttaaactgacagtacccgactgtttattggatctattgatttgaaaagaatttgttaggatagatcttaagcagtaatctgtcagtgtttgtatttgtattctctgcaattttactgtgaaaaaaaatttgttttcaacaattggtgtcattttcttgatgtcactatttgttggagagttaaatggtctcttccctttgtgtatcttacctagtgtttactcctgggcacccttaatcttcagaggtgctaaattgtctgccattacaccagaaggatgcctctgataggaggacaaccatgcaaattgtgaaatagtcctgaagttcttggattactttacacctcagtattgatttgtcccagaattttctggcctttcatggcaatgaaaattttaagaagaaagatttaaagtattttaattttaaagagtgtgttataaaataatgtactgaattctttatcccattttatcatcctttcagtttttattaatctactgtatcaataaaattctgtaatttgaatgagaacaaccacccctgaagccggagggggggcaaaccgccacccacacacgacctggtcgatcgctaggggnnnnnnnnnnnnnnnnncacttgtccggnnnnnnnnnggccctgaaaaaaagtttttcaaaaacctattccatannnnnnnnnnnnnccccccaaaaagaaaaagtgggccacgggggcccctaactcgggtcccccccaaagaaaacacccgcggccccaggaacaagggcctctgggaaatnnnnnnnnnnnaaaataaaaaacacgccgcggggcggagaaacaccggggcggggttccccacaccctgtccccccaaaaggggggacctactgagggggccccatgtccccgggagacttctcataccacggggggtgatctcacctgaccggaactcccccatataaccaagaatttctaccggccgcccgcgcctcctgaccaaataataatttttgaaaagaaaggtggtacagaaacacctcccaatttacaggatttacactacccct

SEQ ID NO: 133604 - DNA, 847 bp, Homo Sapiens
acgaagaccgaggagtagataccgaacaggatgccgatggtgagcgccaccgcgaaatagtgcagcgtcggaccaccgaacagcagcatggacaccaccatcagctgggtgcagccgtgggtgatgacggtgcggctcatcgtcgacgtgatggcgtggtcgatgacctcgtgggtgttcatcttgcggaacttgcggaagcctcccgcacccggtcgaagatgaccaccgactcgttgaccgaatagcccagcaccgccagcaccgccgccagcaccgccagcgagaactcccactggaagaaggcgaagaagcccaggatgatgaccacgtcgtgcaggttggcgatgatgccggccagcgcgaacttccactcgaagcggatggccaggtagatcatgatgccggccaccgtcacggccagggccttggcggcgtcctgggccagctcggcgccgacggccggaccgacgacctcggagcgcgacagccggatgggctcggccccgtcgggtttcttgcagatctgcttgctgacctgctcgccctgggccgtcacttcctggtgctcgctgacggcgccggcctcggccgcgcagagctcaccgaagaccttgccgaccacttcggtctgcttctcgccggcacgcaccggcaggcggatcatgacgtcgcgagaggagccgaagttctgcacttggacctcgccatagcccatcttctcgatggtgtggcgggtcttctcgatctcggccgcctgcgggtaggccacctcgatgacggtgccgccggtgaattcgatggagaaatgcaggccacgggtgaccaggaagaacacggcggccgc

SEQ ID NO: 133605 - DNA, 601 bp, Homo Sapiens
  misc_feature (74)..(119): n is a, c, g, or t
  misc_feature (548)..(548): n is a, c, g, or t
gatgatccccagtgatttttacctatttttattttaactttcatctcctgctattatgccttgtgtcatccccnnnnnnnnnnnnnnnnnnnnnnnnnnnnnnnnnnnnnnnnnnnnnnggtgacaggatgtcacttctgggatgatgtttggtgagattgtatcttccttcttgctggtagcctctctccctggctggcttgctgcagccagccgctatgctgtaagcagccccatggagaggcccgtttggcaaggagctgagggtggtctacagccaatactagcaagacaacctacaaggaactgaatgctgctgtgatactatgaatattaaaaatatatatttattcttcatctctgattcctggctcagagcttctgaaatgcttgtaatttcctgcacgatgggatgataggagcatctgttgttataatatttagtcttagtccctggttcctggcgtaagagcttttaagacccttggaatctctggagtgatgaatatcttttgtatgctgatgagatgactggtggttgggggtcnctagatagcttcaggactggggctggttgccagaaagactgaggcaagatgag

SEQ ID NO: 133606 - DNA, 722 bp, Homo Sapiens
  misc_feature (605)..(646): n is a, c, g, or t
gtaggggtgaattatttaatttaaatgcaatcaaccattagaaatacagttaacaatggacaagagatactcagtttttcagtacatgcttatcttgtgctcaagacacttttagccaattagctgctcaattgactaagtacctcctaccttacttatttgaataagtaaggaacttcagtagaggaattcaataagcagaagaacttcagcaagacataattattatatagcagcacacaaagcagacacaaatccttgatggaaaataacttatacaaagcaatatggcacctagcaaattgattggtgtggctgttttcctaatttagaaagcaaggtcattgaaattcctaaataatttgaatactttggttaagagtagagaatcaaatatcaaagatttagttaaaattagacgaaaaagccctcttccttactgaatttctttttcctagaatttgttcttgttttacttctgattaaataaatatgcacacccttaaacatgataaaaatatttaagaagctattattctttcattgggaaatgaatagaagttactcatacaataataggtgacgtcggaggatttgtggaattnnnnnnnnnnnnnnnnnnnnnnnnnnnnnnnnnnnnnnnnnncatccacgggtttatctgtaatacccttgaaagagtagtttttaaaaaattcttcaagaaatggtgtagtggccgc

SEQ ID NO: 133607 - DNA, 760 bp, Homo Sapiens
tttttcatgtttagtagatatatttatttttataaagacaagtaaagccaccttataacatatttaatttaatgcataaggtataatgaactggttcagtttaacacaactacgtaagatttttaatattatgaacaacctgtttggttaacaagatagcagctataaaactataatgtttagtttgtttctcctgcagactcagaaaataaatgttttctttttgctttgcatttataaactttttgcaactcaaaaaatctctttcagtattcaattttaattaatctagcctaaagtataatactcagcaatctgtactattctgactttaaaatcatatcaaatattaataacatatatgctcttaagaaagtacctttctttgtaaatacaactgacaaaatattcagcaaagtgtgtacaatagtgccttgtatacatgtgtctttctagagctacttcagtataatttaacaatattgcacaatagcagatgtataatagtttccatataaactattatctaagctgtaaaatatggacatagttcagcaaatcatttctgagaaaaggcatagatgtttatttaccaactatctctttaagtggtaatttccttgaaaagacaaggttgattaaataatttaaagacactactagtaagtgtttagctaaaaccaatttatgggattttcaaaggctcaacttgaaaattcttgaacttctttgaaaataacatattctatgagcgatgaag

SEQ ID NO: 133608 - DNA, 394 bp, Homo Sapiens
ggcacgaggactcgaacgaagggatctgcctgcgcagcgcgctgattttctggctgttgcaactcatcaaaacacttaccgaacggcgaataagcgtggattctgacgcaaaacgtgctgcgcagacagcttcgtccgaccgctgtatcctgcgtcaaattttccaaacagggatgctccccatgaccgccagcgcccggcacaccgcttcctactacgccgccagcagcgtttcacagcccgactacccggcgttgatgggcgaagtgcgcgccgatgtgtcgtgattggcggcggctattccggcctaaacacagcgcttgagctggctgaacgcggctttagcgtggtgctgctggaagcgcgcaagctcggctggggcgccagcggccgc

SEQ ID NO: 133609 - DNA, 903 bp, Homo Sapiens
gcggccgccatccaccgacacgctgatgctgctggccaccagttcgtcaccgatggcgaggtcgccctgcttgagctggaagttgcgcgccccggtcacgccggcgagcgtgagccgctggttcagcccggcgaaatcgtcgatcgtctgcgcgcgcacgtcgatgctgccggcaaggaacggcaccatcgtgccaccggcgtcgtagtgccccgaggcgctgccgcggagcgagccgcccagcaccacgtgcccggctgcggcatcgagcgccgtcgccgacaatgatccggcgcgattgttcaccgccgagacgtcgatgaccgatccggccgcctgggtgatgttgccatgcgcgctttccaacgcgacgtcgccgccccagctgtagcgcaccgcgtcgagcaggctgacggttcgccctgccatgtcgatgcgcgccgcatcgctcagcgcgatgtcgccgttcgcggagacggtcagcttgccgctcggcagcacgacggcgctggagatcgccactgagctgccggtcaggccgatctcggcgccgaacgccgccgggcctgctgcggccggcccgccggtgccggtcaggttgagcgcaccgccggcggtgatgcggttgatcgagccggagtcgccggtcagcaccggagtgatcagattgaggttgccaccgctgtagctgtatcccacgccggtctggtacgcgccctgactctcatacacagacaatgtattgcggttgttcgcggtgattcggccgcgcgccgtcacgttgaccgtggagaagccgagcgccaggcggtcgagcgtcacctgggtgtccggcctcgcctcgctgggataaccgaacaccacttcatcggcgacgatattgagtgtgccgtggccggtgcc

SEQ ID NO: 133610 - DNA, 542 bp, Homo Sapiens
tagtaggcatctggcttttcccaccaacccatctacctttttggtggtccagacctacagtctccttgcagagcactcctcctcccaccctcacttcaagtgaggtttggatgagattgaccacatccccttggtcacaaatattggctcaggaatggacatgtggccctgttcaagcctatgagagccaggacccccagacttatgttagaactcttgagagagatattctgtcttctctgaaccttgcagtatatagaaatgagcctattgatgcaacaatataaatggcactgagaggggtgtccagagctgctggggtcaggggagggaggtcagcctggcagaagccatcttgtggagcatgaaaatgaaagagaccttgagaaaggccagaggaatccaggcctgtggtgacaacatttgagctgctggatcaaacctcacctgaagtccttcctattcctactagatatttttttccactgtgtgggccaatgcattccctttatactgtgtaagccaggcatggtggctcacac

SEQ ID NO: 133611 - DNA, 264 bp, Homo Sapiens
ctttctctttatcttctttttctctttgtcacttccttccttatcaaacaactttgcagttatctctaaaatgctctttgggctctttttcagagctaagttttcccatcattggcttggtgtcccctgagccagagtgacattggtactagtgcaggcaagagagttagcctggagattagctggttttccagcacttctgtgtctgtgtctgagtctggttctctaagcctagcacattctaaacattacagccgcggccgc

SEQ ID NO: 133612 - DNA, 990 bp, Homo Sapiens
gcggccgccaaggcataagccaacgcggattcgttgtggcgggtcccctcgccacacactcactgtatttcctgagggttcaccccatggcatggctactgctcggcttggccggcattcttgaaatcgctttcgcgttcgcgatgaaggcttcggatggcttcacccgattcacccccggattgctcaccgtcgtgaccggcgtctccagcgtcatcctgctgtcgacagcgttgcgcacgctgccggtgggcagcgcctacgcagtgtggaccggaatcggcgcagcgggcaccgcgatcctcggcatggtgttgctgggcgattccaccgcaccgttacgagtgctgtgcatcgtactgatcctggccggcgtgatcggcctgaaactggtctccgccaactagtgctgcctgcgagcgggtatttctcggagatggccttttaacattgttgctcactctttatcatccgcccccagcaactccggccatggagacgctccattcactaaggaagtcgtaatgcacattggaaaaatgctggggttggccctgatcacgttgtcgatgggcggctgcgccagcttcacgaaggacgaagtcgcacctgtcacgctgccatcgaaggccagctacgccaacaaaccgaacgtctacgtagacttcaagttctaccagggcgagccgacaaacgccgccgctacggaattcccacaagcgcgggacatgctcaagccacagctgcagaaagtcctgaccgactccggcctgttttggtcgtgtgaccctggatgaattccagaaacagcccggcgattacagcctgcgcctgaaggtctacaaccatccaccgggtggcggccaaatggtgctggcgtttatcagcggctttaccttcaccatcatcccggcgctgggcactgatcagtacaccatgaagctggagtcggtggacgcacaaggccaggcgctgagcaccggcaccaac

SEQ ID NO: 133613 - DNA, 497 bp, Homo Sapiens
ggcacgaggcccgtaagccggatcgtaaaacgtcgccgccagttcagggcaggcggcgcgcaactcatcatagagagaccgcgacgtcgccaactcgatgatcgccgccacatagctctcgacgtcgttggtccgtgcctccacgcaggccggcttcagcacttcgagcgcgggaacgaccggactggtcacgcaggggcggccggcgaggatcgcctccaccgcctagagggccatgccttcggcgaactcgctgcgggtcggaacgatcgcggcgtggctcgccgccaggacagccttgagctcccgaggtgcggtaaagccgcgaatttctatgatctgctgcagggccagccccgcgcattggcggcggagttcggtcagttcgggaccatcgccgcacacggtccatcggaccagccccgggcgcagttgctcgacgcgccgcgccacctggagcaggtcgtagacgcccttgtcggacgtcacgcggccgc

SEQ ID NO: 133614 - DNA, 424 bp, Homo Sapiens
gcggccgcggctgtaggcttttagaagaggagatgaagcttggtatgaaaataagggaatgagtcaatgaaaacttgataagaagaataagtgaaagaagtatctaattagaatatatagcctactgaacataaaggaagttttgtgaccagtcttatgtgcagtggggaagcaagggagacaatgagtgagcttgctttaggcttgtcctcatgtttaaaaagatcacagcaagtgaaaatgtaatttgaaagttaaacttgagatgaggtatgaaactgtataagtgtgttgtctgatatcctgaagagcctggtttcatagaataatatgattcttgctttgggattgctattaacttaagcagtgatgttctcatcattcataaatatttggcacattaataaacatattttaataggga

SEQ ID NO: 133615 - DNA, 1048 bp, Homo Sapiens
agctgggcagcctgttgaacaaacagggcctggagatcgacgaagccccggtgaccgccgagcagttgggcggcatgctgctgcgcatcaaagacaacactatctccggcaaaatcgccaagaccgtgtttgaagcgatggccgcaggcgaaggcagcgccgacgacatcatcgagaagcgtggcctcaagcaagtcaccgacagcggcgctatttcggccgtgctcgatgagatgctcgccgccaatgccgagcaagttgaacaataccgtgcggcagacgaagccaagcgcagcaagatgttcggcttctttgtcggccaggcgatgaaagcctccaaaggcaaagccaacccgcaacaggtgaacgaactgctcaaaagcaagctcgaaggctgacacttgatcgttcccacgctctgcgtgggaacgcctcactggacgctccgcgtccgcttttgtgacgcggagcgtcacgggctgcattcccacgcagagcgtgggaacgatcaattgggggtttgttgaacatgaagcgtctactcggcctcctggccctgttctctctgttggccggttgcgccagcggcctcatcgaccccaacggctacgacgaaaccggcaccgcctcctattacggcgccaagcaccatggcaatagaaccgccagcggtgaacccttcaaccagaatgccctgaccgccgcccatcggcgcctgcccttcggcacgcgggtcaaggtgaccaatctcgacaacaacagatccgtcgtgctgcgcatcaatgatcgcggcccgcacacccgtggccgtctgatcgatgtttcccgcaaagcggctgagcaactcggtatgctgggcagcggcaccgcacgggttcgcgtgcaagcgctgagcaactgacagtagccttggccatctccgtactcaccgccctctcgcccttcagcctgctcgaactggtcagcggcctgctgctgctgattctcggcgccgaaatcctggtgcgcgccgccgtgcgcctggcggccagcctcaaggtgcggccgc

SEQ ID NO: 133616 - DNA, 1403 bp, Homo Sapiens
gcggccgcatccgctggtgcgaacccaccgcctcagatgcggaagccgccgacgtcgcgaagcaggtcgatgacctgcgcggcgaggcgtcctacgaagctggctgggacaaccacagcacggccgagcgcctgcgcctgcgcgcccgcgtactggccggccggttggtcgatccgttctggcaagtccatgcccgccgcgccattcaggcctcggctgcgggcgcctgattcccacgggagcttcggctcccgtttttcctccttgtgccgcttgcgaaagcggggtgtgcgcggtgcgcattccttgtcgcagcagacatgccttcggcgttcgactaggggccttgctctcatttccaggacacccgccatgacggctcccttgttctattccattccgcggctgggggtcacgcgcatcgcgtgcgcgggaggacttctgctgtgcctgctctgccagaccgcatcggccgccgacgtgctcgtcgtgaccgacagccaccatcccgtgcagcccgctgccggcgcccgcgtggtcgagctggacctgcccgagcgcatcgaggccgagctggcggccagtctgcccaacgaccccaaccgcgcaaccgcaatcgtgcagcagcgactgcgtgatggcggccaggctttgcaacgacgcatcggcagcgcctaccagggtgtggccgatgcctgggggctgggcatcgccaaggtgcccgccgtagtggtcgatcgccgctacgtggtctacggcgagcccgacgtggcgcgtgccgtggcccgcgtcgaagccatcggaggacacagccatgaagcgcctgctgtcgggatcgtcgcgccgcgctcgcctcgcccatcgcctcggtgctgctgggcggtgcggcatcgagcttcgcgctgaacacggccaccatcgtgtcgtcggccctgtcgccggactgcatcgagtaccgcgtcgtcggcatctgctactggctgttctgcacctggacgggctgcaccgtgcgcacgtcggtgaaggtgcggcactacgtgccggacgcggtggtatcgagctacagcaacaccggcgagaacccctgggtcgaggtgcgcgcgatgagcacgccgaacccgactgcgcaggctggcgacgacggcacgacgaaccacgacaacgagaacaacctcgccaagttcaagaacgccgacgtcatcggccaccccggcggctacgtgttcagccaattcgcgagttcgttcggctactcgtgcgagggcgcaggcacggccttcatgccgtacctactcagcacgctggacaccatcgcctggcgctacaacatccccgaagccttctaccctgaagcgctcattcccggccggcgcgagatcggcacgcgcaccggcctgaatctg

SEQ ID NO: 133617 - DNA, 865 bp, Homo Sapiens
gcggccgcttcggcgcaggcgacgcccgccatggccaaaaacatcgtcaaggcgagcgctttcgatacaacgcgcatagataactcccaagccggcgcctgaccgcagccggcgccgctgataacgcagacgcaaaaccccgtcgtcgagttaaactaaattcatgttgttgcgttcggaaccagttcgagcggacttttcggtccaccccgaggcgctgaccgccgcggcgcaacgcgaattgctggaagacgttctcctggctgtagaccttgcacccttctatcgccccgtcacgccgggcggacgccccatgagcgtcatgatgaccaaccttggcgcggtcggttggttcaccgacaaggacggctatcgctatgtggagcgccatccggtcaccggggcgccctggccgccgatgccggcttcgctgatcgcgctttggaacagatatggcgacccggcccggccgcccgacgcctgcctggtcaacctctaccgcgaggaggcgaagatgagcctgcaccaggacaaggatgaagccgatttcacggcgcccgtggtgtcggtctcgctcggcgacacggccgtgttccgcctgggcggactgaaacgcggcgaccctaccactagtcttcgattacgttccggggatgtctgtgtcctggcgggggcggcgaggctggccttccacggcgtcgatcgcgtgctcggcggctcctcccagctcgtgcccgggggcgggcgcatcaatctgacgctccgacgcgcccgatcttaatgagtcagggtctgaccggtcaggctttgacagaagttcgcgccgccgccaccttcgtctcgccgcgcacccgatgaaggagcc

SEQ ID NO: 133618 - DNA, 748 bp, Homo Sapiens
ccgagaataccggcccctgccattgttcattgtccagaacggttgactgatgtctgcccggccagagtgtattgacgagtgtttcccaaaatttccgcgcagcaggattttcttcaatgacacaaacctcccatttggccgggaacatcgtcatgatggtttgcgcagccttcctgcccagcccttgacgccggtacttgcgaacgacaaagaactccacgattgcatgtgtatttccctggatatggacctcatcgttcgtcaacacaaagcccgcccacttgctgtcaaccttcatcacatacgctgaccacgtggggttcacccaaaaactgtccaaatcgtcatacccgtatcgaccatgttcgtccatatccgtgccgtcaagctcggaaaaatcatgctgatacagttccatcaggtttcggactatctggcgttccgtgatttcggcgcgtcgaatttcaatcttcatgtattcaggttcgcattctggctgtatcgcactgcaatattgccgttccaggttgaaaaaatatttacgccctcgtattgcagctcaagcgtcaaccgccgcgcctggcctaacgtggactcgccgcgtaaagtcagcaccccctggaccagaacatgccgacatgtgtgccatttttacgccgcgtgggaatgtagccagtcatcggcagcttgggctgggctgtaccctcttccacttccgtacggctaaccttgtagtaccggcggccgc

SEQ ID NO: 133619 - DNA, 1026 bp, Homo Sapiens
accgccctggttgcccaaatggggccaagttatggggggattccctgtgtttgttacacaacccccggggcccagggagggaggtttccccctctcctggggagagaaagaaatattgtgcaggaattggaaccatgggagtcggtggccctcctttctattttcagataatatcggggtctccttgcccattcccctcgatcttctttttggtattgggcatctattttgctgcgggtattcaggcctcatcaacatagctgcgaaggtgaaagcagagttcttcaggccctgccctgtgacactcaatcacagttgacgtcaggatgggtacaatgtgtgatggaaatttgctgatgttgttggccacccgaatgagcatgcgagcccctttcatgtgatctccatttttaacatgaatctttactagtatatagctgtgcagaatcatgaggttggtggccatctcggagggaattttgatcttctgggatttcagttctgcatacatactgaagagaacatcgtgtgcattccggtagttgcctgcagactgctcttctctggcaatgatgatggcagtctgggcagcttctcggtattgcttcagagccatgtacaagcggaacaggtacttggcatccttaggcatgccatcgttctcccccaggagatggtctatcagctgattggtcagcagttcatctttggcctgaccaacagtttcaattgccatttctattgccacattatcttccgagcttgggcatttcaggaagtgtttaagtgctcgtgaatattggccacacagcaagaagaattttccagcctgaagatatctcttttctccttcaaagtataaggcaatgctttgatagtcttcattagtagtgtcttcagaaccaataatatctgcatagatttccattttgttgtgttgctgagccagtgtgaaagcttcattgttgcatttggacatgacaagaaactggatggcagcctcgtgccgaattcgccacccaggcc

SEQ ID NO: 133620 - DNA, 865 bp, Homo Sapiens
  misc_feature (660)..(676): n is a, c, g, or t
aacgggagacaaaaaaaagtttagtttattattaaattcatgtaatataaaaacatctatgtggaggtattgaattaaatctataaaacagaaacaaatctagaatatattagaatctgaggtgaaaaaataccttgctttcctcttctttgattgtaataaaacaccggaatttggaaaaacaagtattttcccaactaaattttcttctggtctgtactcacctagcaggatggcactccatattttatctaattttaaaatggcataagttgatttttagcagcacatttcctttgctccagcaagcctactacaggaaataaaaattctgtcttgaaatgcccttgatatgaaatctatgcctacaattcccatccacttctttcctagtattttaagactgtgattatcaaaatctaaaggcagctagttaaagaagggaacaagaaaatcattattatatgtttcaaaatcagctgataaaagaatacaagtaaggaccccatattctctgagctaagtgtggtcccagagggcaacatcttggtactctgtggagcctgggtaccatgtaaatgccacacactgtgctgctgccccactcataacaagtacagcaccactcgagactggtctcctgtatttctttgctgatcnnnnnnnnnnnnnnnnntggggtggggagatggcacataactgtgatggtaatttagcattactacccactagtctgtttactataatcataataggtatactacggttaactcaaaaattataatataagacaaatctgggtagctttgtctagcaagtatggtattgatcctataaccccagcagttaacttgcaaagcctccc

SEQ ID NO: 133621 - DNA, 1069 bp, Homo Sapiens
  misc_feature (334)..(343): n is a, c, g, or t
  misc_feature (824)..(824): n is a, c, g, or t
  misc_feature (837)..(837): n is a, c, g, or t
  misc_feature (847)..(847): n is a, c, g, or t
  misc_feature (853)..(853): n is a, c, g, or t
  misc_feature (857)..(981): n is a, c, g, or t
  misc_feature (983)..(983): n is a, c, g, or t
  misc_feature (991)..(991): n is a, c, g, or t
cattttgtaatgaagaaaataaatctgtatcattttatttaacattcattctttaagttacagttaacacaatctgcttctaatccaagaaatcctagtataatctgaaatacatgcatatacatttagtaagacctacatttctaaataaattacatgcatgatatacaataaagaatactaatatgagaattcaggacatttatttttctgcatggaaatttaactactgtataacacacgcacatacaaaacaaacccacaaagcaacagtgtgtaataggtagtgagagacacacaaaataagcatatttaaaacgcctacaaacagccnnnnnnnnnnaggcaacaaaatacgtccagtccttgacatcttctcatactcacctagcaccacagatgcaaggacctaacagtaaacatgtacaatctcatgcttaacacctaaagcatgcactgaattgaatttgtatgttgtgatctattctactaagtatgcaatacatactttttcttactaatattttatacattaaattaccctgcagcattttgaaattttaacattgatgtaaaacaacttttgaaagatttatgaaacaagtttcgaggttcaccttcaggctggtttggttaagtggaaaaatggcagcagcctcaaggttcatactgaatgaaaatggtgttgtgtgcatgtcaacccatgttaaaaatacctatatacaagatggcacaaagatttgtgcagttggaatcaccagtgcaaatgcatgcatttgaggtacttatttttttcatggtcaggtataattatgcatagtccntcgtgcgaattcnttggctcgangggcanattnnnnnnnnnnnnnnnnnnnnnnnnnnnnnnnnnnnnnnnnnnnnnnnnnnnnnnnnnnnnnnnnnnnnnnnnnnnnnnnnnnnnnnnnnnnnnnnnnnnnnnnnnnnnnnnnnnnnnnnnnnnnncnactcaatnattgcgtgcgccatgccgcttttcatcggaaactgtctggcactgcatatgatctgcacgctgggaaggcgttggttc

SEQ ID NO: 133622 - DNA, 925 bp, Homo Sapiens
  misc_feature (47)..(47): n is a, c, g, or t
  misc_feature (825)..(859): n is a, c, g, or t
agggagctgatcatcacttccccgctggccaggcagtggctggtgtnggagaaaggccagttcgcacttggcatggatgtccttgggctcaatgaccttgtgcagctttggggcccggggctcagagcccacgtccaccacatagatgcgagaggagatgagactgggcagcaccagcttggtgcgcgacttggtgctatcaccgaagcagctgctgcaggtgttccatcctgagtgatgcagctcgtccttcaggttgggcatgggcagccggtggatgacctaggatgcggggagaggtggtgctcccccaggccacgcctctgtccacttttggaagaggcgcccctgtggactcattttggtttggaagcacggcacaggctggatttcagcactccccttgtcccaggttgagcgtgcacaagcatccccagggagggccaagaaggatggagctgggaagggggggcccagggccagggatgagggcagctatggtctcaaagtagctggcgcccaagccccgcctaacctggcaatactggggagacttggggtcaacatccacagtggccagataatctggggcctcagtgcctgtgtttcggtaaatgcagggcaggtagacgatctcttccctgggtcctttcatggcctccagaggggtggagtagccgggtccacaattcccacatttcgtagccatgctgccgactggtacactttgatcccggcgggtttgctgtgctggtgtcagaggccgctgttccccccggccgtaatggccgaattcccgggcatatgtccggtaccgtcgactgnnnnnnnnnnnnnnnnnnnnnnnnnnnnnnnnnnncgccgcttcctcgctcactacttcgctgcgctcgtcgttcggctacgagacgctagcgccctatag

SEQ ID NO: 133623 - DNA, 1070 bp, Homo Sapiens
  misc_feature (953)..(987): n is a, c, g, or t
  misc_feature (990)..(1027): n is a, c, g, or t
gtagaagcgctggatggtggagctgagtgcgcagcccacaaagccttgggcagcgtctgggttgtgcaggaagcgtatctccaagggaataagcccattcttttagagacagggtctgcacaatctcatggcgctgccagtcccatacatattaagtggctcccgtacagtccagcctcccacatcagcggggttgaagccatctcgtaagacattgggagctgcccactcagtgctgatcatgacattgtgtcgaggctggtaccagaagtcatagcccaacggtgcagcacccccaggtctctcccatgtccccttcacctcgaacgtctccccatccagcagcacaaaaccccctttgccattgcccttgacgtctcccagggagctgatcatcacttccccgctggccaggcagtggctggtgtggagaaaggccagttcgcacttggcatggatgtccttgggctcaatgaccttgtgcagctttggggcccggggctcagagcccacgtccaccacatagatgcgagaggagatgagactgggcagcaccagcttggtgcgcgacttggtgctatcaccgaagcagctgctgcaggtgttccatcctgagtgatgcagctcgtccttcaggttgggcatgggcagccggtggatgacctggcaatactggggagacttggggtcaacatccacagtggccagataatctggggcctcagtgcctgtgtttcggtaaatgcagggcaggtagacgatctcttccctgggtcctttcatggcctccagaggggtggagtagccgggtccacaattcccacatttcgtagccatgctgccgactggtacactttgatcccggcgggtttgctgtgctggtgtcagaggccgctgttccccccggccgtaatggccgaattcccgggcatatgtccggtaccgtcgactgnnnnnnnnnnnnnnnnnnnnnnnnnnnnnnnnnnncgnnnnnnnnnnnnnnnnnnnnnnnnnnnnnnnnnnnnnnagcaataacggagctagcgccctataggatgacaacgtctttg

SEQ ID NO: 133624 - DNA, 344 bp, Homo Sapiens
aataatctattttgtctggttttgctctttattagtagaaatagacaagtgaggagttggaggaagaaattgcttctgatctgttttagatacaggtgaaactctccctccctccccgccctacccagtctttctctgtctccctccctgagcctattcttgcttcttccctttacaaataattaactgctcaggtcatgttgaaccaaaaaatagcgtctgtagcccctgtgtgcttactttaagtatatgttactgaaaaatgcggagtgagcacttaacaactcattctcctgggaagcacagtgctacaagaccctcttaactgatgttggagcggccgc

SEQ ID NO: 133625 - DNA, 847 bp, Homo Sapiens
tgttcgcgggcaaaggtgatttgctttttgaggccggcaacgcggatctcgaagaactcgtccaggtgctggagaagatcagcaggaattaagccgctccagcagtgggtaggactcatccagcgcctgctccagcacgcggatgttgaattgcagttgtgacagctcacggatggatgtacaggctgctgtcatccaggttggtcaccgctgccaccggggccggcgcgggcgcttcagccaccacagcaggcgcagccggctccagctccggtggggtttcggcgatttgttcaaccacccgggtgagcgtcttttacagcaacttcggagagtccttcggtattcatcgagtgttcctgtgagggctattgttgctctctaagcaattgggcagcgcgggcggcgaagtaggtcagaatgccatcagcacccgcacgtttaaaggcagtcagggattcgaggatcaccccttcactcaaccaaccattctggatcgcggccatgtgcatggcgtattcaccgctgacctgatagacaaaggtcggcaccttgaattcctctttgacccgataaaggatgtccaggtaaggcatcccgggcttgaccatcaccatgtcggcgccttcggccagatcggccgccacttcgtgcagcgcttcatggctgttggccgggtccatctggtacgaggccttgttggccgtgcccaggttcaacgccgaacccaccgcatcgcggaacgggccgtaataggcgctggcgtacttggccgagtaggccatgatgcgcacattgacgtggccggccagttccagggcttcgcggatcgcctggatgcggccgc

SEQ ID NO: 133626 - DNA, 209 bp, Homo Sapiens
gggccgcttttggctgcatcagccggggattgccggcgccaggtgctgggggcgactcggacagcgggagcgtggggtggagtaggatggagtctccctcccgagctgggggtgtgggcctaggaagtgtggcttgctagtctgttacgttaacatgcttttctaaaattgcttcacgtgttaattcatttactcctgcattcattgac

SEQ ID NO: 133627 - DNA, 1414 bp, Homo Sapiens
  misc_feature (357)..(357): n is a, c, g, or t
  misc_feature (368)..(368): n is a, c, g, or t
  misc_feature (556)..(556): n is a, c, g, or t
ggctgctcagggagaagtggaggggtgagctgtgtgtgtccactgaggcacggccaggaagaggcagcctttacctgtgaggggctccatgctccagcagcagagcaggttctagtgacaattcaactttttatgctatgaccaggggtggatctaaattttatggggctgaaagcttgaattatttagaaagacttctttaagaaaaacaatgttaatataaaattaggtacagggtcttggaaggggccctgaagattaagcttccttagcgtcacaataagtccgtatctggttgcaattgaaaactgatgcttcagtgagggtatctaaaaaggtaaactggcatatccaggngcaaatgtggngctgccaatgggctcatctctagggtaattttatgtctgaaagtgtatgcagttgggtcagagcatgacctttaagatagcctctctcagctaacatatttatgaagatgaggcctggtgacccagcaggttcattggatacataagaaatgagaattcctggttcatgggccaacctacggactctnggagtatgcagacttggccattcgtccattgtggcctgcgggtcgcaccccaggcatactgaaaggccatactcgtggctggctgcctgcgggcctaagccttcccaggatcttcaggacacttgacagacttgtgttttctggtctgagctgcctccacaggtccctccagcaagcctcactgcacctctcccctgctgtttgtgtttggaattttgtcttctttagctgagaccaaattaaaccttggtgcataaagtgagcttaaaacttgccactgtttagtaagttagcccccatagaatgtgaccctgtctgcagagtctcatttacccctctttttctcattgtcatttgttggctttattagggctgtcttacaggatcatgttggcatttactatcatgtctttatcataaaccatgtttgtttgaggtagaagaatcaccatataattcgttgcccaaattgggactattgagagagaaaggggatgctattaattacaccagatcaaaaggcataaaccagacctgtcccaggccgatgtggaaatatgttctttctagttgtgggtaccctgatctaggtggtttgtaattgtgcattactgactgcatatgtttgtgtatgtgtaaatgtgggctccctgttaagtggggctcatggatacgaggcctgaggaagtgtggcttgctagtctgttacgttaacatgcttttctaaaattgcttcacgtgttaattcatttactcctgcattcattgactgtttttgttcttttccattcactttgtacttatttttttcattaaattttgcatttattttgaaaaaaataagtacaaagtgaatgg

SEQ ID NO: 133628 - DNA, 674 bp, Homo Sapiens
gcggccgccccgccgacctgcacccggccgccacggcggccgatccagcgcagcagcgcgcgcagcaggcggaacaggaagcgcagcagcgtcaggaaggccagcacctccaggaagcacagcacgcccgacaccagcgagccccagcgcgcggcgcggcgctggaacttctggcccaggtggtcgcgcatgatctcgatgctgtcgtagaagctgggcaccatcagcagcgtcaggaaggtcgacgtgatcgtgccgccgatgatggccacggccatcgggcggtagaactcgccgccctcgccgatgccgatggccaccggcagcatgccggcgatcagcgcgaaggtcgtcatcaggatgggccggaagcgcttgcggcccgcatgcatcagcgcctcctcgcgcggcacgccgttggcctcctcctggcgcgcggcgtccagcagcaggatggcgttcttggccacaaggccggccagcatgatgatgccgatgaagctcatcaggttcagcgtgcccttggtcaacagcagcgcgacgacgacgccgatcagcgacagcggctgcgacagcatgacgcccagcggcgccgtgaaggagttgaactggatgacgaggatcagatacatcaggccgatgcccgacaccagcgcaatgcccatcgccctcgt

SEQ ID NO: 133629 - DNA, 737 bp, Homo Sapiens
  misc_feature (675)..(675): n is a, c, g, or t
atccttcagagttttattagataaattcaagtgtccaaagtgaaaagtctataaaatgagaaattattctaggtgccagtggttgttaggtaacattcaaatatatcccagagtgctttatttgcttaaagcatttagttcaaaaataaatactagaaagaagtcttggttagccaagagaacatccgaatgttatcactagttttctaaataattaagaaaagctttttcttctgctttaattaacacacttgaattcagaagaattacatcaaataatcaaagtttctgaggcaaatgtgttctacaagacattattaatcataaatttttattaatgtacagaggtttacaaaatgcaaaaactaaagcacaagaaaggtattttccaaagtgtttcaaaattaccattacttcattaaacagcagatatttactgggagcttgctattatagaccaggtactattctaagccctggggatacagcagtgaacaaggcgagtccccatcctcaaggaactgacatgtgttgatcatgtacacaaatgaatgggttagtgctttcatgtcaatggatcataaggttttcaagtcacctaaagttcttgtggaaccacagtgggttataaacatccttggctccatgtactatgttcctaggcactgtcctctnggtaggtcctgagggtcacgtattgtctgtatcaaccccatggtgttctatgaggcacctcg

SEQ ID NO: 133630 - DNA, 1134 bp, Homo Sapiens
  misc_feature (117)..(117): n is a, c, g, or t
ttggaatgcttcccgcacggaaaaaaaggccccttgcaaggcccttgccaagggggggcccccccttaggtggaagccccgaggccaacgtcccccacacctctttccccagtaacnaccctgccattcaagcttggtgatgttgctggtgctccttgctggggggccactcggctgctgtcctcccatggcccctggtagactcccaggggggctccccttatagaaggaggaggaggatgacgacgaggaagatgaggaagaaggggagccgtcatcactcaggctgggtggaatgctcccaaaggagcgagccgggtcttgggtgagggagccagtgggggatggtgggaagtaggtgggacagccttgggtcagggactggaagctgccattggagttgtcactatagagggattcagggctggtgcggcttggggaggagccactggagccaatgtaggtgatgacgccacctgtgttgttgttggagtccagggtcgtcatgtcttcaccagctgagagcggtcattcaaactggaccttgactcaaactagaggttgcgatcgccgctgttgccccctgggcactggctaagggcggggagtggaccccgcgactcacgatcaggatccgaagcaccctgcagcaaggtcttggggtggccggactgcagccctgcagaagggttggacgttgaggcaacggagttctgctttgcatgggaagagcagagagagtgtgtagggggaatcagcctgcagtagttctggctagaaggtagcaaggagggtcgggtctctgcagtgtacggggtgcctctgcctgccggctccgcagcgctgcggggtggcgaatctggagctcccggtgcaaaagtcccagaggaagagaggttgcaaccaggaagtaagtaggtgatggggagaaacggggcaccgagtcgcaaagaggcgagacgtgtgccctgctacgttccctcggcagtaatatttcactctgccaatctcagccgccttttgcccgagcctttccctgggacagagggctctgcgcaggcgccagcagcccagggttcccgggccgcacgcggcactggagcaggtaccatgtgatccccagggagcggccgc

SEQ ID NO: 133631 - DNA, 426 bp, Homo Sapiens
gcggccgcaccgtcaccgtgccctgcacggtggagatcgagcagacgcccgagagcctgcacgcgcacgtgatcctcgatgccggcttcgagatcgagcccggcgacgaggtccaggttcacgacgcgccgacctcggtgccctatggcgagcggctgacggtgcgccgcaccgccacaatcacccgggccggagcgctggagcgggcctggaccaagctcatcgcccatctcgagctgaccgaactctacgaggtcagcttttccgagaggaggaagctgtgaacgcgcccgtcaccccgaccatcggacagccggtcccgaagacgccggtcaacgaatcgaccagggccgcgcaggagacgaccttcctgtcgccccgcttctacaccaccgatttcgaggagctcgaccggacgaatgtcga

SEQ ID NO: 133632 - DNA, 1003 bp, Homo Sapiens
  misc_feature (214)..(230): n is a, c, g, or t
  misc_feature (724)..(724): n is a, c, g, or t
agagaaataaatcaataagcactttttattaacttttttgacaaaccgatagtaaaacatatgctacctaacgataactgtgtccctttatgtatgagtctaagagaaatattcggatttttatctggacaagaaattcaaaggctccttaagaagaaagtaaataccatggtcactaatgtaaccagactaaatataaaagctacatatgtannnnnnnnnnnnnnnnnataaatcaatgttttgatcaatgtaactaatctgaggttacaataactcactgcttcaaataatatttcaattacatgtaacagattaagatactgtttaggggaaaacagcctcagaaggaagtatgaacaaaaagggatattaatcattacctttaatcaaactaattatcaacctttcccccaacccataaagacttcatgtctctaaatggttcctaaatcatggaagataacttgaaaaattttaaatacatctccaggtatcagatgcttatgtactccatgtgggtccaacttttactgcccagagtttcttgtcatggtaatgtaacatcatgaaagtctggttgccagatctttatgtttttatttgtaacagagctaaaccttttaacaattatattaactacaacgtaagttatttgctaatggtagtagaatgatacatatgttttattcacgaaaatagtacttctgcaaatttttctttngtaagaattccataaataccaaggaaaagaaaagactcaaggggtttgggaaataaaccccttttaattttaaatctacataagtttaatttattcccaaactttctaagttcttccagagttctggccttcagaatatttcctaatttttcttcttgagttctgcactaactcaaaacctatccaaacgatctaattctgtattacctatatttaatataaagtacaatatatagtcaacattgtatcactagaattgtgaagctcttcagtgacttt

SEQ ID NO: 133633 - DNA, 704 bp, Homo Sapiens
  misc_feature (650)..(650): n is a, c, g, or t
cgagggttatgacaggacaggttttcaagtgctttgctttgcattggaaggagggtatcgggtttaacatttctctttgtcatcttatctgttttctggtgacaaagcattctttggaggaaatatttggggtttagtgaatgcagagaaaaatagtttaattgacattactcaaagcaaacttgtgggatgacaataggtttaactttgggaaaagaggattccttggacaaataagcttggtaaatgctggcttaaagtttaacattgtaaattatggtaaatggattggggtccccaaggttacccctaaatttggagatatgctaggacttaaagcgcacagcatatagttgtactcccaggtaagacttttaacaataaaataacagtacataggtggatcattaaggaaaaatacagtccagaggaatctatgtgcaggcttccttatgctctttccttcccataaggagtcacagagtacacttgcagcaatatgtatgtgatgtttctgcccagagaagctcattagaaactcagtgtccaaagtttggttcagaactgctcatatcagcaccctctgcctagcacatttcaacctggataggaaattcctaaagattgcaataaatctatagataattttnggggagtactgctactttgatgatacaagcatctgatccatgaacatggaatgt

SEQ ID NO: 133634 - DNA, 1056 bp, Homo Sapiens
  misc_feature (42)..(59): n is a, c, g, or t
ccctcactaagagggaataagcttgcggccgcctgctcaggnnnnnnnnnnnnnnnnnngaccagtcacagctttattaatgaccagggtaacccgttcagctagggagctcctcaatgagagttcttggggcaggtggcacggggcctccccaaagccgctccagctccccagtgagggcggccacctcctcggctaccacagcatgggcttggtgagccctggcgcagtctagagccaggggtgtgagggccgcctcattttcgttggtccaggccaggaggaactggcactttttccgggcccggtaaagatgatctcgctcttctctagccacggcctgtttccgggcacggcccagggtctgtgccaggtcccccagtgctgccagcgtgtagcctttctggttggtcgggccctcgcccagcaggatgcgggcgacctcgtgcatagcccctcgtgtgcccaggggccccggcgggtgctcgcctgcttccagcacgtgggctgccgcctgcagggcttcttccgcagaggcgaagacttgctgggcacccagggctccggaaacgccgagcagtgtggcacagaagtcagagagcagcgcgtcgtcaccgccgtgatacagggcgagagtatgcgcgtaggcgaacagcacattgggcagctggaagcgcacgagcggcgagactgggccgcggctcaggctgactatcgcggggatgcgggtgggtacgacgggcgtgcaggcccccgggacatctccaagaacccgctcggcgggcgcgggctctgcggcggaggcatcttttcacagatccggcggggtcctcgcaggggcgagctcagctccgcggcgtcactaccgggcatatcagctctccagagctgcgtcggctcgcgtttcacacacggcgcatgatgcacatcgccgctcacgcgtcacagcgtcgaagcactttccccgcgcagcgtcccaatccataggcccggcccggcggactgagcgctccagtctctcgtcccttgtaccacgggtagcctgcagcgtggaga

SEQ ID NO: 133635 - DNA, 917 bp, Homo Sapiens
  misc_feature (800)..(800): n is a, c, g, or t
  misc_feature (825)..(825): n is a, c, g, or t
aaaatgtactatttttaatgggtgtgcatgtcaggattttctttagaaatacactggtctggtctaatttatttaagcaggagcactttaaagtatcccaccctaccccattccacccccagtggacagaaaggaaattgactgacttgaggggatgcagacatctgggttattccaacagaccagtggttaggaggagggggtgggtagcattatggcctcgggcaggcccccccaccctgagcctctgaaagctgactttatctgtaagagggaggtcaggctcgccttctcaatagcgtgtatttggatgagatgagtttcttctggagtacacttaggcagagcagggctggcttagggctggagcctcagcgtttcacaacttctcaccttctcttccatgtcagtcagaatggcatccagctttgccaccacctgccgtgcattgtccaggcttaagcacattgggggcttaaacttcaggattttcctcccagggccatcagtgctcagcaaaacgtagttctccttcagccttgataccaagtaggcagcctcttcagttgctggtgtccttgtggcctcatctttgatcagatccacaccaatgaagagcccaacacccctgacatccccgacgatgggatgtttgattttttgctgcccgaggagctgcatcaggaagctgcctacactggtggcatgatcctggagctgctccttctccaagacattcaggacggccagccccacagcgcaggacactgggctgcccccaaacgtgttgaagtactcanacccggtggcttcaaatgcccctcncacaggctgggttgcggccacgcaggcaacagggtggccgttgccaatggacttgcccatggtgacgatgtcagggacgaagtcttttccct

SEQ ID NO: 133636 - DNA, 1553 bp, Homo Sapiens
  misc_feature (127)..(137): n is a, c, g, or t
  misc_feature (331)..(377): n is a, c, g, or t
  misc_feature (1392)..(1392): n is a, c, g, or t
tttttatcaaagccaaagtgttttttgccccatttcccctacccctttggagagccaccgtctttttcttgttggtctccgtcggctttgaagaacagaattttttgctttgttgttcccagggttnnnnnnnnnnntaaaaccacaattaagtggttcccttggcaacccttggaccttcattggggggggcccggaatccctacccattttcaagcctttttgaagtaggttgggaccccacagggcaatgtaccccccatgcctgggctcatatgtttttttaaaagcctggtttcaccatgttgcctggggttaaagccatcttttnnnnnnnnnnnnnnnnnnnnnnnnnnnnnnnnnnnnnnnnnnnnnnntggtcttttgggcacctcttttaagttaacccttaacccagggcaaaaatccttccaaaagatctcccagggtcctggccagcttaaatccagggtcagttgtgctttcaaatgagtggattcatgtgcagggaggtgtagctcttcccctcctgaactctggtcagggaaagggtagttcaggcttcaagttggcagttgggagttgagggtgcggcctgcagtggcagggtgtggcaggttctgtttctgagcaggagttggcagccagataaggtgggacaggtggaactcctggaagtctctatcctggctgggagtttggaaagagtggattaggatagtcttaaattttctataaaatgacagtctttgaggcagttaggggaagcagtggttattactccagtggacagtgatagaggcctttttctctatgtgccataatgggaaatgggtgggaagagcctctaaggcagagtttaagtgaaactactggtagtgagtcttaggagtaagtatatttagttggttatattcagtatttttaatttagtaggatagaatatatcagattgcattattttaatttgccaattaaaagtatgactgggacactgtaaaatgtactatttttaatgggtgtgcatgtcaggattttctttagaaatacactggtctggtctaatttatttaagcaggagcactttaaagtatcccaccctaccccattccacccccagtggacagaaaggaaattgactgacttgaggggatgcagacatctgggttattccaacagaccagtggttaggaggagggggtgggtagcattatggcctcgggcaggcccccccaccctgagcctctgaaagctgactttatctgtaagagggaggtcaggctcgccttctcaatagcgtgtatttggatgagatgagtttcttctggagtacacttaggcagagcagggctggcttagggctggagcctcagcgtttttcacaacttctcnaccttctcttccatgtcttgataccaagtaggcagcctcttcagttgctggtgtccttgtggcctcatctttgatcagatccacaccaatgaagagcccaacacccctgacatctccgacgatgggatgtttgattttttgctgcccgaggagctgcatca

SEQ ID NO: 133637 - DNA, 935 bp, Homo Sapiens
gaggagggagggcccacggaagtgtcccccttccacaccggccatttcaaatcccccgggggggaggacttaaggacccaccctcccaggttgaggaacttcctgggggcaaatgggccattccccccctgtccgggaagggctgtaaaggtacttccccgtctccaatgggggggtcccacacctcttgtccatgccacgttcacattgtcccccacgcctggtcctccaccaacctcttcaggagccccagagcctggaaagaagttcccgttgtcatagcgatgcagagagatgtagagcacagaggggtcattgtagaacgcctgctgggtgccattgccatggtgaatgtcccagtccacgatgaggaccttgcccacgttcaacttctgctgtaggagttttgcggtgatggctacagagttgaagaagcagaatcccatggctgtggattcctcggcgtggtgtcctgggggccggatgatggcaaatccattcttgagctctcctgcagccaccttgaaggccagctccagcaggcagcccactgccatgcgcacagcactggaggagtgcatctcattccacacggtgtcactgtccaccccgatgcccccacaaggcagcacagcatacatcttctggctgatggggccgagcaacttcttgctgtctagcttctgccggttgaggggactggtcccatagagcagggtgtggtattcagagtgcactgtctggatctcatctagcgtggctttgcgacctcggatccgctcgcacttgctaagcaggcctgtctcctgcagccgggaccagatgctctggatccggccagcatgctcagggtgcacgtgtgtgttcccgcacatgcactggtgctttagccggacgcggggtcgacgatatcccgggaattccggaccggtacc

SEQ ID NO: 133638 - DNA, 912 bp, Homo Sapiens
ctgaagattcccttcaacagcgaagattagacacgaggtcatgtagtcgccctggccatgcaggggaaggcccagccacgatgagacttgcccacgtcaactctgctgtagattttcgtgatgctacagagttgaagaagcagaatcccatgttgtggattcctcggcgtggtgtcctggggccggatgatggcgaatccattcttgagctctcctgcagccacgttgaaggccagctccagcaggcagcccactgccatgcgcacagcactggaggagtgcatctcattccacacggtgtcactgtccaccccgatgcccccacaaggcagcacagcatacatcttctggctgatggggccgagcaaacttcttgctgtctagcttctgccggttgaggggactggtcccatagagcagggtgtggtattcagagtgcactgtctggatctcatctagcgtggctttgcgacctcggatccgctcgcacttgctaagcaggcctgtctcctgcagccgggaccagatgctctggatccggccagcatgctcagggtgcacgtgtgtgttcccgcacatgcactggtgctttagcatgaacgtgtcgtagaccacacctgtggtgaagaggtgcttgacgggctggtctggggggctcttcatgcccccaggggcagcaggggaggactgggtacggcccagggcctggtggggcacagtggccaggctgaggggcgcactggtacacctgcaaaggctgcagcggctgggcatctgagaacagttttattgtatccagcaccaggctcctccaagtcgggcccctcctcagcaccactctcgccctcctcgtccataacctgatcaatcctcccctcgtgccgattcgacacccaggtctctactgccgtt

SEQ ID NO: 133639 - DNA, 780 bp, Homo Sapiens
  misc_feature (617)..(617): n is a, c, g, or t
  misc_feature (652)..(652): n is a, c, g, or t
  misc_feature (696)..(696): n is a, c, g, or t
  misc_feature (708)..(708): n is a, c, g, or t
  misc_feature (734)..(734): n is a, c, g, or t
ctggctcacaactttaattgattgctttccctccactgggcccaccgggtcggcttacatagctcatagctcagtgctgctgaaagagacccagggcaagaaaggtatgaacaaccagtgaatgccactggagcataaatgttcacaaaattgtagagaaggggtgacaagaagcaagcagtggggcagggagtgtcactgatgtccgaaaccccgggtcagaccaacacgcagcacagccactcggccagagagagctgaaccatgccatccttgtcttcgtccagaaggctgaatagtttgaagagggtctccaggcggatcatacaagccacgaagctgtcaaagttgatgccaagcttgctgcacgcataccgcagggcaatggtctgctgcacctggctgttgagggtgaaacctgccttcctgagggctgtcctcatctcgtgggcatcgatggtgcccgagtggttataatcagtttcccaatagatctccagatacttctgaatcttcagccagagcgtcttgaattccaccgcccccaaagtgcccgttccattgctatccaacagactgatcatttccctgcaagtgttgatgttgaatccatcganatttatgtctgttctcttggaaaaccctcattcanaagtatcttgagtgcattggcagtaatctcagaatccttccccntgcacttctcanacagcctcctgaactggtcatctccntgatccactcactgggatgtggtcatatgggttccagctacacatc

SEQ ID NO: 133640 - DNA, 794 bp, Homo Sapiens
  misc_feature (665)..(665): n is a, c, g, or t
  misc_feature (762)..(763): n is a, c, g, or t
ttattctttgatcaagtttttaataagcttttttcttacatgtacagtcatcttaaaaagacaaatattaactattataagttaaatactatacaatttatgagaaatgtaattttgtgaatttgaaaagtaaaagggaggtaactactaaacggattaaagaagaaaattctactttttaagacattttaaccagacagaaagtgagaaattactaatttaagtaaacactaaaaacttttactgaagctggagaccttatactattttagatcaagccttcatctacacagctttaaataaactttaaaaaatcttttctagtacatataagactgctaaaaagagtgcatgactgggggaaaaaaggcatatgctagaatgtgaactcctgaagaacagaaatacatttcattcatctttatccctggattcctaacacaatgcctggttcaaactaaaatgcttaaacaacgtttgctgctttgaagtgaactggggcaaatacatctttccacctctggtccagttttcactccatattaagcacatctgaagtacctgagctgctcctggctgttggcttttgactttaaattgagtaaggtaagccaatatgcatacattttttacatcagctttctcacatcagcctcaagaaccanatcatcactgggctgggaatattctcacgtactccgatacttatttgttggacaacagttaatatcaatgtgcaaaagtaatgcattttcaatgcanngataatatgctcttatgaatatgaatggaat

SEQ ID NO: 133641 - DNA, 470 bp, Homo Sapiens
gcggccgccctttgagcgccttcatcggcgaattatggcggcggtaaaacttgttcagcagcggccacagtggctctgccagcagttggatgtgcagttcgggcatggtgtttgagcaacgtaatcaagggccgccgattataagcgccttctgccgggcaataggtggtatacccagtgttacatccccttcacgtggagcatgcatcatggccaaaggtatggattcaaagaaagccgcgaagaaaaagccggcaaagaccgccgatgaaaaacgcgccgacaaaaaagccaaaaagactgaaaccggcctgttcggtcactgagttacaagcttagaaccaaacgatctgcaagatttttgcgcctcactgcacagagcaggaaacacctgctctgagctaccgatggccaactaccttgatctgacccaacgccgggaaatcgaagccctggcacgccctcgttcc

SEQ ID NO: 133642 - DNA, 1060 bp, Homo Sapiens
  misc_feature (155)..(168): n is a, c, g, or t
tttttgactgaaattaaagtgtatttatttgcagcaatcctttaacaatgatcaaattttgacaacaagcaacagcaattactgcttaagtgttgcctctagataggagcggcagatagcaggaaactgtattatctccaaaacaaactgcaagnnnnnnnnnnnnnngaacgtctgtaatcaaatcgccatctccccaaagtctgattggcagggcagatcaccctaagataatgaatttattacatttcctgggttatttacaaaagggggagggccaatccggattgtcccctaggtttaactgtaaattaacaagaaaaaatggtttaaaaagaaaccaccctagaccaaaatgttctgctcctctcgccttccttcttgttattgctttaaatctttttcaaaaataattgttctacaaacatattttctaaaatagtttctcaaagattaaatatccctttccaacccgcagtatatttttaaaaaagcaatccttctatgtaatacatgaaggattgtaaatgggggagaattatatacatacatttaaaaactggtttatttttccttttataaaggactgaaataataggaaaatatctattcagcatctggctcacagggatgtataatatgcactgcaattttatatggaatacacaagccaaatatttatctgtgcatatctggccgcacagtcccatctctcggcacacaggcatcaccgtggtaagaccgcggctgattcatgggcttaaaatttccgaatcatggactgtcattagtgagaaaacgtatttgtttatatgccaactccaatctgtttagaaaaatatctttttactagcctcaaagcaagctgactatatagtacattttgcagaagatgctgcaggaaaataaatctaaacaaaagacttttagtaaaatttgacatggactagtcagagggtttctccatttttcagagatttcggacgcgtgggtcgacgattatcccgggaatccggaccggtaccagcctgctttttgtaccactgttatagtccatgct

SEQ ID NO: 133643 - DNA, 482 bp, Homo Sapiens
gtaaactgttttatacagagtcagcaaaatcttggtttattaaaggacagtgttactccagataacacgtaagtttcttcttgcttttcagagacctgctttcccctcctcccgtctcccctctcttgccttcttccttgcctctcacctgtaagatattattttatcctatgttgaagggagggggaaagtccccgtttatgaaagtcgctttctttttattcatggacttgttttaaaatgtaaattgcaacatagtaatttatttttaatttgtagttggatgtcgtggaccaaacgccagaaagtgttcccaaaacctgacgttaaattgcctgaaactttaaattgtgctttttttctcattataaaaagggaaactgtattaatcttattctatcctcttttctttctttttgttgaacatattcattgtttgtttattaataaattaccattcagtttgaatgagacctataaaa

SEQ ID NO: 133644 - DNA, 599 bp, Homo Sapiens
ggaacctcacactctttattgctcttcactgtgcccacatccacaaaggacttaaaagtgatgtctgtaagcaggttttccacagcatgggtctgccagacagagcaggtgcaggattagtcatgactccaagccaggcaaggtgattaagaaaagctaaatttatattaaattatcataaagtcctaaaatactgaacatagtggttaaataactccagaaagtccaatctctccagtgagtaacgttaaaaccattacacatgagcatgggagaatcgcttccattagtttaggacagagagattttgctttttacagagtaaatcagtgctcaaatagatacttcctcaaatatgtcctttctacattctgaacagcccaagtgcaataagatccttccccctttccaatcaagaaaatgccacttttctacttgctcttcctccccagacatgagtctaaggacccaaagtgctcactcctttactgcttgttaagtgtaatgtggggaggctcagaactggggctgacgctactgagagcaaggctaagggcctggtatctctctctagcagtcttagaactgactagaaaaga

SEQ ID NO: 133645 - DNA, 365 bp, Homo Sapiens
gcggccgcgccgttggtcagccaacagaaccgtggctcgtacatggacgtctccaagcgccaggaccaagctgtctacctcgcactggatgttgacctctcgcccgacaccaccctgggcatcggtgccagctacgaagatgtcgatgcaacgccctgctggggcggtgtgccgcgctacagcgacggcaagagcatcggcctgagccgttccacctgcctgggccaggcctggaacgactggcagagccaacgcactacgctgtttgccgacctcacccaccacttcaacgacgactggcaactcaaggtcacggcggtgaacagccgcaacctgcaagacatcaaatacgccgccctcgtgcc

SEQ ID NO: 133646 - DNA, 717 bp, Homo Sapiens
  misc_feature (44)..(44): n is a, c, g, or t
cgaggaccaaactgtttagctgtagaccataagttttcaggggnataagaaggcacttgtgaggctgtcttctggtgatatcaggatccttgccatcttcagtctgtcttgatgaataatggttaaaaggcaattaatattctagggaacttgatgcttgaaaaaatgcaataaatggatggtaatcccttccagaaccaaatttatagtgtctagagttttgtctgtccttttgccaagtctccctatttctagaatgaagatgaaatgtagctacttccctgtattattgcagtactccttgcagtgggggactctttcctctttgctcttctatcttggtagggacacttctttaagttggccagataatgttcttcagactgactgcatttcagatttaattatttatacagttggatccttgttaagggagaaaagactaactttgaaaatgctatgcaaataccatacttctctactgggcaaggacagtaactgtattaccttattacagactgtagcttggtttcagtctagttccattaatgatcttgggacataaataagtttatgttataatcaattttgggaagcttttgagagttttatatgtttgggaaattagagcacctgaattgatgaaatttcagtgataggaatcaagagaaaaccatgctttatgaatggtaaagtattatataaattacaattgct

SEQ ID NO: 133647 - DNA, 941 bp, Homo Sapiens
cgaacatctgcgaaaaatccaccgcgccatcctcgatcaccaccgcgccgatggacagcacttggtcgcggttgaggttcaggccgctggtttccaggtcgaccaccacccaacgttggctgcgtaacgacccttcgcccagcaatgcgggcttgggcaattgtgccagccgctgctgctgagccgcgtcgagcccgggcttgttcttgcgcagccaactgaacaggctcacagctgataccgtagcgtcaggctgctttgcaggcgttgggcctggcgcagggattcacgcaggatgcgccggtccaggtggttgaggctgtcggggtcgacgcggttggaatacggcaggttctcgcgggtttgcagctgatgctgctgcatgcgggtttgctggataaagtgataggcctcctcataggcagcgccatccagcggctcaatgacctccttgaccaccagttggcgcaggcgctccaaggtattgttggcgtggataccgttggccagggccaacaggcgcgcgccatctacaaagggcgtaaggccctgcaccttgaggtcgagcgtggccttttcggcgcctttgcgcgtcagcacaaagtcgcggaaacgcccgaccggcgggcgctggcgcaaggcgttctcggccagcatgcgttggaataagcggttatcggccacctgatccagaatgccctggcgcagttgctcgcaaccgcgctcgtcaccccacaccacgcgcatatcgaaatagatgctcgacccgagcaggttctccggcgtggcttcgcggataaaggcaccaaagcgccgcgcccattcggcccgtgacaggcacagctcggggttgccggccatgatattgcccttgcacaggctgaagccgcacaacgccaggctttggttgatctggtgcgccaggggcagcaggcggccgc

SEQ ID NO: 133648 - DNA, 784 bp, Homo Sapiens
  misc_feature (750)..(750): n is a, c, g, or t
tttaaatgtttacaaaactttatttaacaggtgcaattattatactgcgaaaatgaaaatattgcatactaaacagtacctagggtatgatctcaatgtaaaagagggaaaaatgtcaaactattgatagaggctatctctgaatgaaagtagttaatttttcctgcttccttacattttcagtaatatccaaatgttataatgaattggtcacagtgaaacacagggctgacaacccatccaggagaggcaagggaacaggctcctggggctgccagccagtgagagcagagtctgtcccctcacccccatggccagtgacatgctccaagttaggcctggagccttcccctgcctcttccgacctgcatctcagcagccaccctacccagtgaccaggagtccttaggctacctggatgcaagtcttgcgggggtgacgggccacccccttccttcttctcccatccaatcccactggttcctggatcccaggccctcagctctgccctaaaggaactctgagcaatccatgatgagtgtgtgctacacacatcctttctctcttccaaataagggacttcccctttaaaagtggtccaggacaagcaggggcaagggtgatggcaggcagggtgtgcagccagccgcctggagcccaggaaagctactgaggctgctgtcactggaggaagaaccccaacgtttccagtagtctggaaatagactattggtaagaacgccatttgangactggcgtctcagctctcctagctagctggtca

SEQ ID NO: 133649 - DNA, 922 bp, Homo Sapiens
  misc_feature (801)..(801): n is a, c, g, or t
  misc_feature (900)..(900): n is a, c, g, or t
  misc_feature (911)..(911): n is a, c, g, or t
tcgactcaagccggcagggcgctgatccaggcgctgcctgccgagatcgcgaaaccggacatgaccgcgttgtgggaaacggcgatgcgcgagatcgaggcgggcaggaagcaccatcgatcgatttgaggcgatgcagcgctcgtggattaccaaggtgatcgcggagatccgctccaaacccctgaatatcccctacacggggccggcgaaagcgggggcaggcaaaggtggaagctcgggccctcgtgtcgcaccggagccggtcggcaaggcctgtccgcaatgcggcagccaattgatgaaacgaatgggaggcaatgggccgtttatcggctgcgagggcttccggtcgggttgcaagtacaccgaacaagtagccgcataaggggcagagatgatgatcggcgtgagagatctggtgattgacgagttgcgtgctgtcgcagccgtaccgaatgggctggaccgcaacgtgttggtgcggatccaagacagcatcgctgccgacgtgatttacctgtaccgggagcagctggaacagatgatgagacgccaggaagtcgcgggcctgcccgcagccattgcgaagcaagagcggcaggattttttcgccgagcgactgaatctggaataccgcaatcgggcggccaacggccaaggcttcagtttgccgctctatgtcgagtcggcgaagaacttctaccacctggagattcggcgccatttgcagcaggtgcaggactacctggtccatgggcgggcggtgaacgagctgaacgccggcgccgagagcatccngtgaactgcgtgctcgggatcccagccctgaacgccctggcgcacaaggtggccggtggactgaatgctatcaacgaaaccctggagcgcctttctcgnggtgcaaaccnggggcggccgc

SEQ ID NO: 133650 - DNA, 886 bp, Homo Sapiens
aaaaatggttattcagtatttattctgcaatgcaaaggtgacaaactaaaatataaaaaggctgttatggcttaacatttttgttgcagattaaatatgcagcattgaaaaatggaaaggcgtggcttcatctctgaccagcagagttaaaaagaaaaatctctccattttccttcatcatcatgggatacactgttcaggcaatccaaattaataaagacttgcactttcatatgaacacaagatcaagtgtaccagttaggttttcacattcacagtatataagaaaatacacatggaaggaaaagtaaagggttaacttaacaaggatttattcacaggaatacatgtaagtagagaaaaataacagaaaagctaaacaaatgaaatgaagaggatccaaaccaactttcactctgtagcttttaacttgcaccctgtgtgcatatatctagggcacagagggccaccaacatgcgccaaaatacagtgtaggaaccctgcattacatccattaacttaaacatatctttaagatcatgctttgaacaaaaaaagggaagcttagaaggcagtatgttgagtgggaataaacattgaaatatagcaatcatttttcaacttctacaattgtctttatgtgccaactaacatttatgcagccttttacagatcttttaccacgtaatttaaattttagaagttttgataaaatcactagtagtatataaccatgcagaaagcacatcacactgacagcacagaggcaaagattttgcacaggtatatcagctttccacattgtgcaggttacacacaatacaatatcaatcttattcctaacagatcctaaaaaagatatttcaaggcatacagccgcggccgc

SEQ ID NO: 133651 - DNA, 569 bp, Homo Sapiens
  misc_feature (292)..(306): n is a, c, g, or t
gcggccgcggctgtaggcttttcttcaactccttggcttcaagcattcctcctacctcagcctcccaaatagctggcactgggggtgcacgccaccatgcctggaaaattcttttattatttgtacagacagaggtttcactatgttacgtaggcttgtctccaattcctgagctcaagcgatcctcctgcctcccaaagtgctgggaatacacgcgtgagccacagcattggcctatagcctgattattaaaggtgtaaattgctatgtttagatactagaattaactaannnnnnnnnnnnnnncttccggagacagggtcttgctttcttgctcaggctggagtgcagaagctattcacaggcatgcaccgcgtacctgtctagaactcctgggctcaagcaatcctcccacctctgcctcccaaatagctgaaactacaggtgtgtgcaagcacactggctttatagtcttgtttaaagccaaggaaaaatatctgatgacttcttaagatgttttcttgcgtgttagaaatagcttttgttctgaaagatttctgcctcgtgcc

SEQ ID NO: 133652 - DNA, 1347 bp, Homo Sapiens
gcggccgcagaagcagtgactcttgcagcagggccttgctcagtctcagaggctgatgctacgtctaattcatgagaggaagtgagctctgagtgtgaagagcctgcagtactcagacacaagttcagacaggtttgcattggccacagaccggctgctcagaacagaaagccagtttgcctgttcccgtcctctttggaacacccaactcctaaagtcacagagacaccacgtgtggctcagagactcagtgggagcttccctaggtttttgtgaagcctgtgagtggtcactggagcccaggcgtcaatgaccaagtggaagataggccaggtgggcccccactggtggccatcggacagaatccaggttcggctctgcagtgtgggtctaagttaacttttgtccagttttcttgccagcatgcccttctcacagtaaacggtttcctgtgccctgaaggaatctccccatctcagccttgccaaatgcattcaattttcctgtaacaacatgatttaaagcctactttaaaaaataaacaccgatcttagctattgtgtcttagccagagagctggcctcacaggaaaaaggctcatgtctgttccttttgcatgaaacttggcatgctgtacacacgttagaaacatgtgctgagctgatgagcagctcaccacaaagaaccacaaagctgatcggtgtccaaggaacgttggtgggagagacgatgtgctcctgacgacagccacctgctcccccgaaagccagcatcagccgctgcggtctgtgctccggggtacttccatgcatctttcaaagaaatctttaggaacagttgtcactgcaatccttgtgggtcacagtgagaaaagttcagtttcaatagaaaactaagccacagataaaacaaagcaaaagcaaaagcattgaatgtgagggggtcccattccctttgtggaaacccaggactcagcagaattcatggacgttcttagtagagtcagccatcactacagcaagttctccctcagagatgggactcttggaagccactggcaggagggctcatgggaaccggtgcgtgttgggtgctgtgtgcaaacggagcagggacaggctcagagggcctgaagctggcggggaagtcgctaccctaccacccagcgatggctggctgtcctgcagtggggtctgctgactccacacgggggactgactcccagagaccctgatgtggactttcaaactggcacctgctgaatgcacaccacgggtggtcaggccagtagggtggaggagccgcttcccgaggttccttctgtgcctgcagaggcctgagagccag

SEQ ID NO: 133653 - DNA, 533 bp, Homo Sapiens
ggcacgaggcagcggcgtggcgcccttgggcaagtcgatggcgtggccgtcgggggtgaagatatagacccggtccggctcgatatccacccgcagctgctcggccaggccgccgatatcgcccagttcttcgtgccattccagcacttggcgcaaccaggagattttctcttcgtactggttggacccggccttgacgtcggtgcccttgtagcgccagtgcgcgcaaactccaagctcggcctcttcgtgcatggcgtgggtgcggatctgcacttccagcaccttgccctcgggaccgatcacggcggtgtgcagcgagcgatagccgttttccttggggttggcgatgtagtcgtcgaattccttggggatgtgccgccacaacgtgtgcacgatgcccagcgcggtgtagcagtcgcgcatttccggcaccagtacgcgcacggcgcgcacgtcgtagatctggctgaaggccaggcccttgcgctgcattttgcgccaaatggaatagatgtgcttggcgcggccgc

SEQ ID NO: 133654 - DNA, 1197 bp, Homo Sapiens
  misc_feature (691)..(752): n is a, c, g, or t
atcgttccgcctgggcgggattctgacttagaggcgttcagtcataatcccacagatggtagcttcgccccattggctcctcagccaagcacatacaccaaatgtctgaacctgcggttcctctcgtactgagcaggattaccatggcaacaacacatcatcagtagggtaaaactaacctgtctcacgacggtctaaacccagctcacgttccctattagtgggtgaacaatccaacgcttggtgaattctgcttcacaatgataggaagagccgacatcgaaggatcaaaaagcgacgtcgctatgaacgcttggccgccacaagccagttatccctgtggtaacttttctgacacctcctgcttaaaacccaaaaggtcagaaggatcgtgaggccccgctttcacggtctgtattcgtactgaaaatcaagatcaagcgagcttttgcccttctgctccacgggaggtttctgtcctccctgagctcgccttaggacacctgcgttaccgtttgacaggtgtaccgccccagtcaaactccccacctggcactgtccccggagcgggtcgcgcccggccggcgcgcggccgggcgcttggcgccagaagcgagagcccctcggggctcgcccccccgcctcaccgggtcagtgaaaaaacgatcagagtagtggtatttcaccgcgnnnnnnnnnnnnnnnnnnnnnnnnnnnnnnnnnnnnnnnnnnnnnnnnnnnnnnnnnnnnnncctcccacttattctacacctctcatgtctcttcaccgtgccagactagagtcaagctcaacagggtcttctttccccgctgattccgccaagcccgttcccttggctgtggtttcgctggatagtaggtagggacagtgggaatctcgttcatccattcatgcgcgtcactaattagatgacgaggcatttggctaccttaagagagtcatagttactcccgccgtttacccgcgcttcattgaatttcttcactttgacattcagagcactgggcagaaatcacatcgcgtcaacacccgccgcgggccttcgcgatgctttgttttaattaaacagtcggattccctggtccgcaccagttctaagtcggctgctaggcgccggccgaggcgagcgccgcgcggggaaacaaggcgaaaccaggaaactaggcgaacacggg

SEQ ID NO: 133655 - DNA, 941 bp, Homo Sapiens
cagtgccaggcactcatggggcctctcttctgctctctccctgctcggccgcctccccggcagtctcgcccaagaacttcaaggtgaaaatgatcatgaagacatcagttctgctcagctgggagttccctgacaactacaactcacccacaccctacaagatccagtacaatgggctcacactggatgtggatggccgtaccaccaagaagctcatcacgcacctcaagccagttatccctgtggtaacttttctgacacctcctgcttaaacccaaaaggtcagaaggatcgtgaggccccgctttcacggtctgtattcgtactgaaaatcaagatcaagcgagcttttgcccttctgctccacgggaggtttctgtcctccctgagctcgccttaggacacctgccagcaaatctcgactctgctcccacagacgggccctgggggaccattcccaggcatttctgcaagccattgcagacaacaacattcaggatcacaacgtgaaggactttttgtgtcaaatagaaaggtactgtaggctgtgccatttgaccacaccgatcatgtttccccccgagcatcccgtggaagaggtcggtcgcttgctgttatgttgcctcttaaaacatgaagatttaggtcatgtggcattatctttagttcatgcaggtgcacttgatattgagcaagtaaagcacagaacgttgcctaagtcagtggtggatgtttgtagagttgtcgtaccaagcaaaatgttcgctcattaagactcatcaagaacagggccgttcttacaaggaggtctgcgctcctgtcatcaaacgtttgagattcctctttaatgaattgagacctgctgtttgtaatgacctctctataatgtctaagtttaaattgtattcttgccccaggggaggaccatacacactcgtcga

SEQ ID NO: 133656 - DNA, 889 bp, Homo Sapiens
accaaatgtctgaacctgcggttcctctcgtactgagcaggattaccatggcaacaacacatcatcagtagggtaaaactaacctgtctcacgacggtctaaacccagctcacgttccctattagtgggtgaacaatccaacgcttggtgaattctgcttcacaatgataggaagagccgacatcgaaggatcaaaaagcgacgtcgctatgaacgcttggccgccacaagccagttatcactgtggtaacttttctgacacctcctgcttaaaacccaaaaggtcagaagggtatctgctccacgggaggtttctgtcctccctgagctcgccttaggacacctgcgttaccgtttgacaggtgtaccgccccagtcaaactccccacctggcactaaaggcgtatgcccccccgcggccggacacaacctcgcagggagaaatgcatttgcacggtgccgggccggcttttcttagctcctggtatagcttgaaccggcgtctgccgagtgttctcagaggccggaagaatgatgcccgtaaccgtgattagaaactcgaggccgtgtaggattctgacacatcgatggtaagatgactgaggcccccaacgccggagatggtgtgacccggacccccccctttcagactctccgtctcctaatattcgcattactccatcgtgctctcaacccatcagattagggagatacaatgttcctgttcatgaatgtggtcctaccctggcctaaatgccatctctgaagaagtcaggctgaccgtattttcaccttctgtgcgatgcatgtctttcacaggaacgccatcggtatcacttatagtaagtaacattcgctgcgcacgtccatactgtgacgcgcatgggga

SEQ ID NO: 133657 - DNA, 1921 bp, Homo Sapiens
  misc_feature (1213)..(1229): n is a, c, g, or t
  misc_feature (1566)..(1580): n is a, c, g, or t
tttgtgttcaaaaaaatgttttttttattgaattgaatgggagctaaagtaggataaagtggagccaaattataaataggaatataggtaggagttcattcattcagtaaatatttattgaatgcttattgtgtccaggccctgttctcagctcttagaatacatccatgaacaaaccagataaaaacttctgcccttgcgcagcttatactctagatcgtaagggatgggattagcaataaatttacataaattcaaccatacctactggaaaaagacacatgcatggaaattattaatgctataagaatctcttgatatgcagtttgtatttttgtacttaatataagcataatatattcatacctacatatcactccacagggatttaaactttaagactacaaagagaaatttattggtaatttaggagattttcaaggaccattctgagcatgctcaattttgtccttaggcacggtctttaaaacctaaccaccttacaagttgtgactccactgtaccaaaatgaagactctgagacttttgggcaaaagaaccattttaagtatttgagtatgagaaagatgacaggatgaatccacattctctcagattaatctggtaacaaggaacaagaaagagtacattcatctgaatatacatggtcaggtaacagtggaattcacatcaagaattttttaaaaaaagaaaccagttcatgacatgtcccattgttttaagacaactaaaacagtaagagctcaatgtcataagtatttataagcaactcttaattataaaatccaaaggaaaaattcttaacataactggctttagtatgattaaaggtttctcatttgcatatatgtttcagagtatttaaaaagaatgccaagaaaaatcatttttaaattttgcaataattttactctatatacattgataccaatcatttaaccctgaaaacacagtcttcactaacacaatgtaaaaaaattttttgacagtaaatgaccagaaatattgcattaccataaagctacaaagaggctcatgctcctaagagcaaagttaggaaaaccaaaaaataataattataccagtgataagcaccaagacagaacttttttgcacttagggcctgattggttgtatttaaacataacttctacattagagggccaaataacaccttataataatggcctgnnnnnnnnnnnnnnnnntacacaaatacatacaaaggtctcgaaacagtgaagaatgcccactttaaaaataaaatcaatcatactcatttttaaattaatgtgacatttgcaaaatatatttatatatcacttttcttccttcttaagttattttatacaattcagattgctccattttttttcatcagttgtcacactaaagtaaacaaatatgttaaattatgtaggtttgcagtaatgaatccaaaccattagcgctagattgagtagctccagcaatcttccttgcaactcactccagctggtgaaacagattatttatcttcataattttaaaagccttagccaggtnnnnnnnnnnnnnnntgtgtgtgtgtgtacaagtttgccagagcagtgtgagacagtaagtaccaaccagaaagaggtgagacatacaaacaagcttacacaatggtccaactaacccctaaaagacttgggcagtcagacactgagttaccctcaaaataaacctgaggctgagcaatgggggaaccagaggatctgtcaccacaatgaagagtcagtgacaggtttggaaaactaaaaactaaagtgggatgtctcaggcacagcattcctgtgacactggaggatacgaagcagcaatagccacttttcaggcagagataaaggattgggatcccctgggtctgcagctgagg

SEQ ID NO: 133658 - DNA, 381 bp, Homo Sapiens
ctgcatccaacgccgctagctgactgcacccaacgccgcctgggcgggattctgacacctcctgcttgactgcatccaacgccgccacaagccagttatccctgtggtaacttttctgacacctcctgcttaaaacccaaaaggtcagaaggatcgtgaggccccgctttcacggtctgtattcgtactgaaaatcaagatcaagcgagcttttgcccttctgctccacgggaggtttctgtcctccctgagctcgccttaggacacctgcgttaccgtttgacaggtgtaccgccccagtcaaactccccacctggcactgtccccggagcgggtcgcgcccggccgcggcgttgatgacagtcggaccgagctcgatta

SEQ ID NO: 133659 - DNA, 317 bp, Homo Sapiens
agttacggatttctagctccggtatcctcggcaacacgggattcctgtggtaacttttctgacacctcctgcttaaaacccaaaaggtcagaaggatcgtgaggccccgctttcacggtctgtattcgtactgaaaatcaagatcaagcgagcttttgcccttctgctcacgggaggtttctgtcctccctgagctcgccttaggacacctgcgttaccgtttgacaggtgtaccgccccagtcaaactccccacctggcactgtccccgatacgtcgcggccgccgaggaatcccgctaacgggatgtctagagtt

SEQ ID NO: 133660 - DNA, 371 bp, Homo Sapiens
cagcgttatccctgagcctgagttcctcccagcgttatccctgagcctgagttctccccagctttatccctgagcctgagttctccacagctttatccctgagcctgagttctccccagctttatccctgagcctgagttctccccagctttatccctgagcctgagttctccccagctttatccctgagcctgagttctcccagcgttatccctgagcctgagttcctcccagcgttatccctgagcctgagtcctcccagcgttatccctgagctcgccttaggacacctgcgttaccgtttgacaggtgtaccgccccagtcaaactccccaccatggcactgtccccggagcggtcgcgcccggccg

SEQ ID NO: 133661 - DNA, 753 bp, Homo Sapiens
gttctattctgatgtttaggctagcacccaacttatgagagacacctcctggtgccatgtgcatttcagttaaagattcagagctggcagccgcttctgtcctggcccttttaaggtcagcctctattttatgtcctaatacattcttgcatcaaacttgcactggatgaagttgcaaagttcagacaatgcatcctcctttgcaaaattaagccttcagaatccccagggatgttttcaagctttctagttgagtaagatcaaaccaagttcacttcatgagttggtctttcctgattctctctctaataccatcccaatacacagatgagttcctcatgccctatttacaaggccgtctaaattccgtgcctttagctaccacatctaagagctgggaaagtggtacagaagcacaagaggaaggactcttcaaacaatctatgtaaaacagtagttttgagattctttttctatttttttaaaatccagcaggacaactgaaagtaacttgtttgagtacctctccatccatccagacacttgggaaatacaacacagggtaatagttgccacagattccagcttacacagacagattggcagttacagtactagggacaaaggtacagatacgagagactgggccaacatgtatactttcacaaaagtatgaaaaagtgcttctcccaaaccgttccatctgtggaatgcaaatactgtacaggtaatagttgctacagccgcggccgc

SEQ ID NO: 133662 - DNA, 493 bp, Homo Sapiens
agctggggtgcttgactccgagggatcgttcctaaatcccaccaccgggagcagagagctacagggagaaacaaaacttgagcagatggaccaatcggacagtgagtcagactgtagtatggacacgagtgaggtcagcctcgactgtgagcgcatggaacagacagactcttcctgtggaaacagcaggcacggtgaaagtaacgtctgacagaagcatgtgcacttcgggaagcaggcctgcatcttacctgtacagtatttgcattccacagatggaacggtttggagaagcactttttcatacttttgtgaaagtatacatgttggcccagtctctcgtatctgtacctttgtccctagtactgtaactgccaatctgtctgtgtaagctggaatctgtggcaactattaccctgtgttgtatttcccaagtgtctggatggatggagaggtactcaaacaagttactttcagttgtcctgctggattt

SEQ ID NO: 133663 - DNA, 480 bp, Homo Sapiens
tccattcacgttttttactaaagcacccacacaagtttctgtgcaatgtacaaacacaagccggccctggggctcctgcctcctctctcagacagggaggcgggaaccagacttactgatccaagccccacctgcctcccatgcaaaggccaaccccaagatcccaggcagcgacacagcatcccctctggtcccctcctgggtctgctcctcagcagggggcgcaccaaagcttgccccctacaatgttgaatgaaaaaggtttcccctcccctgggagcaagggggttcccaagagctgagaattccccctggaagagacactggcccctagacatacctcccacccttccaggccctctgcacccgctccaggggcatgggtgaggtgaactcgatcagcagtctgcccacaagaccaggtggcgagtcaggacagggtggcagcgtgggagccgtgggaccgggcagggcactggg

SEQ ID NO: 133664 - DNA, 2209 bp, Homo Sapiens
  misc_feature (1646)..(1667): n is a, c, g, or t
  misc_feature (1981)..(2108): n is a, c, g, or t
gctccattcacgttttttactaaagcacccacacaagtttctgtgcaatgtacaaacacaagccggccctggggctcctgcctcctctctcagacagggaggcgggaaccagacttactgatccaagccccacctgcctcccatgcaaaggccaaccccaagatcccaggcagcgacacagcatcccctctggtcccctcctggggctgctcctcagcagggggcgcaccaaagcttgccccctacaatgttgaatgaaaaaggtttcccctcccctgggagcaagggggttcccaagagctgagaattccccctggaagagacactgccccctagacatacctcccacccttccaggccctaggggactcaagggggggaaactgaggcacagagaggtggagtgacctagcccaggccactctgcgaggcagtgcaggggctggcccgaccctgacagtgactggggctgggctagggggagggggtcgggaaggagggttgactccaaagagggccacacttgaagagcctgcccaggcaggaggccccccaaagtgggttctgaaacttccaggtgtagctagggggcctagtgaagacccttggaaaacagagcccagtctcagtcctggaggtcctccacagagcagctgccagccaggctgtggtcagtcctctggcaggcaatcttcggcaccgagagcctctgtccattagtgtcagccccgagggggccacgacggaggccgcccaatgtccactgtgatattggtgaagagtggttgccgagacacctccaagacctggtaccgcactgacccaatgccgtcccgcttcatggtcagcttcgtgttttgaatcttggtaaacctctgagggttaggttcgttatgcttgtcgcggtcgtgcttgatcatgcggtagcggccgattcggatgtctgggcgtgagatcttcatcccagtcagggagatccggttgaagatgtcatcatcctcgccaccccagccccagtactcattggggaagccattgattctcagaaactgagccttactcaggcctgacacacctccaaagtagccagcatagggaagccggaagccaaacttgtccatggcaatggcaaagtggcggggttggtcgccgcagcggtataggttgcggtcatccatggggaccaggtccacatcgctgaagatgaagcagtcataggcggcatcctccttcagcgcctctaggaagcccacgttaagcagcttggcccggttgaaggtgtcctcaccatgctggttgatgacatagacgccgtagcgcagccgctgccgcctcaagatggggtgtagatagtggagccagtagcgcaggtggtgttcccggtgtctaaaggggatgatgaccgccaccgtctgggctggggtgcagtcgggcggtgtgtatcggccgcccatgagcacgcctgggttctccctgtgcacccgctccaggggcatgggtgaggtgaactcgatcagcagtctgcccacaagaccaggtggcgagtcaggacagggtggcagcgtgggagccgtgggaccgggcagggcactggggacctcagggagcccggagctagaggcggtggcgttgggccgggagcagtnnnnnnnnnnnnnnnnnnnnnnagcagctgggtggagggcatgggcagggcctcgggcactgaagcggctgaagaaggccaggtgctgggcgtagacgtcaaagtagaggatgacggccacgaggaagtgcagcaggcagagaaggagcacagccttgcagacgcgctccagcgtcccccccatcagtgtgctcatcccgccggcggcccctggcccgcccagtgggcccgggcatccggctgctggcccggcgctcggggctcagcaggggccgccgctccgacttgggcagggctcccggctccggcggctgcggacggttccgtcccccatgnnnnnnnnnnnnnnnnnnnnnnnnnnnnnnnnnnnnnnnnnnnnnnnnnnnnnnnnnnnnnnnnnnnnnnnnnnnnnnnnnnnnnnnnnnnnnnnnnnnnnnnnnnnnnnnnnnnnnnnnnnnnnnnngggcagacccacggaccggcggacccacggaccacagcgccaccgcctccctcccgcgctacatccggaaaattccgggccggtggggtgccgttggggcg

SEQ ID NO: 133665 - DNA, 787 bp, Homo Sapiens
gcggccgcctgcaggcgggagaggtcctgctggtgcagggcggcagtagcggcattggcgttacggctattcagttggcgcgtgcacgcggcgccacggtcatcgtcacggcgggttcggacgaaaagtgcgcagcctgcctggcgctgggtgcgcaccacgcgatcaactacaagacacaggacttcgtggccgaggcgcggcgccttaccgatgggcgcggcgtggacgtagtgctggacatggtggccggctcctacgtggcgcgcgaggttgagtgcctggccgaggacggccgcgtggtcatcatcgcggtgcagggcgggctggatgcgcagttcaatgcggggctggtgctgcgcaggcggctgaccatcacgggctccacgctgaggccgcgtcccgtggcgttcaagggcgccattgcgcaggcattgcgtgagcatgtctggccgctgctggcgtcgggcgcggtgaagccggtcatccacaccaccttcccggccgcgcaggccgcgcaggcgcatgcgctgatggaatccaaccagcacgtgggcaagattgttttgacatggacgacatgacacagaaaaagaaactcattgccggcaactggaagatgaacggcagcctgcaggcgaatgcggcgctgctgcaggcgttgcgtgatggcttgggcgccgcgcccggttgcggcgtggcggtggccgtgccggcgccctacctggcgcaggtgcaggccttggtcgcgggcagcgaaatcgctctcgccgcccctcgtgccgaa

SEQ ID NO: 133666 - DNA, 1103 bp, Homo Sapiens
cttcacaaggaccgctcagcatggctcactggagagttccatgagagaacagcactcaagcttctggccgcatggacccgatggctcgcattctgtgtagtgttttacgtctccatggtaactgtgccctgcacccctcggtagccgccctgttagttttcagtctccttttctttctcaccatttatcacttccctcactgccctacccaggctttctctcccacttccctgactctgggaataactaatatttaagcaaggtaagatgagaagcaaggggtctcagttctaggaatacagtgctagttgattgtcaggtatgttgtaaatagaccctctttggccatacactccatgcctagatgcctcggagagcatcattctctgcctaggcaaggccctgcatcccttgcctcaggccgggctgagtgtgactgcagctcctgaggatgggcctgccctgtctggggtatgcgtgatccctagatacatgttcccacagaggtgcctgctccgtcttcgctcaccagacactcaggcaggctggcttagtctttgtgcgtggcgattttgtgctctgggccctttctctttttccagccagtttccattcacttgccttacagcctgccctggccgtcactccccagctttgttcagcaatggtgtggttggagagttgtgctgggatagcgcaggaaggtgggtcccggcaacacgcaggggatgagtggacctggaactgacaatggcgtgctgccaagtgttcctgagaggtgtttaggcacagcagaggggacgcggggggcaagaacagcaggacgctggtttaaaaataactcaccgccaaacctgtggagcagtgtggggcatcctggcagaggtgcacaggctgggagttcaggcactgcaggctgatgacaccacagggaagagtggcccctgcctccaggtctccccaggggtttatgcagactcgaagtctcactggcaccagatgcctcagaatgagcggggaaggtggaagactggggcccagcaccaaacagctttacgtggcggaccttgaacccggccggggccctacgcaaagcatgggca

SEQ ID NO: 133667 - DNA, 562 bp, Homo Sapiens
taatagctgaggtctttatttcaatttctatatacagtaaaagtgctgctgagaatctgcagcgaccagacagaacataaatttaaatctctctcaacaattagcagcttaagatctatcaactacagtgttaacgttcacacgttcacaagtgtcatttctttacgtttcaattcgtgcaagtgagtttttattcttacacactttgataaaacacacagtctagtagtcaatccctactgaggatatcacctagcatacacgacatacagacagcaatgttaactcttagagccacattcaaaatcccaggtttcatttggggttggggtgtgggaaccataattttgcctgtgtcagattacaataatgtttggttttgttttagatgcatattttccaaagctgaaaggcagctcctcattggaactctctcagaactcagcattttcatctgactgtacctcaaaggaacatgaaatcagaaacaaaaccaaatgcagtgaagaccacatgaaaatacgctcattatttggacatggctagtgaggaaggctcgctc

SEQ ID NO: 133668 - DNA, 758 bp, Homo Sapiens
gtggaaatactttgcagagtttatttggacaggttcaaaaatagtccttcgacaatacaatcagatcgaaccacgacaagtaaaatgcaattatgggttggttacatttttaaaaaatgtaaacaggtttgggaaaactaaaagcaaaactacatcgtcatctcctccattcccaacccctgcatttcttacaagcaggacttcaagacggcatctgcaatcttttgaaatggatgagaggatgacactcactaaaggagacagctcaacagtgtgttctgaggccatttctcagaacaaaggcatacttctgcataaggcaaatgcagcctgataaagcttcccctagtgggtaacatgggaatgccaaagtcattcacctaaatgagctcaaaatacatattgttctgggccaaattatacagtgtcaagctcagactgtatgtatttatgtatgttggcagagcaggccacttttggggcgccacagctttatcctagcatcctgtgccctgctgggttcccatcgctgtctccccaaacccatgaatttccttggatttggttccagaaaggcagacaagaaacaaagtcagttgcacaagcccacaagggaacagggccccagaggacttgaatttctaatgaaacttaagagtaacacagaatgtgtgcctttgccaacaagccgggactttctgaaggttgatctgagatgggggcagggagtggggacaagatcaagtgtgctttgggcc

SEQ ID NO: 133669 - DNA, 1094 bp, Homo Sapiens
gcggccgctccaacatcagaatggtaacagttcacaataaaatgtgctaacaatgttttgtttctatcagctgttgcaatgctgatatatttctagttcagtgaaataatttgtagtaaccttactctgaggttttacggtctgataatgaagcacttgcatgagtatagtaagtcatgtttttttgttcaaatttaaaagccctgctaattgcatgacacaccacatagaatgtatactagcagatactatccagtgaagcataaattagaatttaatttgatgttcaaaaacagttccatttttaagggttaaggtggtattttcaagaaaaggcagaacaaataatgcaaaattctcagtaatagtgatacatggatatacttccttttaaattctcagctgcaaaataattgtagacaaaataatggcatttaactaaagatggagcatgatctgtgtacatagcacatgtgaataaaagaaaagctgacagtatattctggtttcaataaaatgacctatcagaaagtagaatttcatccccaagagtatttcagtttatccaatattgagtaagttctgaaacagttttagaaaaaattttctttttgttaaatgtgatgcactgatcaatttttgtcacagcattttcataccttcatggtggactactagtcactgcttccataaatattgtttacagggtgagatttggtttattcatcttaagtgctgtagcaaactgtggttcgagcaacctgtgggaaatctgtgagagggaatggggtgggagatgtgggggaatggtggtcagactgatgacagatcctagaccaatgtaaagaatgtgtatctgtatataaataatttatcaaatagttttctctttgtgtctgtgttagtgtttttaaagctgctcatttcatttagtccaaccaaaaagaacaagggagataactaatgagcttctagtgatgttcaaaattgctgttaactaggcattataccctgcaagttcactgcatgtctgatgcttggtaaaactagtcttccctgtaaaatgcagattacaggtattaaggcaatctagc

SEQ ID NO: 133670 - DNA, 724 bp, Homo Sapiens
ggggtgatgaaatgttataaaattgtggtgacgactgcacagctctgtgaatgtatgaaaaccactgagttatacagcgtgggagtgatttctcaataaagctgttaccaaaagagacaaaagaaaaaagtgtacaggcttaaattggggtgggtcccactccgtgtgacctcaggtgagctaaatgacccctctgagcccagaagtgcccacctacaccagaagccacagcctctatcccgggcaggaccagagggctgctgagaggatgtctgggattcacggactcattgcacagtggatttttccacaggcctgttcccggtgcccttccctgcactgccaggatgagtacccgaggaacttggggtgagctcccaagcccagcactggccctttctctccaccggggctggctcggattgccctggctggtctgtttacacaggagggcagcaggagggtcctgactcctggaaggctgaccagggccaccacagcctggacccccctgcttgctagccactcactttgacatgtgactgctgaaaaattaacaccagtttcacttccttccctcacactccacgtagcacagaagaaaaatctgtcatgttccaaagcgaatccacagccttctcgtaacaggaaacactctgaaatccgtcactgcgaagtctggggaagacccaggacaagctgctgctttgacggcagcgcttcc

SEQ ID NO: 133671 - DNA, 834 bp, Homo Sapiens
cccacatttcacagggacaccatgtgatattgccatcgccaaggtgcacaaatggcctcctgaaccccaacccttctgcacacttttatccccctcacccccttctcctcccccaaagaatcatatgctgtgtctggagagcaatcaggggtcctttcctttggggtattcacgtctagcagtcattaacaaggctgtactctcaaggccccgtgcaacgcctgggacaccgggtggggccttggggaaagtgcccaggcttcaggccctaaagggactgggtggaaaaggacttgacgatgttgtttctcaggttcagaggttttctgtgagatgattcagttgacctctgaggggacagcatgactcagaagaagagctgacttcaagggagctggtgagtcacagagacactgtgtcccaccgtccccagcccagctcaacaggccaagtccagcctctgggctcagcactgctcagcatggccatgatgacaggcaagtcctccctccaggcatggctgcagttctaggtcacgtctgctagagtctgcaaagccaccagtttggaatctggcccatactagtggcagcatccacacagctgctgggctgggcccggcaattagatgtagatctgaacgaaaccagtctctgagtttgatggacaacccacagagaggaggcatttgtggagccagtgcccaggatgtccctgctctggaggtctcttcctatagttgcataactttggcagcaagttcaaaggaggaggagggttagaatccctgtatcctagtccaaacggcctgaggaagggtgggtgggcggccgc

SEQ ID NO: 133672 - DNA, 1591 bp, Homo Sapiens
  misc_feature (78)..(78): n is a, c, g, or t
  misc_feature (94)..(94): n is a, c, g, or t
cgaggctggagagatagaccagggacactaggggtccctgcagccactcccacctcccacccgcccgccggtgccgcntgccccaggtggggcntgggtcacagcaggttgatctcgtccaggtagcgggcgagcaccgagtcccgcacgtccttgaagaccttgcggatgttctgtgtgtctgtggcacatgtgtagtggctgaaaaggcgtcgggatcgtgcgcccttcttgctgccctcggggccgtccacgcacccggtgtacatcctcgtgtacatgtccaggatgaacctcttggctgcctcagcatcctgcttagggccctggaaactggggaaataggtagccaggtgggaggtggggattttctcctccaggatgtcggttttgttgagatagaggatgacggatggtgcttttgaaccagggtagttccaggatagtcccaaacaatgcgaggctctccttcatgcggttctcctggttgttctcctccaggcactggtcgtattcactcagtgaggccaggtagatgtgggcgatcacgttctcgaaacaatggatccatttcttacgctctgacttctggcccccgacgtccacgatccgcaggttggttttctgcacggagaagcagtactcgttgatgccagtggtgggcatgcggctgcggagcacgtcctgagctgtggggacgtagccctcctcggtgatgcgctccaggtgggacaggtagtacacggctgaatcgagcaggtggaattcccgccgacgctcatagcaggcccggatgccggcatccctccacaagccactgcatggccgcagcgtagcgcttctcaaacgtggtcactttataggggtcctggctcatgaccaaggctagcgtggtgcttgctctcgggcctgctgaatggaatctgcagccgctccatggcctcgatcatggcccgcatggacacgaagatgttctggtagaccaggggccggaagcccttgcgctcctcctccgagtagccggcgccgtggatgatccgcatctgcttgatgaaggtgctcttcccgctctcgcctgggcccaaaagcagcagcttcagctccccgcggtcctgcttcttctgctccaagaggatcctgttgatctcctggtccacccgggcggcggccttctcatcctccgtcaggcaccaggggcagcagcgccaggtcagcgagcgggccatggtgcggtggcctcagtcggcaccgggtggcatcgcccccgggcccctgctggccagggcaacccccagcccagccggccctggagagggctccgggcaaccgggtgcgcagggaggctgccttttccttgggggtcaccccccagggacctagacttccttgcctgaaacacccaggaagcccggctcggcggtggcaaggcttgagtgctgggaacagggtggggacgggaggaggtggggaggccagggctccccgcccacctccagacctgctcagacccggcccgacaggttgacggtgaagggtgccaggagagggtgaggtgggggccccagggagggcggggcggtggcgggaaaac

SEQ ID NO: 133673 - DNA, 578 bp, Homo Sapiens
gcggccgcccgcaggcacctgccttttcggcatcaccatcccgcccgtcggtggcaacaccgaatttgcgaaccagcacgcggcgctcgacgcgatgcctgccgcgctacgttcaaggatcgaaggcttgcaggcgatccatagcgcccgcgccggctacgcgccgtcaggcatgtacggcgcgaacgacaagaaccgcagcatggacatccgctcgggcgacgaggcgctggaaacccagcgccatcccttcattcgcgcgcaccccgaaaccggccgtcccggcctgttcggttgcgccggttacatcatcggcttcgatggtctggacgatgccgaggcgctgcctttgctctacgaactcatccagtggcaggggcgcgaggaatttcgttacgcgcaccgttgggagcccgacatgctggtgatgtgggacaaccgctcggtcctgcaccgcgccaccggcggctacgacggttatgaccggctgctccaccgaacgacgattgcggcgtgggatggatagtgcagacgggtgaagcggtcgctttgggatagaagaaccacctctttttcgt

SEQ ID NO: 133674 - DNA, 688 bp, Homo Sapiens
gcggccgcggccaggcccgcccagccggcgggcgcacccagggccgaattgcccgcagtttccaccggggacgcgcccggggcggcaggaacgacgggtccgggcggcgaatcgcggtaaaccccaccggccggctgccccgggccttggggcttgccggccggcaagcccaggtcccggcggggcatcgccatcggcagcgcagggggcggggatccagccggtgccgcggcggcctccccaccccgccgtgccgctgggccaagagccgggccgcgggatgtcccggggatcgcctgggcgaccgccgttgccggcggcagagccggttcgggcgccctggtggttccgccggccggctcgttccgggaacgggcgggcaagcccgggctcccatcccctcgggccggccccgccggacggcccgggagcggagacgtgccgaagattccgtgaatgacctcgctattcggccacgatgttacgaaaacccaaatcaatcacgtctcacccttcgtatcccgtcgaccgctgtggcaagggccgctacgcctggattaaaatagggtaggagggatcggcggtgaccgccagcctgctcccgctcgaacacctcaccgacgccgacttcgggttcctcgcggcggccgtttccccgcgccctgacgcccctcgtgccgaattcttg

SEQ ID NO: 133675 - DNA, 942 bp, Homo Sapiens
  misc_feature (718)..(718): n is a, c, g, or t
  misc_feature (769)..(769): n is a, c, g, or t
  misc_feature (771)..(771): n is a, c, g, or t
caggggatcctttgttccatattattttaaccaaccaaagtatcttgccacaaagaaccacagtcaaggcacaaaggtaagaggaggagagtctggacaaagtcctgttgaggtggtaggaggaactgaaatgccctcagtaaactgcagattcttctctcagtcatttctgtgaagattacccgaatagcagataatccaaattggtttagtttggtttggcatgcatcacttttaccttttatgacaacatatgtaccctataagttgtttattttggcctaacatgaaaatcatttacattctctgaaaagggaaatggcaaagggtgagggatggcaacaaacaagcaaaagcctggcttaacaccagttccaggccagatgcacacaagccaaatgaagttgcctatctggcccttccctatataccaccctcttccaccctgtccttagggtgagaaagactccataaccttttttcctttctggcttggacaccttggccaggtaagaaggctgacaatttgggagtagctactaagtaacattctttaaggccagggctttgtatacaaatacccttctctttcctctaatacctgactctcctttccaagttcccttgggaacactgtgaaaggatagatgtgtcttgcaggatctcttccactttgcctctggagaggagcaaggtgactgactattggtaagaggangcataagcactctctaaggtgaggaggactgggtctcctctcttctttaancnctctctcccaattctacttggcatctaccatatcgcactaccttgaaaaaacaagaactcctcctcatatctcagactttcttaccactcctactctactgttattcatcctccctaaaatccatacaacataagacgtatacttagatcaagtcaacttatactaaacaa

SEQ ID NO: 133676 - DNA, 1271 bp, Homo Sapiens
tttttttaggaaaaactagtgacactgctttatttgagaacagaataaagagcgtggctggaactctgccaagatggtctttaacattctgccctaaccagggtgttaactttccaacactgttggtgtatggctgagtgctgcagatttctcagagaattagcaaaaggttgaaataaacgctaaagatgagtccgtaagaaggaaaataagctggttttctttctgttccttttaaaactctagccagaaatactgcccaatgcataatgaagactgtacacagcagcatcaaaaaggctatttacaagagattttcttcaacagaatccacttgaaagcactgagaatttgcatcttagctaagagcagtttaccaaggaacagggccatctaagtgcctaactagcatttaaagttgtcaaggggtggggatgtgcaaattaagcagcaaaagattattatcttgttttgctttaagggaaagtaatagtggtcagaggggccagttccaagggctggtccaaggggggccgctggtcttggtactccgccacatgcccattccggtggtggccatactcaaacttgatccgcagctcgccaatcttagattggggaaggatatctgggatccactcgatgatgaaaggtgttggctccttttgatctggggaagtgttgccaactttgagaaaagtttttagttccaagggtcgcagcactggttgtttttctatacgaccgtaggtttctgctatgctttctacttccactttagggcatttaaatagctcataagtcccatctcggttctggataaagctacgggtgatttccaagggcatctctggggtatctaagatttgtttaacttgcaggatattagtgatatgccaagtatacttggaaaaggttcccagtggcaaggcatctttccgaacaaaagctgtggtggagttggggagccgtttttttgcacttcctatagatattctttgttgcagggcatcaaaaaatgactgaggaatgtggaacaccaatggttctggtttgccatcaaactgatagtgcatggtttgatggatgcgttctgtgacactggccagccagtcttggaaggataaagtcacttgtgcctcatctaacagctgaccacaggcctgcctttttaacgaggaagcaaccacaggctttttcaggccacttttccttagattactgctcactgcatcttgaggcagtggagaactgttcatctgtgcaccaga

SEQ ID NO: 133677 - DNA, 592 bp, Homo Sapiens
gcggccgcgtcgtagcaggcgtgtacgcgtcgccagtaaccgggcggcggcagatgggcggtgcgcagcgcgtcgagctgcatcagtgccagcgcactcagcgcgcgatgggcgatcaggccggtctggcccaccactgcgccgtcgccgtcgagcgcggcagacaggcagtgcagataggcggtgaccagtgtgtcccacatgccctgattggcatcgaaggccgctcgttcgccggcggacagcggcagtgggcggccgacgaagcggttggcggtggcggtctgcacttccagcaccgtgtcgcgcagctcctcggcgatgcgcagccgctcgccggcgctgatgctgcagcggttcagcaggttgagctgaccgagcagacgggcctgcgtggagagcggctggttgctgtccacgccctgcagccagtcacgcgcagcccgcgcgtcggagaactccggcaggtgcgtgctgtggctgatggcgggcagagcgaaggcgtgcatgaaatcggggggcgatgtaagccaatgtaaccaattctatgtgtacgccgcagtttgcgcgcgggcctcgtgccgaattcttg

SEQ ID NO: 133678 - DNA, 459 bp, Homo Sapiens; identical to SEQ ID NO: 119602

SEQ ID NO: 133679 - DNA, 1102 bp, Homo Sapiens
catggtaaagacagatatatttatttcatatgacagcacgtttcacaggatatgtacagaatgtctgtgtaccactgactttaatactgtacttctataaagtttatagttataaatattgtatgccacataagcaataaaattcttacatataaacagcaatctaatatagagaacacagagttcacaaagagatccttagtgtctaacttctgctctgcttttaacagaactagtaaatatttaataatacatagaataatggctagttatttgcagcatacctttaactttcataactttgtgcattttcagcaacttgccaagtataattttcctgataaaggctgggctgctgatatgtatattttagacagtagtttatattcaataggaaacattgctcacagatctgcaatttgcactagtgaagtttacctaacaatgaattattttgctaatggagagcaaataccatatacactagtcacatggatgttaaagccacagtttcaacaagttaattcacattttgaagcaactgcttatagtaatactgctgtttaagacgctactgctgaaatgattagaacctccaaaaagcacaatataaaactcacaagagttatttctaacagcaaatcttggctgttaacagagaagattacttctataaatatagtattttgataacatttgagcatttagaaaaatgctttttttctaatagatttgctttataagtgcagtgcagtttgctgtgcttttaacattctacatattcgtagccatgaacgctattttttgatattccctcaatgtacatctttaaaggttaagtgtggacataggaatttaggtggacatatacaactctttatataaaaggaatgttaatgtaagtcttaatgggtaaagatgattgtaactgaaactgacaaagaaacaactattgctcaaggagttttctgattggtttacttaatgatatcaaaatactacattctgtaaaaattctgtgtacttcttcaaaaaattaataaaagcgggatcagttgcatattggcagtgcaggagacaaaatccgcagctactttgaggt

SEQ ID NO: 133680 - DNA, 822 bp, Homo Sapiens
catcagcacgatgcccgcggctgcgtcgcgaaatgagctggcgtggcgccgcccatcagcgccgccagttcgtcgtgcaccacgcccaccagcgcctggcccggcgtcagggagccgacgacttcctggccgaccgccttttcacggatgcgggtgaccagttccttcaccaccggcagggcgacgtccgcctcgagcagcgccatgcgcacttcgcgcagcatgtccgaaatgttctcgtcggtcagtcgcgcctgtccgcgcagcgtcttgacgaccttggcgagccgttgggtgaggttatccagcatgaaagagcggcgtgcgccttgggttaaactgaagccaatgattctaatcgaactgcttccttccgccctctacgctgcgctcgccttctggttcatgcgcccggcgcgagcaggcgcacacgccgcggccggcggtgtgcggccggcggcactggccgcggcactgctggtgcacgccgcggtgctgtcgctgcagatcttccctgagggccgcatgcgcttcggtgcgggagacgcactggcggtgatgacctggctggcgctggtgttctactggatagagagcctgtcatcgcgactcgacggtctgcacatgctggccctccctgccgcagcgctgtgcgcagcggtaccggtgatctggcctggccggcacgacatcggcaacgccgacaatctgcttttccgcgcccacttcgtcatggcgatgaccgcctacagcctgttcacgctggcggcattgcacgcgatgctgatgtcggcggtcgagcgcaacctgcaccgcggccgc

SEQ ID NO: 133681 - DNA, 701 bp, Homo Sapiens
  misc_feature (16)..(16): n is a, c, g, or t
caagctacagaactcntagtctccccaggctcttcagaagtccctccagcaaacctgctggagtagccacctcctcctgcccaaactctttaccctgtgggggttggcatgggaagatggtggcaggtataggggaagacatggccttctgggtcaaccttgggtttggaccaccagttctgttgcttaccttctcgctgtgtggccctgggcaaataacctaacctctctgagcttgttttcttcttactaaaatgggcagtatagcgtatcgtgggattgttctggggaattaatgtctataaagaaccccacagtgtaccagttcacagtcggtgcttaatacgtgggagtttccctgcgacctaagtgtactggccccctgcacgtagctttttgaacaccatctgtccagggtcaacagtgaatttgttattactagggggtcggaaggagagggcgaggagggagtttggcggagcctggggccggtacagctgaagagaggcgtctgtcttccgaggtgggtgggtgggtccaggaggcgccggccgcaggagccttagcggggagccgcagcctctcccggtcccagagccgcccgcgagcgcggacaccggccggctcctggagggctgagcacggcctgcagcgaccccgcgtgccgggagagagaaagcaacctcctgcggcgcggccgc

SEQ ID NO: 133682 - DNA, 1087 bp, Homo Sapiens
  misc_feature (1025)..(1025): n is a, c, g, or t
ttacagtttcaatcttatatttattctcttgtggaatgctaggtttaatgttacagtatggttgtcaaagctaatgaaatgtgacaaatgtctaaatgctgcagaacagtataattttaattaaacaaaacacctgttattgtacagctgaggtctgatggttgttaaactgatgcctatgtgtatggccagccacaaaccttggggatgtttattacctgtacatatatatacaaatatatcccatacatatgtatgcacacaggcatgtattaatttatgcgtgaaacttataaaattatatatacaaacacatacatgcacatctatctacatatacctaccctcaccattgagtaatcagcctcatgcccaattattattgctgcccagtataactacatgattttagtgccaataccaggcacctttttgggtgcaggataggtacatctatgcatatagatatgcatattcatgtatgtttgtgtatataaagaaattctctctcccttttatgcttcagccatgcattactacaataaacagtctttccactgtaggtgttggaattctaaacagtgtaaaatctatttctggaaaactgtgtatgttcatagttacaaaaaatatattatatatatgattgaaacctattgagtacatatgttatttgaatctggctatatcgtagccattagataaattaaaaaaaaccaccctctaaataggatgttatggtagccttaaatataccattacctgtatttagaatagttgatattatatcttaaaagttgaaaaaatgatgttaaagatttgaaaaacactatgcatctgcattaaatatataaatgtttccaccaagggcccgattaaattcattgtctgacattttcatgttctaagactgaccaatatcatagtcattattcttatattcttaaaattatggctcattaaggcttttatagaaaaaaagccctattttaaatcaattataaaaacaagttctatttaaaagnaaaaacatatacaaacactaaagtactcatggatatcatcctgtacaaagtgactaaagata

SEQ ID NO: 133683 - DNA, 824 bp, Homo Sapiens
tttttcacactttacagagtttgtttaatgtacttttacagttttaaacacatttgcagtaattaacattttttccttagcaaactgaagcattatgtagggctttgggaaatacatgggggatagctatatatgcaggcatgcacccatgcacacgtgcaccgtgctcaagggtagccagggagagccagggtgtattgggggaggatggagatggtggtctgggatgagttttgccccagcacacttccaggagatatgctgcaggcaaagccaagaggcaggaatttgtgagtcacagtggattaggtgattcctgaaacctcaaggagtttccccctctctgtaactctgctcgatattcatcctgtaagatgcatgcctgtccctacctcagatgcacacatgcaactccctcccagacaggctgaccatgccctcctctgagcccccacctcatcccctactcacttctgctatgtctcacccatcatgtagggggatgtcttcctctacacaattggaaggcagggacagagtcttctccctgttatcaccatcccctagcagtgcccaggacatagatggtgctcaatgaatgctggctggttggttgaatgactgtgcctcaaggaagcccatgtttggggatagatgaggagaacttctgccagatcgatgaccgcaggaagaagctggtgagtgggcacggcactgcccggggatgccttgctgctgtgtgccctgtgtgggttcatgctccaggaaggcagagaggaaagggcagagggcccttgggcttcctaactgtgtggacatttgtt

SEQ ID NO: 133684 - DNA, 1036 bp, Homo Sapiens
  misc_feature (145)..(145): n is a, c, g, or t
  misc_feature (358)..(358): n is a, c, g, or t
gggaacctgttcttttaacttagggagcagctggtctaaaaccaccatttttgccactgttggtactaggatgcatatctgtgtataaaggtggaccagtttctgctccatcaaagagatatggatgattacaacattttctcanctgcattaggatgttcaataacctcattttgtccatcttgcctgctgagttgagtatatctatatccttcattaatatccgagtataccattccctttgcattttgctgaggcccacatagatttttacttccttctttggaggcaaactcttttcaacatcagccttaattcgacgaaggaggaatggacgcaaaaccatatgaagcctctncaactagtttttgatccccaaggcagttgtttgtatcaaaccaggaatcaaagtcatctgctgaattaaacacatctggcaacagaaagttaagaagtgaccacagctcatgcaagttgttctgaagaggtgttccagttaataatagtctatttgtagtcttgaattccctcactatttctgacaacttagatttttcatttttgatcctgtgagcttcatctattactaagtatctccaattaaatttttttgaacacagacttctctttaataagcatttcataagatgttacacatacatcccattctcccggtaataaaacgtctctgacaaaagcagctctttgttctttatctcctatcaaacaaacagatctaagtgttggtacccatctcttgaattcactcatccagttgtgtaatgtagacttaggaaccaaaaccatatgaggcccaggaatgtttctataatgtttcatgtacccaagaagagaaattgtttgaagagtctttcctaggcccatttcatctgcaaggataccattgatgccattctcatacaaagaaatgagccagtttaatcctcggacctgataatctctcagtttaccccattttacatacgatggagagtcttcaaatcgagtgcaaacattggtgctttggagcggccgc

SEQ ID NO: 133685 - DNA, 899 bp, Homo Sapiens
  misc_feature (56)..(56): n is a, c, g, or t
aggtctcatggtggcccccgggaattcctctcccataggggaaaacacaagttttntggccacccatgtttccccgttcaccctaactgggggccccggcggccgccaaaacggaaaggggtttagaaaaaagtttctcgagggggcccgaagcgggccgaccaaggtttttcagaatctccgaaggccgcccctcccggggttgggcaggcttgtttttgccatcttccccatcagcaaacattgaaccagggcccactcccgcctgccccagactggagacttttaggttataaggaataattcttccttcatgagccagcagtgggtaccagagtctcttgggctcagcacctgtttcctttcccacagaagggggtgcctgtcagaggcctggagccaaggccacctgtggctggacagcagcagccccctcagagtggggagcccacttctgccttctgcacgcgctcactcctgtgggtgccatcgcagtacgggggcctctgagtggccttgcaggtacagagtgccaccatgcgggtctcttgggccttgaacttgagtggagataggccagtgcgttggaagaagtgggagccgtcacagaagggctgcttcttgctgcggccacacacacaccacctgtaggttttccctgccaccagctccaccttgatgggggtcttcagggccaccacggacctggctggggttctagggaaccactgggccagccaggaggagatgtcccgccgcgggttcaggtcccgggcaccacgcgccgccggccgcaggatcgcccccgcgccgcgcaggtcgccggacgcggggtcgacgattcggagaatccgaccgtccacctgtttttaatgcaacctctccaaccccctactccc

SEQ ID NO: 133686 - DNA, 877 bp, Homo Sapiens
gcgcgtggctccagagccgctgcggcagtaagcaaaccgagggcccagatcgcgccgcgatgggtattcacgccttgggtggtggcgagcatggcttgctcaccttcgcgcccgatacgcccgagggcttcgcgcaagggcaaacccacttcaccgaactcaagcgccgcttcggccatttccttgaacatcggccacaacgacagcgccgaggcgtgcatcaggcccaggtgcaaatcgctatgggcgccattgccgcgacggtctaccaatgcgggtttgggtgacaggtcagcctcatcaatcaaggcatccacagccatatccgccaggcgatcggcgaggctcagttcatgcagtttgagggcgcgcatttaccagctcctgaacttggcgggcgggttatacaggccaccggaccagtccaccaaatcggccacgctcttggcggcgagcagctcgcgggtggcgtcggtgcggcggatgccgaggtcttcgggcaaggcgatcaagccttcgcggcgcatgcgcgcagtgtccttggggttgtggcgcatgccgatggcggtgacgcctgcaacggcggcgatcatcgcctggcgctcttccagcgagcgtgccttatacaaataggcgatgccttcttcggtgagcaggtgagtgacgtcgtcgccgtagatcatgatcggcgccagcggcatgccgcttttgcgcgcgacctccacagcgtcgagggtttcgacgaaggtgggtttgccaccttcctggaaggtctcgaccatttgcaccacgagctttttgccgcgttccagcaaggcctccggcgcgtcgtcgtggcgcatatcgagccaggcaggcgtaccgtgacggcggccgc

SEQ ID NO: 133687 - DNA, 445 bp, Homo Sapiens
atttcacgaaacatttattctagttacacacaaattggctctgggttgctaagtacaatgtattttgtattgttggctacagtttaaaaaaagaagtaaaaaagtcattgatctagaggcagctgtgactgtagtaggtctcatgatgctttatccaaattacacttttcaaaagttacgtgagaactgatcaacacaaatttttttcatgtatacacacaggaaatacataatccactgtgaacaccacacatttcagagtgttgtgccaaaaatagggagctatcaactatttctgggtcaagatcaggattaagtggatttctcgatgtatagatgtatttctgttaccaaatttacatgggcaggttgcaggagaaaacagtatgagtagttttttaaactaaggcataacgtatacagtaaagcctacagccgcggccgc

SEQ ID NO: 133688 - DNA, 1515 bp, Homo Sapiens
aggtttcagggcacagtttattaaaaaattttaagtaactgcaagtcccacccccgattccagtatctgtcccctccatatctcaacagaggggctgtctatcatatgtgggtgggatgggaaaggaagaggtatggtcctactatgcaagttactctccagccttcagcttgtgctgtcccaaacctgagtccctctgaccaaggtaagttgttcagagagcagtggtgccaccctgacagcactttaggacagtgccatctcctgagatcactagtcacattccagtcattgtgaccaatatattagttatcagtggtggtcaaaggtagaccagaggcacaggctgttgagggaagaccctctattaaagaaggttctaagaatgaaacatggaatgctcaacttgttaaagtgctcagctacaacattaaaaaagtgtcgggaaggtgtctattggtgagaaagcaaggtacaatctgaggggctcctggaaagatacaattttaaaagtacacaaaaggacttctgcttaaatcattccagcaatgagagaaaaaagcttagagcttagcctctgaattacttaagctgtaaatcaaatgtatctctaggtggagaccaactccttcaattcctcatggagacggaataaaacatttaccactgtcttttgctctaactcttctctcactaaataattgaaaatctggtttccttaatggacatcaccaccacaaaaatgtccaccatgggcaagtgatcaacttaagtatgaatggcctataaaccactttcctgcagggttggctagccaaaacctggagtgggacgagaaatttgagtttccacatctgccaggctgagaggcccatatctaagaacaagaggtccataatgtatctattctcttggcatgattacaagatccatgactggtgtgccatggcagtgagggaaaagtatccatcagcagcagtggttatcttgttctagaagctagtgtatagcctcagcagtcacttgtaagtccagtgggcagtggcccagccctggcccttgcataggtcccggtggcggagaaaacaggcatggactcggaaccgacggccacagtggggacaggcatgcagggctccagcatgggtcttcatgtgctctgtcagatggtgcttcagcttgaagcgcttgttgcagatgccacagccaaaaggccgaaggctgaaggtcagcatgatgtgccggtcacgctttggcttcactgcaaaccgcttcccacacaggcaaccaaagcgttttccatctgcagggggtgtcccccctagcttcacaggcccatgcacggcctggcctgctcccccaggtcctccaccccctgacaggatttcattcccatgaagatccactggtttccaggatgaccccctcccccagatgttggcctggccctgaagcaacaagaaccctagctgcccagcctcgtgccgaattaaccacccagcctcgtacctagcc

SEQ ID NO: 133689 - DNA, 548 bp, Homo Sapiens
ggcacgaggggaccggttgcagtcgatgcagaccctggtgcgggtcgtggagctgggcagcttttcggccgcggcgcgcgagctgggcagcacgcaaggcgccgtcagcaagcaggtggcggcgctggaacatcaactcggcgcgcagctgctggcgcgcagcacgcggtcattgaagctgaccgacgccggcgagcgctacgtggagcaggccaggcgcctagtggccgagatcgccgaggcggagagtgagctgcgggccggcgagcaccggttgcagggctggctgcgcgtggcggcgtcgggcaccttgggtcgcatgaagctgatgccgctggtgcgcagcttccaggcgctgcacccgggcgtgaaggtggatctgcagctgcacgacggcttcatcgacctcatcgagcagggcatcgacatcgcagtgcgcatcggcgagcagccggactccagcctcgtggcccggcgcatcggcacgctgcggcgctcggtcgtcgcgcggcgcggctacttcgaggccatgggcctggcgcggccgc

SEQ ID NO: 133690 - DNA, 1158 bp, Homo Sapiens
cggcgatatcggcaatcgcccccacaaatgggatcaggcttaataccatcctgaggttttcacgggtaaagacctttccggaatcaaacggataactgcgtcttctctgtagcgttgtcggcgcgttggcgtattccaacagcgtctcgcgcttcacatcgaacgtagcgttgacgatggccctggctatatcgttggtttttttcgacgcccaactgttaggcacagcacctggcgtgctgctggcccacctcgacgaactctgccccggcaacgtctctccgaacttttcgataatggccttggttcgcacgccgggacgcagctcgctgcctgtctgataggcctgaaggtcaaaatctacttgtgttgccttagtccgcaggtacattgggcaaaaggaccatacgggaccgtccccttttcaatcaccccgtccaactttaacgtagagaacagcaagttacgcttgcacactttcatggaccccgggaacatttcgagacaggtatagcctccctctggccccttgtttttgtagcgcaacaacacaccctgcttggccctcttttcgaccaccttcgagtcgctcccctgatcctgtgccagggattccccggtttcctcacgcaacgtgaaaatctccacatcgccggactccaaccctgtgcgtacatccagcggtgcattggcgatcatcagtttgatcaccgtttcctgtgcgcgacgactgtcggccaggtattggtccactgccggcgctaccagcggcttgatacgtggaagcttcttgattctttcttcaaaggtttcctgggagatggtggggtgcgtgaatgcgtatttcttctcgccaaaaagtcgcgtattcacccactgctgagccacgaaaaaagggtcctcctcaggttctccggcaaggatcaactcggtcaacaacggggtacgtgtttccaggtggccctcgtttctggcgtcatacggtttgtcggtcaccagcgtcaacttgatcttggcgatctcatcccgcgtcatttcgggaaacaacagaaccaattgatcaatcaataggctcgtctgcgaaggtggctcacttgtcaggctctggaaggccgcgacagtactgctctggcggtcagcaaacgcttgcgcggccgc

SEQ ID NO: 133691 - DNA, 1082 bp, Homo Sapiens
gctgctgcagccgctgccgcaccggctgccgaagtgatcgaggctccagccccggttgagcacaaggccttggaaacagagcacgagcctaaacccctcgtctgattccatccgctactaaaaagccccgcctgagtgatcaggtggggcttttttatgggcgttcaacttttgccttgtggagatcaaaggtgggagctggcttgcctgcgatagcatcaccgcagcgtgtctgacacaccgaggtgcctgcatcgcgggcaagcccgcttgtgtcttgatctgggaataaactctgaggtgagagggggtggatggcaagctgtgagtccgcggtgctagaagcacgagtgggagcaaagctgccatccacctttccactctggccgacaagcccgaacagttggacgagcaccactcgaatcacaagcgtgggcatagccagagcactctcactcctgagtgtaagagggttttgccatgatttcctgggtcggcatcgatatctctaaattaaaccttgttgtctgggttcaacctcagaaagaaggcttcgagattccaaacacatctgaaggctttgttgagctgatcaaacgattgagctgctatgaggttggccgggtattgctggaggccacgggaggctacgagcgccaggtcatggcggcactgcaacagacgaatttccaagtgctccgaatcaatcctcgtcgggccagagccttcgcggtggccatgggcaaaaatgccaagaccgacccgattgatgcggcagttctggctgattttgccgaagtgctgcatgggtctcacgaaaaggtcatttctcctgagcgcgaagctctgcgcgaactgatccaattacgtgagcacttcgttcagcagcgcgacgacaataagcgtcgacttcagcaggctcagttgcccaccgttgtcagcgctaccaaagatcatattcgctacctgcaagcgcagatcaaagccctggaaaaacacctcgttcagggcatgtttgatttggatgcagaaaaggccaggcgactcatgtctgtgaaggggattggcaaagtcgcggccgc

SEQ ID NO: 133692 - DNA, 1328 bp, Homo Sapiens
  misc_feature (353)..(361): n is a, c, g, or t
  misc_feature (542)..(566): n is a, c, g, or t
  misc_feature (654)..(664): n is a, c, g, or t
  misc_feature (985)..(997): n is a, c, g, or t
  misc_feature (1241)..(1258): n is a, c, g, or t
caacataaataaaataaaactttatttttaataataaaattaatgtttctagtaaggaaaagacagtatgtcattcctttagcagtacaaacaatcttttatccaaaagaatacattgggttttattgtgtcatttgtctgaatacagacacagtggaatatctaaatgataccctgctctgaactccaagttgaaagtaagtttttattatacttgagggaaacaatgggttcagctgcttattgcaaggagcaattgccaagggagagttaaactcaattactgtaaccatactgaataaaaaatactgccaagaacaaaaatacgcctgggtaaagacagccactgaatnnnnnnnnntcgacataaagcgtatcaaatatttatttatctgggcaacaaaggactatgatacattgacaggcatggaaactactgccagcacaactcaatacaatgcaactagaactgcttccaatatggccagtgaaaatacagaataccaggtggtcccaaatgtttgaagttctttgaacagaannnnnnnnnnnnnnnnnnnnnnnnngaaaattccctaacccttggtttaaagacaatattcatttattgctcaaatgatgcttttaagggaggacagtggaataaaataaacnnnnnnnnnnnctccctacaatacatagaagggttatcaaaccactcaagtttcaaaatctttccagggtccaatatcactttttttctttcggttcaatgaaaagctaaatgtaataatactaattatagataaaattttattttactttttaaaaatttgtccagctgtttgtcacctttaacatgctacaacagggctaaattcatgaatcccagagaaaaaaatcccccaaacactggatttctaaatcagtaccatgaaccacatgaagaactaatagggaagattcaaaacccactaaacaagaggtaaacaagatcagataaatnnnnnnnnnnnnnggcttaaaacagactcaccatatttacaattcccattaaattacacataaataaatatatacagagacgtgaacactgattcccttatataactgcgaatcgtgttgccagagaaagttcaagttggtcgctttaccttaaagaggaaaaacttctacaactgaagacatgacatggaacttcgtgtatttgtgttcaagtttattcacaatactgataaaaatgttgtcatcatcttttggcnnnnnnnnnnnnnnnnnnaagtatggctacaatctgaactgaagtatgtaagggaaggtggtgactcagtcccatgaagcgcatataa

SEQ ID NO: 133693 - DNA, 1027 bp, Homo Sapiens
  misc_feature (231)..(231): n is a, c, g, or t
gcgtttcaaacccttttcttgctggtgcatttctcgtccctattatttttatgaggagaagatcgttcccacgctccgcgtgggaacacatcctgtgacgctccgcgtcacgactcttaaagcggacgcggagcgtccagggcaacattcccacgcagagcgtgggaacgatcgtatgtcagtcacacatgtttcaactgacagatagctatcgcaggcaagccagctccncacactgggttgcgttgcggttacaagctcggcaggagcttggccggcaccagctcattcaggcagcggctggcgagcagttcgctggcggcattgatgtccggggcaaagaagcgtccttctcataaaacgccactttgtcgcgcaggatcccgcgggctttttccagcttggtcgaagtcttcaagccatcgcgcaggtccaggccctggcatgccgccagccactcaactgcgagtacaccacgggtattttcagccatttcccacaaacgcttgcccgcagccggagccatggacacgtggtcttcctggttggccgacgtcggcaggctgtccacgctatgaggatgcgccagcgccttgttctcactggcgagcgccgcagcggtgacctgggcgatcatgaaaccggagttcaccccgccattgccgaccaaaaacggcggcagttgcgacatgtgcttgtccatcatcaacgagatacgacgctcgctcagcgagccgatttcggcgatagccagcgccatgttgtcggcagccatggccaccggctcagcgtggaagttaccgccggaaatcacgtcgccctcggcagcaaataccagcgggttatccgacacggcgttggcctctaccaccagcacgtcggcagcctggcggaactgggtcaggcaggcgcccatgacttgcggctggcaacgcagggaatacgggtcttgcaccttgtcgcagttctggtgcgactgggacacctggctgctctcgccgagcaggtcgcgataagccgcggccgc

SEQ ID NO: 133694 - DNA, 699 bp, Homo Sapiens
attgttttaactgcctttaattcctaatagtgactatgccagagcagcctattttggggtggcaccttcttaactctgcatactgtacatatctggcacacatcatttaaagtaaatagacaggcttgcttactttttactcaagtgcaacataattcagaaaagtgcagacatgctcagtagacagctccttctacacgcctgttgactttctttcatcaatgacatattggtcggctcttgctaggcctgtgttgccaaaacaactcgcaagcctgggtcgatcacagcaaccaagtttcccctcccactcaggtttcttgtcggccacgggtggctcagcttctgatgcctccttcgttctggggtccaggctgagcaagctgtggctctctggaacatgccgttctcccagagatttcaccggcatccctgggctgcctggtgccacatatgtgaaaacagtcatttcatgtaagcttgtccactcagtagcatgaaggtgggagggtgtcttagtcatagatggggtggcttctgcagccctgggatgtccatttggttctctcgtataggttccaatcagctgtggaattctccatccagagatcccgttagacggcatttcctgcctctctctccctgctggttctggtgggccctgggatgggggcggtgatatcctgtgggcaaccgggt

SEQ ID NO: 133695 - DNA, 1398 bp, Homo Sapiens
  misc_feature (822)..(822): n is a, c, g, or t
tggctaggtagaggcctgggtgtgtgaatcggcacgaggcttctgaagacccctcctcaatttcttggcctcacttattgcccaaacccaggagttaggggggtacgggtgaaagaggggtacacaggggacccagcccttctcttcttccccaatacctggctctaacccagccaggaaggtgtaaacaataagggtgattggggtccctgtcgcccacccccggcaatcctatttgcttacctgtcaccctgaagcctgggcttggcctcctccagccccccatctccgtcccatcctcccatggtgtctactcctgtccctgagccccgccctgtggtctatcctgtgcccgatttccagtgaaccccatgaagctgatgggtttgcaggaaggcctgaacatgtgcaccctcccagggacactggatgagctgggagccccggggaccccatggggtgctgtaatcatggaccgtaggccatgtgatgggcctgaagtggaggctgctcagcacagagccctttctggtgcctctcgaactcagtacgatgcaagttctagacacacagatggcctgtggaggcctctccctggtgtgggcccacaggtacttccatggttgactcctggcttcaggaatcccttcctccctccagaggcttcccagtgccctcggtgcccacgcctctgcccatctggaggcctgagtaaggagtggctcagccccacgttcccacactgctcctgctctttgccctgtatcccatgaggctaggagacaggagtcctgggtttgagccctgcctccccccactgcntaatgtgggaacccaagcaaggcccttctaccttttgggcctcagtttccatgtctgtaccacaagagggttgaccagatggccccaggttttcctttaggtctgacatcctgagggtcattcatcccatgcccagttccccccatcctactcctaacagatgtgaccctacttgaggccgccttggcttttgggtcaccctgtctcatcccatcaccccaaacataccctagtccttcagcctggggctctggcatctgagcccgagctcctgcccctgctgtgggaaaggtggggaagaaggggatctccctcccgggcccacccagctgcccagcctttgcccactcggggagcagatcatgcatgccaatccctgttgccgcatggagctcctcagcccactgacctctccgtgcctggtgcaggccaggcccccgtcttccgcctgcctctgcttccccgtcatgcatggtggtggtgtttctacggtgtctggttctgtgcccgtctctgagacagtctctgtgtggaatttgccttaaactgaagtaaatttggttcttttagtaaagc

SEQ ID NO: 133696 - DNA, 487 bp, Homo Sapiens
gcggccgcgccgccatggccctcggggtgctgctgtcctgcagctggttcgtgctgctgccctttgccgagcaacgcctggccagcggcacctgggcgcgcgactacgcccggctcttcgccacggcctggcgccatgccttccagttgctgctggcgggcctgttcgcggggttgttctgggccctgctgttcctgctggccgggctgttcaaggtgctgggcgtgtcgctcttcatggacacattcaccagccgcccgttcgtctacatggccaccccgatggcgttcagcatggggttgtcgctgtacgcggcgcgggaagaagcgttggcgggtttctggcgttcgatgctccaggtgctgggctggctgttgccgctggcctgcctgatcgctgtgctgttcctcgtggcgctgccggtgcgcggcctggcaccgctgtggaagaccgggcacgccacggcgctcatgctcggcctcgtgcc

SEQ ID NO: 133697 - DNA, 781 bp, Homo Sapiens
acccgtgagagcgagtccgggtcagcgatgagccccgtgcaaactcagctcgatgggcgcggctcccagaataaccagggcagtagtactcagaacagcagcggcacgcccaccggcagtggtgtgcagtcgtcgggctacgaccagtcgagcagttcgggcagcagcgccaacagcagcacccccagcgatcagaacactgcgttcagcgccggtggtgtgacgatccaggcggacgctaccaccaacaccttgctgatctccgcgcccgacccgctgtaccgcaacctgcgcgaagtgatcgacatgctcgaccagcgccgcgcgcaggtggtgatcgaaagcctgatcgttgaagtcagcgaagacgacgccagtgagttcggcgtgcaatggcaggctggcaacctgggcggcaagggcggattcggcggcgtcaacctgggcggcagtgggctggtcaccaccggcaaaaccagcatcgatgtgttgcccaaagggctgaatatcggcttggtcaacggcagcgtggatattccggggatcggcaaggtgctcgacctcaaggtgctggcccgcgccctcaagagcaaaggcggcaccaacgtgctgtccacgccgaacctgctgaccctggacaacgaagcagcgagcatttttgtcggccagaccattccgtttgtcaccggcagttatgtcaccggtggcggcggcaccagcaacaacccgttccagaccgtacagcgcgaagaggtggggctgaagctgaacgtgcggccgc

SEQ ID NO: 133698 - DNA, 774 bp, Homo Sapiens
  misc_feature (652)..(693): n is a, c, g, or t
ttttttgatcttttatgcttatattgcatcaatacacaattcaagggaattctggtcttccctcccccaactcacggatataatttataccctgatatccacaacttccagtcacccccttggcattttgtaagtccaggaatattcaagtcggatttagaattggaatgatagaagatccagtcacagaccccatctgttctttgatttttgtcttttggattcctcatttttcctgattatccactcacaagatgactcagttgggaacttgaccatgattgtagtgctttctggctgggctccttcttctttggattaaatataacttggaagcgtcttttttaaaaagttcctttgtatacaaaagttcttagaaaagttgtaaacgcaaaaatagacaatcagcaaggcgagtaagtaggtccggtggccgggctgcgctctcttccactcagcagcgtcccccaccactgtcgcggtcgcctcgagtgctaccgtgggcgcaggggctgtggccggggcggtgggcgggcggttccgcccaggtgagactggctgccgtggcgcggagctgcgaactggtcggcggcgcagggcgcggactccggtgagttgtgtggagcgcgcgcggccatgggcgcgggccacnnnnnnnnnnnnnnnnnnnnnnnnnnnnnnnnnnnnnnnnnnactcggcggctcccggtgccgccgccgcccgccaccgcccggacgcggggtcgacgatatcccgaaatccggccggtccac

SEQ ID NO: 133699 - DNA, 1103 bp, Homo Sapiens
tttcagataaaatattataggtttatttaaaacttaattctcaccttgagtatgcaaaatacaaactccacaaaatgttcattttactttgtagtttacaaatatacaaaatagacgtttgcttaaatttatattacatatttattaaggcaaggaactatatagaaaaacacatttgttctgcttaaggcatacttgggaataaaccattgtacaaattattgcacatctgaaaccacagtgcataacagactgtctgcataaaaatgctaaagaagtaaaccaggtatattacctgacttaggtcataaatgttgatcggaagacaaatatagattttccttgtcaaagtatgcagcagtttgaaaactttggcttccttgtttggtacctttagaaccaagactcaccaagcaccatcatttaggctatttaaacatgttttctgtacctgaatttcttcctcttcttctaacatcataataatggcttttagaaggtaaagagaatacaaggtgatcttttatgcttatattgcatcaatacacaattcaagggaattctggtcttccctcccccaactcacggatataatttataccctgatatccacaacttccagtcacccccttggcattttgtaagtccaggaatattcaagtcggatttagaattggaatgatagaagatccagtcacagaccccatctgttctttgatttttgtcttttggattcctcatttttcctgattatccactcacaagatgactcagttgggaacttgaccatgattgtagtgctttctggctgggctccttccctcatcgggaagacagtgtgaaaagtaaaaaatactgaattctcttctggcagtgtgggtcatatccactgtctgggatttaaaaatgcctcttcatgtgtaaggcgaggtggtccgacctggaaaatgctcggtcgcatttttggcactggaacgggcggtgccccgtgttgtttacggtagtgcctggtcagttcatctgagcgggcgaatttccatccacagccgtccccccggccgtaatggccgaattcccgggcatatgtccggtaccgtcgactg

SEQ ID NO: 133700 - DNA, 1207 bp, Homo Sapiens
ccgttctccagcagctcaatgcggttgcccggttgccagccgtaatccaggtcgcgggccttggcatcatccggtggttggtcggtggcaatgtgttccacggcgacattcatagttcgatctccaccgacagcggcacgtggtctgacaggtgagaccagggccgcgtcgtcagcgccctggggttatgcaccttcaggttacgcacatagatgcgatccaaaggcagcaatggcaggcgcgccggaaaggtgcgcgccggtttgccatgggcttcgataaacacttccctgagcccgctttggctcaggtcggccttgtggcgccagtcattgaaatcaccggcgacgatcagcgccgcgtcagccggaatctcggcaatgcgctgctccagcaaacgcaattgctgctggcgatgcacctcgcgcaggcccaggtgcatgcagatcgcatgcacctcttggccgctgcccggcaagcgcagcacgcaatgcagcaggccacggctttcatggccgctctgggagatgtcgaggttgtcgtagcggatgatctggaatttggacagcagcgcgttgccgtggtcgccatgcgggtagaccgcgttgcggccgtaggcgaactgcggccagatgctgtcggcgaggaactcatactgcggcatcttcggccagtcgctgtaacgctgcgggtgccgctcatgggtgccgtggatttcctgcaggaacaccatgtcggcgcccacgttgcgcaccgcctcacgcaactcgggcaggatgaagcgtcggttcaacgcggtgaaacccttatggatattgaccgtcagcacggtgaagcgggtgatggcggtgctgggcgtaacgggcacccagtcggcaatcgcagccatgatcgctcctgtggataagtaaagggtgaagcctgttttattggctgatgttattggctgactgcgggtgttgacggaaagtttcgagtgacctacaggcggtgctgttaaccgatcgttcccacgctccgcgtagtaacgcagcccgggacgctccgcgtcccatggacgcagagcgtgggaacgatcagcgctcaaacccgtcagttccttacagaccctgctgaaggagcccggcgttttgctgaatctaaagactgcattactgctcgtcgcgttgttggtgtgtggcaatggcgcgctgcaagccgcggccgc

SEQ ID NO: 133701 - DNA, 733 bp, Homo Sapiens
  misc_feature (32)..(32): n is a, c, g, or t
  misc_feature (456)..(464): n is a, c, g, or t
gttggtcaaaccccagtgcagtgcagtctgtntaagaagtagtgtcgcatagctgtggcctggatctgctcagcagccccagtaggcagcatttattccctttcgcaacaaagagactgagacttggccagagggaagatgggacctgcctaggttcacacagggaatctctggcggggctggactcaaacccagctccctgccatcactccttagagtcacactgatgaactcatttagggccaaaggaagaaggggaggcagatttcccctctagatgagtgaagggataggaggctggtgaacccaacggctgaaatgtgaagggtgagagggtagggtgagtccccccagccctgagggatgaagggtctgaagatggcactgcacggtgacagctgcagtgactcaggagctccgtttacaaaggaacatgagtgaggaacataacttaannnnnnnnnatatctgacctgaatttctgttttcctcccccattccccacatggtagaagtgtaatctcacatcaatttggggaccctttctttccccagggatgtgtagaacttttggggatggcacatttgaagaccttagggagctttgcattttaaaggctgaatcccacactctatcatacatattaatatttacctgcattccacattaaagggttcagtttatgacttgtgtcctgtcttgtagatacttaattaaacggtattaattttg

SEQ ID NO: 133702 - DNA, 502 bp, Homo Sapiens
ggcacgaggaacattttacccaattctgtattttctgaattataacaattatttaacaagaactcataaaaatacataatgctatcaccttatcatttcatggctcagaggctctcagagtttgctcttaactacccaatgttccccagccatcgctcctctccaacaaaaccactacacaatcccatttccattcttcccttttcctagcatcactagtattttcttacaacaggagaagaataaatagcaggtggaaatagcagaggaaatagcaaggttcaagaaaaaaagaaacggatcataccattagtatcagtttttggcattcaggagctaaagactctgcaattccattcttacaacccatttggagctcatttcaatgagaagtcaaacttcactaatctttttgaaaactggaatagataacaatagcaaaattgagctgttattgaaataaaatagaaaatatgctaaatgaatgatttaggccttagtt

SEQ ID NO: 133703 - DNA, 560 bp, Homo Sapiens
ggcacgagggcggcccggacggctgcgcgatctgagcgctacgcgacctgctccagaaagaccagccggatcggctcctcgagcagttcgtcgaagcgctgctcgaaggccttgaagtgcggcgtggccagatgcgcatccagcgcggcctggtcccggaacgactcgcgcatgtagaagctgccgggttcgtcgcgcagttcgaacagcgtgtagtcgaggcagccgggctcctggcgcgtgggtggcaccagcgcgctcaatgcggcgcgaagggcttcgcgccgaccgggccgggctttcaggacggcgatgccgatgatgggggtcgtgttcatggggcgtggagggtgtgacagggaccccgcagtgtgcgagcaggcccgtgcatgaaaaagccctcgcgcccggaaactctttcaagcgccgcttgaagatcggcccggcgctagcgcgtgcactggaagctcgccgcctgtgccacatcgccccccacgtagcgcggccacagcggccattcgcacagcgggcgcgcgcgcaccgtcctgaagggcggccgc

SEQ ID NO: 133704 - DNA, 1067 bp, Homo Sapiens
  misc_feature (233)..(233): n is a, c, g, or t
agccaccacgcatgggcctaatgagtttttatgctaaaattctactcaagaacaagcttgtgagttttggtatactaaagacaaaacctaaaatttcaaagaaaaggaaaatcatcaatcatctccaactaccatgagtggatggtgttggcagcaaccactgtcactttagtgcccagtgacatcacttccatgcacactgtctggagtacgtgtctgtgcttcatattatntttaacataattcataaccgcgtcagatctgacacatgcaaaggcagtgagcatgctgaaagtactagtaagaaaaggtatacaatgatgataggaaaaaatgtaagataatttaaagaaagcaagtagtaaaaatacctggttcatgtgtacatgagatgaactgttcagtttaaggaataactgagggatggaggataactcacgcattgtgttcaaagcactgtacccatacagatgacagtaattggcgggatattgaggggaaactgacaaaatagacaacacttttgaatacatggattagaagataaccatcagatgcctattagcttaatgctaattcaggaagcaactaagagtgtgttttaaagctcaaagactaaggacagcaaatgtgctgcggacaaaaccttggtccagaactccagtttcataagtccagatctgtctgattctgcaacagctgctctgcgtctgttctattttagatgtagagcagcgaagtatccttttataatattaaaatgagaaaaaaatgaaagtatgataagtagcaattgtgaaacctacaggattcattagtttgccaagtaataaacatagcatatttgaaacattctctgcaatacttgcgggagtattaagaaagaagggttacctgcctcctaattttcaaatataagaaacatcctttttgcaaaacggtgccccaaagatcttatatcatcaaagaaagagagagtgggcctgtttttaaagctctccttcctggtggtggaaatgcactcagagattttaaaagtcatcttggacttttgagcaggcggccgc

SEQ ID NO: 133705 - DNA, 640 bp, Homo Sapiens
  misc_feature (629)..(629): n is a, c, g, or t
cggcacgagggtcaccgccatcatgaatgccagcaccgtgcccaggcccacgcccctgcctacaagagcttcggcgatcggcagcgtgccgaagatgtcggcatacatcgggatgccgacgagggtcgccacgggcacggcccaccatttgtcctggcccagcagcgcgctgatcgcctcctgcggaacccagttgtggatcgcggcacctatagccacgccgatcaggacatagggccagacgcggtggacgatctcccccacctggtcgcgggcataggccagcctctggcgcctggtcattgtcgccgcctcgcccgtgaccggaaccgtgcgcacgaagtcggcgacctgagcctccatgcccagccgaccgatcaccgtgcccccaaccaccgccacaaccaggccgacgccgacataggccagcgcgatcggccagttgaagatcgaggcgagcaggatcaccgaggcgaggtccacgaggggcgacgagatcaggaaggagaacgtgatcgccaaaggcagcccggcggcggtgaagccgatgaacagcggaatcgacgaacaggagcagaagggcgtcagtgtgcccagaagcgcggcgaggatgttggcgccccagaccnggagcggccgc

SEQ ID NO: 133706 - DNA, 730 bp, Homo Sapiens
  misc_feature (37)..(37): n is a, c, g, or t
  misc_feature (649)..(666): n is a, c, g, or t
acagtgggcagaagcagtcctgggagctgagacctgngacacagagactgaagacttgacagagaatgggcaggagctcaggaggaccctggatcatatcaagggccagaaaggagagcacgtgagcctgcaaggcccggatcaacgcccggttgggacaggagaccaccagggcagtgcacagctgggatttcagtctctggtgtcaactcctgggtctactggctccactgagggcagctacactctgcagccagatggccagaattcaactccctgcccaggtctcaccagcactttcccacttggtgcctcagtttcctcatctatgaaatggggaaactaacagcatttatttcttgtggttgggtggatgaaaagcgttagtatatatgaggggtttgcagctgtgccacattatttttgttatcatttgattatattttaatatattacatatgcggtcattgtattattattataaatgagatttatgagtgagtgtcctggttacggctccttctggggagcccaggaccagctttcctggcaccttgaggtcccctcaccctgtcacactctcatgcattacctcatatctactatgtcttcataattttatactatagaaatttaccctttaagtagnnnnnnnnnnnnnnnnnngcctacagccgcggccgctccaacatcggaacgaggtgtaccattctgatgttggagcggccgc

SEQ ID NO: 133707 - DNA, 842 bp, Homo Sapiens
cttccctaaactgcccttaattcatctggcggacaatgtatactgaatggtttgctttgttttatgatctcaccattggtttcatctaactgctccagtccaaagttgattttccttaacagaaaatgtcaatgcaaaatagttcacaaattttactcactatttgtcattttccaacttgattttctcatttccttgttaatgatttaccataacatttcattttctcctcttcttcctttcttgtgcgcttcattttatcttagaatcatccaagggctgcttttgggaacaccttcagtgtgcaatatgcttacagttttgagggatttccccagcttctaaagttggctttcctttcaaagatgtatgcttggccttatgcctatgcttctttcctcactgttttctcttctccattcctgaaattcagaaccttgctcacccttacctttgcaagtcttcacaactctctatgccatagttcctctctccaggactcttctgttgttcagacaacaaaaacaaagtgccaattttggtttcacacaattccaaaaactgtttacaaactgttaacaattgcagaaagaagctttgatacacacaaattgaaatggcctgcatcttggtaatattacaacaccgtataggactgagctcttgaaatgtgtccaagagtaggaagtggtttttcgtttgtgagatatttgtgaacttttaatattttggagtatagcaagaggaagtctaaacttatgagtttatacctgccacttatgagcttgtaaattttgggtaagatacttaattttctgagtctctacttctttctctctctc

SEQ ID NO: 133708 - DNA, 519 bp, Homo Sapiens
aatttttattttgaaatgcagggccagtatgccatttattttaaaagtatcacatagagggaaaataaaataaaaattatttatctgaatagaattatggatcttgcttggtctctttctccatttaagaaggatcaaaaagtttcctttagatgtagaatactcatttctaactatttctcttaatatgtcaacatacattagccaaatggtcagcatcagtaattcacatattgttttacagagtaatatgagagaatgttccaattgcataaagcagatgtcgtgaggattttgtgcacaagacaactgatatcactgctacttaagaataacctccatactgtgtgaactccatcttcccagaatttcaaactacatgctatgaatgctaagattaaagtactaaatatatagtccaaatagggagctgaataattttatattttgtctcacctttttttctgaaccaaattaagtctctcctagaccttaaaaaaaatttacacccgcggccgc

SEQ ID NO: 133709 - DNA, 933 bp, Homo Sapiens
  misc_feature (82)..(116): n is a, c, g, or t
aagaacccttgattgactatatagggccatagctgtcgagcgaacgacgagcgcaagcgagtagtgagcgaggaagcggcgnnnnnnnnnnnnnnnnnnnnnnnnnnnnnnnnnnncagtcgacggtaccggacatatgcccgggaattcggccatctacggacgggggtacaacatttcctagggtaccgtcgtccacacagagttgtcgtgcattcatgttttggaccatgctaatgactgtagtgactggattatgttctaggtagattgtaagagtatgatcgaaggaattagaagaggagcggaacgcagaggggggaaacggggaagtagagacaggatgactagtggatgcttttggtgatgaataagagtgatgctatatcaaacacgagtacgctcttacgtgtaagcatcgaatttcattgattattatttcgaagctgtttgcatttagtcattcaaacaggttatgaagttcatggaatggaaaaaataccagaagatggaccagcacttataattttttatcatggagctattcctatagatttttactatttcatggctaaaatatttatacacaaaggcagaacttgccgagtagtagctgatcactttgtctttaaaattccaggtaaactttcactgtagatagtaatgtaaaaatgtttttattaacaaaaccaagttatgtggtcgtctctatcctgagctctctaacgtcatttgaaaaagctttttgcttttagggtgtgtataacactcttggaactctaatatgggaatatctaattatcctttttaggcaatatatctaaaaataaaagacattgtgggtcaaaaatgttagctcatttttattttatacatttttaaaattgtttattttaagttgaacattgtatttatggcattaccaattataat

SEQ ID NO: 133710 - DNA, 1121 bp, Homo Sapiens
  misc_feature (19)..(19): n is a, c, g, or t
  misc_feature (21)..(21): n is a, c, g, or t
  misc_feature (690)..(935): n is a, c, g, or t
  misc_feature (942)..(966): n is a, c, g, or t
  misc_feature (994)..(1029): n is a, c, g, or t
  misc_feature (1067)..(1067): n is a, c, g, or t
aaaatgctgggatttccangncaaaagccacccacatccaaacctcccctccatatttgactaaagaagtctcataaatctgagaacaccttagcaaggaattaaggcgagggtgtggcactgttctggcttcagtctatcaccaggcagagtccacgcattcttcccagggagaaagaagcagtgacagctcttgggctttgagggaaatgattcagcgggagaaagaaggtggagaggggctgatatgcagataccattgctgcaggtggctctgcccctaagcactgaggagggcactggtccctctggccccacccagccttcaccccaaggtgaagtacgctttctcaggtccccaaggatgggtggccaggtcccccactgggagtggaggtctcactcccttccttgggttctgacctccacattatctggctgtgagggtgacctgcctggctttccccaccacagtgcagctccccgcagctgaaagccacactctcaacacaggactcctgagatctgacactggcccattcacaccctgcttgaagctggcatttgagaggccttcaggttgacaacagcagcaacaagtttgctgttcaaagtaggccaagtcacggctttgagcggcatcatttgaaaagtgctgggatcagccaggcgcagtggctcactcctgtnnnnnnnnnnnnnnnnnnnnnnnnnnnnnnnnnnnnnnnnnnnnnnnnnnnnnnnnnnnnnnnnnnnnnnnnnnnnnnnnnnnnnnnnnnnnnnnnnnnnnnnnnnnnnnnnnnnnnnnnnnnnnnnnnnnnnnnnnnnnnnnnnnnnnnnnnnnnnnnnnnnnnnnnnnnnnnnnnnnnnnnnnnnnnnnnnnnnnnnnnnnnnnnnnnnnnnnnnnnnnnnnnnnnnnnnnnnnnnnnnnnnnntgtctcnnnnnnnnnnnnnnnnnnnnnnnnngtggtggggtttgggtgcagtgtctcannnnnnnnnnnnnnnnnnnnnnnnnnnnnnnnnnnnatcgacgcgtggcgacgcgtggcgacgcgtgggtcganatatcccgggattccgaccgtaccagccgctttttgtaccacctgttatagtca

SEQ ID NO: 133711 - DNA, 633 bp, Homo Sapiens
gctctttctgaggatgactgaattgcccagcacaaggagccaaactcacagcagggaattaatatgaggaacctagtcactgagaggtaggggaagaggacccaaagaggagtcactaaaagagacaggccttcagggccatcatcaagggctaaaaggagctgttgctttctccatctacctacctccttccatctgctttttctttctccttgattaatgcaaagtctgctcatcggctcatcctctttccatcccctgcatgtgcattgacgcctggtaagagattgtgggacggacagggggataccatggaaatcaacagaagtaatttgaatgacgagcatcttccctctttgaaagtggaaatgatgtggggctcccttctctagccttgcgggacttgacggagcccctcggcagagatctagcccaaggatccagatggggagaaggacaaccctgttcttgaaaagggtgaaacaattcaggtgtaagcagctcttctctctgtggccctggctaacctatccagatgtccccctgctcactctgaagccttggtacagtccttaaggaacccaagtccaggagaagaggagtgcatccccagttacctggactcatggccgc

SEQ ID NO: 133712 - DNA, 113 bp, Homo Sapiens
ctggatttgaatcccagcagactccatgtgtttttggttgttctgtgaaccacatgctttgagcacttaacctcttgaatgcatattcgaactcacaaggtttggtggcccaa

SEQ ID NO: 133713 - DNA, 456 bp, Homo Sapiens
  misc_feature (390)..(406): n is a, c, g, or t
tgagccactgccctgcacctgtggattttttgtgtgtatggttttgcccaccgtaactgtccctgtgctgcattcctattctgctgactgcttccgtcattcaacagggtttctcagctctttgtctgtggccctggagacgtacagttgactcctgtgctcctgcagaggatttcagagcttggatgcaacacatttgatcattcccaccctgagtgatgcaaccccagggcttcagctcctggtgtgccacaaaccatgccacgaaggccatggcacggaatgtggccttagcgagaagggagaattgctcttgctgaggttatcaaggggtaggattgctgggttcaagaacactgatgtttcattttcttatgtttgttctgttcnnnnnnnnnnnnnnnnngtgaaagagtctcactctgtcacccaggaggtgaatgttggagcggccgc

SEQ ID NO: 133714 - DNA, 710 bp, Homo Sapiens
  misc_feature (632)..(632): n is a, c, g, or t
  misc_feature (647)..(647): n is a, c, g, or t
tttttacatttagggagtcttcatctttattttcacgggttaaagaaaacaaaattgtatcatttttatatgcctatttggaaaagcaatactttatcaacaagattagtagattttatgacagaaattacttatcatcatcaagtacacgttttagttattcagataaagaaagcaacattcagtttcatgttcacatgtttcaataagtacaactttgtttatacaaccttgggaaagacagagtaggagtcgcattgctgtgtattccagctagcacaacaggcctgagtagttctagatgccacttaaaaatcactcaatttgccaagtaacccacaactaaatcctggaaaagtagaaaagctatgtgggccatggacagggacactgtgtacaattacccagtttgtgcattttaagtgggttcccagcacaggggtaggcaaagatatgtcctactgtggttccagcccagtaaaaaacagcatctttgcatagttaattggtccaggtaggatgtctttttctcacttacacaaaggcatcatggttagcaaaaagactggtgctaaaagaagagactttctccaagaagagacccataatacattatctcacattcacagaanaagaagacccagcanagttttcatgttcttactgggcagaatatcagtgttatgaaaagtatactggttgtcaatttt

SEQ ID NO: 133715 - DNA, 484 bp, Homo Sapiens
aggccgcaggcatggttttggtcaactgatgtttgcagatggtggcacctacctgggtcattttgagaatgggctctttaatggctttggggtattgaccttctcagatggttcaaggtgggtatgaggtcattcctttcttagccttaaataagggagggtctgacagaaaaatgggactctggtaaatatctggtcaatcctgaccttgtctcactccctgcagaacacagatgaggaataagtagttcttttattagctattttttaagtggacctaaaatttgaaatgtcaaccaagtgagtgactttccaccccactcccattcacatcctatcttctttccttgagatcagggcttcatgtcatatatactctctgctccttgggaataggtggggtaggtggagctatgtgactggtataatcggtttgctccttatcatcattaaataacagagatcagcagctgctcctcgtgcc

SEQ ID NO: 133716 - DNA, 554 bp, Homo Sapiens
gcggccgccacggatcacttcgcgggctacttccggcgccagcacattcactggccagcccagaatcgcaatggccatcagcgggtcgccgcccatggcgtagatatcgctgatcgcgttggtggcggcaatacggccgaagtcgaacggatcatcgacaatcggcatgaaaaagtcggtggtggagaccacgccgcgttcgtcgtcgatggcgtacaccgccgcatcgtcacgcgaggcgttgcccacccacaggttggggtcgaggttctgtgcgccgctgccggcgaggatcacttccagcacctggggcgaaatcttgcagccgcaacccgcgccgtggctgtactgggtgaggcgaatcggctcgttcatggtggacctcaaggtaacaagtgggccgattctaacagacagcaaaaagccggctgggctcttgtgagcacagccggctttttgcttcagcgcttacgggcgggctgccagcaagcgtttgtgacggttacgccgggcaatgttcaggcattcgatcaccgccgagaacgcctcgtgcc

SEQ ID NO: 133717 - DNA, 532 bp, Homo Sapiens
cttcatacttcaggtagatcacggccgcacctgcgaaaccggcactgcccgaatcaccgcccttggcccctgctgctgcgccccgggaatcgccttctccaccgaaggcaactgcggcgcctgcacatccggcagcgcccaactgtgctccggctgcaacccgccctgggcgcggcgcatgaattcatagcggttcaaggtgatactgcgcccagcgccactgtcgcgaataatgtaggggcgtaaaaacaccatcagattggtcttggtgacgctgcgcttttcattgcgaaacagcgcccccaacccagggatatccgccagccacggtaccgcgtcattgctctggctatagccgtcctgcagcaacccgccgagcaccatgatttgcccgtcatccagcaaaatactggtgtcgatcgcgcgtttttgggtcaccgtgcccgcctccaccgaggcgcgcgtgtcgacgctgctgacctcctggtaaatatccagcttcaccgtgccgccttcggaaatctgcggccgc

SEQ ID NO: 133718 - DNA, 1139 bp, Homo Sapiens
gtatatattaagatcctggtgctgcatgcagacataaaattgagtctgtggcatttgctgtgtttttcagcaaaacttcatcccaaatcagacatcttaaggcaccaataatttgcaaagttaaacctcctccacaaatttcacccagcaaatcgatgggcggagaattttgtgtggctgctatcttcggaacatccaggtcatggtttgcaaataatgcaggtctgaaaagagaaaaagatcagtccaaacaagttgtagttgagtccctgtacattatcagttgctatggcaccttagtggaacacatgatggagccgcgacccctcagcactgcacccaagattagtgacgacacaccactggaaatgatgacatcgcctcgagccagctggactctggttagaacccctcaatggaatgaattgcagccaccgtttaatgcaaaccaccctctgctcctcgctgcagatgcagtacagtattatcagttcctgcttgctggcctggttccccctggaagtcctgggcccattactcgacatgggtcttacgacagtttagcttctgaccatagtggacaggaagatgaagaatggctttcccaggttgaaattgtaacacacactggaccccatagacgtctgtggatgggtccacagttccagttcaaaaccatccatccctcaggccaaaccacagttatctcatccagttcatctgtgttgcagtctcatggtccgagtgacacgccacagcctcttttggattttgatacagatgatcttgatctcaacagtctcaggatccagccagtccgctctgaccccgtcagcatgccagggtcatcccgtccagtctctgatcgaaggggagtttccacagtgattgatgctgcctcaggtacctttgacaggagcgtgaccctgctggaggtgtgcgggagctggcctgagggcttcgggctgcggcacatgtcctccatggagcacacggaggagggcctccgggagcgacttgccgacgccatggccgagtcacctagccgggacgtcgtgggatccggaacagacacagcccttgacgtagcagtaaaaaccttcccccctgagagacacgtggcagtgaagtgttttggg

SEQ ID NO: 133719 - DNA, 515 bp, Homo Sapiens
  misc_feature (491)..(491): n is a, c, g, or t
ttgggactttggtttcattaatctcaatttgttctgaaggcactaaggcagattttcaaagagctgtaattgtcacagggagagcacaatgacttattgaagtttcacatgttgctctttttggaactaccagagattggaaccaattctccatccacatctctatccgagagttaagttttctcttctctggtgcttgtcaaaagtatttctcccagctaatctcattcccagttgccaaagaaaagatctcaagcataactcctcatctccaggtcacccgacaaggtacctttgacaggagcgtgaccctgctggaggtgtgcgggagctgcgcctgagggcttcgggctgcggcacatgtcctccatggagcacacggaggagggcctccgggagcgacttgccgacgccatggccgagtcacatctagccgggacgtcgtgggatccggaacagaacttcagcgagagggaagcatcgagactctnagtaacagctcaggctccaccagc

SEQ ID NO: 133720 - DNA, 773 bp, Homo Sapiens
tgctcctcgaatgacaatcagttttattgcatgagttatggtgtccaaatgagttaatttgcttttttcaccgtctgagtcaaaataggccacctgcaggcctcatgcaaaatgtagaaactggatagatgatttaagcctcaaaaacgcaagtgattttttggggtgcacgcaggagagggcggatctggggtgtggtcagcagatgaccagccgtggccttgaaggcagtttccagtctctgcagctgcgggatgagggtgaagccccccatttgctctgctcagcctctctgttgagtatttaagaaatcctgattctccgtgttctgccagggaggatactgcagaagagtggactggtgtggccattatttcagcatcttcaccatgtacgggccttgtaatctgtagccgatctttctataataattcctggtgccgacccctgatatcacagcgattttcccagacccatgttcttctctagctattctttctgcttcctccatcagcagcatcgccgaatccgtagatgctgaaatttagtaggatcccggctgctcacagggaccacactcccatacacatgcagctctcgtactatggagacacctccacccaattcgaaacggaaagtttcttctgaacacattgcgtaatcgtaggagaccaatcaaaatgtcttagatgctgggtcttcgtatgccaagaagtgtttcccagccaccactttcaacataagtctctccttaccaattcacaaggggggcc

SEQ ID NO: 133721 - DNA, 1097 bp, Homo Sapiens
  misc_feature (58)..(80): n is a, c, g, or t
  misc_feature (927)..(928): n is a, c, g, or t
  misc_feature (954)..(954): n is a, c, g, or t
  misc_feature (971)..(971): n is a, c, g, or t
  misc_feature (1000)..(1000): n is a, c, g, or t
  misc_feature (1015)..(1015): n is a, c, g, or t
  misc_feature (1037)..(1037): n is a, c, g, or t
  misc_feature (1056)..(1056): n is a, c, g, or t
  misc_feature (1083)..(1083): n is a, c, g, or t
gtgccaagctaaaattaccctcactaaagggaataagcttgcggccgcctgctcaggnnnnnnnnnnnnnnnnnnnnnnncacattgtcagatcatttatttcagcgcagttacacccagcagaggggcacaggcttaaacgccggcatattagttttcccgcacgcgagccctgcatggcggtgggctggggagccggggcggtgcgattctgccacacgccacgctctactaggcccccttactcctaattaattgcctgctcaccagactgtgagaaaataattgccactataaattttccctcctctgcataaaatattcgggggaaccagcacttaaaaaacagacttcatgaaagaagggcagcaaggcgtggatgctgcgccccccacaacccccactgcagaggacacagagaggccaggagccccttcctggttccccctggttccaaatgagacagaaaggctcaaagagctcccaggaatggtcacagctgaaaaaaagtcgagtgagtggctacatgcggcagccgcttgtgttcacctgccgtccacccaggacagtccccggcagcagcttgtgttcacctgccctccacccaggacagtccccgggctggctccaggctgcagggggtcagcagagggagcctcctgccccatatccttggcaaactcacttctccttctgggaccacacaagagacatgggagaatgttcctaattaggcaagagcacagaacccctaatcccagtctctgcttggcatgagtacccaggcaggcaaggaagatggcgacaggtggatttcagctcctggaaggagtccggctcagagtggctgctgagtacccagccttgcctcctctgacgtgggacgggtgtggctgtgctgccactgctggctcttcctcactgcanngtgaatgatgtggatgcagcccttangtgtggctccagctggngtcaagagcatcccagcctcagactgccngacatgaggaacccntacactggcctatgtggctggnggtgagagaccccccccanagcgaggactcaagcactgaaccgtgnaggacacacagccc

SEQ ID NO: 133722 - DNA, 1040 bp, Homo Sapiens
gtgccgctctggttttcctcagtgactcagagcctcaaacctgccccataggtgcctcctcaaccctggtccctctcctgctcaaacacccgccatggctccctatcgcccacaggatactgtccccacctgcgctctgggacaacccgccctcagcacggggccactgtgctcaaccagagaggctgtcagggtcttggctcagaaatactccgccttcccctcgccaggccctggatccctgcagttctccgacgccccctgctggctgtctgtgggactcaggcacagattgatttccccgggaatctgcaaaggtgcctgaggagggcgcgggtggttctgagacttgacagtggtgggtcactgcagatccgcgctcaggggctccacccgtagccaaagtccatcctctgcgctcacgatcagctccagcttcctgcgtggctccgcgtggtccggcaggatgcggaagcgcagcagcgtgagcgccaggaccacgttcatatcagccatggcgaacctctggacactgctgagaagggaataaaagccagaggtgatgtcttctggagattttctgggtcgaagcgaaaggggtcatagacctccgggtccggccagactgaagggttgtgatggatcccaaagatgctgatggtgcaagtgttccctttggggatgacccggccatccgggagcaccccgtcctgggggcagcagcggtggatcctggagactggggaatgcagccgcaggctctccttcaggcacatggtcaggaagggcaagtgggccaggtcatcccaggctcaggtgacctcaaaagcagttccgttttggaggctgctggaaacactggaggcggtggcagttgtcatagaaggcgtacgtccaggccaggacacgggccaggagccaggaggccccgaccagcagcaggagcagccatggggatgctgccaccggcccgaggcccagccaggacaggctcagcagcgacatccttctgtcaggagcagcttgtcccacacaacttc

SEQ ID NO: 133723 - DNA, 895 bp, Homo Sapiens
gcggccgcgacctggcaggccttgccagcccaggtagaaaccgaccagttgccacatggcatcaaggcccaggcagcccggcatcacagggtcgccttcgaaatggcaggcgaagaaccacaggtcaggggtgatatccagctcggcgaccaattcacctttgccgtacttgccaccctcttcgctgatatgggtgatgcgatccaccatcagcatgttcggggcgggcagttgcgcgttacctgggccgaacagctcaccgcgactgcagcgcagcaggtcttcccgagtaaaggcgttttgtttggtcatgcgagctcctcaataatcccatgcggcagggcagggtaaatcttcccggaccgaatgaagcgttcatgcctcataccggcagcctacacatagactattgcgttgtagtgaaagtcacagcgtcaaggtactcaatgtacacttgttcactgaaattttaaaccgagcctgtttatcggcccgtttgggtgcctaagactgccgcactttcgtctctcgcgccagtcgcagttggttgatggcgcggcgctattgcacccagcgctgcagtatttgctgcaaatccgtgcgtttgaacggcttggccaggtaatcgttcattccggctgccagacaggcttcgcgatcgccctgcaaggcgttggccgtcaacgcgataatcggcaggtcggcgcagccgggcagttggcgaatccggcgggtggcttcgtagccgtcgatcagcggcaggcggcaatccatcaggatcgcggtaaaaatcaggctctcggcgctgcggattgcctcggcgccatcggtggccaggctcacttcaaagcccaggctgcgcaacatggcctcgaccacggtgcggttgaccggg

SEQ ID NO: 133724 - DNA, 767 bp, Homo Sapiens
  misc_feature (82)..(82): n is a, c, g, or t
ggtgtgccgatggaggccgttccaaaatattcgaacccttcctgcgcctggacgccagccgcgatcgccgcaccggcggctntggcttgggcctggcgttgttcaaacgcgtcagccagtggcatggcgggcaggttgaagtgctggactcggagtggggcggggcgtcgtttcggatgacgtgggcgtatggcgagtaggcggttgccggcggtcgcgggcagccgccaaaggctttaaggtgccccgaaccgtaccagcatgcgctggcccacacgcagtgacgcaggtgcaggttgttcgaacgctactatgcattccacggtacgcatattggctcgtgcctgtgggtcgccttcaagcgtgctgttacccagcacggagctgatacgcaccacatgaccggacagcgacggttggtcgttgccgttttcggtcgatatatcggctttcataccggcgtggacctgcgcaataaacgactcgttgagctcggctcgcacgatgcgtacctcgttcggcagcaacacgaaggcaggccctgactccgatgaaacggtagcgccaggttgggtcaggcgccgcacgacttcggcgtccgccggtgcatagaggttgcgctgggtcagttcgtagcgcgcaccggtgagtgttcttgtggcggcttcgaggtgtccttggtttttttcaatagcgtcgcgcagttgctcggcggcctcgcgcgcatcatcggcactctggccatctgcggctccagccgcggccgc

SEQ ID NO: 133725 - DNA, 411 bp, Homo Sapiens
ccctgagttgtttttagaaggccattctgacagctgtaacaacagcaacaggagcaggagtggaagaagggtatggagcttgctcgcctccaaggtgagaagtggccgggtttgtgtcacacataaaagtaggggttaaagtgaagggcatcaaggaaagatctgagatcccagcatgtacttttgcaaagttttggctaaaaaaggcattgctttttacttgcgctataattgataccaggaagataatagctttttcttaattccaagagattctgaatcctttatatactggttgattgaagagtaacaaaaatgtcagagccataatcagtggtttaaatacgacaagccagataagtaatctcagatttcaattacatatcagagctctaatgagcaggcggccgc

SEQ ID NO: 133726 - DNA, 969 bp, Homo Sapiens
gctggtaccggtccggaattcccgggatatcgtcgacccacgcgtccgctcgaagatggccggttggcagagctacgtggataacctgatgtgcgatggctgctgccaggaggccgccattgtcggctactgcgacgccaaatacgtctgggcagccacggccgggggcgtctttcagagcattacggaaaagaccgggaaggtttctttaccaacggtttgactcttggcgcgaagaaatgctcagtgatcagagatagtctatacgtcgatggtgactgcacaatggacatccggacaaagagtcaaggtggggagccaacatacaatgtggctgtcggcagagctggtagagcattggttatagtcatgggaaaggaaggtgtccacggaggcacacttaacaagaaagcatatgaactcgctttatacctgaggaggtctgatgtgtaagcagcctctccccatctacctagcaactgtcttcatcaacaaccctaattatggtcacaatgctaccaaactgtagatggtagctaatttttctttacctattttctaatgtcatgattcctgtttgcccaatggatcatttgtatgttaaccactgtatgtaaccaacccttatctggcaacataattgcagcacaataatgatttgcatgataccttgaaattggggggagggggcatgccaagttgggcatcactttgtcttagcaattaatgggatattgattactaaaataagttaatattaagcaaggtgccggttgtacaatctctgatcagtgtcttttcagcactttgagcatttacttgggctcatttagtcttcccttttgtagcgcatggttggggaaggaaaaagtgcatgcatcattccttcactcttctctttttcccgcccccccctcccttcgcacataggcatttggtttgcttccatctttttttatgcagtgcctg

SEQ ID NO: 133727 - DNA, 885 bp, Homo Sapiens
ttttccttcccaaaccaatgcggttccaaaaagaaaggactaaatgagcccaagtaaatgctcaaaagtgctgaaaaagacactgatcagaggattgtacaacccggccctttggttaatattaacttattttagtaatcaatatcccattaattgctaagacaaagtgatgcccaacttggcatgccccctccccccaatttcaaggtatcatgcaaatcattattgtgctgcaattatgttgccagataagggttggttacatacagtggttaacatacaaatgatccattgggcaaacaggaatcatgacattagaaaataggtaaagaaaaattagctaccatctacagtttggtagcattgtgaccataattagggttgttgatgaagacagttgctaggtagatggggagaggctgcttacacatcagacctcctcaggtataaagcgagttcatatgctttcttgttaagtgtgcctccgtggacaccttcctttcccatgactataaccaatgctctaccagctctgccgacagccacattgtatgttggctccccaccttgactctttgtccggatgtccattgtgcagtcaccatcgacgtatagactatctctgatcactgagcatttcttcgcgccaagagtcaaaccgttggtaaagaaaccttcccggtcttttcctacaatcatatctatttctattggcgtaatgctctgaaagacgcccccggccgtggctgcccagacgtatttggcgtcgcagtagccgacaatggcggcctcctggcagcagccatcgcacatcaggttatccacgtagctctgccaaccggccatccttcgagcccttcgcactgcagcgcggacggcgagccc

SEQ ID NO: 133728 - DNA, 971 bp, Homo Sapiens
ccccatcaggcagcgatctttgtcgcatattccagtgagttgtacaccgtgtttacatccaatgaggctggcgacggatcgtgcagtagaatagttaaccaattagctccatctactgtttggtaccgttgtgaccatgattaggtttgttgatgaagacagttctaggtatattgggagagcctgctgacacatgcggacctcctgcagttataaagcgaagttcatatgcctgtcgttgtgtaagtgtgcctcctgtggacacctgccttttcccatgactataaccatgtctggagtacacaagtaacaaccagaagtgaacagaatattttggggggggagggcagaaatgaaagacacctttccccaccacagagggatacaaaggagacacaggttcataccccatcaccctgcattgctaataaaatttccagtaattaagacttaagcttatagctaggaaagtttaagagcaattttcccctaatacttaacagtctgcctagcagctagaacccagagtctctcaagtattttgccattgagtatgcctgtcttattcaatccgcctccatggaccccttcttttcccattgacaaagaccaagactctgaccagctctggccgacagccacattgtatgttggctccccaaccttgactctttgtccggatgtccattgtgcagtcaccatcgacgtatagactatctctgatcacctgagcatttcttcgcgccaagagtcaaaccgttggtaaagaaaccttcccggtcttttcctacatcatatctatttctattggcgtaatgctctggaaagacgcccccgccgtgtctgcccagacgtatttggcgtcgcagtagccgacaatggcgtcctcctggcagcagccatcgcacatcaggttatccacatagctctgccaacccctcgttgccgattaacccgcgggccctactagc

SEQ ID NO: 133729 - DNA, 955 bp, Homo Sapiens
cagctgggcaaatacaccattcgtgacgtgtcccgcagcgaagggccggtgttggatttgacaggcatcctgatcaactccagtaacgtcggcatgagtaaggtcgccttcgatatcggcggcgaaaccatctatcacctggcgcaaaaaatcggtttgggccaacccaccggcctggatttcccaggcgaacgcgtgggcaacctgccgaactaccgcgactggaaaaaagccgagactgccacgctctcctacggctacggcctgtcggtaaccgcgatccagctggcccatgctttctctgtattggccaataatggccgtatggttccactgagcttgatccacgtcgacgaagcgccgaaagccactcaggtaatcccggaaaaagtcgccaagaccatacaaggcatgctgcaacaagtgatcgaagccccgcgcggtgtgttccgggcacaggtgccggcttatcacgtggccggcaagtctggtactgcacgtaaaacctcggtcggcaccaagggctacgccgaaaactcttaccgctcgctgttcgccggcttcggtccgatgagcgatccgcgctacgccatcgtcgtagtgattgatgaaccgagcaaggccggctacttcggtggcctggtgtcggctccggtattcagcaaagtgatgtccggcaccctgcgcctgatgaatatcacgccggataacctgccgccgactcaacaagcgaacgcaggaccaccggccgcagctgtcaaagccaatggagggcgcggctgatgtctcttagcctgaacaagatttttgcccacgccggacgcgatctgctgattcgtgaattgagcctggacagccgtaatgtacgcgccggtgatctgttcctggcggtgcccggcggcaagctcgatggccgtgcacatatcgccgatgccctgcaacgaggcgcggccgc

SEQ ID NO: 133730 - DNA, 640 bp, Homo Sapiens
ggcacgaggcagcagcacgtccttgaccggggcgccggtgccgtcggtcacgacgccttccacgatgatgcgctggccctgggccttcggcccggcgatgtcccagcccagttcccggcgatagatgtcgaagcctgcggcccccggcgccagcccgatatggacatagggcccggcggtctgcgagggcgattccttgaggtaatgcagcggctgcggcatggtcagttcccctccagacggttttcgaacagggtcgagcggcggccccgcagcacgatgtcgaacttgtaggccaggcagtccagcgcgattccggcgttcatgtccaggggtgcgatcagctggtcgatggcggccgggtcggggatcgtgttcacgatcgggcagatcgggatcaggggatcgccttcgaaatacatctgggtgatcaggcgctgggtgaagctggacccgaagaccgacagatggatatgcgcgggccgccagttgttgacatggttgcgccaagggtaagccccgggcttgatcgtgcggaagtaataatagccgtccgcatccgtcagcgtccgcccgcagccgccgaaattggggtcgatcggggcaaggtaggtgtccttcttgtggcgatagcggccgc

SEQ ID NO: 133731 - DNA, 1031 bp, Homo Sapiens
  misc_feature (42)..(62): n is a, c, g, or t
  misc_feature (514)..(514): n is a, c, g, or t
  misc_feature (580)..(580): n is a, c, g, or t
  misc_feature (739)..(739): n is a, c, g, or t
  misc_feature (761)..(761): n is a, c, g, or t
  misc_feature (765)..(765): n is a, c, g, or t
  misc_feature (779)..(779): n is a, c, g, or t
  misc_feature (782)..(782): n is a, c, g, or t
  misc_feature (795)..(795): n is a, c, g, or t
  misc_feature (806)..(806): n is a, c, g, or t
  misc_feature (824)..(824): n is a, c, g, or t
  misc_feature (847)..(847): n is a, c, g, or t
  misc_feature (854)..(854): n is a, c, g, or t
  misc_feature (863)..(863): n is a, c, g, or t
  misc_feature (868)..(868): n is a, c, g, or t
  misc_feature (873)..(873): n is a, c, g, or t
  misc_feature (879)..(879): n is a, c, g, or t
  misc_feature (901)..(901): n is a, c, g, or t
  misc_feature (907)..(907): n is a, c, g, or t
  misc_feature (920)..(920): n is a, c, g, or t
  misc_feature (946)..(946): n is a, c, g, or t
taccctcactaaagggaataagcttgcggccgcctctcaggnnnnnnnnnnnnnnnnnnnnnaccatccgggcaccaagggttttattcgagtccaatttttatccgcactgcggagaaagagggaggggggacatagagaaagcggggaacccggaccagaccccagacccctccccccacgtggagcccggggcatctgcctggttgggccaaggaagacttcatgagatccctgagggccccaggaggagggggctgggagcagcagaagaggactgggggccaccgcttccccatcgacgccccaggccagggccctcagtctctttcctcccctcccttctgagggctgtagcctccatctctacagaggctcggctggccatgaccccatcagacccccaaggtactcccttgtcaggtccaaagcacatgttatcctatgcctgtgaccctgggctgccatccagcccacgtcccagaccacaggcacacgctgccctcctcttggngtggggctgggggcactgctgacctgtcagctgctccctccccagggacccgtctccactccctgnggggctactcagtcagtgaacgactttgctttttctctttcctacagattccacctcccatctacccctttcctctcccacctcttgacctgaaccctttttaacctcagggtcaaatgtacctgaggtctgtaccccccacctcttgtcatgcagtantcatggctggtaggaccttggnccangggcatgggtgagnganagcctggctgganaggtcagacangagtgaggtgcctagctnccaggctgggattttgggggcanccgtctnggcctctgngtcantggangactgngggaaggttttgggcaccacancctcancaggtctctgcancactcaaaggtgcactcccactggtnggggtgacaagggtagtgtctctctttcactcaccattgtgtcacctctcgcctataaagagtggggacttttgtggaaaggtcc

SEQ ID NO: 133732 - DNA, 1618 bp, Homo Sapiens
  misc_feature (133)..(133): n is a, c, g, or t
gtaatccatggctttctgggggccccggggaagagcccccacgggggttggagaggcccatcccacgctagttagaaggggatgtgcaactggggccgctgccactggaatggaaactgaagggagagcttgnccgggctacgggggcgcaatgggactcagggtgctccagaagtgaatgctaggagggcagcgagctgggtgtcagcagcaccgggggtcaatgtatgcgtaggaagcagggatggggtcagcgcccggcccccggagcctggaggccggagccactttccgaatcccggggtccgttcgggtcccggcccacctagcaggctcgggctgagtggaagctctaggtcccggggcttccggcccttctgcggctgggagatctcagggctggaagccgcatggccgcccgcctgccctgcggtgtccataacaaccgcgggcagccgggctggcacgccctcctgtggagggacttctggctcggccttggtggtttctggcacaaaccctctctcccccgcaacttccaactcttccttgggcccttctactttcacttctgggggcaaagcccggcccaaacccggctccacattaagctcttccgatttcaggtttggggcctcgggcggggtcaggatgacctgcagaggcaagccggcctcttcagcctccagacaggcctccaaggggcttggactggtgctcctgctccccgaggggggcgctgctgcccctgcaggagctgcactggggagcaccacagcaggccgaggatgagggggtggctgcggctgcagagactggatggtgaaggtggaatagaggcccgagcgcatgtactcgttccggctgctgcgtgccaaaccgcctgggcctgccattcctgcacccttgggtgtgcctggctttccagagacagtgtcccctggggcggcatgtatagcagcaggggccacatttggcatggtggaggtaacagacacctctggctggggcgggcagtcctcagtggagcaccctgcgacctcagggtaggacacaaacttgtagacgaacttctggccgctcaccttgcggatgatgttcttgtcatagtagtaccgcaaggcccggctgagcttgtcgtaattcatgttggtcttgttcttgcgtagcccccacagccgggccacctcctctgcatccaccagcttgaattcaccaccatcccgtgaagtccaggagatgatgtggccattgccttgctctctcagcagctgcagcagaaactgccacagcgtcacagatgggtccatcgctgggggagtgctcacgccatcccaggggtactgttaaagagggatgcggaggagtgcggcgccacggattgattcgctacgatgtacaggaagggtggaataaataaggccacggacgggtctcctgaaagttgaggctgtgtgtagcgtggcggtggcgttggcaatgttggcagactccgggggcgggggctccatacgcggccccaccgccccccaggcctgggttccgagcgcggtggaggtgtgcagacgcgtgggcgacgcgtgggtcgacgatatcccggaatatccgaccggtaccg

SEQ ID NO: 133733 - DNA, 1042 bp, Homo Sapiens
ttttttgctgcttcagatcatgtttattgtggggccagggggtagggatcctcgggtgagagggctggctggccggggtaagttgctctggacgtgctggcggggagcagtcctggtggcgggatggcgggggcacttctgggtcccagggtgcacgggatccgggcagtgctcagggtggcaagaggcggcgtgcaggcacctggggcgccggggtctctaggcgtttcacacgcagcagcgcccccagcacgccctcagggggcagctcagagcccacatcgtggtcggcggcacggcggaggcggcgcggggctgccaccccctcggagtccgcgcttcccgcaagaatccgtcccagcaagtacctcaacagctcggggtccacgtcgggtgtctcgtcgcctgcctcctcagcatccgggcccgcggggccgtcgtcgtagaccgggggccggggtcggagcgccgcggcggggacgggcgcggggacaagctgggctgctagggcggcagggtcaaggcgggcgcggagcagagcgcgagcgagctgcgctgcaggcgcgtcggggtcgtcgtccaggcccagagccggatcagagttgcggggggcgccccagacgcgcagcagctgcgccaggacgcgcgcctgctgatcctcagcctcctgcgcctcggcccgcgcccgctcctgacgttcggcctccagcagatgcgccagcgcccgcgccagctcctgcagcgcccccgccgcctcacctcggggcactgaccgccggaagcggcgaggagcgccagtctcagccaagggcggagacgctgcgcttaggccgcggggctcctttaccggccgcgcgcagagcgcggggggcggccgaaacaggccgagcagcagcagcaccaaaaggccgacgcccccggcccgcggcccccagagcagcggcgaccccgccatgctgccccagcgagccgggctccggacgggcggactggctggcaagtgcgcagtgccggggcgagctggcgcctcgtccgatacccc

SEQ ID NO: 133734 - DNA, 385 bp, Homo Sapiens
  misc_feature (154)..(192): n is a, c, g, or t
aggatactttctttttgtgttctaagtaaaacggtctttgtattttactaaagagggcccccagctgtgcatacatgagctagagattttccccagcaaaacctgttattaacgcatctctaatgcatatctaaaatcattaaaattatacagnnnnnnnnnnnnnnnnnnnnnnnnnnnnnnnnnnnnnnnaaatttgaatgattaaagtttaattcttggacttaacctctgccaacagtcttctcttccttcctacctcagctgctcagtcccatggttactccctaggacctgactcgagccctcactcttcatccaacatcatttccagagcttgttactgtatccacccacgctctggaaatgatgttggagcggccgc

SEQ ID NO: 133735 - DNA, 710 bp, Homo Sapiens
agattcgggcacgaggacatttttattcacaataaccctgtgagatggatctcttgattttcattttatagatggggtcaggtaaggatgagaaatgtgaagtaacttctcagggttgcagcaagagggtgaaccaggaatggaaaccagatctactgactcaaattctgtgcttttctctccccagggcttgtccctccctccatgaatcaagcctaggaagctgagatggagcaaaaaaaggaagggaaagggaagaaaaggtgattttgggtttatactgcccttcttatcctcatctaagatttttctgaaactccttcaacaactaaggaaaaccacacacattaaaaaaacccaacccaacagcttgcagaagcctgggattccagaataaatactaaaattggcaggacacgtagtatcctttctctcagtgggtcacgtgaggacactgcccaacatctgtcatgtgtgtctgggaatatatatttatttcttgctgaatgctcagatgcctctttcttgtgccaaaaagaactgctacatcctaccttctgatctaatctaaaaatgccatcaaaatctggccccaaagacctacaaattattttaaacacaggacgcttcagtatcctcccagcctcctaagagattggttcagataaaatcatgccaaatgttgagtaaatgggaggggttttggccgc

SEQ ID NO: 133736 - DNA, 678 bp, Homo Sapiens
  misc_feature (655)..(655): n is a, c, g, or t
aataaagcaacctgtttattttttaaaaagataaacatggctgatctgcactaatcataacattttgaaggaaataaaacaatattcaacatttctagactacaaataaataataccctgttttacttattctgttaaccaaagatgaaggtggaaatgagaaaattgaatgcttatggacttaaaggtatcagacatggcatttgatttttggaaaatgaagacataaatggaaaatggctatggcaatgaacttaagaatgacatttaaaagtttttacacaaactttacatacttgacagactaaaacatttttcaagtccttaattatgagaacagcagcaaaatttaagacaattaaaaatcggcatttaagaatctgctgtattattgtgaataaatgcaaaacaactgtatcagtgaagcctgggaaaatctcaattactataatattcgtgcactggctttacatttcacttttgaatgcgttccctcatcctgggtgcaaactgggtaccttcagatacaacagcttggacggggaacaagattacgacacatggctgtagaaccagtctcgctgcgttacagttacagcatataaacaactctgtctaataaaaacagtaaaaccaggctcaagtgcacaccctngtgttacaaacacatcacatatc

SEQ ID NO: 133737 - DNA, 1337 bp, Homo Sapiens
gctgctgggtggctcgcgtgtcgtcgtgtgtcgagcgacttatataagcgatgatcttgtcgttgctgtgacgtgagtggcgcactcagtggctgctctgatcagtgcggtgtgagtgggcagtctcagttacatgggatcgctaggtctgtgctatcgtatttattgtagttgtgaggtaatatgtgagtgcggctgttcggtttcacccttttgggggaacccacgcttttatgtttctgatttttcttttcgttgtcagagtataaaaaagtgagtgcagcaaaacaaggaagacgagacaggcgtgcgtgggccagggcaagacagaggagaagggagggaagcagaggcagaagggccccttgggcgaaggctgatggtgggaggcgggcagaatacttgcgcagccacacaggggcagggatgagggtctccccgtggtgggggcttacaggatgggagcggccaggccagttgtccaaattccacctgggacctgcagtgaccagcctcgagtctggaggctcaaagcacacagaggggactaggggctcagcctcatctgtccctgagattttcagaagccacagggggactgggagagggcagaggcgcaagagggtggaggcggctagggccgccctcactgtccttccgccaggcagcaccagccccaaaccacccagagaggggttgctcaggcctctgggagggtgtaaggggagtggccctgggaaggcctctcccctgaatccaggccttcttgggaaagcagcaatgggaaggcccacgcacaaggcccttgttcttgagggcgagaggggggaagaccataaaagcaagattttcccaaagatagggcagggagcactgctaagcctgggcctgggcgcggagccacctggacagggctggggttctcgttgtgccacattttgtctctggcgcttggtcaatctggtcctttctcagctttacttctcatgaatagagggggtgtggtgacgatgtataaataatgatgaaagtgcttggcatggtgcccgttaggcgggtgctgatggccactactctagatgatgggttggcctgctgggcctggcaggtgcatgggcacaagccacagggagccgaggcagcttatggtacctgtgtgggccaacctggaggtgctggggaacgacctagaactgggctgggtgggtggacagacaagtgactcagcaggcgatgggggaccgacatcacgtggagaggggaatgtaaataaacagactcctgggagtctaggggggacatccaaaccggttctggctccaggcagctgccccaca

SEQ ID NO: 133738 - DNA, 963 bp, Homo Sapiens
  misc_feature (870)..(896): n is a, c, g, or t
gtttctgttcagagtggttactaacttcaccttctttcctcttgctgtcatctgcattcgtgcttcccacctgttgttggcatgtcctttaccttctctttccctgccacatcaacctacacactgactcatcattgacgtggaagatgtggaagatgtcaagtttgtgatcaactatgactatccaaacagctcagaggattatgtgcaccgtattggccgaacagcccgtagcaccaacaagggtaccgcctataccttcttcaccccagggaacctaaaacaggccagagagcttatcaaagtgctggaagaggccaatcaggctatcaatccaaaactgatgcagcttgtggaccacagaggaggcggcggaggcgggggtaagggtggtcgttctcgttaccggaccacttcttcagccaacaatcccaatctgatgtatcaggatgagtgtgaccgaaggcttcgaggagtcaaggatggtggccggagagactctgcaagctatcgggatcgtagtgaaaccgatagagctggttatgctaatggcagtggctatggaagtccaaattctgcctttggagcacaagcaggccaatacacctatggtcaaggcacctatggggcagctgcttatggcaccagtagctatacagctcaagaatatggtgctggcacttatggagctagtagcagcacagctccaagctgggcagtaagttcacagcagctctagcctagcagtttcagtgggataggccggtcgtgggcagcagcctacagtcacatgatgtcacaacagttgtgcacagcctccgggagctagcaatatgataggttacatggggcagactgcctaccaatacnnnnnnnnnnnnnnnnnnnnnnnnnnntcacgtaaatgaaaccactcaagtggtagtgactccagcagacttaattacattttaaggaacactg

SEQ ID NO: 133739 - DNA, 681 bp, Homo Sapiens
  misc_feature (104)..(167): n is a, c, g, or t
  misc_feature (242)..(268): n is a, c, g, or t
tacaaaatgttattccagactggatcattttggtgggcagaagaaacctggcagtgaattctaactaatctgcatgaaaagacaaatcacgatggttggggggnnnnnnnnnnnnnnnnnnnnnnnnnnnnnnnnnnnnnnnnnnnnnnnnnnnnnnnnnnnnnnnnggaaagacagtgttccttaaaatgtaattaagtctgctggagtcactaccacttgagtggtttcatttacgtgannnnnnnnnnnnnnnnnnnnnnnnnnngtattggtaggcagtctgccccatgtaacctatcatattggtagctcccggaggctgtgcaaactgttgtgacatcagtggctgtggctgctgcccagaccggcctatcccactaaactgctggctagagctctgtgaacttctcccagttgaggtggtgctactagctccataagtgccagcaccatattcttgagctgtatagctactggtgccataagcagctgccccataggtgccttgaccataggtgtattggcctgcttgtgctccaaaggcagaatttggacttccatagccactgccattagcataaccagctctatcggtttcactacgatcccgatagcttgcagagtctctccggccaccatccttgactcctcgaagccttcggtcacactcatcctgat

SEQ ID NO: 133740 - DNA, 615 bp, Homo Sapiens
  misc_feature (41)..(41): n is a, c, g, or t
tctgctggagtcactaccacttgagtggtttcatttacgtnaaggaggagcgggtggaggaggagggagggtattggtaggcagtctgccccatgtaacctatcatattggtagctcccggaggctgtgcaaactgttgtgacatcagtggctgtggctgctgcccagaccggcctatcccactaaactgctggctagagctctgtgaacttctcccagttgaggtggtgctactagctccataagtgccagcaccatattcttgagctgtatagctactggtgccataagcagctgccccataggtgccttgaccataggtgtattggccttgcttgtgctccaaaggcagaatttggacttccatagccacttgccattagcataaccagctctatcggtttcactacgatcccgatagcttgcagagtctctccggccaccatccttgactcctcgaagccttcggtcacactcatcctgatacatcagattgggattgttggctgaagaagtggtccggtaacgagaacgaccacccccgcctccgccgcctcctctgtggtccacaagctgcatcagttttggattgatagcctgattggcctcttcccc

SEQ ID NO: 133741 - DNA, 763 bp, Homo Sapiens
  misc_feature (66)..(66): n is a, c, g, or t
  misc_feature (194)..(194): n is a, c, g, or t
aggcttgccagatggcatcgcggggcgccggatgatgcagggcgctgagccagctgagtttcttcncggcgtgagcacgtccttgatgccggcggcgtggccgatccagaatcaggttgcgcgcaagctcggtgcgttgttcgttgaggggcttgccgttgagtcgaacctcaccggccgtcggctgcatcaancccggccagcaggcgcagcaaactggtcttgccgctgccattggggccgctgatctgcaccatgtcgccgcccgccagccgcagttcgaggtgctcgaacagcaggcgcaggtcgcgttcacaggcaagcgctacggcttctagaagagggctggtcaaaagatcgcgggcctttacggttcaagtcggcggtgcagcggccgttatagagaagtgcacaataacggctttggcgaccgattttagagagctggatcaaatagttgtgaggtttttaccgctctctttgcagacgggcggcattatacatgtgatgccctactctaaagagggcaatttccccagagacgacgcgcacgatgaccggtgagatcaaccttcctacgctgccgccagcaccgacgcccgggcctgccccgctgccgccgaccggcgagttgttgaaactgctggagccgcagaccggcctgatcgaccctggcaaaaccgcgaacgccgaggtgatagcgcttaaacaaggcggcgatgcatttcagctgttgctcaagttgaccctcgaaagcggccgc

SEQ ID NO: 133742 - DNA, 550 bp, Homo Sapiens
gcggccgctctacaggtttgaagccgctcgacctcagcgataaaaccgcgccattgggcgtggaaaaacccaaggatttcacctggaaccaactgctcggcttcgacgcctgcgtgcagtgcggcaagtgcgaagcggcgtgcccggcgttcgccgccggccagccgctgaacccgaaaaaactcattcaggacatggtggtcggcctggccggtggcaccgatgccaagttcgccggcagcccttatccaggtaaaccgattggcgagcacggcggcaacccgcaccagccgatcgtcaacggcctggttgatgccgaaaccctgtggtcgtgcaccacctgccgcgcttgcgtggaagagtgcccgatgatgatcgagcacgtcgacgccatcgtcgacatgcgccgccacctcaccctggaaaaaggcgccacgccgaacaagggcgccgaagtcctggaaaacctgatcgccaccgacaaccccggcggcttcgcaccgggcggtcgcctcaactgggcagcggacctgaacttgcccctcgtgcc

SEQ ID NO: 133743 - DNA, 702 bp, Homo Sapiens
  misc_feature (651)..(651): n is a, c, g, or t
  misc_feature (677)..(677): n is a, c, g, or t
tttgcaggttttcaattactttattttagaaaaacaaaggtttacaatttgtgccataggcagaatatcatgaattcaacaagttagtaatgcagactttcaaaaacctctatagattagtccaaagtagaaaattattttttgcccactcttggactcagacacattcagaaaaaatatatatttataaaaataaaatgtcaagcctaatcccaccaattgatagtcttaatatcctacactggtttatttgatcatttaatgcataaggagtgttgaatgatttttccctgtcctaactccatgtcgtatgaagcaatgatgaaaatatgttactttttgcaacaccaaaataaaaaggtcccaaagcaaaacacacacaaaaagtcactaacaatatccactaaacaaaaacagtactgctaattcacctgctcatatagacccttccttcaatcccccagatacttggcatttaaatgttatttctaaatcagataccaggaagcaactatgtgagaaagaaaatgaaaattctaggtctaatacatgttaaacaagtttcaggtaatagtagctgagaaaaatattgatgcacataatgaaacaaaaagaattgccagatataatgtggtgcacagggtactcgantaaaacatgcactttgtctcgctganatgtccttaaatattgtctgagcac

SEQ ID NO: 133744 - DNA, 663 bp, Homo Sapiens
gcggccgcaaaaagggcaaagaccctagaacgcatggacggaactcctcggggtcgaaatgagcagatttcgccatcaccctaaagcacaacgcataaaattgctttaacttcgctcgccaatcagccgtctgatctcattcgcggcgggcgaaggccctcattaccgcctgtgatccgccatcggtaaccaattgattaacgatgcctttcattcggcgtcgaatgagcacattggtggagcatccctgaagcgcgagaggctttccaaggtacgcgtacacgatgctgatgacctcgccgtattcgatctccggacaagaaacggggcgcgaaaccaccgaccttgccggactggtcgacatcctgcgtcgcggccttccgcagatcctggtgacgaccgcgctcgcactcctgctcgccgtcctctatctcgtctttgccgcgccgagctacacgtcgaatgccgtcctctacatcaatcccagccccaaccgggtggtgaacgagacagcgccggcgccgaacagtacgggcgccgatctcgccatcgtcgacagccaggtggccatcatctcgtctgacgcgatgctgcggcgtgtggtcgatacgctcagcctggacaaggacagcgagttctccggcaccggtccgcctcgtgccg

SEQ ID NO: 133745 - DNA, 638 bp, Homo Sapiens
  misc_feature (64)..(64): n is a, c, g, or t
  misc_feature (451)..(459): n is a, c, g, or t
agtcactggtgacttttatgaaaaagtatagagggctgaagaacagctgaggaagaatcagttnaaaaaggatctttttaaaagtaacttggttaacaaggaaaatgtgtaaggggtaacagactctgagaaatgctgttttaatcttgtggagaacttgtttgcaggctgtgtggaggtaaccagtggagacagaggctggagactccagggagtgggagcagtggagtaagcgagggagcagtcttggaggacatacaacaggattcaagatatagagaattaaataggagcaagaatggaggggttggggagagttacagacacagatgaatgagaggggagagaggaacagcaggcaaggaagctcttgctttaggggctgtcttctgtgaagtagacagtgagctcagtcatttgtggaggacaaagatggaggcatgggtggggnnnnnnnnngggatcacaacaagttaaagaatttccagtcaacactgagaagctcaactgaggctgccaactgtgaatctgtcatgcatagcagcccaggaggtggaagcagcaaatatgatgatgccgaaaatggagaatggctgatagtttcagcaaaattgaaggggatacgcctggcgcagtgg

SEQ ID NO: 133746 - DNA, 843 bp, Homo Sapiens
gcgcaaaccactccagccactggcgccagggttgcaaggcttcaggcagttgcatggcgggtgccccaattcgtcgcgatgcgctgaaggtgttcaaccgtcaccggcaacaggcgatccaacggcactacaacttgcgttcgcgccacaacagcaagggcgagcgcttgaaacgtgccgacagcgtctggccgagcaagtctaccggcactgtcggctcccaactggtgggcagccatacgccaggcgcgccggggtgtactgcggcgtattcgacaccgtcgacccacggcaaatccgccaccgccccagtgacgaccaatacatcgccattggcggtagcgtgcaagcgggcagcctgttcatctgcgagcagcagcaagcgcgcaagcaagcggcgcgcggcgtcgccccatccgacggctgcttgtggctcggcaggcaccggccttgggcgccaggtccaggcgtagtggtctgcactcatggcgtcagcattcgggacagttgcccgcgtacctgctgcaaggtttccggcattgtctcgctattgaagttggcgtcgatctcgcgcagcagcccttcgaggaccgggctgtcgggcggctcgctgcgggccaggtagtcttgcgcagtttccagcaagcgattcaagcgcgacatcggttgcaaggtggcctcttcgaccgcactgaacaaatggctgttgctggacgcggcaaacaggtcgcgcagcacctcgcggccatgctgctgagtctctttagtgggcagcacatacagcaggggccatagatccgcgtcgctggcttccagccgcccgcccagcaacgcggcggccgc

SEQ ID NO: 133747 - DNA, 440 bp, Homo Sapiens
aggtagaagatgtttattgtttttgagaagttgtttagcatttttcacagagcagttaagcctgttgtctttgctaagtatggtatagacggcaagaagggtccagctttgagcctcatgtgagtcacgtggttttgcctagagaagacgattgtgttccaggctgtagatgcagagtgccccagacccagcgtcacctgacttggtgatgaaccagtgtctcagggaaaactctctctaccattggaaaaataatccaaaatattcaaagcacattttataccgagagtagtttggaacatcatcttctcatcttcccttacttgccccggccctcctttgtcttgcccatgaacactgctctccaattacgcagtgactcccctaaagaaaccaaggctcactctcatgcattcccgtgctgtactggtcctcgtgcc

SEQ ID NO: 133748 - DNA, 1001 bp, Homo Sapiens
  misc_feature (273)..(273): n is a, c, g, or t
ctcaagtagcctttctggggatttttattttcttaatgaggtgccaatcagcttttcaaaatgttttctatttctcagcatttccaggaagtgataacgtttagctaaatgagtagaagtggacttccttcaacatattgttaccttgtctagccttaggaagaaaacaagagccacctgaaaataaatacaggctcttttcgagcatctgctgaaatactgttacagcaatttgaagttgatgtggtaggaaaggaaggtgacttttcttgncagaagtctttctaaacattcacactgtcctaagagatgagctttcttgttttattccggtatatttcacaaggtggcacttttagagaaaagcaaatctgatgaagactaaaagaggtacttctaaaagagatttcattctaactttatttttctgcgcatatttaactctttcctagcacttgttttttgggatgattaatagtctctataatgttctgtaacttcaatattttacttgttacctaggttctgaacaattgtctgcaaataaattgttcttaaggatggataatacacccattttgatcatttaagtaaagaaagcctagtcattcattcagtcaagaaaaaatttttgaagtacccagttaccttacttttctagattaaaacaggcttagttactaaaaaggcagtcctcatctgtgaacaggatagtttcgttagaagtataaaactcctttagtggccccagttaaaacacacataccctctctgctgctttcaaattccctagcatggtggcctttcaacattgattaaattttaaaatcctaatttaaagatcaggtgagcaaaatgagtagcacatcagtaattcagtagacaaaacttttgtctgaaaaattgctgtattgaaacagagccctaaaataccaaaagaccaggtaattttaacatttgtggaatcacaaatgtaaattcataagaagctctaattaaaa

SEQ ID NO: 133749 - DNA, 1139 bp, Homo Sapiens
  misc_feature (853)..(911): n is a, c, g, or t
aatgtgggttttctgtttccttttggcctactcccaagaagatattggtggggtattgattttagatatgcacctctgataagcaaggattgtttcccgtaggattaggacgtgctgtggatgtgtgttttgataccagtgtgctgatgcagagcgtttatttacttgttaggattttgtgttttcatttgctatttttctttaagtgcagagttcatttttgcccctgaaaagtttttgctgagtttgctgaagaaattgtatttcaaccacatccatgaaaataaaacacctcctgttgtggatggtgagcccctgatgccgcttatttgccgtgagtttggacggcacccctgctggcggatagcaagactctgtggagtttgttcagtggtacggtgtccaagcaaacagcagaatgcaactttctaaacagccccaagcaaacagcagaattcaactttttaaacaataaacaccatcaaccttattgactttattgtcccttaaattatattgactgttgtgattccatcaagtttgtacactcttttctctccctgttttgcagcaacaaattgcgaagtgcttttgtttgtttgttttcgtttggttaaagcttattgccatgctggtgcggctatggagactgtctggaaggcttggaatggtttattgcttatggtaaaatttgcctgatttcttacaggcagcgtttggaaaccttttattatatagttgtttacatacttataagtctatcatttaaagacatgtactgaaacaaatgtatttgtttcataagcatcttcctgtaatctattataaaattgaaattaaatatagagaatgnnnnnnnnnnnnnnnnnnnnnnnnnnnnnnnnnnnnnnnnnnnnnnnnnnnnnnnnnnnaaagaaaaaggaatttaaggacaggcagtagtctcttttaaaatttattcacaaaacccattaactgcacagttgctattagctgcctgttctaaaacgatagtctttttattgaaacacaaataaacttttctgtaatattttatggtatataaagagactttaattgtttgacttgtttaacttggcactgttagtttttattaataaaacgcgcatgggcatttt

SEQ ID NO: 133750 - DNA, 992 bp, Homo Sapiens
  misc_feature (26)..(26): n is a, c, g, or t
  misc_feature (49)..(50): n is a, c, g, or t
  misc_feature (53)..(53): n is a, c, g, or t
  misc_feature (62)..(62): n is a, c, g, or t
  misc_feature (148)..(148): n is a, c, g, or t
  misc_feature (255)..(255): n is a, c, g, or t
  misc_feature (264)..(264): n is a, c, g, or t
  misc_feature (954)..(954): n is a, c, g, or t
tgtgaggacagtttcttctgtggggnaccaggcccgcttatacgcggcnngtntgtttttanttttctctgccccaggtgcatcaccttcacctcatgggccttctgccgcttttgggtacccctagcggcctgaagcgcaccctggnctcgaaccaggaatgccagggacacctgggcccagcgcaagggctaatgggaagacacttttgtcagttggggacccaggctctgcttctccgtggtgcggttttanttttttctnctacaggtgcctcacctcgccttcctcaaacctcaactgcccctcatgggatttctgcccgcttgtcttccgaggctgcggtgtggatctcgcactgcggccgcctcgccttggctggggagaacctcggtgggtaggattcagaggggcttttggtttcccattttccacactgaacccttctaactggtctctgaccctgattattaagggctgcaaacaggaaggattttattcaccattgatgcggctccgagtagtcccaaagcgaggcagtgcccacaaggtctgtgctgagaaggctgctctgccttcgcggtgtctcccgggtgtgtgctgagcagaacgcagctccgccctcgcggtgcccctggcccgcccgcccgggtctgtgctgaggagaacatgctccgcttcgctgtatctccgaagtctgtgcagaggagaactcagctccgccctggcaatgctctccgggtctgtgctgaggagaaggcagctccgccctcgcaaaggcacagggcgccggcgcaggcgcagagaggcgcacgggggtacccctagcgggctcgaggcccacccgtggcttgaaccagggtctccagggtccacagggcccagagcaggagctgatgggaaggcttttcatcgtgggggaccaggccctgcttctccgtggcgcgggttgtnttttttctttttctgtgacaggtgctcacactcctcct

SEQ ID NO: 133751 - DNA, 528 bp, Homo Sapiens
gcggccgccggtttcgcggatgaagcaggtggcgacgaagccactcagcgcggcgacagcgagcacccgtatgcccatggtcaccgcttcgtgcgtcgcttcggcgatcgaaggcgaatacagctcgatcacccagccgaccagcggctgcagcagtgccgcaccgagaaagcagccgacattgaccaggctggtcgccatgccggacagcgcgggcggattcacttccttcgcacaggcccaggtcagcgagaaggcggcggcggaaacaccgatcagcgcacacgtggcgtaggtcgccagcggcggcagcgcgccgtcggcgagcacgaagggcagccagccggcgacgtagagcgcggcatagctcagcatgaccggcttgcgccggcgcaggtggtcggacagccggccgatgcccaggcagctgcaggcgaagatgaccagcagcagcgtggtgtgctgcgcggcgaccgcgcgttccatgccgtgcgccgccatcaggtagggcacgccccacctcgtgcc

SEQ ID NO: 133752 - DNA, 2305 bp, Homo Sapiens
  misc_feature (125)..(206): n is a, c, g, or t
  misc_feature (214)..(276): n is a, c, g, or t
ccaggtgattttgttggtgaggagtggtcgcgcgccgagtaacagggaatagttggagagggctccctccccacgagggaaagggcgggaaagaagtttgatggaggagcgggggacgcgcaggnnnnnnnnnnnnnnnnnnnnnnnnnnnnnnnnnnnnnnnnnnnnnnnnnnnnnnnnnnnnnnnnnnnnnnnnnnnnnnnnnnccgcggcnnnnnnnnnnnnnnnnnnnnnnnnnnnnnnnnnnnnnnnnnnnnnnnnnnnnnnnnnnnnnnngcatcgtagtactcaaacaactttatttcactagccatgagcaaaaagttgaccggctccaggggattttccatcctgccctctccctgctggtggctcccatgatttggaaataacctcatgttccacttggcagtgcctggctttgtgcacccacatggttttggcctgggtcccagtgaaaatggtcctcacctggctggggaacatggttctgagaggccccttgatctgccctggggacatgtgtggccatgctaagggccctgcccaccttcacgtgactggccacctctgccagggtgcaggcagctcctagcatggagacatccttcatggaagtgagctttcccacccacctccatacccacatttctcagaaacagagttaacagggaaccaagagtcaagaagccacagggctggtaacgtgcctacagccaaatctgtgaccattacctgaagaggcaggacaacaaaagtaatcaggaaaggagaagatgtgggctggaatgagataggacaagagaagacagaataaaggcaggaaaatcagaaacaccagagagcacagtagcattaaagggacacaccaacacctgggctcttgcacacaggggagtctaagggttccctgactccctgcacctacacctgaggagagaatccgagttatacgaggacagcatggcaaaagggccgacagggtagtaggtgtagaggcgaggcaggaggctacgtgaagggctgccaacagaaactggaaaggtaggaggccacatcgtcttttcccaaatctccatctacgagttgcctcaactgtccccgtgatactatataggtgcttgcccaaccacctttagagaagcctcagcaagcctccctcaactaggacacagagaaccctggcttttcctgttcagccggcccctcaaagacgagggcagtgcccactgcggactggatggcaacggcggcagcggtgcgggcgcgcgtgtgggcccgctgatgctgtgacagcgagcggctgtggctgaagcacttgccgcactctgcgcactccgctggccgttcgcccaggtgcgtcttgcggtgcagtgcaagcttggaggcgacgctgaaggccttgctgcactcggggcatttgtgtggcttgtggccggcatggttgcgccgatgcacgttgagattggacacgcacgtgaaccgcttgccgcacagttcgcagcggtagggcttctcgcccgtgtgcgtgcgccggtgcttggtgaggtccgagcggtcgctgaagcggcggccgcactcggggcacgcgaagggcttctcgcccgtgtggatgcgctggtgcaccaccaggtcggagcgctgcccgaaacccttgccgcaagtggcgcacgcatgtggccgctcgccctgatggctgcgccgatggcgcagcagcgtggaactctcgctgaagcagcgtccacagtcgccacatgcgtacggcttctcgcccgtgtgtgtgcgctggtggcgcaccagcgtggcgctctccaggaagcccttgccgcactccgggcacttgaagggtttctcccccgagtgcgtctgcaggtgtcgcgtcagcgtagagctcttgccaaagcacttgccgcacacgccacactggtgggcgtctgagacacggggtcgcgtggggctccgggacacgtggatgcgcgcgtgactccgcagcccggcgccgcttcggaaggctcgcgggcactgcgcgcagcggtggggtggggcagcagggtcagaggttgtccccaaggggtgcgcccgcgcctggtggaagagcagcgcgctctgccggaaggtgcgggcgcacagcgggcagcggcggggccgtctggcagatgctggcggcgccggtgtagcagcagcgccgggaggtgcgggaagcgccggcgaagtgcggcaggggcaagtgcggcatcgtgccggtgtgcgcccaagtgtaggtcagacgggcgtgtggggaagctttgtccgactcactgcaatg

SEQ ID NO: 133753 - DNA, 638 bp, Homo Sapiens
gcggccgcgggagccggggtcggggccgccctgcgcgcccctcgccctcgcccacaggtggtcgcgcgctccgcttcgaccccacggcctttgtgaaagccaaggaaaggaagcagagagagatccagatgaagcagcagcagcggaaccgcttaggcagtgggggaagcggggacggtccgtccgtctcctggtctcgccagacccggccccctgctgccttgactggccgaggggacgcccctaaccgctcccgaaaccgcagctcctcagtggacagtttccgcagccgctgctcgtctgccagctcctgcagcgatttggaggatttctctgagtcgctctccagagggggtcaccgccgccgtgggaagcctcccagcccaacgccctggagtgggtccaatatgaagtctccccccgtggaacgcagccaccatcagaaatctctggccaactccgggggctgggtccccatcaaagagtacagctcggagcaccaggcggctgacatggccgaaatagacgcacgcctgaaggccttgcaggagtacatgaaccgactggacatgcggtcataacgtggagaaggggtactacccctccatcccccacccacttgctgggtatggtgtggg

SEQ ID NO: 133754 - DNA, 686 bp, Homo Sapiens
gcggccgcctgggctcgaaaatcatcatcgccatttccgtggtgctgatcgttctggcaggagtttggatatggtaaccagcgttacgaacctttcgcgttcgggcctctatgactggatggcacagcgtgtgtctgcggtcgttctcgcggcttatttcattttcctgatcggatacctcgtcgcaaacccgggcatcggctatgagcaatggcatggcctgttttcccacaatgcgatgcgaatcttcagtctgctggcccttgtagccctgggcgctcacgcctgggtcggcatgtggaccatcgcgaccgactacctgacgccgatggcgctgggcaagtccgcgactgcagtacgttttctcttccaggcagtctgcggcgttgcgatgttcgcgtacttcgtctggggtgtgcagattctttggggtatctgattcatggctaacattccaactatttccttcgacgccatcattattggtggcggcggtgccggcatgcgcgcagcgctgcagctggctcagggcggtcacaagactgccgtgatcaccaaggtgttcccgacccgttcccacactgtgtcggcccagggtggcatcacctgcgccatcgcctccgccgacccgaacgatgactggcgctggcacatgtacgataccgtcaagggttcccctcggtgcc

SEQ ID NO: 133755 - DNA, 761 bp, Homo Sapiens
  misc_feature (475)..(501): n is a, c, g, or t
  misc_feature (630)..(645): n is a, c, g, or t
agccctaaatttttatatataaacattgctagctggtttaaacatctgttgatcaattgtccttatcatattttctcaacattttatattttgcataatatgatttctttttaaaacgttagtttaattaaaacttaaagcacctattacaactttaaattttcctaccatttaaattcatggcatactacacaaaagtattgaacatgcttgagaaataatttgatcctcctaattcatttgcgtgttctgaatagttcctatcttttgcatgtctatggcttgctgcttatgtttagaagaattgtagtttgttgtacttagaaacttcttttggttttacatattaagcacaaatatgctatttaaatcaattgctatattgactttatgtattcttgttagcagccaacagtcgacaccatctttggtcacaatgatacaactcaatctaatgaaatttaacaggatgtannnnnnnnnnnnnnnnnnnnnnnnnnngctttagtttagctcttcatggtacaggatattatggaaaagagagcttcatgtacatttaatactgaaaacattatgtttactatttataagtgtaaaccatagtgtccaataaaatacacagataannnnnnnnnnnnnnnngcacaatttctctcacaataataaaatcccttaataattcacacctttaaaatatttatactcaaatattttgtcaatacttttctatagtcagttcattatttgcctcgtgccga

SEQ ID NO: 133756 - DNA, 2150 bp, Homo Sapiens
  misc_feature (406)..(431): n is a, c, g, or t
gcacaaacatttgttattttattaccaatagtgctacaatgaacaatgcaaaatttgtggtctaattttcttgagtcttttgggggttttcttttttacattttagaaactatggtaaacttctgtcagtgtatttgcttgtctttacagactcaagtctgtctgctggcaaaaaaggaaataaatgaaaaaattcagaccctgctcaaactagagaaaaacaaattacaaatttagttgttgggcagcacataattagtaaggcaggacctcaaatggtgaccttttgcgtaagccaattgccagatcctcaaggaattaaaaccagggtgcctgagccacatcagttctgcagttatgttgagtattgtgctgagacagccataccccaagaaaagggaagtcnnnnnnnnnnnnnnnnnnnnnnnnnnagaaggcttgctgagcagggttgtagttgaaggtggatggcaggtgaggccgttcttctaatttgtcatattccagatggaactccttagctactttcctccagttaagacagtcaaagaagtaatatgttcccctctcataggtattggttttcattgttggctccatgcctggtgccctggtaatccatactcgttcttctttgtggtatctccaatcacggttaaaaagctccactgcagctaaaagttgtaatacgtctcctccattcatgtaatagagatagaagagaaggtcttcaccatatcggccaagttttattgcagccagcttatccctaatgtgaatgttcgttaagtactcagatggaacatggaagtctatgtcttgaggtcgacaaggtgaagatgcccagggtgacgcaaatttggggtagagattttcaggagagttcagattgaggcctaatgttgttaagtcacttcctaatgcaagatgtaccattcctgggtctgtctctgctgccctgataaatgttaacaggccaatcattccaaattggtccgtcaccatcccttgaggaatgttagtaacccgaccatcaggtaacacctggatcccttttttctgctggttattattttgtgttgttgaacttttatctccagggaatttgggtccatctgtacttgaagttgtcttgccagatgtattcaaattagatttactgtcatcattacttgatgttggatctttatagctggagcctggtaatgctggaaaatcttcattgtgtattgagaagtcctgggattgttcatttgctggttttgttaccattccaacataaggagctcttccagccaaggggtttattaatggagttgggttaccacttccttccctcctgtttcggtctgctaatgctgggaaatctgaaaggtccaatcctgtcacattttcacttccgtctgttccattaaaaatgttacttgataaggagttattcattccaaatgcctgattcctgttcattccaaatccagacatactgttcacagtaaaaggctgtcgagaaggctgctgctttggcatacatattatgcttggcgagcttctgttggggctacctaaccctgaactgctcatgctatttgtcctgctaggaattccaatgccctgaccaacctgggagtggttcatcatattcctaggattcataggcaaaatacccctgcttggagatggaggcgtgtgaagtgacattgttggtacccctgttgttggcgtgacgtggctcggtaactgagtgccttgtgataagctgcgatttaactgaggggtattgttgctcatccccctcattggaaggcctagtgcactttgttgcccgtataaacttgccccaaactgagacagctgacctgatgtagatggtgatgccagcatatctttttctgaccgatgtggaaacatagaagactggctgtagtacatgttttcgtcatggtagtcactgtcgaccccctctacaaacttctttcttgaagcaccaaacatgctgtttgtcacctggtagtttcttttctcagataatgtatgtccatcagtcctcaccatagagtcgtgtcctttcctcacagtaccggaggcaatcaaatagaactgtcactcaagggtcgtgtcacaggaaggaccgcccaccacgtctccctcgc

SEQ ID NO: 133757 - DNA, 1067 bp, Homo Sapiens
atccgttcggttcccattaaaaaatgttactgataagggagttattcattccaaatgcctgattcctgttcattccaaatccagacatactgttcacagtaaaaggctgtcgagaaggctgctgctttggcatacatattatgcttggcgagcttctgttggggctacctaaccctgaactgctcatgctatttgtcctgctaggaattccaatgccctgaccaacctgggagtggttcatcatattcctaggattcataggcaaaatacccctgcttggagatggaggcgtgtgaagtgacattgttggtacccctgttgttggcgtgacgtggctcggtaactgagtgccttgtgataagctgcgatttaactgaggggtattgttgctcatccccctcattggaaggcctagtgcactttgttgcccgtataaacttgccccaaactgagacagctgacctgatgtagatggtgatgccagcatatctttttctgaccgatgtggaaacatagaagactggctgtagtacatgttttcgtcatggtagtcactgtcgaccccctctacaaacttctttcttgaagcaccaaacatgctgtttgtcacctggtagtttcttttctcagataatgtatgtccatcagtcctcaccatagagtcgtgtcctttcctcacagtaccggaggcaatcaaatagaactgtcactcaagggtcgtgtcacaggaaggaccgcccaccacgtctccctcgcatgaattttcttgtcccgcggatccaagatggcgacgtatccaccgcggaggctgctgggagcaagacctttaccctctgaccgccgccgtgacccccgtcgctccggcttccctccaggcggcagcggaaggtgggagcgacgactgcaaaacggcagcgatggggtgggtaggcaggccgctttcagcgcgcttctaacaaggtggagagaggcgcttcacttccctaccgcccttaccgccgctccgtcttgtctcccaccgactcacagggaggcttgctgctcctacgcggccgttacagagagcg

SEQ ID NO: 133758 - DNA, 1554 bp, Homo Sapiens
  misc_feature (1456)..(1456): n is a, c, g, or t
atcagagcttggcagagctgagagatcagcggcaggggagcgcctggaacatgcagcagctttgcgggccctacaagatcaggtatccatccagagtgcagatgcacaggaacaagtggaagggcttttggctgagaacaatgccttgaggactagcctggctgccctggagcagatccaaacagcaaagacccaagaactgaatatgctccgggaacagaccactgggctggcagctgagttgcagcagcagcaggctgagtacgaggaccttatgggacagaaagatgacctcaactcccagctccaggagtcattacgggccaatagtcgactgctggaacaacttcaagaaatagggcaggagaaggagcagttgacccaggaattacaggaggctcggaagagtgcggagaagcggaaggccatgctggatgagctagcaatggaaacgctgcaagagaagtcccagcacaaggaagagctgggagcagttcgtctacggcatgagaaggaggtgctgggggtgcgtgcccgctatgagcgtgagctccgagagctgcatgaagacaagaagcgtcaggaggaggagctccgtgggcagatccgggaggagaaggcccggacacgggagctggagactctccagcagacagtggaagaacttcaagctcaggtacattccatggatggagccaagggctggtttgaacggcgcttgaaggaagccgaggaatccctgcagcagcagcagcaggaacaagaggaagccctcaagcagtgtcgggagcagcacgctgccgagctgaagggcaaggaggaggagctacaggatgtacgggatcagctcgagcaggcccaggaggagcgggactgccacctgaagaccattagcagcctgaagcaggaggtgaaggacacagtggatgggcagaggatcctggagaagaagggcagtgctgcgctcaaggacctcaagcggcagctgcatttggagcggaaacgggcagataagctgcaggagcgactgcaggacatcctcactaacagcaagagccgctcaggccttgaggagctggttctctcagagatgaactcaccaagccggacccagacaggggacagcagtagcatctcctccttcagctaccgggagatcttgcgggaaaaggagagctcggctgttccagccaggtccttatccagcagccctcaagcccagccccctcggccagcagagctgtcagatgaggaagtggctgagctctttcagcggctggcagagacacagcaggagaaatggatgctggaggagaaggtgaagcacctggaagtgagcagtgcttccatggcagaggacctctgccggaagagcgccatcattgagacctacgtcatggacagccggatcgatgtgtctgtggcagcaggccacacagaccgcagcgggctgggnagcgtcctgagagacctagtgaagccaggcgacgagaaccttcgggagatgaacaagaagctgcagaaggttctccattctgatgttggagcggccgc

SEQ ID NO: 133759 - DNA, 353 bp, Homo Sapiens
  misc_feature (179)..(209): n is a, c, g, or t
cagattccaaacattctctttattacgtgtttgatccagaggagaaactaagtgcagggttggggaggagggggctagacggggaggggccaccttgcctgggtgccccgggcccctaccccctttgggagccaagccatgccctcccagccccctcagagcacccgggctgttccatnnnnnnnnnnnnnnnnnnnnnnnnnnnnnnngcccttggtttgagccgcagtaggagtgtggggcaggagggctgaggttggcaaggccccttcctaggacgcaagggctcggcttaatcgctgagcctggcctgggagcgggggtgatgaagaggggtggagtcatcataaatc

SEQ ID NO: 133760 - DNA, 715 bp, Homo Sapiens
gcggccgcgatgccgggggcgatcgcgttgacattgacgtccccgctcgcagcaatcgctgcaaaggtgatcatgacgcccaccactgtaccgagaagtcccaggaacggaccgccggaaatcgcgatggtcagcattaccatcatccggttgagccgctgggtctcctgcacaaagccactgtcaagagcggcccgaatcgcctcgatcgactgcggcgacaggatgcgatgtccgctatttccggagaagcgacgccggatctcctccgcgccgagatcgaagatccggtagaggggcgcaccatgcatgagtttgcgcgtctttttctccagatgcgcgccgagggtcgctgtcgaatcgtccgcgtccacttgcagcaaggtatcgagatcactgctcccgtcacggaagtgcttgcggaacagcttgtttcctttcgaggcccggttcagcaacgatatcttttcgatcatcacgacccagctgatcacggccatgattgccagaattccgatgacgacccaaccatcgagggtcaccgatctcagaatcaccgcgaagtatccgctcaaccagctcgcggtctcctcgtcgacgctaaatgagatcagcttgctgttgtcggctccctgcccgatcgcggccagcctgatgaatcccgccggacgtgccaccttggcgatctgcagttcgtcgatgtcgcctcttgccg

SEQ ID NO: 133761 - DNA, 566 bp, Homo Sapiens
ggcacgaggcacacgcacatgcccggattccagatcgaggtcggtttgcagcagcaggcgcaacggcaccggctgcgcccacaggtcgccttcgatctcgaaactcaatgcgttgtggttcatctcgccatggcccacgcgggcttttacgcgcagcgtgtggcgcaaaatacgtggttcaaaagtggcaatcgcctggtagatcaaggcttccagggctttgatatccacactggaaacgctgttgccggccagcgcaggcaggccgtaattgaccaccgatgtgccagccggggtgtgcaacgtggcatcggcgtcgaggagcgacgtggtgttaagcaaccacgccaggtcacgcagcaccgaggcttttaattgggtcagggacagcacgcgtttgtcggcgctttccttgaggttggttgggtcatcgtcggtcagccggtccagcagggacggttgcagacggtcgcgggaagcgatttcagttaccaccaaagcagctccacggacgggctaagagagggacaaggtgccagggggccgcagcgaggtgctgcggccgc

SEQ ID NO: 133762 - DNA, 786 bp, Homo Sapiens
gcacgaggcgcggttcaggtcgatttcgtaggtagttatctgcccctccagctcaaccttgaccaacagttccggttgattttaatctggcgtgctgccccagaagccggtcgacagcctggatgtgcgctcataaaaaaactcgagcttcccgaaatcgaatttttctcggtcctctacgagaagttgggagatcatgtgctgaacggtcgtagcgaccgcgtcctttttatcagcgattgcgcgtgcaaattgctgatcgaacgcctcctggacgccaaaccttgggttactgttcaaggcttccaatgggatacgcgggtcagttgacataaaggggcgcagattcggcatgtccatcatggtgatgtccaatagcgaatgcatgccgcccagcccgacttgaccaggctccccgcgatacgggtctgtaccgagcaccttcaagtcgaaaagcgctccgaggtcgccaaatcgctcgatgagcttggtccgcgcaataccttctcgcgtgggtagtgctttgtccaatgtctggctggcaaccaaccgcttgctgacttgtctgttgaatgcatccttgagggtattgagtcgttcggggctatagctgtcctctgcatttgcaacgaatacaccgttggcgactccccaatccaccagtgcgcgggtctgagcgtgcgcattcgcagccgatggtgcacatttttgtgcatcgcacatgacctcggcaaaggtcatattggcgaaggtacctggccgctcggcttcgatagccgcggccgc

SEQ ID NO: 133763 - DNA, 1561 bp, Homo Sapiens
  misc_feature (1526)..(1526): n is a, c, g, or t
gttttttttggccatgaatgatatggcccctacgcaaaatcacctaatggcatgccactgggccaatctgggggcaatttgtgtttttcctttctttgcaaaggtggagctccagacagctcctgtcctaggcggggagcaggaaccagacctgctatgggaagcagaaagagttaagggaaggtttcctttcattcctgttccttctcttttgcttttgaacagtttttaaatatactaatagctaagtcatttgccagccaggtcccggtgaacagtagagaacaaggagcttgctaagaattaattttgctgtttttcaccccattcaaacagagctgccctgttccctgatggagttccattcctgccagggcacggctgagtaacacgaagccattcaagaaaggcgggtgtgaaatcactgccaccccatggacagacccctcactcttccttcttagccgcagcgctacttaataaatatatttatactttgaaattatgataaccgatttttcccatgcggcatcctaagggcacttgccagctcttatccggacagtcagcactgttgttggacaacagataaaggaaaagaaaaagaagaaaacaacgcagctcctgttgtatacataaggtaatgtgaaaagctcacatgtggacactactctgtgtttcggaacatagaaatttctacgccatgcttcttggcaagtgttactgttggctggcccgacatttgactcatggtgttttaaccagactttctctttttggtgttgctgagcgacggtagtttgcaaattctccaatcaagtttgggcctcaatatgacatcctatggggcaccgccactgtcagtcctttctctaattgccattcacgagtgggacttagaagagttttgcttttttcttcatgtcgttgcgtctccaaagaggtaacctgtcaaacttctgtatggacattccaaagatttcccgaaacacttcaggggctaagtggcgctccagcctggttctgtccacctctctgaggattttgtttcgccctctgttggtcaccatgagcatttcatatggaaatatctttggttccaacatgttgggcatagacactcctcggtccattctcattgcaggcatgtggccatctgggagtgtctggtaatctcgcactcccccgctgacatccccatagctgttatactgagcgaagtcggtagaaacaggccggtgaagcccatttcttccatagccagggagagatgcagttttagatgatggaatatgtgaagctgagttgatgggagaatcgtagcgactggctaacagagatgacctttcccggctctctttctccatctcttctttcaagatcaactgtcccaggcctgagttaagcttcattaattgctcttcttgaagctgccgacgtctcagaagttcctcatcatcttcctctctgccactagatctgcgtttcatgtcaggtccatgctgtttgtagatgggtggctttcnggtaaatgttgattccttgatgttggagcggccgc

SEQ ID NO: 133764 - DNA, 438 bp, Homo Sapiens
ggcacgagggcaccactgatcgggtctcccgtccagcgcgtccggcgagacggcgccgtccacggcgttgatcgccaccatgtacggggcgtccgttgccgccgccttgcgcccgtcgatgatggcggcggcgcggggcgccggcgccacgacgctcgatccaaccacgagagccagggcggcaagcagggcgccaccgacaacacgccagttcatgggttcatcccttcacacgcaaggagacaggagcacggcggcaggcagggtgaggcgcccagcgtaggcgcggcgtccgcgccgccgaaagggaggcgaggcaacgatcgggtgacggacacgcacaaggccccgcacgacgtcgtgcggggcctttggcttgcccctcgccttcgggcgaggggcgggcgggtctcagtcctgcgggatgaaggcggccgc

SEQ ID NO: 133765 - DNA, 1335 bp, Homo Sapiens
gtttaagaactgtagtgcctcctcctttttacccctggacatgaggatactctcgaccggctggtttgattcctatttgaagtggctgatgaagatagcgatggatctgaagactctatgctggaacttggatcctcatcatttatatatataagatcttttggcatttctttaaactgatacaccaagcgctgaccttccacttttgccagaatacccctttggtaatagtacctgagtgctcttcccatggtctcataattcatatcaggtttgtttttgtgcttcccccacaacctggacactgctgttagaatccgccaatttaaaaatgccctttctctcgctgggtccacttgatgtatttaggacaagtagccttgtcctggagcagtgccagtaagaactcccaaagataaattgtgtttccctttccgtctttgtttttcttccttcacagatatatttggcgtagtggctggggaatctggtcgtggtggtttagtttttcttccttttttcctcttaggctgttctggtgatgaggctcccggtgagtctgcatatttttcttgcacctgctgtgtttccatcacttcaggaatcccatctaatgtgacggacacatgggtgactggggcaacaaccatgtcatcttcaggtgaactaaatatattattatttattcgtttttcatccagcatagggccaggggaatccatattgaggagtgcctcagcagcctcaatagtttcaattgtttcatccccgtcatgacaagaagcttcaactgtaagggtgatgtcatcatcatcatcgtctatgatttcttcttcagcaacatccagtgaactctcagtaatcatgtcactgggctcttccacacaggctagaccggcataactattgagaatatcagcaccaggaacatgttccacaattacggcaggaaaaatagctggatcaccaagctgtcgttcatcctccatgacgttactagcaaattcaaatactaggtcgttctgttggacaacagcagccataataaagcattccccttagatccacatgagaaaaattccaagaagattcacgtatcaggcagcaaaatccagtgactgatttgggtaaaaaaccctcagctctgtctgtggagtaattgtatacccaagttttctttagggaaggtgcttcagttttcctggttcattgatattctagtcaaattgagacaatttttctgaaatttttcttctctcaagcttcttggccttcaagtattctttctctatcgtcttttgagcttgaaaataaaaagcctacagccgcggccgc

SEQ ID NO: 133766 - DNA, 786 bp, Homo Sapiens
gcggccgcggtccagcacctgcatggccaccttgaagccctcgccctcttcgccgaggcggttctccgccggcacgcgcacgccgtcgaaggtgatgtcgtggatgtgggcgccctgctggcccatcttcttctcaggcttgcccaccgtcacgcccggcgcatcgcggggcacgaggaaggccgagacccccgccccgcccttcttgtccgggtcggtgcgggccatgacggtgagaaggtgcgcccgcccggcgttggtgatgtagcgcttggccccgtccagcacatagtggtcgccgtcgcggcgcgcgcgggtctgcaccgcggctgagtccgaccctgcctccggctcggtgagggcgaaggaggtgatgatctcgcccgccgcgatgccgggcagccacttggccttctgctcggccgtgccgaacatgacgaggccctgactgccgatgcccacattggtgccgaagcaggagcggaaggccgggctcgccttgcagatctccatcaccgccaggcactcctcctccatggagaggccgagcccgccgaattcctccgggatcgacatgccgaagaggccgagttcggccatctcgcggatcacctcgtccggcaccttgtcctcttcggccaccttggcctccaggggccggaggcgctcggccacaaagcggcgaagggtgtcgagcaactgctcgcgcgtctctaggtcgagagcataggtgttttgtccatcctggatgctggccttttgggccgcagcggttatatgcgccgc

SEQ ID NO: 133767 - DNA, 1007 bp, Homo Sapiens
  misc_feature (42)..(52): n is a, c, g, or t
gcggccgcggctgtatttctgtgttttgatagaagtcacacnnnnnnnnnnnggataaaagaaacccttccccccttcttcaagttattgctccctccattcccctggacccagggacatgcagccctacatggccacccactgtttgcagtgtctctgggtccctaagggataccattcctgtctcgtccccaaatggtaagatgacgtaaatgacccactcctaaactgaggtcagaccacctaggcttccacctggtgagccctagcagggctgagacccccagggcggcagcctgtctgctgctgagtgattcagggagaacatgtgtgcacgtgcatgtgtgtttgcccacaccggtgacacggggccctggctttccactttggatgcccgggcatccgctgctgctacatcttagccagaacttgaagtcttttgtcccagtttgggatgaaggaaaggaggaagaggcggtggctgtgtggcccccttgagtggagccatggaaggggtggcatggtgccactggggcctgtggctgtagtagccctgggccaggtaacctccagggccctgacttttccagaggctgctgccacctacttcttatcaaagaagggggagaacagttcatctgagtcagtgcacctcccctccagtctccactccctgaggatggaatcggggaaacagcatcctgccgcctcctctctgcctgcccactcaccggcaaggttgtccctctgcccagggctcagggccatgtaccagatctgtctgtgcccacccaggcacagccactgcctcccccttggctccctgctcctaccccaggagagctccctatccgcctttggtcagagctgaaaccatatacgactgggtgtttgtccccctactttggccccaggagtaaaaaaacttctcccttttcctcctttcctttccctgccttcggggaggtgggccagggccatttcccctggcctgaaagccctttttg

SEQ ID NO: 133768 - DNA, 582 bp, Homo Sapiens
ttttacttcaggtagataataaaaatttaatagcaatatcataaaataaacacacatattaaaaaatcaagtatttagtttcggatattagaaataatatacataataaattcaacatactgatagtgctgcaagataagattttatttttcaaattacatattatgccaaccagcctgctttggactcagaggttcaaaaactttgcttttattacgaagaacatctggactgtagacacctctaacgaaaccaggttatacttggcatattgtgattgaagctgtgtgatcaacatcttaatgacctaactaaatcctctcataacagaaagaagttcaacaggcaaacatttccctccctaggatcctagttaccaaaactgtcacagtgtcaaaataaaaataattatttcctcctttttaacatcttattgtccttgaagcttatgtatggaggaagttaaaaaccaaaagagcaactttaagctatatgctaagtcagtgttaaatccacagactaatttttcgatatagtattcctggttctggtccttaaagagaaataaaggcattaaaccaa

SEQ ID NO: 133769 - DNA, 731 bp, Homo Sapiens
  misc_feature (668)..(668): n is a, c, g, or t
aggaggcatcgacctgagatttaatttgcacataaagggacacagggtcctgctgctttaacaagctgcgtgtccttaaacaatctaacgaaaaggaccaatgtagaaagcgtgagctcccggggaattcacccaagtctcgctgggatgggaaagttgctcctaatatattctgttccagctcccttttggagagttcaaaacaattgcccatcactttccctcaggggtctgtccagggtcctttgggtccaacgaatgtcactgttggccggtcaaacggaaggaacttgccccgaagccggcgagcttacaggtctccgagcagctttaagagactcgccaggcaccagagaggagaggttttgctgaatttggattcagctcagctcagtgcctgacacaagtggtcacttttctacctgcagagccccacatggttgtcactgagaaaatcaagtgacacaatgacacacttttttcaagggcacaggcgggaggagtggagcccacgctggttcttgcgcactcatcaccacgcagcgtctccctggcgtctgctggatggcagccggcaaatgggcagcatctctgcagaattatttgtgctgggcactgaggggcatctcagcacctgccaaggggagatgcttagccccatcaggtcnccagtggtagggcctgcgagacagcctgggcatctcccgaggtccccgtgagccgttcatgcc

SEQ ID NO: 133770 - DNA, 775 bp, Homo Sapiens
gggatgatctgctgctctgccggggctggccactgccgggttacccaggcctgcaatggggcgagatcaccaagcgcacactgctgcgccgctggcgcaagcaccgcccggacgtgctctacatcgccaccgaagggccgctgggcctcagcgcactgcgtgcggcgcggcagttgggggttgccgtggtcagcggctttcataccaatttccaacaatattcgcggcagtacggcctgggcctgctgacgcgcctgctcactcattacctgcgctggtttcaccggcgcaccgccatcaccctggtgccgagcgcgagccagcgcctggagctggagcgccgtggtttcgagcgcctggcgctcatggcccgcggcgttgacgcctgcctgttcaatccggcccggcgcagccaggcgttgcgcgagcgctggggcctgggcgcggacgacattgccgtgctgcacgtggggcggctggccgcagagaagaacctagggctgcttgcaccgtgcatggaggccttgcgcaaggcttatccacagcgccgcatgcgcctggtcatcgtcggcgacggcccccagcgcgaaacgctcgaacagcagttgcccgatgccgtgttctgtggcgcccaacggggcgaggtattggccgagcactatgccagcggtgacttgttcctgtttccgagtctgaccgaaaccttcggcaacgttgttctcgaggccctcgcctcgggcttggcggtggttgcctatgacgaagcagcggccgc

SEQ ID NO: 133771 - DNA, 994 bp, Homo Sapiens
  misc_feature (288)..(296): n is a, c, g, or t
acacccagaaattttatttcctatcatcaaatacagagcaaactgaatttagaaatctgaatccaacaaaggatttcgaagaatccacaatccatgttctgtacccaattattaaagttcaagtgatagataagtatataatcttaagagaaaagcagattataaaatcttatattgaatcaattatgttcaaaaatgtatataaaatactcatatatacatacatcttctttatgttttctgcatcttctaaatttcctactataaatacatagagagctatatttnnnnnnnnnctatagaactattttgcaatgagacatgtagagaattgggccatcatctcaaagaaaacatgtaaaagaaaaatccttattccttcttatccaatcaaaatgctcacaatttaaattcctaagggaattccaccaccctggaattgtactactcggtttccaggtatctacaactctctctgaaagcaggcttctttcaagttaatgcatttcctgtaagaacgttagttctcatgttcaatatataagccatatcaatttcaaagataaataatataccaaacaagaaagtataagaactttatgtcttaaaaattaaagatactggatataattccttgaagcacgctttgcaaagttttcacaacaaagtttaaaatataacatttaatttattctatattgtaaaatttatcctttttcatcatagcagtcaactgaaatggttcactagcctcttaaacttggggttttaatcatttcttaatttgaactgtgtttccactttctccttattgataatggcaacaaaatctgaagtgtttacacaatccattcaactagtcaacacatttattgagcaaccattacaggcaatatctgttgaaggaataaacatagtaaatgctgagtgtagagcagtgagcaatcagacaaggtaaaactgctaaaacaactataataaactctactataaa

SEQ ID NO: 133772 - DNA, 1138 bp, Homo Sapiens
gtaaccccttggttttaaagtggggccaaggaccaggctactaatgggtcaccaacggacctctttcctttaaatccttacctttatacatcaacctttcaggtggctcccccaaaatgttataccaaatctgtaaaatgcaaataaaacaaaagacaaatctccatcacgtacaacatgaactgaacagccatttaaaaattcaatgggtgagaacttcttggacctcattggctagattcctttcttaaaatccatacaccgaatttaacaggaaggttcccattccttgaagagcaaacttcagatgtacaagccttgagtgaaatatatttttggtggctgagtaaccatcttactgaataagagacacgatttttgtaaactacacgagagtgacagatgcacaaacgttttggccagtgtgcctttaaatagatgtctcttctggtggagggatgtctagagggaggaaggtatgcattctataggactgcagccttcaaagctgctcagtcatgtttttgccagtgggtcaaacacctgcagtgctgtcctcttttcttggtcactgattgtcacccagtgacctaaggttttgtgttcatgatctggtggcagctctgccttggcagctgaagcgccagctgacactgggtctatgggatctcttttggggctcctggttcctgagtccaaagggtctgagctcttagaaagccaagtgttattcaacagtttagggtggtgaagaaggttccagaaggggtcctgataatcaccaagaagtggggctgcctctggcttcatcgctttggtgccatcgctgtcggggcttgtagcagatgaagtgctgagaaagtccccttggtgggaagacggtgcccgcggcaggtgggtgcccagaggggctgtcactgctattgtaagtgaggccctggagaagctggctgttgctctgcaggacctgcaggtggaaggctgcgggggctgacttcttcctcctcgggggtaccttgggcacaagaggcggcgcctccagaggtggtggcacagaggctcctgccccaggaggggcttcgtctgatgctggcttcctgtggcttggcctctctgcagctttcacaggctgaaattt

SEQ ID NO: 133773 - DNA, 461 bp, Homo Sapiens
aaatttgtcttgccttattaaagttctgtaaaatatacttaaatggaaaaaatgatgttcatttagattgaaaacttttctcagatggattgataattgcattcatcttgtgttttatatgagaaggtgcctcaagaatttcctgttggatttgtttaaaaggatttttatctttcgtgataaactttgctgtgtaccaggaactataaaaacaaaaacttgttactaaagaaaatatctgaaatgtgataagttcttatgccatgttaatttcatgtgtcaacttcaacatttacatgtattatttcattatgtaaaatgttttagcaatttaatattttgcacagttagcaaactttgtatgtcatttccttcaaggcatcatgcagagttgacatgagatttataaggttttaagttgtttgcatgtgaaaatcaaatacatactttggtagtctttg

SEQ ID NO: 133774 - DNA, 659 bp, Homo Sapiens
  misc_feature (343)..(383): n is a, c, g, or t
cacccaggcgcacttctggcccctctgaggattccctagggctgccccgcagaggggcttccccaagctctgttttgaagcctgcaatgtggaaaagtgagaagtcagagggaacaggacaggtgcagccgggctctgaggccacacctcacacctcgctgttccccaacatcccctgagcagtgtgagctcatctcaccagatgagaagaggccctgtgcatttcttttgtttgtttgttgctgttttcccccacccatccagttctcctcagcaaagcaaattccttaacacctttggtggagaatttcttacccagacttggggctgtgatgcccttcannnnnnnnnnnnnnnnnnnnnnnnnnnnnnnnnnnnnnnnnaacctgggggccatcctggtggcctgggagcgtgaggagaggccccctgtgtgctgggtgagtggtgggtgtggggtcaatgcagtgaggctctctgggtgaggctcccaacctggcagtccccagcctcccagcatctgtgagcgtctgttggactttacagaagagcctcatcccgtctgcccctcactctgccctggaatcaacatcttccgagtccttcttgggggaaatagcagagccccacttaactccataaactgcttcccattccgc

SEQ ID NO: 133775 - DNA, 893 bp, Homo Sapiens
gggacgtggggccggggcggagagaggcgagcaccgggaaggggagcgtggggccgctggaatccgctgtgtggcttacaataaccagtcaaacagattggctgtttcacgaacagatggcactgtggaaatttataacttgtcagcaaactactttcaggagaaatttttcccaggtcatgagtctcgggctacagaagctttgtgctgggcagaaggacagcgactctttagtgctgggctcaatggcgagattatggagtatgatttacaggcgttaaacatcaagtatgctatggatgcctttggaggacctatttggagcatggctgccagccccagtggctctcaacttttggttggttgtgaagatggatctgtgaaactatttcaaattaccccagacaaaatccagtttgaaagaaattttgatcggcagaaaagtcgcatcctgagtctcagctggcatccctctggtacccacattgcagctggttccatagactacattagtgtgtttgatgtcaaatcaggcagcgctgttcataagatgattgtggacaggcagtatatgggcgtgtctaagcggaagtgcatcgtgtggggtgtcgccttcttgtccgatggcactatcataagtgtggactctgctgggaaggtgcagttctgggactcagccactgggacgcttgtgaagagccatctcatcgctaatgctgacgtgcagtccattgctgtagctgaccaagaagacagtttcgtggtgggcacagccgagggaaccagtcttccattttcagctggttctctgtgacatctaccagcagtgagaagcagtgggtgcggacaaaaccgttccagcatcacactcatgacgtgcgcactgtggccgc

SEQ ID NO: 133776 - DNA, 926 bp, Homo Sapiens
gcaggaccagctgaaaatggaagctgtgccctcgcctgtgcccaaccacgaaacctgtcttcttggtcagctacagcaatgggcctgcacgtcagcattagcgatgagatggctctttcacaggcgtccacagtgggctgagtcccagaacgtgcaccttcccagcagagtgccacacttatgatagtgccatcggacaagaaggggacacccccacacgatgcacttccgcttagacacgcccatatactgcctgtccacaatcatcttatgaacagcgctgcctgatttgacatcaaacacactaatgtagtctatggaaccagctgcaatgtgggtaccagagggatgccagctgagactcaggatgcgacttttctgccgatcaaaatttctttcaaactggattttgtctggggtaatttgaaatagtttcacagatccatcttcacaaccaaccaaaagttgagagccactggggctggcagccatgctccaaataggtcctccaaaggcatccatagcatacttgatgtttaacgcctgtaaatcatactccataatctcgccattgagcccagcactaaagagtcgctgtccttctgcccagcacaaagcttctgtagcccgagactcatgacctgggaaaaatttctcctgaaagtagtttgctgacaagttataaatttccacagtgccatctgttcgtgaaacagccaatctgtttgactggttattgtaagccacacagcggattcctgatggaacataattaaagaaacgtactcgatggaccttaaattcacccattccagcggccccacgctccccttcccggtgctcgcctctctccgccccggccccacgtgcgcgcgcgctcggacgcgtggtcgacgatatcccgggaattccggaccggtaccagc

SEQ ID NO: 133777 - DNA, 1115 bp, Homo Sapiens
aacaaacaagtgaagctatttatttagaggttactgtaacaagggagtgggctaccattatctattaatattatccatgtttggcggagactcaaagactgacagacagtggaaaagctttttagtaatgcaaaaagaaaaagaggctatgtagagaccttgatggcaggttgttgtcatgggaaggactgggacaggttacctggacacatgtcatcttatggaattgattttatatttggctttctttttgttcatcctgattgaaagtgagaacaaatacagggaagttggcagcattgacttagtcctgaccatctgagctggttattacaaaggctgtcatttgactttctggattgattgctacagaagttgttttttggtttcctgggcatctaatgtgagtcatcagcgttatattaccataagtggtctggccattgtccctttgtatattcagtctttcggtggttattttccctacttttttctaacctttatcaacttggatttctcactctctagagatctagcactgggagagagacaacagcagaaaggggagcacagactttataaaggtaatgctggtagaatctgctgtcagtctcctcttggtatggcaggcacttgaagccaagtctttttctttaaacctttgatacgaagtgtagtttttgaaccagacacatcagccatcacctttggagtttgccatagcttaccgaatatcctgtattgcagcaagatacttaggtagtttgtaagcacagtaacatttaggaagcagtgctctagaatgcctttgtgagttttccctgggttttctcagtgacatgttccagttgcaattttcatgaggttgatggtccccctccactgactgctttctgttactcttcagtccacaggcttcattttgtgaatgtgtccattttatgcttggtcattttgtcccttaggttatgtcacttgcagtacctttcaggaaagctccaggctggattaatcaacgtgctgatcaaataactcctaagaatttggcagacaatccaggcccttggactctggatttgttgatggcacagctgcatactgccaaatgttgccac

SEQ ID NO: 133778 - DNA, 1238 bp, Homo Sapiens
  misc_feature (1164)..(1198): n is a, c, g, or t
  misc_feature (1201)..(1201): n is a, c, g, or t
tttttcactctttaaagttttatttcactaacttcagaccaaattcccacaactgtgttctggtcaatttactatccttgcttggcttccccaaatggtagtaccaaaagatttgtggggtagggagaagagaccactttaagaagcactgcatttactcatcttccacaaggcaacagagttgggcatctgattgttcaacaaaacaaagctttaatagcatccaggagggcagacaggcaaaccacgctgtagacactcttctatttgtcaaaatcagaccagagaaaacctactccacacagatataataggtattgatattcatcttttctttttctgttgccgcaacatttttcttcttttaatgatcatatcatgtagtttctcaagtccttcctttaggccatctcctatgattgcacaggtaggctgcaaatgccaaggagttgatgagctcagttcacccattgctaacaatttctcaatttctgaaagtgacaatgagttcctcaaatcttgtttgttagcaactataagtacagggactccctgattttctgatatcctagttattttgtgaagttcagttttggcttcttccatcctttcgacatcaacagagtccacaacaaatacaatgccatctgtgcatctggtatatgacttccacagtggccttaatttctcctgaccacctacatcccagaagtgaaaagtgactgttttagaatttcccaaggttaccttaattttctcagtgttaaatcctttggtaggtacggtatttacaaattcattgaactgcagcctgtataagacagttgtctttccagcacagtccaaacccagaataacaatgtggaaagactgaaatgaaggcaggttggacaggatagaagtctggtctgacagcccattccccatttccaggtgcaaataaatgtcccaaattgaaatgcttttctcttcttggtttagaacttctcttggtagctgatccagctataagactgctcccgatctggagtctgggtccaaatgagaaagcattggcaggcgtttctacgcagggataagcacccttccagcttagctctccaagcagctctccccggccgtaatggccgaattcccgggcatatgtccggtaccgtcgactgnnnnnnnnnnnnnnnnnnnnnnnnnnnnnnnnnnncgnccgcttcctcgcataacgcactcgctgcgctcgtcgt

SEQ ID NO: 133779 - DNA, 779 bp, Homo Sapiens
gcggcgttggccagcccgatggccatggccgcagccagggtggaggccaggagcatcttgttcagcgtgattttcatcgcagtggatttcctgtttcgacagttatgcctgaatgtatcattggcgctcgccccaaaagttaacgattcagtcattaatttgcggcatgagtgatatcaatgcgcacgctctacaccggcgcagacgttgtctttactctcgcccgctaccttccttcgcttgaatgagaacaccatgaccgctacctcacacgcttcaagcaccatgacccgaggcatggtgatgctgtttgcgttctgttgcggcgccattgttgccaacatctactacgcccagccgatcatcgagttgatcgcgccggacatcggcctgaccccggcactggcgagcctgattgtctcactcacgcaaatcggctatgccttgggcctgttctttctggtgccgctgggcgacctgctggaaaaccgcaagctgatgatcatcaccaaccttgtggccatcgccagcctactgggtgcggcgtttgccgagcagccgaatgtgttcctgcttgtgtcgttgctgatcggcttcagttccgtctcggtgcagattcttatcccgctggccgcgcacctggcgcccgccgagtcccgaggccgtgtagtcggcagcatcatgggcggcctgttgctgggcatcctgctggcgcggccggtgtccagcctggtggctgaccactttggctggcgtgcgatgttcatggcggcggccgc

SEQ ID NO: 133780 - DNA, 613 bp, Homo Sapiens
  misc_feature (101)..(125): n is a, c, g, or t
ggcacgaggtttttctttgtgaggtggagtttgcagagagctgcctgggtgacaagagtgaaactccagtctgggtgataagagtgaaacttcacctcacnnnnnnnnnnnnnnnnnnnnnnnnntagtgtccagaaaatgcccctttcttctgctagtttgagaaactgttctaagagggcctttcattgaagtgacaggatttttacagaagttgttgcctgtcgggtggtgctagaggctggggctggtgcaagctgcagggccctggcatcctttctgcaggagctggccccatgcatcagctgttttctaggcaaagaggtaagaggtaagagggtgtaggagccacactggctcctcgaggacacagctttgtggcgttacaaaagcctcgttccactgcagggatcctcgtgtataatagtgatagtttccagtctcgagcacggtcaagtgccaggcctgggcttgagtccttgtatccctgatgtagttctcaccaaatacagccaagaatctagacaaggaaacgatatctggagaggtcacaggtttgccaagtccttggtagagctcctttccagcaagttctgggtgcttacgtggccgc

SEQ ID NO: 133781 - DNA, 463 bp, Homo Sapiens
taactgttctgattcagtttcttcctcatctattgtgctgaggacaatatcacctaacccgcagcacagatgtgaaaattaacttttctaacctaaagtgcaattcaactaacactgtggtaatgacatactcaaccaaagtcaaattattatttttggattatctatctcactggtccctagcaatatctgacaaagttgagaacgctggaatacacaaagtaaaacccaacctcaccactaaaacaaaaatacagtttaaggcccaagatgtctaattacaaattaacaggtcttaaaaaactaagaccctctgaaccaaacaaatcttatctaactaaaatactcatgaggccaggtgcaatggtgcacacctgtagttccggctacttggaaggcaggagaactgatgaggccaggagcttgagacccgcctgacaacatagcaagaccttgcctctat

SEQ ID NO: 133782 - DNA, 867 bp, Homo Sapiens
gggggttgtgtggggggctggactcaggtggccagaggcctgggcacatcatcctgggcacgccgtacctgtcatgcagtctgagtcatgctgccagggcaggtatccagctcccagcctgggagtgccgagagccaaatccactgcagattaggggtgatagtcagggtcccacgtcctctatctgtcagcaatccagtggtgatctaggataaaagccaccctgctcgtcagcacacccaagctcctgggctattggggctcctagagtgggctcatcagcagggttctgggcaatggtcagaatttgccatgcccctccttgtggtctcccacaagctgcaacacctgccccgcagctcctgcaggttcaccttcatctcctcctggtcctgggccagcctgacgatgtcctcctctcccagtgctgcgtctctgacactgccccctggctgatgtactttcctgcaggaggacatggctcagatgctggggcccctcggacggcctggcagctccccccagcggtgccctagcctctcgctcactatggtgtctgtctgtcctgagaggtggatgaattgaagctctagtttctctacccgctccttcaggtccaccttctccttccataaagtcgctgtggagccaaaataatggggtcacatgtcaggagtcacctgccttgtcctgccccaccgccccccttgttggcccatgccaggacctactcacctgcagcttctccatggccccctgcagggcccgggtgggtctccccaaacacagactcacccccactctctggggctggggcgctacctctggcttcttctgggacgaggccactgggtgaaccaggggttg

SEQ ID NO: 133783 - DNA, 1554 bp, Homo Sapiens
cggtccggaattcccgggatgctacgtgcagagctgtcgcggagccggaaagcagcggtgaagcccctcggctcggccgagaccgccgtgcccattgctcgcctcggttgccgccgctttagccgcagccgctgctgccgccgccgggggagaggcagcctattgtctttctccgcggcgaaggtgaggagctgtctcggctcggcccgcgggggagccccgggagccgcacggagatggaggaggacatctggacagtgagcaggaggcgcctcggcccatgccgaacatcccaggggacctggagagccgggaggccatggtggcatttttcaactccgctggagccaatgcccaggaggaacaaagggtgtgctgccagcccctggctcacccagtggcctcgtcccagaaaaagccagaggtagcggccccagccccagagagtgggggtgagtctgtgtttggggagacccaccgggccctgcagggggccatggagaagctgcagcgactttatggaaggagaaggtggacctgaaggagcgggtagagaaactagagcttcaattcatccacctctcaggacagacagacaccatagggagaaagtacctcagccagggggcagtgtcagagacgccgcactgggagaggaggacatcgtcaggctggcccaggaccaggaggagatgaaggtgaacctgcaggagctgcggggcaggtgttgcagcttgtgggagaccacaaggaggggcatggcaaattctgaccattgcccagaaccctgctgatggagcccactctaggagccccaatagcccaggagcttgggtgtgctgacgagcagggtggactctcaggcttttatcctagatcaccactggattgctgacagatagaggacgtgggaccgtgactatcacccctaatctgcagtggatttggctctcggcactcccaggctgggagctggatacctgccctggcagcatgactcagactgcatgacagagaacgtggccagtggagacggcacactggaaatcagagtgaatgttcttgaaagagggtcacgggtcaacaaggcccagccaaaggatgcagtagaaccattttccttagaaatctttgggagtgaagtaggcttcagccactcccatccctgcccttgcggctaccactaccccattagtttagacagggtcgggcggggaggggtgtggagaagaaatgagcttgcctgtggcccccaggctccctctgtcctagctcaggtctgggtgccattctttacactcgtgtgctcgctcacgcacacatcacacaccttgctggtcacacagtcacagactcgcctctgctcctgtggtccagtggccggacaccccctgggatggctcaaaggagtcaggacttggaagtggggacatcagggtagctgaaggaaatccacacacccagagcatctcggagttcagactctcagacctgaagtaggcgcccccgggactgggctaggagttggacggaatggaggatggaggacagcga

SEQ ID NO: 133784 - DNA, 685 bp, Homo Sapiens
ggggatagcatcctttttacttgatgcacggcgagctggtagcccgtgtacttacgaatgttgataacgccggtgtcgaagatcaggtactggcccttgatccccagcaacgtgccttcggcaatcgggttcttgtccaggttgaagctgacgatcttggccgggtattgctcgaccgggtaacgaatttcgatcggctcgatgtcggttaccggttggatggcctgcaagccaaagcgttcctgcaaccccagcaggccgtcggcgcaggtggcgaacagctcatcgcgtacctgcttgagatccaccgattgcgcatcgcccttgagtaaagcacgccagttggttttatcggccacttggctgcgaaacaggtcttcaacgaaaccggattgctgacgggtcgccacgcgcatgatcggcagcgcctggctggcgccctggtcgagccagcgggtcggcaactgggtggcacgggtgatgccgaccttgatgcccgacgagttggccaggtacaccacgtggtcggtcatgcagaattgttcgccccagcccggatcacggcaggtgccggcgtcgtaatggcaacgctcggggctcatgatgcacaggtcacactgggccagtttggtcatgcacgggtagcagtaaccctggctgaaactggtcttggtcttgcggccgc

SEQ ID NO: 133785 - DNA, 917 bp, Homo Sapiens
  misc_feature (610)..(650): n is a, c, g, or t
  misc_feature (866)..(866): n is a, c, g, or t
tctctctacaggggctttaagaatgagtgtcccacgggcctggtggacgaagacaccttcaaactcatttacgcgcagttcttccctcagggagatgccaccacctatgcacacttcctcttcaacgcctttgatgcggacgggaacggggccatccactttgaggactttgtggttggcctctccatcctgctgcggggcacagtccacgagaagctcaagtgggcctttaatctctacgacattaacaaggatggctacatcaccaaagaggagatgctggccatcatgaagtccatctatgacatgatgggccgccacacctaccccatcctgcgggaggacgcgccggcggagcacgtggagaggttcttcgagaaaatggaccggaaccaggatggggtagtgaccattgaagagttcctggaggcctgtcagaaggatgagaacatcatgagctccatgcagctgtttgagaatgtcatctaggacacgtccaaaggagtgcatggccacagccacctccacccccaagaaaccctccatcctgccaggagcagcctccaagaaacttttaaaaaatagattgcaaaaagtgaacagattgctnnnnnnnnnnnnnnnnnnnnnnnnnnnnnnnnnnnnnnnnngccattcatctgggctggcagaggggacagagttcaggggaggggctgagtctggctaggggccgagtccaggagccccagccagcccttcccaggccagcgaggcgaggctgcctctgggtgagtggctgaacagagcaggtctgcaggccaccagctgctggatgtcaccaagaaggggctcgagtgcccctgcaggggagggtccaatctccnggtgtgagcccaccgtcgtcccgttctccattctgatgttggagcggccgc

SEQ ID NO: 133786 - DNA, 827 bp, Homo Sapiens
  misc_feature (488)..(497): n is a, c, g, or t
gaacgaggaatattcaaagtgtaccaacgtagagaaaatagctttaaacaaagcccatgtgtacctatcagtatgctttaactgttgtcacctttctgccccacttttatctatctcgaacacccctttctgcacactctttaaaccactgtattaacaaacacattagactgcatcctgccagacctacccatacagacatcaaagtaatgattattgcttattgcctgacctaggatgtgagctccatgagaacagagactgtttacctctcgctcccctgcacttaaaacaatgcctgcttggtgtaaagtaagtgctcagtaattttttaatgtgtgaccaatgaaataacttcaagagcagagagctcttttagattagaggcacatactaagtgccagcattcaacaaaagacagacggaaataagacagatgcaaatagatctcatttattaactgtgtaatgcagctgccactgcaattnnnnnnnnnnttttagtatcaacctttcaaattcctcaaaattaaagttatgactaacttcaccagcaaaggaaaaattgaaggatgtatcaagttgccatttctagcccatcaaatcggctttataaagggaagcatagtatctggtattgacgaccttgtagagaaacaggccttttcctgcctcagggaagagagctgactcaaagtaaaggctttgctagaggcagtcggcagagtatttttagcatctaaaatgctcttccacttcggcagtgaccatgcgatgtaatcaaaggagaatacgtaagtgtatggacccgggaatggtcgcggccgc

SEQ ID NO: 133787 - DNA, 1330 bp, Homo Sapiens
  misc_feature (378)..(394): n is a, c, g, or t
tgtgaaaatggatagttctgaggaaatgggaaaagccagttgctgagagaactgcagtaaaggtaagtcggtcccatgaagggatacctacttcctacctctgctcctcagctatgttctcttcataagcagaaattctgtgaccaggcaactttctgtatggtcaggttgcctggcctaagtccttggcttgactaaaagcccttaataatccagccagtcccccacggtttcagaggaatttctaggactgctaaccttctattggcttactagggattcaggtcctaatctataacctcaacatgtgctttgaccatgtgcctcccaggctccactacggatataacaggaagtacttacaaaattcctttatcnnnnnnnnnnnnnnnnngcaatcagtttctcaggttaaaaaataaattcctttatctttgtttgaaagagaagatcaccaccttaaacttcctaaatgttcatgagtcaaacaggatgataatatttaccccactgttatcatccctaccttttatttaatgtcatgagtatagggtgtggaccggaagaagcaatacagagtttcacagttgtgctgggtaattcataagttttgtatgtgcctgggatattagggttgtaaatcacaattaaagatgaaaaatgttaggagggaagtaaagcagaaagcccaaatcagacagtgaatcagggattaagtgggagtggtggaaaggcaggctaagaacatttccagagatagaaaatagcagagactctctcaaaacaagaattcattgttctagcattcaggaagtgtctatatagggtgtggaggaaaaaaaaggagatgtgggacatttcagagcagacactgcccagactagatcttttatccttccatgcacatgcacatgtacaccttagttccattataagcttttggtgaaaaaagtaaagcattttattgaaaaagcctcacagttctgactctttgtcattttcatccaggtagtattcatcatctgtggttgtgtctgtgtcacaatctgagtccactgggtcatcctcatagatattaagcggttcacttggagataagccatcttctggcacctgactactgggagaatttgagcttaatgactctgaggggttgggagggttcctcaaatcatcttttaggaagccagggttcttaagaaaacttggtttccataatcttccttgtgtaagtgacctctttacattttctaagaaagctaactgttttctttcccaaagatcccatagtcgcctcgtgccgaatacgccacccaggcctcgctacctt

SEQ ID NO: 133788 - DNA, 1196 bp, Homo Sapiens
ttttttagggaagatagtaaaattcatttaataggcatgttccatataaccattttgttacaaattttgcattttccacatgaaaaaaatcacagtaggcacatactagaagcaaaatatgtcagacaaaaatatcctaaagatgtttctgttatcaaacttttacaatttttccaagacgtttttgaggtttgggaaaaagtctggggcatttttggcaaaaaacaaacacactctatccatgtgagttttgactattgttctttctcaccaaaaatgtccataattttctacaaattccatgaagttttaaatcaatcatgtttgatttacatttaccaagaatgatttgcccatcaccataaaaattgaattaaaaatacatcaggctaaataaatccaaaagagaacagtgaattttgttgggtttacagacagtggtatgcattttctgtgatcatgtattattcttaaccttttgcccttcagtgcggtttggaagtaacctgccttttaatagcttaccttggacatcatcattgcaatcaaagtgagtagcatcacaacacaattatctaatatacacatgctgcttagggctgcaatgttaccacagttaccaccagattaaatgtctcaagaaaacagaaccactaagtctttcaacatgccagaaattcagcactcttgatagattatgagccttcatttttcttcattttgagggcttttccaatgtggtcttgtgttgttttttcatctgttctcttgttgcatcttccttcacggagagagcctccagtttgaggggcaaatctgaggttccgtctgtggcagctgaactctggatgtctggtaaggcattccggcggcctgcccttgctgaagatgcaaaattggcgaccccagactccacgtcagtcatttttgatgaatctgtcctcatagcaacataaatctctgattaaaatatgttgttatttctgagacaggtttaaaaaattctgataaactttctttctcctatctttcctgtccctggcacagggttttctgcttctcccagagttatcttgatgaagtgtcttttcagtatagcatgactccagccgcgcgcagctgcctgccctgccggtgccctggcgctcgcgctcgcccagcgctctgcggcccggagctgcgactcgggctctagc

SEQ ID NO: 133789 - DNA, 1055 bp, Homo Sapiens
cgaatgtgatatgaccgtgttaaaaaagaggtggtacggtccggaattcccgggatatcgtcgaccacgcgtcgcagaagatcttcgatgggtccctacaaccacaagatgttatgtgtagcataggtgttgttgatcaaggctgttttccaaagcctctgttatcaccagaagaaagagacattgaacgttccatgaagtcactatttttttcttcaaaggaagatatccatacttcagagagtgaaagcaaaatttttgaacgagctacatcatttgaggaatcagaacgcaagcaaaatgcgttaggaaaatgtgatgcatgtctcagtgacaaagcacagttgcttctagaccaagaggctgaatcagcatcccaaaagatagaagatggtaaaacccctaagccactttctctgaaatctgataggtcaacaaacaatgtggagaggcatactccaaggaccaagattagacctgtaagtttgcctgtagatagactacttcttgcaaagtcctccttatgagagaaatggcagaaatatgggaacatgtacaatttagacaagtttgcaaagaatcctgcctttgaaggcagttaatagaaaagacgctgcctactactgtttgttccaaatttaatggcgtttgaccagcaaactctacagaaaaattcaggacaaacagttatgaacaaaacagcctactgcccagactaccatgatcatgcccggtgcactccaggaaaaaggagtgaaacaagcttccagattaagggggaccatcctatcaatgcactccaaccagtaagcatatgcagagccaggccagtcggaaagaggcattcggaagcaggtctcagatctaacctctgtccgtaaaaccgaaaatgggctacatgtgaaactataacaatgcccacaccgtcggggatgcagaccgtactaaggcctgcaaaaccacgcctgggacagcaccaaacactcgtggaaggacaaagggcggcaaccgagcgacacacaactcgaaccgacagacgcaccgatacagatata

SEQ ID NO: 133790 - DNA, 1008 bp, Homo Sapiens
  misc_feature (76)..(110): n is a, c, g, or t
tgttgatcactatagggcgctggtcgtttttgccgaacgacgagcgcagcgagtatgtgagcgaggaagcggccgnnnnnnnnnnnnnnnnnnnnnnnnnnnnnnnnnnncagtcgacggtaccggacatatgcccgggaattcggccattacggccgggggcaccacgcagggaagagaaagcaggagccgtccagcacggaggaaggcgaccatggccaaggagtggggctacgccagtcacaacggtcctgaccactggcatgaacttttcccaaatgccaagggggaaaaccagtcgcccattgagctgcatactaaagacatcaggcatgacccttctctgcagccatggtctgtgtcttatgatggtggctctgccaagaccatcctgaataatgggaagacctgccgagttgtatttgatgatacttatgataggtcaatgctgagagggggtcctctccctggaccctaccgacttcgccagtttcatcttcactggggctcttcggatgatcatggctctgagcacaccgtggatggagtcaagtatgcagcggagcttcatttggttcactggaacccgaagtataacacttttaaagaagccctgaagcagcgcgatgggatcgctgtgatgtggcatttttctgaagataggacatgagaatggcgagttccagattttccttgatgcattggacaagattaagacaaagggcaaggaggcgcccttcacaaagtttgacccatcctgcctgttcccggcatgccgggactactggacctaccagggctcattcaccacgccagcctgcgaggaatgccatcgtgtgggctgctgctgaaggagcccatgaccgtgagctctgacccacatggccaagctgcggagcctcctctccaggtgctgacgaacgaggcccccagttgccctcttgtggagcaaactggcgaccttccacagcctatccataacagggctggtgaagagcttcctttcaa

SEQ ID NO: 133791 - DNA, 675 bp, Homo Sapiens
  misc_feature (586)..(586): n is a, c, g, or t
  misc_feature (628)..(628): n is a, c, g, or t
gcagattagaaaatttttaatagttgatttgaaatgtattcattcactcattacattgtgttgcagaaatacctgtctttcaccatgcttggttcttcatacttacaatacagtttgtaagtggaggttaggagtagctgagcaatctggtagagagcagcatgtggcacacagagttgacaaactgacagttggaactcctgactttctccattgcttcctcagaagcaaaatccttcaccatgtgatataaagtagaatgaaactcagtttcttctttaagtgcttcagaaaatgcctcactctcttccttgatcttcagtctttgtgctctgtcaccactaaacattaaaagggcccaattaggattctcagtacattcttcagtaaggtgttccctcaccttaaatacgacttttgtagaattacatagtaggttccacttgctccaaccaaatgcaaaagcagaacttagtagggccatctgtcgataagctttcacttctaccaaaggaaccttattgtttataataacataaaaatgagagtgtctagtaggaaagatattcagtccagcttctttcanagcaataatgaaaggaataggagtcatccaggttccttccanaatagagatgtgtttcttgtcttttagtttgcctcgtgccgaattct

SEQ ID NO: 133792 - DNA, 408 bp, Homo Sapiens
  misc_feature (328)..(336): n is a, c, g, or t
gcggcgcttggcgggcatactaggccgtccatttccctggtgtcgcccgcctctatgcttcgcgccttgatttccctcgctcttgtctgcctgctccaaccggcgtttgccgatgagcgcgcacaaacccaacaacagtttgacgctacgcgtcaggacattaccgagctgaaaaagctgctcggcaagctccaggaagaaaaatccggggtgcagaaagacctgcgcggcacggaaaccgagatgggcaagctcgagaagcaggtccaggagctacaaaaagaattaaagaagagcgagtcggaactggagcgactcgacgctgagnnnnnnnnnctccagagcgcacgcgttgaacagcaacgcctgatcgcgatccaggcccgcgccgcctaccagagcggccgc

SEQ ID NO: 133793 - DNA, 790 bp, Homo Sapiens
  misc_feature (715)..(724): n is a, c, g, or t
ttttcaagttgaataaagcttttaataaaacagtcttgttctttatcaatacctgtaaattctcttaaagcagtagcaaaggcgactgtagcaagagctcaaaaggcaaggcaatatcggaaagtgtatttaacagaagattaaaaatataaatgtagaagatctgtttatatatttttctttcagaaataaatcccccctcccctgccaggtgaaaggaaatattgcactttctgttctcatgactaaggggacaggagttccagaagaacctttcaagatgatcaggaacaccaggacgagggccgtctcacctcactcggaccacatggagacctcccttcaaaatgggagccatgtcctgccccaccaagccctgtctgaagtggagcttccccgcctgtgctccctccacagtcccggaaagcccagcggcaaaggcagctttgtcccagctctgccaccctcctgctcacagtggtcagggcccctcaggggcaaggacggcagggattggaacgagggctctggaaggactgttcagccctatgcctaagacccctatgctggggacactacaggcacacagaggaatagcagggccaccctcagagctcacacatccacgaacaaatgaaggctgaggaggtttctaaacctaaagtccatgagtgtgcacttcaatccaggaaggtcgggacttccttcagtttcnnnnnnnnnngaccgcgtatgcggccgcaagcttattccctttagttgagggttaattttagctaggcactgcccg

SEQ ID NO: 133794 - DNA, 1508 bp, Homo Sapiens
ggtgccctgtagtgtcccccagcataggggtcttaggcataggggctgaacagtcttcccagagccctcgttccaatccctgccgtctttgcccctgaggggccctgaccactgtgagcaggagggtggcagagctgggacaaagctgcctttgccgctgggctttccgggactgtggagggagcacaggcggggaagctccacttcagacagggcttggtggggcaggacatggctcccattttgaagggaggtctccagttggtccgagtgaggtgagacggccctcgtcctggtgttcctgatcatcttgaaaggttcttctggaactcctgtccccttagtcatgagaacagaaagtgcaatatttcctttcacctggcaggggaggggggatttatttctctgatgtgctcccagtgcagtgaaaacaatctattaggagaccagactcatatccaacttttctccttttcttgtaaatgaggcaaacacttgatgcaagggcttcgtacagaacagagtttcatgagatgctcgttgctcctcccatgaagtggataatacttccactccttgacatgtcacggtgacgtcagtgggaagagttgctgtgaggtccttatacagcaatctagcacagaacgggaaggactgaccccctggatccagtttgtaagtaaatgccagcaagttacacagtgggtttctctgcaagggcccagtcaggagggctgcaaaagtcagctctgaagccggtcctgcctggtacttcctcccagagtaagcattcaggtactcgcagagactgaacaggaagtgctggatgttggtctgtaaatattttgcagctatctcttccaggggaatgaagactgggactgaatggtgatgtatccggagtggtttctgtatgacaaggtccacaaaataggaatccaataggttcccctcaaaagcagtactgatgcagacacaaactcctcggctggtcagtttaccactgaggcctgtaaaatgatatgcctgcagaatggctttcacattttccaagtttctctgtccaatgcttcttgctcagttgatctccactgtttggttgggttctacattggcaatacatgctttcacgctggctcgccggtgccgcaccacagccctcagctcatctcgcagacgccttagtttatgaatcttggttccaagagcaccttcctgggcctgcacgctctgcagctcttcagactgtttacgggatctgctcacttgggtctctagcctttccaagtgagctaaaacacctcctttggactcgccatctggacgtaaagggttcgcctgctccatctcagattccccagggccttcccatgaagttgtctaggcaaccggtgatagggactccaatgtccttgcttctcccttctagctcacccaggccagaagcgagaattcccgccatccactcttcctctggccgattcaacaccagcctcgtactagctatt

SEQ ID NO: 133795 - DNA, 1151 bp, Homo Sapiens
gcggccgccgaagcccggcgctttttgctcgcgcgcgcagcgggacgctggggcgtgagcacgggcagcctcaaggttgaagccggggttgtccacgctgccgacgggcgcaccacgacctacgcagagttggtcagcggccagcatgaccagttgcgcatcagcggtgacgcgccgttaaaacctgttgcggattaccgtctggtcggcaagggcgccgcgcgcgtggatattcccggcaaggcgaccggcgagttgacctatgtgcacgacatgcgcgtgccggacatgctccatggtcgcgtggtacgcccgccgtatgcggggttcgactgcggtgagtttgtcggcaacagtttgttgagtgtggatgaagcatccatcgcgcatatccccggcattgtcgcggtggtggtgattcgcgattttgtcggtgtagtggcgatgcgcgaagaacaggcgatcaaggccgcccacgaacttcaggtgcactggaaaccgtggaacaacgccttgccggacatgagcgatgtcgagcaggccatccgcgacaacccacgggtacgccgcacggtgctcgatcagggcaacgtcgacgaagccttggcgggcgccagccagcgcatgccgcgcagctatttgtggccgtaccagatgcatggttcgatcgggccttcgtgcggcgtggcggactatcaagcaaccggcagccgcgtgtggtcgggcagccagaacccgcacctgctgcgcgcagaccttgcgtggttgctggaatgcgacgaagcgctgatcgacgtgatccgcatggaagccgccggctgttacgggcgcaactgtgcggacgatgtgtgcgccgatgccttgctgctgtcgcgcgcggtgggcaagccggtgcgcgtgcaactgacccgcgaacaggaacacctgtgggaacccaagggcaccgcgcagttgatggatgttgacggcgggctcaatgccgacggcagcattgccgcctatgactttgaaaccagctacccgtccaacggcgcgccgaccctggcgctgttgctcaccggccgggtggagccggtggcggcgatgttcgagatgggcgaccgcacctcgatcccgccctacgccatcgataatatgcgcgtgaccatcaa

SEQ ID NO: 133796 - DNA, 686 bp, Homo Sapiens
  misc_feature (283)..(291): n is a, c, g, or t
  misc_feature (610)..(644): n is a, c, g, or t
ggtacgtattttaattacaaggtgtcaacatacagattagcataagcttcaactgtcataagaaacatgttccatccaaattcagaaacagcaggtatcagtgaaactggagcaagcattttgaagacttcaacgtattggatggaatttttcaaaaatttcaccatatgttttcttatcttcttcaggaaaatcctctggatgtgatttcatatatccaaacatttcacggtccctcacagcatacaggtagtcttcacgttttacaagataatatccagcnnnnnnnnnggccgtaatatatagaagctggcgatgcaaaccagccgtcgcgatcggcctccgccggattaggttatcaatcaggccggagcagtagcccaagaagccgatgtagaggagccgcgggtcggtcagcttgggcgggggcaggctccgggcctcatccggcagaaaccgtaagggttctgggttccgccgtgcgatcatggtgacgccgtttccacttgaggcctggtctcagaccacgaactacaaggaaaaccacgacgaccactaccccggccgtaatggccgaattcccgggcatatgtccggtaccgtcgactgnnnnnnnnnnnnnnnnnnnnnnnnnnnnnnnnnnncggccgcttcctcgctcactacttcgctgcgctcgtcgttcg

SEQ ID NO: 133797 - DNA, 825 bp, Homo Sapiens
ggggttccaatgagactttattggcagtgggccagatttgggtagtctgctacctctaaactagaattcaacctcatcttaaaatctttcagatgggtgaatggaaactgaccattctctgatgatgaactatttttcttacaacaataaagagtcagagtactcatggtacgtattttaattacaaggtgtcaacatacagattagcataagcttcaactgtcataagaaacatgttccatcaaattcagaaacagcaggtatcagtgaaactggagcaagcattttgaagacttcaacgtattggatggaatttttcaaaaatttcaccatatgttttcttatcttcttcaggaaaatcctctggatgtaatttcatatatccaaacatttcacggtccctcacagcatacaggtagtcttcacgttttacaagataatatccagcgaagaaaaaggccgtaatatatagaagctggcgatgcaaaccagccgtcgcgatcggcctccgccggatcaggttatcaatcaggccggagcagtagcccaagaagccgatgtagaggagccgcgggtcggtcagcttgggcgggggcaggctccgggcctcatccggcagaaaccgtaagggttctgggttccgccgtgcgatcatggtgacgccgtttccacttgaggcctggtctcagaccacgaactacaaggaaaaccacgacgaccactacccgggcctaagcggtcagctttctcctcctcctctgcgcgccggactccccccggccgtaatggccgaattcccgggcatatgtccggtaccgtcgactg

SEQ ID NO: 133798 - DNA, 624 bp, Homo Sapiens
  misc_feature (213)..(213): n is a, c, g, or t
  misc_feature (413)..(469): n is a, c, g, or t
  misc_feature (482)..(542): n is a, c, g, or t
ataatgcaaaggtttttattcatctaaagaaggtaacataagaaaaatagttgagcaagaaagagataatattagaaggcagcaaatgacaatggacagacttaaacccaatgaggtcaataattacattaaacataatggactcagacactccaattacaagacaaatagtgcaggggggtaaaaataaataactaaataaataatcatggngctgtttacaaaagacataatttcagtagaaggtaaagaaaaagttggaaagtaaaaggatagagaataccagacaaacattcatgaaagaccacatggagacgccatttagaaaaattacaggatatgagtctcctgagacatagagtacacgtagacagctcacaaggtctttttcccttttttcagagacagggtcnnnnnnnnnnnnnnnnnnnnnnnnnnnnnnnnnnnnnnnnnnnnnnnnnnnnnnnnntgggctggagcannnnnnnnnnnnnnnnnnnnnnnnnnnnnnnnnnnnnnnnnnnnnnnnnnnnnnnnnnnnnataatgtctcattttctcatttgctgtggtgtgaacaaggaaacaataccatgccatgtatttgacttgcagcaggtacaca

SEQ ID NO: 133799 - DNA, 469 bp, Homo Sapiens
gcggccgccatcatcagcgcgaagccgaagtcggcggtcgattcagtcagcacgtccggcgtgttgctgaccaggatgtcgcgcgcggtgcaggcggcgacgtcgatgttgttgtagccgaccgccatcgtgcacaccgcgcgcaggccggggcaggcgtcgagcagtgcggcgtcgatcttctcgttggcggtgatgaaggcgccggccttgccctgcagtcgcgcgatcagttcgggctgcgtgagcacgcggtcttcctggttggcgtcgacgtcgaaatgctgcgacagacggtctatcagttcaggcaggacgtagcgggcgacgagaatcgaggggcggctcaagacaggctccagtgatgttcaggagcgccgaatctagcgcgcggcctgccgccaggcgagccgcagcgcacaagtgtgatgcggtgcgcggcagcacagttgccgccgcgcctcttgcc

SEQ ID NO: 133800 - DNA, 1221 bp, Homo Sapiens
  misc_feature (78)..(112): n is a, c, g, or t
atgtatagactcctatagggcgctactcgccttaccgaacgacgagcgcagcgaagtagtgagcgaggaagcggccgnnnnnnnnnnnnnnnnnnnnnnnnnnnnnnnnnnncagtcgacggtaccggacatatgcccgggaattcggccattacggccggggagacaacagacaccggacacagcagtagcgtggacgcgtaaagttataaatgaccctgtctcctttgttcagtgtactcttgtggcaaaactgctggccagtgtaccctttctgcagaaagtaaaaatggccttgctgaggtagttaaaatttatgttcaagtgctatttctttacagcactggggaagaagcatttctaacaggagcctgcatgctgaggatggcagaggaaaaagacagagccatactgagcccttggagatgccactgaggagctacactaaccaatcctggaggcaccataacctaggacttcttattatacaaggatgctagagagcagtcttcagcttgagacccatctctagcttctaacaactcagtatactcctatgaacaaaatttggagcatatttgtttctctctacctgatttcttcagactgtggaaactatttgaatcaaacttgacttatggatccaataaagcccttggaaaaactggcctcatattttgtgtaaacagtccccgtacagggtttctgacttgtggacatgagacttcacagcctgctaaaaataagcttttgggacctacccatttaggaataaacagtcctagccttgagagatcagatgaaatctgaggccagatactcattttcttctcaaatgctttctccagaagatttttaaatagaaaatggggtaaatgtgaaaggaaagtgtcttgggcctcttcgagctgggaactgctcagtacaaatctgtctctcattctattcaaagtcatccttgtctgctcacagagatagatgcatattctgattgccttctttggaaagacttaccagaaactcaaaagaatgcaaccatctgtctctcacctatctgtgacctggaagcccccagtgctttgagcctgggagccttgatttgagcagtctccacctttctttctggaactaatgtacttcttacatattgattaatgtctcatgtctccctcccggccgtaatggccgaattcccgggcatatgtccggtaccgtcgactg

SEQ ID NO: 133801 - DNA, 633 bp, Homo Sapiens
  misc_feature (527)..(527): n is a, c, g, or t
gagtcagcttttaatcttgcccctaatttgctgtgtgtagccttgggtaagtcacatcctttctgggtcttagcttcgtcctctgtgaaaaaaagggggttagactccatgctcttgcctggctctaaaactctgagactcttaagtcctgtctcttccaggaagcctctcctgattgcctcaacctacagcactctctctctcctatgggtcatgccatggcaaaagctaggcccctacccaccaccagaagacctgctgtccatgaaggactggccagtcctgggccagatccttgataggctaggcgcatgcaaacctgagtgactaggctagggaagagaccagatgccaagtccaggaagaaaccgaggatgcttattctggtggaaaggagccatacttgtgaatgccaaagggggcaagtcaaagggacaccactgcatttccactcggaaaagcatttctaagtcagagcagtccagagttgggagcagctgcctctagaatgagcaagcttcctgtcnctggagatgtgtacatgaaagctggacagccacaggtcaggggtgctgcagaaggaatgccagcattagatgggacatggataccttgaaccctgagacactctgc

SEQ ID NO: 133802 - DNA, 842 bp, Homo Sapiens
  misc_feature (817)..(817): n is a, c, g, or t
aaagacagcttccactttttattgataactataggatcctaactgctaagcatatatgttgatcatgattacatgtttatgttggggacattattataaatgtgaaagaagtatctataaatgtgattatggattactcactgacacactcaaaaagcgcggtgatctgagttatagtaaagcctgtttcgttggtgtttgcctgataatatcttacacctcatctctcatcatcagcaagttgcatcccactgaccatcccccggctccccatcaaaaaaaccacttgatttccaggaattgccataggctagagtctcaggtgtataaaatttcactcattgacttaagtggaatgattaacctggaggagactccaatcaacctgaatagagtccactcaaatgtctcttcccatggctgagtctattctgctctaaaacattcagagaaaaaccaatcgggtgacatttcagttttgattagtgaggtaccaagcccctgaatattgggagcatcttggtgactggctgaatcttgtacatgacttttgatgtatgttgttatctttgggccactgctgactatcttttctcaattcaggttaaatattttcaaaacacctactatgctcaagtagctgtgttcagtactggggcagcacgagcagcccacatctcagggtgcagtccaagacatatggtcatcaagacagaagagcagatggtgacaggtaccaaccaccaaagctgtacacgccaggttcaatgtctttgctggtaaaaatgggccactgtcactctgcagacttttctcnagtgttaaaagcgggtaggaaaagg

SEQ ID NO: 133803 - DNA, 1043 bp, Homo Sapiens
  misc_feature (781)..(781): n is a, c, g, or t
  misc_feature (824)..(824): n is a, c, g, or t
  misc_feature (871)..(871): n is a, c, g, or t
  misc_feature (927)..(927): n is a, c, g, or t
  misc_feature (950)..(950): n is a, c, g, or t
  misc_feature (954)..(954): n is a, c, g, or t
ttttaatgttaatagtatattttatttaacccaacagatctaaaatcttatcactttaacatataaccaatataaaattagtaacgaggtattttacattcttttcatactaagtcttgaaatccagggtgcattttacactcacggcacgtctcaattgggaccagccacatattaaaagctcagtagccacgtgtggctgtcagtggctgtactggactgtgcaggtctagagcctgtaacctaaatatctgacaggctgaacctcagcagagccaggcatctacaaccttattcctacaaacctcaacatcaccccactgccagagcattaggacgggggcaaccaaagcctccactttggaaagcctcctcaaaagatcggacgtggtcccaagtttagagatgaaaagatcaggactcagagacattaaggaacttgcccaaggtcacatagctggtaagtgaccctgatcttgaccgcacagccctacttttctctgggccccaagaccttggcctctgggcaagggcagtggggtgggcagagtcaagaaggaagggatgggcaggactaacggatgaggagggggcaccacgcatctggggccagaacagcagggctggggacagccggcactcggagttcccgacccagggaagctgagtcagaagcctttccatcacaattatctggtgctgctgactttgtctctaggcgcagcttcctgcccgctcaaagctcctttagagtgacacttcttaaattcaggactagtanagaagctaggaggctccctagcaggagcccagggagtatctcnctgtgcaccagtttcccaacagctgtttcagctgagtctccttgggnggggaggggggactacataagatgagaaatcaatgggcgagtaggcagagcttggngagacaatcataggacacgtcancaanaaagctggaagcaagatgggctgagtgcctcgtactctgcaccaacagcatcagtctaaaagaccgatctctccatgggaaactaagag

SEQ ID NO: 133804 - DNA, 526 bp, Homo Sapiens
gcgttccatggcttctcgacggtgacgacgcggggcgccgccgacgcggcgaggctttctgcggcttcctcggacaggccaagcgcgccggaggcgtcgatcggggccgggtcggcctcgcagacgatgaccgcgatccgctcgtcgccaggcagaatggcatcggccggcggcggcgcttcgcggcgcggctcggacattgccgtgtccggctgggccagcgcggagccccctgacagcgcggcgagaatcaatgcgagccggatcatcgcctcagccccccaggaaggtgcgtcggacctcggggtctgacaacagttcggcccccgtgccggtgtagcggttcgcgccctgcaccagcacatagccgatgtcggcgatctccagcgcctgccgggcgttctgctcgaccatcaggatgctgatgccggtgcgtgcgatctcgatgatgcggtcgaacagctcgtccatgacgatggggctgaccccggcggtgggctcgtccagcatcagcagttgcggccgc

SEQ ID NO: 133805 - DNA, 691 bp, Homo Sapiens
  misc_feature (182)..(221): n is a, c, g, or t
ggcacgaggccggtcttcgagcttggtcttgaggtcggtctcatagaagaacttcgcatccgacaaccgcgcgcggatgacgcgctcgttgcccgcaacaatcgccttgccgccgtcggtggcttcgacattcgcggtcagaatgaacttgttggcgagttgatctcccctccccccgcctnnnnnnnnnnnnnnnnnnnnnnnnnnnnnnnnnnnnnnnnacgatgaagcgccccccacccttgatccctccccaccactgtcgtggggggagggaaagcgcaccacaaagcatttctggttgttgcggatggtggcgcggatcacctcgccggggatcgagaggaattcttcgtcgaacgagcccatcagcaccaccggccattcgaccaggcctgcgacctcatcgagcagcacctgatcctcgaccagttcaaagccctgcgcgaacgccagttccttggcatcttcgagaatgatgttcttgcggcgctccgggtcgagcacgaccttggcggcttcaagcttcgacacataatcgtcgaagcggcgcacagtgatttcagcgggcgccatgaaacgatggccgcgcgtcgtctgtccggcttcgatgccggcgacgtcgaacttcacgatttccggctcttcggtctcggggccgaaggtcgcgatgatcgaatgcagcggccgc

SEQ ID NO: 133806 - DNA, 786 bp, Homo Sapiens
gcggccgcgcatcaaaccgaagcgtgggcgaatttcgtcacggaacttggtctggatctgatacaggttcaacggcagctgcttgtagctgctcaactcgttgcgcatcaggtcagtgatcacttcttcatgggtcgggccggcgcagaaatcgcggccatgacgatccttgaagcgcagcaactcagggccgtactcttcccagcgcccggattcctgccacagctcagccggttgggtgctcggcatcaacacttccagagagccggcggcgttcatttcttcgcgaacgatggcttcgaccttgcgcatcaccttcaagcccatgggcagccaggtgtacaggccggaggccagtttgcggatcatgccggcgcgcagcatcagctgatggctgatcacaaccgcgtcggaaggcgtttctttctgtgtggcgagcaaatattgactggtacgcatggtaggccgttgtcggttgcttggacttgaaatgacttgggattgtacgggcggttgtcgctggagtacaggcgtgaggtcgtggcggtgtttctggtggagtacagcgtgtgtgggagctggcttgctatggagagggcgcttgctgtggcgagggagcttgctcccgtttgactgcgcagcagtcaccggcattttgggggcgcttcgcaccccagcgcaagcaagcttgctcgccacaacaagccagctcccacattggctgaggtgggtcagtcttctgcgggaggattcaccgcgccgtcggctttccctgaacagtgcagc

SEQ ID NO: 133807 - DNA, 637 bp, Homo Sapiens
caagaattcggcacgagggtgacgcaactgtacgaaacgcgagcggatcgtgaaataaccgccgagcccgacaatgagcacgatcagtactttccctgagaggaagtcgttgatgacttcgagcatggagtgttcctcgctgatttttctaatggcaaacgcaggacggtccgacgcgtcgctcagcaccaggcagtgcacgacgcttcgccccaatccttttgcgggtgttgttattcatgcgctttcgcgatgtctgcgggcctcgttaccgacggccgcagacgcgaagaggggcggcactatacctaggcgagcgtgatccgtctgcacggggcgattaaaggtttcagccaggcggttgcaggcaaggagggtttgcagggcgatattggattttttatgggcgtcatttcacaaccttggggcaaaaaaaagggcctgaagaacgagccttcaggccctcaaaaggtgagaggtgtctagtccctcaacctggtgagcggtgcatcaaacgcttaggccttcagcgggaccaaacgtggagcaatcatgttttcggggcgcaggatgtcgtcgagcatggcgtcgtcgagcaagccttcttcgcgcaccagttccagcacgccgcggccgc

SEQ ID NO: 133808 - DNA, 2097 bp, Homo Sapiens
tttttttcagcgtctctgaaaattttaatttgttctgacaacgaaactaacacagcataaggacttaagccctcaagctaggcaagacactgatggcccttggagaaagcaccagggcagctggcaggaggcgctaagatggattcttggtgggaaaggaatgaggcacacacataaaccgtgggaaagacttaggtgtcagggcccaagccagaagagggataaggatggactgttccagccttagtctgtgcttaaaaagacagaaatgcccttctctggaattatgagggagaggtctgagggaagggaggcaggcagcttactacttgccctttcactgacctatagcatctgaggcatctgagagcaaagttaaatagaatgaggctggtcgcaagcactgggaagaggtggcggtcctcgggtttaaggagccaaaccctgggcttggaattcagctcccagggccagagcagcatctctcttctgcggaggaggtcacctgagctcacaggactgggaatgtcggctttggaccctcctgatccctggttgttgagattcccttgtgtctcaaaagccttggagcagtgaagtgtctctccaggattttctttcccaatcagtcagcagtcaactttcctggaagaatgtcctttctacccaatctgcccaggagggcgggaatgtggccggccctcaggaagggcctctgggtggcctctgcatccctggctggagaatgcgcacagtttgcagaggctcagaactcccaatcgtccacctccagctcttccaggtttgttacccggccaaagattccactgtggtcctgagactggctgccctcaaaattggtgatgggggtgacaggacgaagcaattcgggcaaagcctctgaggcacgtcgcttgatctgcttgaagaaagagtggttcaggagggtgctggcactgggcctggcatccgggttgcgctgaaggcactgctccacaaagtggtggaagtggggggagaaggttcggtggtaggggtgggagggcgagtcaccgttggagggccggggggtgctggtggtcaggctgtcactcaggccagagttggccactgagcgcgaagggctcatggtcagctcctcagcggggatggtgctggtatccaacaggcagggcactgtgccgttcagtttctctagcagcatctgggtggcaggcatatccttaaaggggacatggccgttggccagttcacaggctgtgattcccacactgtagatgtcagacttggcatcataaccctggagattctgctggaggacctcggggctgagccacggcagaaccttgacactgtacttgggaaaatcgtggaccactcgctgccgctgcccatggcttatcatgctgaggttgctgcgcaaaccagacaggtagaccttcccatccacagagatcaggatgtggctggctttgacactcctgtgtacatatcccatgtggtggatgtagtcgagggccttcagcaccccctgcaggatgtaagcaatcgccagctcattcatgccatccatgaagtgtgtacagatgagatcttttgcagaaccgtatgccatgaatgatgtgacaacccacagctcattgtctgcaataaaagtggctcgatatggcacgatattgggatggttgaagagtttggagacatgcagctcgccctgcaagaatgttaccatctcattggaacaagcttctaggttaatcctccgtacagtcacgtactctcctgttggtttgtaccttgctagattcacagtcatcaggtcctcaaatcctttgcctatcacagtgagcagctcgtaacaccctccctctggcagaaagctactcatgacctcctgtttagagaaggatgctattgactctgagctcgcatcattggtctccaaatagttccaaatctcttaagccctcaacaatgaacttttccgagacccaccgaagaaatgacatgagttcctactgtgtagacctacttcagtttcaaaacttaaacctgttcctggagttagcaagcagccccgaccgtcttggctccgcc

SEQ ID NO: 133809 - DNA, 442 bp, Homo Sapiens
  misc_feature (172)..(172): n is a, c, g, or t
agaccaatgatgcgagctcagagtcaatagcatccttctctaaacaggaggtcatgagtagctttctgccagagggagggtgttacgagctgctcactgtgataggtatgtgcaggggccgtccttactctcctgctttctgctccaggggctgctgcagctttctcagcangccccagatgtgtgtacagcagaggccatccactagttaggaggattcatgggcacagacttgcttctgtgggtcttctctgtttttttatgccaagtatgggaagagatcaaacttccaggaaagaagctcttttgccatctttcctttgtggctgccatgtttccggtgtcctggccatagtgagtcagaaaggttggctgagaaggaactgatgagagaaaaatcaagaaatgtgagccatgaacataacagttaaattctgctggg

SEQ ID NO: 133810 - DNA, 642 bp, Homo Sapiens
  misc_feature (297)..(308): n is a, c, g, or t
atgtaccattgttagcatcttgcataaccatggtacatttgtcaaaactaagaaagtaataatggtacactactattaaacttgagactattcatatttcagtagtttttccactaatgtctattttctctaggatccagttcaacacagcacactgcattcagtcatcaattaagtttccttagtttcctctggtctgttacagtatttcaatctttccttgttccccacgacgttgatagttttgaggaatactgatcaggtgttttatagaatgtccttcaattttagtttgannnnnnnnnnnncatgtttagactagattgggttataggttttgagaataccacagaggtgaattgcccttctcatcacagtatattgggagtatatgctatcaacatgacttgatgatattaactttgaccacctggccaagacagtgtttccaggtttctgtactatgaagttactctcctcctccctttccatactctgttctttggaagttagtcactaagtccatcccacactcaaggaaggagggaaaataagctccacctgatgaagggggacgtattgtgttaagctgaataacggtcccccaaatatgtttacattctaatctcctgtcattgttct

SEQ ID NO: 133811 - DNA, 1023 bp, Homo Sapiens
  misc_feature (60)..(89): n is a, c, g, or t
  misc_feature (104)..(272): n is a, c, g, or t
  misc_feature (1009)..(1009): n is a, c, g, or t
ggcaaaaaagaatctcccccttttctcctctttttttggggccggccggccccaaaaaannnnnnnnnnnnnnnnnnnnnnnnnnnnnncgcccccacccaccnnnnnnnnnnnnnnnnnnnnnnnnnnnnnnnnnnnnnnnnnnnnnnnnnnnnnnnnnnnnnnnnnnnnnnnnnnnnnnnnnnnnnnnnnnnnnnnnnnnnnnnnnnnnnnnnnnnnnnnnnnnnnnnnnnnnnnnnnnnnnnnnnnnnnnnnnnnnnnnnnnnnnnnnnggtgagaagattttttatttgaaatatagtctgagcaacatgagtgtagccaagaggagtaggggctggcctgcctggggcagcagcctctcaaatggcacgagagcagtacaaatattccaatgtctgtgtgccccaaccccacctgtcaggaaaggcagaacagcagaacaaagacccacccacagcgccttctcaaggggtctggttcttggtgcctgcctgcctttgccttacctcctgctctgcccaggttccaaacagaggtgtgcagcagaggtttctcccaccccacccacagagacatgatgagccagtgtgacaattagttctcaggactattttgagggaaaagaatcagagaagacagggaggaggggcaaggtgatcaagggccctcgccaaaccagactaggcagagctctcccagagggactgtgtcagcacccctcatttccctccttctcaggatctaaaggcaggaaggagagctggtgtctgcaggaaaatagagctctgaggagcgccctggctgaaggcagcaagcgggaacctcccagaagagcacagccgctgtggggttcaagcctagttgacagcagtggggttgggccacataagcagcttggggttggaaggacacagacaagagatggggcaccaagaagcagcgaaaagccataaataacagaagcaattcagagctgtgagggtcctggccgacccacatttcctgnggctgggggatacc

SEQ ID NO: 133812 - DNA, 1234 bp, Homo Sapiens
gcggccgcggagctggacggcgagcaggcattgattcgccatctggccgaacatctcgcgctctccggtcaggccggtgaagagcagatcctgcgcctggaaagcgatgagcaactggtcaaagtagtgacgatccacaagtccaagggactggagtacgacctggtcttcctgccgtttatttgctcggcaaagccggtggacggcagccgcttgccattgcattaccacgacgcaaacggcaaatcccaagtcagcctcaagcccaccgccgagctgatcgcccaagccgacgacgagcgcctggccgaagacctgcgcctgttttacgtggcgctgacccgcgccaaacacgcttgctggttggggatcgcagacctgaagcgcggcaataacaacagctcggtgttgcacctgtcggccttgggctacctgctcggcggcggtgcttcactgggcgaatccgccggcctgacccgctggctgctcgacctgcaggaaggttgcccggcgctgcattacgcagaaatgcccgaagccgatgcggtcatattccacccgccgcgcaacgaagccactttgctcgcgccgctgttgcccaaacgcaaggccgcagaaaactggtggatcgcgtcctacagcgccctgcgtatcggcgagagcatgagtgctgcgagccttgaagcgccggagagcccacaagcgcagaagctgttcgacgacgaacgcctccgacccggatgccccgcgcgaagtgccggcttccggtggagatattcaccgtttcccacgtgggccaaaccctggcaccttcctccacggcttgctggaatgggcgggcggcgaaggcttcaacgtgactccggaggccatcgaagatgctgtcgcccgccgctgtaaccggcgtggatgggaaggctggatcggtactctcagcggctggctcgggcacctgttgcaagcccggctgccgctgggcaacgggcagatggccctcaatgagttgcagcactaccagatcgaaatggaattctggtttgccagtcacaaggtcgatgtcctcgcgctcgacaaactggtgtgccagcacactcacaatggcgtatcccgcgtggccgccgaaccggtgctgctcaacggcatgttcaagggctttatcgacctgaccttcgaacacgaaggccgttactacgtggctgactacaaatccaactggctcggtccggacgattcg

SEQ ID NO: 133813 - DNA, 1231 bp, Homo Sapiens
tctgaacactgtggaaagagtttagttgctttatcaagtcatattatatttttatgagctaagatcatagaggcaaatggaattcttagaacattacctaaaaatagatttttaaagacagaggtcccaactcattcttatatacacatgcaaaagttcatctgtcacagacagcaaatgttgaatttctacattggagtttctggcagcatcctgcacatttagaattaaaatcaacagacagagaaatatcaaatatatcgagatgagttgttcaaatttgtgcaggacagaacacggcccctctgggactactgcctatgtgctcactgctgtttctcaaaggcaaacaccaagtaaatacttgtagcttcccattctgatttacttaaggttcccaaaggtaaccttacttgactgttcttcatgtactttgctgcatgttcatagtcatccaccttctcagagacaagtttagaactctcatttgcaggatatggctccaaggcctgcattcgttttaagagcattttattttcattgttcttaatcttttcttcgtagaattccagaaatgtttttttgtagactagtttcatattgtacttctttgccatttcatttagcaatgggaaattgaccaagaattcaggaacatccacaacaccttccaagttgaagtcatatttgcagccaaataaaggataatctcctttcttctgaaatttcacagtatatatttcatttccaaatgattctgtttctgaagcttcaaggcgtcttatcaattcaaagctattgggagtagtaccaataaaatagcccccagggctaagtctctcacacgcatttctcagcatcatgtcagcctgctcataagactcaaatgagtaatgacagacaaactgacaactgcagatgtcaaaacacatttgtgggtcacgaaatttgtcaatcagaagttcctttgagctgtcagcagttataaattctgcactgaaaatatattcactatcacgacgatttttcatgtcctcataccgctgctgacactgtttgacagaaacatcggcaatatcagtacaaactagcttgttaattcttccttttttccatttcagcaaatctccacctttaccacatcccaggtccaaaacagtgatatcacgttttttcttctgtcgtaccttttcccctcgtgccgataccattctgatgttggagcggccgc

SEQ ID NO: 133814 - DNA, 539 bp, Homo Sapiens; identical to SEQ ID NO: 61050

SEQ ID NO: 133815 - DNA, 814 bp, Homo Sapiens
tgctttgaccgatcactagatactgcctcctcaatttcaaaagcaatataacgtttgtatatgctgtttaatttaagttaatgttaagtaatcatttctcattccaaagacaatgcaaaaaacttcagcactgcttgagagttgtatttcagccacagatattttctccattggaaagctattttcattttagaaaaatgggttgtttgaagatgaaagtcttttatcttttttcacaatttattttggttatatgttcgtacattcttattaaatatttcatacactttattgcaactactttgttatttctacatcttagataaatgctgaaaaggaaaacgatttcattgttcatctaattaaataaattaaaagagcggtttgtgtagaaattggagagaactatgttttatatgaatcacaacagtgctcgttgtggactgtaattaaatgctttgccctctggaacttgatttttgtgtatctgagatttattaacagtgctaactgctaaggatactgtttatcttgttctgggcattggagtttcagtttttaaaaaattcttgaaaatgtattctgtgaaactactcatacctctcttcctgcgaattttctcctaagaactaggtttggggtagaaatgaattgacattattttctcatttgctttgtatggtatgaaggatttgtaaagctttgctcaaagttgtgtgcatttgtaaacactatcatgatattttcaattttatgtgtaaattttattgtctgtttttggtgactctgacattaatggaagagaatattttcc

SEQ ID NO: 133816 - DNA, 784 bp, Homo Sapiens
  misc_feature (691)..(691): n is a, c, g, or t
tttgaccaaagatcagaaatctttatttgacaaaggtatacatggtgaaaatgggcagtcatcttaccatgcaatccaaatctaccaataccaagaaatgcttattgttaagaaaaaaaatcattagtgagcatggccaaccaatttttagagagaggaataaaagaataagattagtttcaaaaggaagaacttcactgtaaatatctgtgtttataaattatcttagaatacacaaaaccaaggcagaggctgtgtaacaggcaactgagccaagcacacataaaagagggatgaggaacagaaaagtgtaggaaatcctgcagcgatgcagaaatagatatttttaaaattatcataatcaatgaccgtattttcatcaaagaaagaataagcattccaaagcagcacaggctatttcatcaatttaaaaaactagcaagaggaagtatttttaaagtgcacttttcctgaaaaattcatttttatatgtaatacacagtcacatacagagataattatttctaaaattctgtaacagtttatctgaccttgtaacaagttccagataccattcctaatagtttgtgtggatattaaatcattgatactgaaaatatttcagtgtaatctatgctacatttttacttgaatgtttttcagcctaagaactgggaacttttgagtaaanactgaacaccggaggtatgacggcataacaggaaatgttgggattttccaacatgttctattttaattatacttctgattacttgatatctca

SEQ ID NO: 133817 - DNA, 655 bp, Homo Sapiens
  misc_feature (227)..(267): n is a, c, g, or t
cgtctttaaatctcttatttcaccctttttaactttaattcctttgtttcttttacttcatcttttttgggctttttggactcctttagttcttctttggcttcagaaattcttttctttgtccttaaatcaaaaactaaactttccaaggagctctccaggtctggtttggacttgtcttttagcttcccggcctttgcttttttctttttcagatcatctgggcnnnnnnnnnnnnnnnnnnnnnnnnnnnnnnnnnnnnnnnnnggggaagtatcttcttttgtctcactttgctgatcgctatcagagttcgcctcaaatatgtcgttatttaaggatagtctctgaatatccttcctgactgctttggctttgttctctgcaattttcttcctaaattcaagaagcacttctttacagtcctccaggtgaatctcgggctcccaggtatcatcatccgatgtatagcctttccagcgaactttgtaaagaactttacccccctcggtcttcatgtccaggatcttctccacctcgaacacatcctctccgtcctcctcactgtcgccaaaggcctccgctcctctcgcggctgcgtcattatcttcgcccactactccaaccccttctgtcgtcttctcgcagccgtata

SEQ ID NO: 133818 - DNA, 677 bp, Homo Sapiens
  misc_feature (47)..(64): n is a, c, g, or t
  misc_feature (145)..(179): n is a, c, g, or t
gtgggtgggcccgtctggcagatggtattttggctgcatagcgtttnnnnnnnnnnnnnnnnnngtgttgctagaacgctgaacatggaccacacacccacccagcatccccaatcccaaatgcagagtagccaggctccagacnnnnnnnnnnnnnnnnnnnnnnnnnnnnnnnnnnngagttggtctctgggaaggagagctcatgcagagatgaagacagaagcccttgggagccaggaccaagaagaaggagaaatccctgccccttccctcaggatccccactccctggtggcctctgccctaagacaggatcattaacactaaccatcaggcctctagcccctttaatgtccagtctcccaagctatttgattttggctccagccctcatttttccaccacagcccaagggaatagcatcctagggggtaggaaggggaggaggtgggtgcagcctgcaggtctttagctggtttctcctggctctaggtctgggtcaggaggccccacgcactccttgctgagccgcacaatttcctgggacagaacttccatatccttgtgcaagtggataattcttgggtgagctgctcctccagcatgttctggcagcttcttgttcatctcccgaaggttctcgtcgcctggcttcactaggtctctaaggacgct

SEQ ID NO: 133819 - DNA, 1556 bp, Homo Sapiens
  misc_feature (165)..(165): n is a, c, g, or t
gcacccgttgggcccccacccttttagggtgtaatcgcacaatagcaactgctctcagtcgcgcagctgacagtgcaggaatacgagggcaggcgggtgggggcacggaatgctcccaacatgagggcatcccaggccagcaggcggggcccagagacccagagncaccacaactcccccgtgtccacaaggcactttatgcattcaaaaccaccgaattcacatccaggtttgctcagacagaggcccagaggcgaccccgctctggcgtggctaccacctgagcggctggcggccctggcccagctcggcctccgcgtaggcgtcatacagcaccttcaggtgcaacagcagctgctccaggttctcgccggtcaacgccgacagcacgatgacctcctgtcccaagtgatcccggagctgggacagattggcttgggcttcagggaggtcaatcttgtttgcgacgattgcgtggggcctcgcagacaggcccttttcatacatctccagttcatattttaaatcgtcaacttgagtccacggctcaggctgagaaagatccaccacgaacaagagaaagcggcagcgctcgatgtgcctgaggaaggcggaccccagacccctgttctggtgggcgcctcgtatgatgccggggatgtcggccactgctatttgtaggtggccttcgtagtggacgatcccgacgtggggcttcagggtggtgaacgggtaggaagccacggcgggtctggcgtttgaaatggcccggagcagtgaggacttcccggcgttggggaatcccaccattccggcgtgggccaccgtcttgagctccaggtggagaactcgctgctgtcctggctgtccaggggtacaggtcacaggggcacggttgttgttggccaggaagaagcggttgcctttccctcctgccccgcccagcgcggcaatgtactcatctcccacgcaagacaggtcggccacaactctgcctccctccttcaccagcgtgcccacggggacccggatgtagaggacggcgccactgcgcccgaagcagtttttactccctccatcttctccactgaaaccctggtaccgcgacaggaccgacgacagggacttgacttgctggtcaactctcagaatgacgtgtccaccgttgcctccgtcccctccatcagggcctccaaactccttgcggggctcactgtggaagcagcttgccccagcgcctccgtttcctccacagacaagcactctccgatagtccacaaagtaccttttcagctttttctcagagagcagcttcttccccgggagttcctgatgcttggcgaggtccgcacggccgaccgagagcagcctgggagaagcccgctgtggcagtagccggctgggcttcaggccagcccatgtggacaaagcccaatgccccacgccctgaaacacggtcctcaatcttgctgagaaacaccttgcaggtgccatggccccggctcgggaaagcacgcctcgtgccgaattcggcgcgccgtcgacttcatactctt

SEQ ID NO: 133820 - DNA, 482 bp, Homo Sapiens
ttttcactgtgagaaaaaaatttatttggaatatttccatggtatcatgtaaccaaaaacaagataaacaaaagagagagggtgagataaaacatggttgattttcatacatttatatgaaaatcggccttattatttcacagttgtattgccataaaaattattttattaacatatattttgtgcaaaaattcaactataaataatgaggctgattttcatacaaaactcacagaaataaaccttattacatatacagcatatagccatgtatatatgctacatatattttacagttatatacagtttatcattcctttatcccactggactatggcataaggggcagaagctgtagtggcttatttcctgagcaaggacaccgtgtttgcatacactgcacatccagaattgatactcagtgattgggcttcctgtggcaacgcatgttggcagtttcccttctccacagccgcggccgc

SEQ ID NO: 133821 - DNA, 683 bp, Homo Sapiens
gcgccaccttttattgtgtcctccgtccacctcccagtaatgtttccctgcttggaaactctgagaagccaccacactcttccttgtaaatctcttctcagagtgaggcacctcctggggagcttttctatgggttacagttttcagatcagaaacgcagagcttcgggtgagccgtctctggatccagagtcacctccactgcgtgtttccgggcgtctctcaattctgcctgtccgtgctttcttctccagtccagttccgcctggattttccactggaatttggagaagaaaatcttcagtccaacaatgccaaaaaataggccacagcagagtattcccagtactttggtagccaggtgccacgatataggctcgaaaaaggtatctcctatctgtaccctggattccacctctcggctcagatgagcatgccgcatggaacaggatatgctcccggcgttctcttggacggtcagagagatctccacatcaaacaggccatgcatgtctctgtttgtcctggagtctgtggacaaatcctgtccttgtggacctttccacttcgctgtgggccgggggacacagcccgaggactgacagagtagctggatgtctctatcaacatatcccgtgatggaaatgagaggaactgagcccagtgctgacacctgtagctccc

SEQ ID NO: 133822 - DNA, 941 bp, Homo Sapiens
cgccatcataccgcaaaacatcgattctcactttgcggaatgtcgatgagacagacgcgtcttggattgagcgagagcctagagccaggcgttgatatgccagggcgcgaattcatcgtcgccatagcccagtgtttcgctcttggtcggttcgcccgacgcggtgcggatcatgcgatggaaaatctcccgccccatctccttgatcgatttcccctgatcgaggatgacgccgcaattgatgtccatgtcgtcttccatatgggcgaagagcgcggaattggtcgcgagcttcagcgacggcgaggggcggcagccgaagcaggagccgcgtccggtcgtgaagcagatgagattggcgccgccggcgacttggcccgtggccgagaccggatcgtagccaggcgaatccatgaagacgaggcccttttcctcgacccgctcggcatagcgatagacttccatcaaggtggtcgagccgcccttggcgacggcgcccagcgatttttcgaggatggtcgtgagtccgccggccttgttgccgggcgaggggttgttgtcgaagcccttcggttctttcgcggtatagtttttccaccagtcgagaaggccgatcagccggcggccgacatcctcagtggcgacgcgctgaaggagcagattttcggcgccatagatctcggtcgtctccgagaggatggccgtgccgccatagccgacaaggatgtcgaccgcggcgccgagcgccggattggcggtgaggcccgagaagctgtccgagccgccgcattgcagcccgacgatcaactcgctgaccggcaccggctcgcggcgggcaagcgacgcctcggcgatgagctgctcgacgacggcgatgccggcctggacggtgcgcgtggtgccgccggtgtcctggatgccgaggctgcgcacgcggccgc

SEQ ID NO: 133823 - DNA, 646 bp, Homo Sapiens
ccgggggagtttgaatatttgtttcttttcacactggccttaaagaggatatattagaagttgaagtaggaagggagccagagaggccgatggcgcaaaggtacgacgatctaccccattacgggggcatggatggagtaggcatcccctccacgatgtatggggacccgcatgcagccaggtccatgcagccggtccaccacctgaaccacgggcctcctctgcactcgcatcagtacccgcacacagctcataccaacgccatggcccccagcatgggctcctctgtcaatgacgctttaaagagagataaagatgccatttatggacaccccctcttccctctcttagcactgatttttgagaaatgtgaattaggctacttgtaccccccgcgagccggggtgttggccgggcggggacgtctgctcgtcagagtcattcaactgaagatataggcgtgttcgccaaacaagattcgcgcagaaaaacctctaattttcttctaatccagaactggataacttgatgattcaagccatacaagtattaaggtttcatctattggaattagagaaggtacacgaattatgtgacaatttctgccaccggtatattagctgtttgaaagggaaatgcctatcga

SEQ ID NO: 133824 - DNA, 725 bp, Homo Sapiens
gcggccgcgcaccatgtgttggtcggagccgcagatgttggtggagaccacgcgcaggatgacgccgtgctcaatcttcctgccacgggggtcctgcattttgggatagtcgattttctgtacttcgaccttgccgttgccgagatacacgacaccacgattaccagacatgctttcacctcgctgttgtttttatggaaccgcgtcgcccaggcaggcggcgcgtttaagtgctcgggtacagatgctgtttccttgtgttgttgctgatggcctcatcgcaggcaagccagctcccacattcaaaggtattcacacatcaaatgtgggagcgggcttgcccgcgatagcaatctaaagaacgacagttcgattggcgttcaaaaacacccgccgctcaatgtgataccccactgcacgcgccaacgtcagcccttcaatatcacgccccttggcaatcaagtcctcgggatagtggctgtgatccaccacctccacgccctgggcgatgatcgggccttcatccaaatcgttgttgatgtaatgcgccgtggcgcccaccagtttcacgcccttgttgtaggcctggtgatacggcttggcgcctttgaaaccgggcagcaacgagtggtgaatgttgatggccttgccatcgagcttgcggcacagctccggcgacagcacttgcatatagcgcgcaagatcaccagttcggcgccggtctc

SEQ ID NO: 133825 - DNA, 458 bp, Homo Sapiens
  misc_feature (42)..(51): n is a, c, g, or t
  misc_feature (73)..(99): n is a, c, g, or t
gcaccacagcacttccctctgggtgatagagactccgttctnnnnnnnnnnggaagtacaacagtactgtgcnnnnnnnnnnnnnnnnnnnnnnnnnnnaaaatgaatgagttactggctggttcttgcctctctaccaagacctctgccacactgggcctacatttccaaccagtcccaaatggccgagtggctgctccctcaagacaggcatgccatctccagttggcctcaggtctcacctatcaatttgctcacttgtgacccctgccgtggcccacttccagtcttgacaaccccctcagtccatgctccacacagagctttctaagaacactggaagccctccagcagcattctcctgcacttaaaagggcagcatcatttatttttgtatccctggtacctagcaaaatgccatgtgcactgagctgctaatttgactgaagcctcgtgcc

SEQ ID NO: 133826 - DNA, 537 bp, Homo Sapiens
ggcaagaggctgaccaagtctttcttgatgtcggggtagtgcacgtcgacgattttttgcagggtgctgcgatcggggaaggcgatgtagtggaagaagcagcggcgcaggaaggcgtccggcagctctttttcgttgttggaagtaataatgatgatcgggcgtttcttggccttgatggtctcgtcgatttcgtagacgtagaactccatcttgtcgagttcctgcaacaggtcgttggggaactcgatgtcggccttgtcgatttcatcgatcagcagaatcacgcgctcctcggcctcgaaggcttcccatagcttgccctttttcaggtagttgcgcacatcgtggactttctcattgcccagttgcgagtcgcgcaggcggctgaccgcgtcgtactcatacaggccctgatgcgccttggtggtcgacttgatatgccaggtgatcagcttggcgccgaaggattcagccaactgctcggcgagcatggtcttgccggtgcccggttcgcccttgaccagcagcggccgc

SEQ ID NO: 133827 - DNA, 876 bp, Homo Sapiens
gcggccgcacaaagcgctggaagtgatccagttcgcggccctggcggttcacgaggctggcgccgatctcgatgacttccatctccgtcacgggccagccgccttcatccgttgtggcttcaaggtcaataatcagccaatggggcatcgtgcaggttcccgtactcgtcctttcctgatggggatagagcgtagctgggccgtgtagttccgcctagggtgttattcgatctccagcaaaacctggcgattgcgcacttgatcacctgcgacgacctgcacacccttgatcacaccgtcgatgccggccgtcagcggatgttccattttcatggcttcgagcaccagcagcagttggcctttgctgacgctttcaccggcgctcacgcggatatcgacaatcgcgccgtccatcggtgccttgacgatgccggtgctggcgtcggcctggcggctggcgacgtgttgggtgcggttgatgatcttcacgcccggcagccagagctgagtgtcgtccagatggtagggcaggcgacggcgaataccgtcgatcaccagtgtggcccagcggccgtcggtggtcaggtcatggatctcgatgccgttggcttgcagatggttgccgtccaatacgttgacgtcgaggtcctgcacctcgtcgttcaccgccaggcgatagcgccaggcggccttgttgcgccatcccgacaagccttggcggtgggtgttggcgctgtgttggtaaacagtgcggcgggcagcgcgacctgctcctttgtcgcggcgtgacgtgggatgtcatttgagtgtttggcgataaacccggtactgaactcgcctgcgataaagtccgcttgcccgagcaggtcaaccagc

SEQ ID NO: 133828 - DNA, 850 bp, Homo Sapiens
attgcccgtgcctcaacgattgaactctgggtttccgccaaccataagtcgacatggggcgccaggccattcaccagtggcgtcagcagttcgctgactcggccggcctcgaacaagtcgggccggtaggagccgaacagcggcggcaatgagcctgccacacgcaccgtctggcttgaagcctgtaccgcacgtcgcgccaattcaccggccaacgccgcaagcgcctggccttcggcagcaaaccgcgcttcaccaatatgaaacggcacaaccgcgtagctgttggtggtgatgacgttggcaccgctctggatataagccgtgtgcaccgcctctaccgcctgcggcgcttcgctcaacgccaatgccgaccactccggctgccgaaacggcgcgccccggcgttgcagttcacggcccatgccaccatcgagaattactgcgcttactgtgcccatatgctttttactcataagcttatgaaaataactcactatgagagtcgttcttataactatttaatgcgtaccgtctggttaataacaacccttttttattcaggtgtcgattgtgaaacttaaaccgctgctggccctgggcctgacgatgctggctgcctctacccaagcctttggcggtgcaaccctggaccgggttgagcaaaagaaagaactggtgggcgtgctgatggaaagctacccgccgttctcgtttctcaacgagcagaaccaactcgatgggtttgacgtcgacgtggccaaggcagtcgcgcagaagttaggcgtgaagctgcgtctggaaacgccgtcctgggatgtgattgccgccaggtcgctggagcggccgc

SEQ ID NO: 133829 - DNA, 730 bp, Homo Sapiens
attcggcacgaggcgcatggccggttgcgggccgtcgcccttgatgttgaaggtcgggctttccagcgcagcctgctcggcggcgttttgcgggaacagcagtttgatgtggtcgtcactgcccaggctgataaaaccggccagctccggcccgcccaaggtgacgcggcgcatgcgtggggtgatgtcgaccacccgcagcacttgcaggcggcggcgtttgatttcgtgggtaacgcgatggatagcttgagtattcattggtttttcccgtcggcaatggcttgagcggtgccgttgagcagcgccgcgacacgaacgatttcttccgggctccagcgcccgtggtgcgaatgcaaggcgtggcgcaggttatgcaccgcctcgtgaatctcgggtgggcggtcgtggccacgcagcgagcgcttgctgacatcaatgcgcatgcgcacgccttccagggcaacggcttgctcgcttaagaagagacgaccggcgtcggtgattgtgtagcgtttttttccattctcggcgtcgccgctgatcaactcgctctcttccagaaaggtcagcgtggggtagatcactccggggctggggctgtaggcgccgtcgaacaggctttcgatctggcggatcaggtcatagccatggcagggctgctcggcgatcaaggccggtagcagcagtttcaggtcgccaggggcaaatacccgagggccgcggccgc

SEQ ID NO: 133830 - DNA, 727 bp, Homo Sapiens
gcggttattgacatagggggcgtcgatgttgggatcgaggggcagcatcaccaactcgtcgaaattcaaagcatcgtaccccgcggcgtcggcctcctcgattgccgcgcgaagggtcccccaaccatccggtccttgaaggatttcgtcggcgtcatgatgaatcacccagtcagatcgcagggtttcgatgacctgcgccttcagggcgagttgggatgtcaggtcgaatacgccggagtagctgaggcgatgtacggcgacccgcccggcgtagggactggccgccagccactcggccgttccatcggtgctctcattatcgatgagcgtcaggtcgatgtcctgatccaggagatagggaacgagcgtgcgcaggtagccgatctcgttgcgggcgcatacgacacaggcaatgcgaagcgtcacgatgacctccccaacgctcaaccatttaagacgcggcgaccgttccaacgccgcggccggacgaaaaggttcatttgaccatagtgcagctctactcaccatggaatggacaggtggatcagcccagagtggcgcctgccgtcgaggatggccagcagacgggacgaccgcggctcgcgcatctgcgattgggtgctagtttcgaggccgccgtgcgtcttagatcatgcgcccaactggagcaccccatgccacaacctattccctatctcgccttcaatggcgagtgcgcggccgc

SEQ ID NO: 133831 - DNA, 489 bp, Homo Sapiens
ggcacgagggcggcgcacttctatttcaacaagtcggcgcgcgacgtgaacctcgccgagtccgccatgctggccggcctgttcaaggcgccgaccaaatacgccccgcacatcaacctgccggccgcgcgcgcccgcgccaacgtcgtgctcgacaacctggtcgatgccggcttcatgaccgagggccaggtgttcggcgcccgccgcaacccggccgttgccgtcgaccgccgcgacgaggcctcgccgaactattatctcgactacgccttcgacgagatgcgcaagctggtcgacaccttcccgaaatcctacaccgagcgcgtgttcgtggtccgcaccgcgatcgacatgaacgtgcagcgcgccgccgaagaggcgatcgagaaccagttgcgccagttcggccgcgactatcacgccacgcaggcttccaccgtcgtagcagacctcgacggcggcgtccgcgccatggtcggcggccgc

SEQ ID NO: 133832 - DNA, 557 bp, Homo Sapiens
  misc_feature (463)..(486): n is a, c, g, or t
gcatgtgaagccttttattggacagggaacagactagtgcattctgactccctcagacaagtggcagatctatgaggtaaccataggtcacttgttggtcaccattccattttaccaacagggaaacagaatgagaaagaggaaggaaatgcccaaaaactacacagtgagttgcaaagagctaggatacttggcagatttatttgagatggctcttctccaatggtttcaataaaaatccagggattgacgcttcactggtaatccgggccctggaaatctgggcccagggtagcccctgaagccaggaaatgagtcagccctaaccaaattccctagaaaggagtggttccccaaaaccaaagaggtattttccataaggggatatggatgtcttcctcaatccattatcctctctccctcccacggcatcccacagaacaggatttaccagtcccattcnnnnnnnnnnnnnnnnnnnnnnnnggagactgaatttcactcttgttgcccaggctggagtgcaatgcatgatctcagcccactgccgcggccgc

SEQ ID NO: 133833 - DNA, 460 bp, Homo Sapiens
gcggccgctgcggaacttcagctcctgcccgtcccacaacgcccgcacgccgtcgagcttttcgctgaccagatagggtcgggggtcgatgcccggcggcgcgttgcgcgccagcagcggctccagcgccgccgcgggcaggcccgtcgaaccgagcagagccagcagcgcacgccgggtcagcatcagaccaccacgggttccggctcgagccggatgccaaagcggccgtagacactttcctggatggcgcgtgccagcgtcacgacctcggcgccgcgcgcgtccgccttgttgaccagcaccagggcctgtttctcgtaaaccgccgctccacccaccgtcttccccttccagccgcaggcgtcgatcatccacccggcggccagcttcacgcttccatcaggcatgggatagtgaacgatgccggggtcgcggccgatgatgtcgccctcgtgcc

SEQ ID NO: 133834 - DNA, 583 bp, Homo Sapiens
gcggccgctgagggcaatggccgtggcccagaagccgccgatgctgatgccgagcaggacacggccgaacagcagcaggctgaagtcgctggcgtaggccactaccgtgttggcgatgatcatgatcagcgtcaggccgatcagcaggtaacgacggtccatgccgccaatgatcaccgacagcaacggcgcggcgagggcggccatgatgccgggcagcgtgaccatcaggccagcgtgaccggcactgatgcccaggtcgctggcgacgtcattgagcacgcccaccggcagaaactcactggttaccagggcgaaagcgcctacggcgaccgagagaatcgccagccactgctgtttgacactttgttgattattttcgggacggccgctgtgggcctggctggggcttggcatagtgtcggttccagaaggaatgtcgcctgaagccaggcgaaggggagggaaagtggaggcgattataggaaccggtgctggcaatcacacaggcgctcgtttcgataataaccatcagtgcaatcgattcgacgctctgggacggccttgatgctcgcctcgtgcc

SEQ ID NO: 133835 - DNA, 979 bp, Homo Sapiens
  misc_feature (731)..(731): n is a, c, g, or t
  misc_feature (765)..(765): n is a, c, g, or t
  misc_feature (900)..(900): n is a, c, g, or t
ttttttaggtataaaaaaatttctttaatcagaaaggatttatcttccctcaacacaaatgcacacattaatagtaaaaatacatatatacataaatatttacacaaagtagaagtcacagtggacagctgtatgccctgggctagaggttgagaagatgagcatcagcagcaactggaggatggcttctctgctgctcccggtgtcctatggtcatctttctggccaaggtgggtagactgggaggggatagggtatagctccagtctgatggcagagttactggcaaactgtagcaacgaggaccctctccagatagtttcataggctcaccagggatgacaggagatgctgtagtaggtgggactggggtggttggggcagagtgggtgaagggttgcactccatgctggaggaaaagaatgacgccaatgccggttccagtgcctaaaggaccatggctaaaggagatagtacctggggagctgagaggggggttgcaaattggagtggtgtggatccaggtgaggttcatagctggccattgtgtgaggtgccaaggctgctttggttttaaagctagatgtcctagctgtgtctggtccatcttttccataggagatgcaggagaggaagcagctgaatcactgtggtggcttgggaaatgcttggtcagctgatgcttgtcaccacccaatgatgacttctgggcagctatttgtggtaacaangctttatcatccttctacctgtaacaggttctangtaacgttccccatctgtggcttctgcaaacactacatacgctggatctgtccattgcaactctgctgaaactgcctcgtgacgatcttggctcgatggtcaattcctgaaagatcctataaatcggatcagtcnagctgttctgtgtgaatcgtatcgcccaatccaacacatcagcggagcaaatgtagctggggctatgagactatcaata

SEQ ID NO: 133836 - DNA, 577 bp, Homo Sapiens
gcggccgcccggtaggtttggtgcacggtgcattgttgctggataacgaccgcgatgagctgattgcggcggtcaatcgtttcaatgaggcctgcggcctcgaccagcgggtgcgtgccgacagccatatcgcgttgcacgaagcctttcccgcaccggatgccatcacccgactggacgtgttgtaccgtcagatgctggccggattcctgccggcttaacgcgtaccgaacaccaccatcgtcttgcctttgacgtgtaccaggttgcgttcttccaggtccttgagcacacgaccgaccatttcccgcgagcacccgacgatgcgtccgatctcctggcgcgtgaccttgatctgcatgccgtcggggtgagtcatggcgtcgggctgtttgcacagttccagcaggcagcgggccactcggccggtgacatcaaagaacgccaggtcacccactttgcgcgtggtgtcgcgcaggcgttgagcaatctgaccgcttaaggcgtagagaatgtcgggatcatgttgggccagttcgcgaaacttggcatagctgatctcggcgaccctcgtgcc

SEQ ID NO: 133837 - DNA, 1700 bp, Homo Sapiens
  misc_feature (516)..(516): n is a, c, g, or t
  misc_feature (1421)..(1506): n is a, c, g, or t
aaaattatggtagtacgaggctggcgtgttaatcggcacgagggcagaggcgctgcgtgttactggccgggccgacgggtcctgagtctccagagctcggttcttacatccccgcgtcccaggtttagcctgagcagggttgtggaaggccgggacccattgacagcacgatggtgacggagcaggaggtggatgccatcgggcagacgctggtggaccccaagcagcccctgcaggcccgcttccgggcgctgttcacgctgcgtgggctcggcggcccaggcgccattgcatggatcagccaggccttcgatgacgattccgccctgctcaagcacgagctggcctactgcctgggccagatgcaggatgcccgcgccatccccatgctggtggacgtgctgcaagacacccgtcaggagcccatggtgcgccatgaggcaggggaggccctgggggccatcggggacccggaagttctggagatcctgaagcagtattcctcggaccccgtcnatcgaggtggccgagacctgccagctggccgtgcgcaggctggagtggctgcagcagcacggcggggagccggcggcgggaccctacctctccgtggaccctgccccgccggctgaggagcgtgacgtggggcgcctgcgggaggcgctgctggatgagtcccggccgctcttcgagcgataccgcgccatgttcgccctgcgcaacgcgggaggcgaggaggccgccctggcgctggccgagggtctgcactgtgggagcgccctcttccgccacgaggtcggctacgtcctgggacagctgcagcacgaggcggcggtgccccagctggcggccgccctggcccgatgcaccgagaaccccatggtgcggcacgagtgcgcggaggccctgggcgccattgcccggcccgcctgcctggccgcgctgcaggctcacgcggacgacccagagcgcgtggtgcgtgagagctgcgaggtggctctggacatgtatgagcacgagaccgggcgggccttccagtacgcggacggcctggagcagctgcgcggggccccctcctagggccccaccctcacccggagctcccggaggactcttgagggccgctcctcccccgcagagctttggcgtctaaaccgggtgtgtgtaaatcggtgtcatcgcttgtgtcttgctgggcgcacggttgctgtccccctcctccgtctgggaccgaggagctgccgttgtgctgtgactccctgagtcccctgactgctcctcggggcctggcgcagggctgtagcgtgaagtttcccaggcttgggggtgggactctgccgggaggctctgggatgcccggctcaggacagggaggattgcgaggggaagccaggggaggatcgcgagggaagccagggagnnnnnnnnnnnnnnnnnnnnnnnnnnnnnnnnnnnnnnnnnnnnnnnnnnnnnnnnnnnnnnnnnnnnnnnnnnnnnnnnnnnnnncgggcaaagctgggttggaaaagtagtatgtggtccgtacatagatgcacaggttggggcttaatccaccaggtgtgaagggggtccggtgtagtggcaggcagagaaacactagggcgtgttattttggaaaaaacgtttgggaaatatgtattccttggtctttatttatatatagtaatactatattttat

SEQ ID NO: 133838 - DNA, 375 bp, Homo Sapiens
cgcatccgcgtcggcgtagacggggacgtagtccatccccatcgagtccttcttcggcaccggcgacgtgtccggcaggcccatcgggttgcggtagtagaggatcgcgcgcgcgccggaagcgggccggtggccggcggcctccgcgccggccgcgtcggggccgggagcgtcgtccgggagatcgaagtggacgtcctcgctggcgcgcaccgcccggaacgcgcgcccgtccgcggtcatcatcggggcgagcgcgtagaccggcttcccgtccggatcctggtaatagaccacgggaccggtcgccgcggccgggatggccggcgccgctccgttcggccaccaggcggcgaaccgcgtccgcgcggccgc

SEQ ID NO: 133839 - DNA, 903 bp, Homo Sapiens
gcggccgcgcgccgggtggagcgcaccctcgagcgccggctgcgctcccccggcgcccccgccttccccgacgacgacgcggacgggtcctacggaccgcggcaggagtacgaggaccaggtgcgggtggacgactacgacccgcagacccagacgatcaccgtcgtcgaccccgcctcacaccagcaggtgcgcctggaccgcggcaccggcgtcatggacgtcaccgacctgcgcaccgggcgcacgcgcagcttcgacgaccccgagcacgactggatcgcggacgacccggaggacgagaagggctgagcgacggggtcgggccggccgcggacgacgtcgtgatggcaggcgcctcgacatggcgtcatgcgcagtcgacgtcggggcgtccctcctcctcagacaggacccggcggagcacctcgagggcatgccggacgcgctgatccacccggtcgccgtccggcaccacggcgcacaccgcgttcggaggtgtggggtctgccacgggtatctccacgaggccgcgcgcggcgggctgctcgcccggcagcgtatagcgcagcgaccagccgaggccagccccgacgagggaggcgaccgtggcgaggttgttgctggacaccgcagcgtcggctcgacgcccgcggcgcgcatgaactccagtgaccgctccgtgctgggcggcaggtcgatgaggatggccggctcctgagcgacgtccgcgaaggcgacctcgtgcgcggcggccagccgatgcccctcgggcagcatcaccttcagctgcgcccgggccacttcgatcgatcgcagccccggtgcctgctgacggctgaacatgacgggcatctcgagtcgaccctgcaggacctcccgctgcaggtccgtggccgcccc

SEQ ID NO: 133840 - DNA, 523 bp, Homo Sapiens
  misc_feature (425)..(465): n is a, c, g, or t
gaaaaagtaaaactatttttatttgctgaagatatgatccactgtgaagacaatcctgtgaactctacaactataacaggacccattatgaaaaaattcctaagaactctactagaactaataagtgagtatagcaaagccacaggacataagtccaatatacaaaaattaattgtatttctatgtattagcaaccaacaagaaatttaaaaataccatttatattagcattcagttataaaattcttagtaaaatatgtacactgcaaactaaaactctgctaggagtaattaaagaccaaaataaatcaagaaacatatcgtatttatgaattggaggctcaacataatcaacacattaatcttcaccaaactgatttaaaacaagagttgcaatcaaaatctcagtgggcttttttgttttnnnnnnnnnnnnnnnnnnnnnnnnnnnnnnnnnnnnnnnnntcttgaataggccctttgcaaaaaaacttataatatacagatggccaataagcccaac

SEQ ID NO: 133841 - DNA, 838 bp, Homo Sapiens
  misc_feature (147)..(147): n is a, c, g, or t
  misc_feature (154)..(154): n is a, c, g, or t
gcggccgcctggtggtattttcctggtacaaggtcttactagtttttttaagtacaagattctacaaagtcattaaatatcgaatgctcaaaaacggaattcaacaaaaatttgcccccatgctttaacggtatacctgtagttaanttttttntaaagtagggattatcaaaataaagctagctcaataatcactttttcgaagtgtttagaagacactcctacttgggtgtcgatgcctccgtggggattctgcaattcttagaggccacgtgggcagagagcggcgctttacccggagctaacgctgtgaccaccagcgcctctcacccggcagcgcctaacctgcagaaaaccggcgcgagtaatgggtacctcacatacgaaggttaaatcatttaaatcacgtaataaggttaaacttgtccgcaacacgatttaacacctccatctcaagatataatgaagcccgtccacactacaaccacgtttgtgtgggactcataccagccgcgtggcgcggagtggcctgcggccgtgatcccttcaccctctcggaccgacttcggagtctcgatcctccggaccaacgaaggggccccgggaaaccccagatatgcaacgcctcccccgcccgccaggcccggacggcctcgccctcttagcaacctacctaaaacggcctcgcagtggccccaaccgcgcacttgctgcttgtaacccaggcctcggcccaaaacccgcgactggcctggtgcgtgagtcctagagctctgtacacaccaccctcccgacctcagccctccaactcccgataaccagccgacctcctccaacc

SEQ ID NO: 133842 - DNA, 785 bp, Homo Sapiens
tattctttcagttgtgttcatacttcagttttcaatatagttaaaatcctcttgcaacagctgctcaaaccgttaaatttttctccaaggtgcggtttttttcagttctctgattctaaaaatgggaagccagatcctctgcttctaaattgtttcttcttatctattagtgagtatataggatttctccttcctttgtggtcttccccgtggtcttcctgtttgctggtacctcctcggtttttcttttttgttatatctctttttcctgttcttgaatctttcaaaaatagcttttatagtcaatggtattggttcaaaagatgagtcacttgatgaatcacttgcgtgaacactttcaggtgtacgaacaaattttcgaatggggtttcttttctcccctttaggtgagtaagggatacactgagttttaaataagctgctatcagaagagttatcacttcgatttgcaagttccacagcatcagatgtcacatggtcaagagaatctattcctgatttatccatcaattgctctttgttttaaacagttttctaaaacggcctcgcagtggccccaaccgcgcacttgctgcttgtaacccaggcctcggcccaaaacccgcgactggcctggtgcgtgagtcctagagctctgtacacaccaccctcccgacctcagccctccaactcccgataaccagccgacctcctccaaccgtgcggaagaaaagccccggccgtaatggccgaattcccgggcatatgtccggtaccgtcgactg

SEQ ID NO: 133843 - DNA, 709 bp, Homo Sapiens
tttttttagtctatattagtttatttacgttttctacaatacgtggaacttttttcaatataaaaacaagtcagtgaatcctcatttaaaaaataaccatgtgacacataatacaaagataatttaaaaccagactcatgctgttttatgacagaaccaatttcaatggtaactaatcttcttaaacatatttaatcatgtagtttctggaagataggttaaatgatgaaaaaatgggcgaccatgaacacactctttaatttcatttccaaactggtgcttcattctgtagataatgtcttggatgtcctcttttgataagtacatgggtaattgtctggatagacgcactgcttctccctctaaataacttatcactttgcgaggtctacattcataaacttcctttgcatttctgtttaatatagcattaagaatttcttttaaatctgctactccatagaatgggagacaattagccattccttctatttccaagtaattttcagtaattgaaactcctggtatcaattttatcttgaaaccattcgctgtaagacgaggatcagacaggtaagttgatccactgtatctttggtcatctgctgtcattttatataaaacgtctaaataatgagatccattaaaaagactgaaaaagaaattatgggcctttaacttattaaaaacacaaaataaaggggtttac

SEQ ID NO: 133844 - DNA, 953 bp, Homo Sapiens
  misc_feature (119)..(179): n is a, c, g, or t
gtgtgttctccgttggctgcttctttttttgctgggttgggtctgctgtgtgggcccgcgcgtgtttttcttggccgccccgtctctctgcttgtggttttgtctgttgtgctcggttnnnnnnnnnnnnnnnnnnnnnnnnnnnnnnnnnnnnnnnnnnnnnnnnnnnnnnnnnnnnntgatgaactttcgttttattgatttttcggtacccaagtgtggcactgtaaggctgccacatacagcaagtgacatgacaccaaaaggaccttccgagagtattattcttactttggatggaagacatcgcttaaacaaaaaacatttaaagatgctcccttgctttttataattcctaactgtaaaatataattttagtacagaacaaacaaattctccttggttggtcacatcattcattattgaaagggaaacttagtatcaaaagaaacaaaacactgaaataaataactaagtaatttactgaaaggtagttttgttgcattgcacacaactgaccgcagagaattctaaagctgatttttttcttaaaggatgaaaaactcatttgccatttttagtttcttgctaagtgatacatgctccttataaggaaaactactctgtgtaggcctgagtttaaaatgtaaatatctgtttatccagagtttgttaatctagagtacacaggtgtggaaaactggtggtgaaaagagggacctacccagccttcagggtggctgggcaggggccccatgttactggcctcagccaccagcagcgtcttcactccgcccaggtcagaaagcactgcctaaagccggagcttaggatgaacatgggcaaaaagcactggtacagttccatgtgtttctcttctactgtaatgtccccagagggattgtgaaatgtctgagaacatgccctggaggaggtttaaaagtgagaagccc

SEQ ID NO: 133845 - DNA, 690 bp, Homo Sapiens
agcgtcgacaacagccagaacggcaccctgagtacgcgccaggccctgtccctcggcaccgccgacctcaacaaccagcaaggcggccagatcaccagcgcagaggcgctgacgctggacctgcaccgtggcgagttcaacaaccagggcgggctgatcaacgcgccgctgctgatgctcaacaacctcaagaacgtgcataaccagggcggcgaaatctccagcagccaggcgttcacactcaccgccgataacctcgacaacagcagcggcaaactgctgagcaacgccgcgctgaccctgcgcatcggccaggccctggccaacgtcaaaggcatgatcgctgccgcctcggttgacgcccacgccaccgacctcgacaacagcggcggcaccctcaccagccgtggcgacacgctgctcaacgtggctggccacctgaccaaccgcgaccagggcctgctcaacgcgagcaatacgctgacgctcaacagcgccgcgctggacaaccagaacggctcgctgctcggcagcgcaattgccctggacttcggcaccgccaccggcgacctcaacaacgcgggtggcctgatcactaccgccggcaacctcaccatcaaccacctgcgtgacctcaacaaccagggtggcgaactctccagcgcgcaaaccctgaaccttagcggccgc

SEQ ID NO: 133846 - DNA, 582 bp, Homo Sapiens
gcggccgcctgttcagccgcaatacccgcaacgtcgcactgacgcctgaaggtgaatcgctgctgccgttggcgcgccggttgattgccgactgggacaatgccgaagacgaactgcgtcagcgtttcaccctgcagcgtggccgcgtcaccgtggcggcgatgccttcgtttgcgggcaacctgctgccaccgattcttaagatattccgcgcacgttacccgcaggtgaatgtgacggtgcatgaccttatcaatgaacaggtgctggaaatggtccgcgatcgccaagtggagttgggcgtggcgttcgagccatccgaaggttcgtccctggcattcacgcctttatacctggaccggtttattgcggtggtgcccggtgattcgcccttggcgcaatgtaccgaagtcgactggaaaaccctgttggaacacccgttcatcaccctgcaacggccctcgacggtgcgcgtgatgctggaggagcaccttggggccttgcagatgaaattgccggtggcgttggaaagtcatcaattggccacggtcggcaagatggttgccagtggccctcgtgccg

SEQ ID NO: 133847 - DNA, 1849 bp, Homo Sapiens
  misc_feature (62)..(76): n is a, c, g, or t
  misc_feature (554)..(587): n is a, c, g, or t
gaagaaaaaggggctttcctggtcgggggaaaaaaagtggggggtccacaggaaggaaaaannnnnnnnnnnnnnncccgagaagagttgttcgccccgttgagagaaataagagaggccaaagttttcccccaaaggaagggccccttattcctgtaaaggtggctttttaagaaataaagggtgccaggaaggccagaattggccaatggtctagttaggtggctggcctaatggtccattatttcacgaggaataaaaaaaattcccaggctaggttccacatttttctcgtcccgttttggaggcatcccactccccccttggtgggccttggaccgcaggcaaatgcagcacctccactgccctttgttggtccttgaacttgagtgagtagccctgggagatccagcaggctctagaaacacacgtctaccaatgggctggagtcctgagttaaagagaagctccagtactggagttggacacagcaatcaatgttctattgtcaaggctttttcccttagatttgtctaaaataggtgtcagagagnnnnnnnnnnnnnnnnnnnnnnnnnnnnnnnnnngccaagaagccccaacaaccaccgcggagagtcagaggcttaacagctcttgacgcgggcctgggtgatatccgatgttttcttgatgacgctggcccgggtctcccggtctggccgcctgctgctggatgctggggtcatggaggaagaaagggggaggtcttgaaaagggggccaggagctgttgtaaggcaccggattgctctcctctttgatggtgacctggaggtccggtttgttggaagtgacgaaggacgccatgccgggcagcaggtaggagcctcgagtccccatgttgctgaggtactgtttgctttcaatattcctcttccgccagtgtggcggtcccttggcactctcttcatcgctgggcacactatcagtcgtttcgctttctgcataggaagacacgggggagatctgcagagggtagagctcgctcatgctgaccggctgctcgtcgctctcagtggtcacctctacaacttggcaaatgtctggcggattggtgacaatctcttgattctcaatgttgctgtccagatgggactgtcctacaactatgatgttcaccgtactatccacttcattttttatagttgaagtcaggaccgcatactcaggagaaagatcacttactccattactaagccccagagatgactcaactggttcttgcttgatgtgcttaactttgtcttctttttctgtctttggtttctttcctttcttagaaggccgttctgataggggcagcattcggtagaccctgaaggcattatttcctttctttatgcttttatccttgacttcttcaatatcaggcaaggaattcatggcgcatctgaaattcgccttccatgttttgggatcaggtttatctactcctggttgatgctttcctgtatggattgcccagtttctaaagagtggtgcatctttttccacatcccacccatgtctagccgcatgcatccaggggatctgaaaaatcttcttttccttgttaagccacttgagccccgggatcgtgttggagtttatctgctcctccagccacgggcgcatgcgcatcctttccaccggcatggtgccctctcagtgtgcttttttcacgctaccaatacaattccgcaaggtataagtgttgctagggtgtgtgaaatggaaatgaaagcccgtcagttgaataatcgcaggagcaaaactaaaagttactccccggcttgcctgagaacagtccatcccgggaattccggacc

SEQ ID NO: 133848 - DNA, 994 bp, Homo Sapiens
  misc_feature (974)..(974): n is a, c, g, or t
aagtgctcagcactaagggagccagcgcacagcacagccaggaaggcgagcgagcccagccagtcccagccagcccagccagcccggaggtcatttgattgcccgcctcagaacgatggatctgcatctcttcgactactcagagccagggaacttctcggacatcagctggccatgcaacagcagcgactgcatcgtggtggacacggtgatgtgtcccaacatgcccaacaaaagcgtcctgctctacacgctctccttcatttacattttcatcttcgtcatcggcatgattgccaactccgtggtggtctgggtgaatatccaggccaagaccacaggctatgacacgcactgctacatcttgaacctggccattgccgacctgtgggttgtcctcaccatcccagtctgggtggtcagtctcgtgcagcacaaccagtggcccatgggcgagctcacgtgcaaagtcacacacctcatcttctccatcaacctcttcggcagcattttcttcctcacgtgcatgagcgtggaccgctacctctccatcacctacttcaccaacacccccagcagcaggaagaagatggtacgccgttgtcgtctgcatcctggtgtggctgctggccttctgcgtgtctctgcctgacacctactacctgaagaccgtcacgtctgcgtccaacaatgagacctactgccggtccttctaccccgagcacagcatcaacggagtggcctgatcggcatggcagctggtctccgttgtcttgggcctttgcccgttccctttctccattcatccgctgtcttctacttcctgcctggccagagccatctcggcgtccagtgaccaggagaagcacagcagccggaagatcatcttctcctacgtggtggtcttccttgtctgctggctgccctacacgtggcggtgctgctggacatcttctccatcctgcactacatcnctttcacctgccggctggag

SEQ ID NO: 133849 - DNA, 825 bp, Homo Sapiens
gcgactaacaccgtgcctttaacccccgaacgcttgaggttcaggctatcgcccgaccacgatgactccaggccatattgctccttgagtttgtgcgccaacttctcggccttcgcgcgcgcgccttctttacccagggaatgtgcacgctcaacggtaatacgggccattgcaatgactcctctttatatcgactcagaacacctgccatgcggcaaaaggtctcgatgaacacctatcttaccttcagccttgccaagacaaagcaggcggtggggattatcatgtcccgcattctcttttggtgacagcgatatgactgatcagcgcaaaggcagcgatgccgaacccaccactcacttcggcttcaagaacgttccggaaagccagaaagcggaaaaagtcgctgaggtgttccactccgttgcggccaagtacgacctgatgaacgacgtactctcgggcggcatgcaccgcctgtggaagcgcttcaccatcgagttgtcgggtgtacgcaccggcaaccgcgtgctcgacatcgccggcggcacgggcgatctggcggccaagttctccaagctggttggcccgaccggccaggtcgtgctggcggacatcaacggttcgatgctcaaggtcggccgtgatcgcctgctggataaaggtgtggccggcaatatcgagttcgtccaggccgatgcggaaaagctgccgttcccggacaaccatttcgactgcgtgaccatcgccttcggcctgcgcaacgtgacccataaagaggacgccatccgctcgatgctgcgcgtactcaagccgggcggccgc

SEQ ID NO: 133850 - DNA, 594 bp, Homo Sapiens
aattaaccctcactaaagggaataagcttgcggccgctgcggccacgcgggtcagcttgaatgccgagcgccagccgccgctggtgcagggcatggtcaagtcggtggtcaactccaccaccaacagcatgatgggcggggtgcgtaaccagctgaatgcggcgtgggtgagtgaagtggtcaacgtgtatcgccagtctctggcggggcgttatccgatgtcgccgggcagcgcgcgggacgccacgctcgatgacttcggccagttcttcggcgtgggcggggtgatggataactatttccgcaaatacctgcagccttacgtggatacgtccgcacagacctggcgctggcagccgggcgcggcgcagaagcttgggatcgcgccgggcgtgctgcaaaccttccagcgtgcggcggctattcgtgacgcgttctttagatcggggggcacccagccgatcgtgcgtttcgagctaagccggtgtcgatggacccgaccatcactcagttcttgctcgacctcgacggccagcaactgagctacgaccacggcccaagccggccggtagcgatgcaatggcccctcgtgcc

SEQ ID NO: 133851 - DNA, 1005 bp, Homo Sapiens
gtccccttagcgacgacaccgtcatcttgccccgagaggtgtctctcatgctgcgcgggaaccgcctcttcgccgaacagcccagccctaccccaccgccatggtccgaaccacatcagaccaacttggtgaaccgggccggactcggaactgccctcgaagccgtcagcgcaatgtctgctttgttggaggcaatggagcgtcacaactgcgctttgctggccagcggtggcattgccaagcgggatgcacgcatcgtgctgtctcgggtggcacccggagacgacggatgggtttacctcgccctggctgccgcaggcggtctcatcggggctgacggacgcagctggctccctactcccctggccgaccgatggcgtaccgactcgctgtgggggcaatgggtgagcctgagagaagcgtggcgacacattccgcagttgcccggtaacctcggcaacgctctcgacgcctcagcacccgcaaccgctcaagcatggcgtcgcctgatacaccgggaactacacagtgccgagccgggcactccgatcgagaccaaagtcatcgcgaatcggatccggtggcgtcagccgggcaccaccgtcgacgactctttggtggaggctgtcctggatgagtgcagagtgctcgggatggtcgcactagacgcgcgcactgacctcgtcgatgcacgcacctgtgccgacatgccggaacgcaccgacgaggtgattctgcaatctgacctcaccgcggtcgctcccggcccacttacccccgacaccgctgccgacctcgccctacttgccgaccgtgagtccaccgggatcgccggtgtcaggcgattcaaccgctctagcctgcgtcgtgccctcgatgccgggtggaccggtgagcgagtgcgccaatggtgggccgaacactccctcggggatgttccgcaaagcctcctagtactcctcaatgacgtcgtgcgtgaccacggtcgggtgtcgtagcggccgc

SEQ ID NO: 133852 - DNA, 917 bp, Homo Sapiens
gcggccgccaactggctcgtctgcaaagaggtctgggtgtaccggaagacgcaaccttatcgctgccgctgcgcgtggtgcagcaggcgctgccggtcgaccccgcgacggcaagagaatttgcagatgccaggatgaaactcccggtgacctcgccgtggccgatgcgctatgcgcggcatggatcgctcgatctcttcgtcgccgcgccggcgctcgtgaaggcaaagccggtatcggcagaatattttccactcacgcccggccagatcaaaggtatagctccgcagcatcttgctttcgcccgcgatgggctggtgctcagaaccacaccatcgaagaagtttagaaacaccggcgtactcgcaggcgtcctcgagctgacatcggcggacggctcggtgcaggcattaaacgtcgaagcgcgaccgggactcgttccgccggtggacttcggtgacacaggcgagatgagtttggcgcttgcgcttctgttcgcgcttcttggcgggctcattctcaatctcatgccttgcgtactcccagtgctggcgatgaaggcgctggcattggcaagccatagcggcgaccgcggcgtggcccgtcgaaagtctggcctacggcaccggtgcaatactgagtttcgtttcgttcggattgacgatcgtcatcttgcgcgcgagcggcgccgccatcggctggggctttcagttgcagcagccgatcatcgtcgccgccttcgcgctgctgatgtttgcagtcggccttaatctctccggcgtctacgagattagtccggtgacagctggagacggtttggcgcgacgtggtggcttcattggctcattcttcactggtgtcctcgcggtggcgatcgcggcaccttgtacagcgccgttcatggcggcggcactcgg

SEQ ID NO: 133853 - DNA, 762 bp, Homo Sapiens
  misc_feature (564)..(564): n is a, c, g, or t
  misc_feature (726)..(726): n is a, c, g, or t
aaactatacggtctaggtacgaggcctggtgtcgaatcggcacgaggcgggcagcagcggggctgtctatcccggctgaggacccgcggccagtgcgggtggctggctttgccattagcgggggcctttcctgaggacggcgtacggagtgtggggaatgaaggatggcagcatgccgtgcattaaaagctgttttggtagatctcagtggcacacttcacattgaagatgcagctgtgccaggcgcacaggaagctcttaaaaggcaagctatcctccaggttcagctgacaaatatgtttgttacgtggtgcttctgtaatcattaggtttgtgaccaatacaaccaaagagagcaagcaagacctgttagaaaggttgagaaaattggaatttgatatctctgaagatgaaatattcacatctctgactgcagccagaagtttactagagcggaaacaagtcagacccatgctgctagttgatgatcgggcactacctgatttcaaaggaatacaaacaagtgatcctaatgctgtggtcactgggacttggcagccaggnaacattttcacttatcgaaattctgaatcaagcattccggttactcctggatggagcacctctgatagcaatccacaaagccaggtattacaagaggaaagatggcttacccctggggcctggaccatttgtgactgctttagagtatgccacagataccanagccacagtcgtggggaaaccagagaagacgttcct

SEQ ID NO: 133854 - DNA, 974 bp, Homo Sapiens
  misc_feature (734)..(734): n is a, c, g, or t
  misc_feature (746)..(746): n is a, c, g, or t
  misc_feature (749)..(749): n is a, c, g, or t
  misc_feature (800)..(800): n is a, c, g, or t
  misc_feature (812)..(812): n is a, c, g, or t
  misc_feature (851)..(851): n is a, c, g, or t
  misc_feature (912)..(912): n is a, c, g, or t
tttggaggtagaaaacttttattagctggagaggttgaggcctacagcggggaaaggacttgccagattttcgccgcaagtcagggccatagcggggggcataacaaggcctcccaaccgaaggtcaagcaagagctccgagcgtcccacacaagtcccgaagggacactgtgacgccgcgctactgaaggcgcctgggttcccggactcggccaccgcctcgccgcttccgcccctcagaagcatggcggccacgtagcccggcccggattggacgttggcggtggacgccaaacagttggcaacacgattggctgctgcggggtgatgacgtcagggggcggtgtcggagtgaatgggggcagcatgaggccgggcggctttttgggcgccggacagcggctgagtagagccatgagccgatgtgttttggagcctcgccccccggggaagcggtggatggtgagtggcgtggggcggcgacgtaggggctcccggtccctagcttcagttcggccattatgtcccgggagccgagtgcccccaaattgctgctctgttttcttaactggtgagttcagtgctcgacgggctccaaacttcttgaagctccgttcctgcactagggcgccctgcctgcccagccttctggagttctcaggggtcgggtttctgggccccttcttcgcgcccttccccatgcagcgttctctgcgtttccgctctctgcgttngggccacggganctntgagatcgggggtggcgagagttgtgggctcaattccctggtgcgccgcangtggctggctgnggatcccggctgccggacgcacacaacgtggatggcgtnctgggcactgggcggcgtggttggcggatttgacgccaccgacttgcgcgactcgctgccnctggggatcactgtctgtccgcacgggtataccacgccactgccgtggaattaaccaggtgg

SEQ ID NO: 133855 - DNA, 912 bp, Homo Sapiens
gtcttccgtccgggaatatgctcaccttggcgatatggttcctttggcattcggactttattccgaaggttgtttagtcgctccttgttggcgctactgtactcctgtgggatgtttgtccccccatgggggtattatttcccttccccgggtggctggcaacatgggtatgctcgggattgtatgtgagcgacctcccgcccccgcgtttagggttggctccctcttcttctcctgatgtgcgccacctaggaccgcatcttgtcccgctacgcctcttgttttttacgtcactcgtccgccacgctcagctttcattactggactgctggaagagcgcacccttgttgaacccattctactggggtcttcgattgcgggtccccccctcgcggtggtcttatcggctcgggcccccctctgtgtgtctttggtaagttagttcctttatctttctttatttatcgtctttttctatttgtattgttttcttggtatctactttgttatacaaatctcctctagactgttccaggctgcctgcggatctaaagtgggggtgactgtgacctggaccagtccatttctggagtaggcttcttctctctgtgtcctacttgggacgataggggaacttcaggtaagactaaacttttcaagcctttttacgagaaccaggggcacgcatcttcagggctgctgctgctgcccggaaacggtccaccacacgggtgatagatgacagcagcctgaggtcctgggggcttgggatgggatagtggacctggcgaggtaccaggcctagatcccccggctggtagggggtgatgtcagagagctgcggcagcagagacccagtcctgggcagctggatgctgggccggctctccttgggtgggccatcctcgtgcc

SEQ ID NO: 133856 - DNA, 1141 bp, Homo Sapiens
gagggctggtggtcaatcggcacgagggggggcagcatgaggccgggcggctttttgggcgccggacagcggctgagtagagccatgagccgatgtgttttggagcctcgccccccggggaagcggtggatggtggctggcctggggaatcccggactgcccggcacgcgacacagcgtgggcatggcggtgctggggcagctggcgcggcggctgggtgtggcgtatagttggacgcgcgaccggcactgtgccgccgacctcgccctggccccgctgggggatgcccaactggtcctgctctggccacggcggcttatgaacgccaacgggcgcagcgtggcccgggctgcggagctgtttgggctgactgccgaggaagtctacctggtgcatgatgagctggacaagcccctggggagactggctctgaagctggggggcagtgccaggggccacaatggagtccgttcctgcattagctgcctcaactccaatgcaatgccaaggctgcgggtgggtatcgggcgcccggcgcaccctgaggcggttcaggcccatgtgctgggctgcttctcccctgctgagcaggagctgctgcctctgttgctggatcgagccaccgacctgatcttggaccacatccgtgagcgaagccaggggccctcactggggccgtgacactagtggccatggctgcctgcctgactgtagtgcccaccaacccagccactgccacagagctgccacgccagccttggtatctactttttatacaaatctcctctagactgttccaggctgcctgcggattaaagtgggggtgactgtgactggaccagtccatttctggagtaggttcttctctctgtgtcctacttgggacgtaggggaacttcaggaagactaaacttttcaagcctttttagagaaccaggggcacgcatctctccttgggtgggccatgggactgtgactcctggtggggacacgcagccttctgaggtctcgtggccacagtggagctgagcatgaccagcagttgctgcagcatctccttgtgccatggctggaacgtcacgtcaacgtcactgtcctcttcatcgcggtgcatctgttggtgagggtggggtggcagcag

SEQ ID NO: 133857 - DNA, 550 bp, Homo Sapiens
gcggccgctcaccaagatgacgcggcagatcgtggcggcggcggcgatcccgaccatcgtgcgcgacgcttttcgcgtcgccgtcgaggaacgtccggggccggtgcatctggagttgcccgaggacatcgcggccgaggacggttcagccgccctggtgccgccgcatccgatcgaccgacccatcgcgccggtggcagcgctggagcggatcgccggattgatcctgaaggccaagcgtcccctcatcatgatcggcgccgccggcaaccggccgcgcctcgtcgcgccgctatcggatttcgtcggccgtacccggattccgttcttcaacacccagatgggcaagggcgcggtgaccggcgagtcccatctctatctcggcaccgcggcgctgtcagaacgcgactatgtccacgacgccatcgatcgcgccgacctcatcatcgccatcggccacgacgaccgtggagaagccgccgttcctgatgggcgaggtggccggcggccccaaggtgatccatgtcggcttctcgtcggccctcgtgcc

SEQ ID NO: 133858 - DNA, 769 bp, Homo Sapiens
aaagtactccattagatttatatacagcctctttcctttagcataaaacatacattttcctatgccattaaaaagttttatacttatttttctattgcatgaataatatcccattgtcctatatcacatatcagcatttacataacctaacatagacattcaagttgtttccaaatattagaatatatatattataaataaagttgtatcccagagctgcataaaactctttcagactttagtttatttcctcagtatagatgtccagaggcaggaacactaggccaaaagatttatgttttaaggctcttgatatttttaagcagcataattttttttgtatttcctgtaaaatatgtaagagtcttcatttccaatttatggatgaggaatttcagaaaggaaaataaatgccctatgtacatgaaaccaagtaaactaatggaaaaatgagaaagaaatattcaaacaggtttttgatatcacagagatcctggactctgtaagtatctgaaattgaactgaagataaggaacaagctgaggtcacacaattattgtgggacaaaaattggagtgggtttctatgttatgtgagagcaagttcattgcaagatttctttaaccatgaagcaaaagaggaattaccaattataaccacatatacttcatgagatatgctaaatgagcaaaataatgatttgcatatgaacaagggaaaaacacactttatatggaaactatacacacacacatacagccgcggccgc

SEQ ID NO: 133859 - DNA, 857 bp, Homo Sapiens
ggactgtttttaaaacatcttcttcatttagttataacgtttatatctatttgaacttagcgaaaatgtttcaatgccgaatttcaggcaataaaaaaccctgctttttaaacagggtttttgtgtttcagcgactcgggtcgatcaggcagtcagtgcctgacgggtacgctcgatcacggcctgcagcggctctgcgctggagtattgatcggggtacaggcgttcgctgtgacgagcgatgccgtgttcgttgaccagggtgaagctgaagcagcctttgcgagcggccatgatcaggcagttcattggtgcaaaagcgttggtgagggtgcgaatggcatcctgagtgtggatttgagcgttcatattattggtgttcctacaaatgacacggataagaaccgtgcagcgttaaaacgttccagtaacgttgatcaccattgatcaaacgaagaaccgactggaacaaagcagccagtttgaagcgctattaagttggcgcgcttgggctggcaggtaggtacttaggagggcaggcagcacaacagtggcaaaggttctgggcccggggtgaagatcctgatcaatttgcaggttggttcggtcagagtattgagacttcgcggcaccctttgcatgttcaaaggcagtgtcgtcgcaagtgatacctggaaaccatcgaggtggtcggtcccgtgttgttcaggggagttgttcgaccagaattgactttcagcttggtactaacgccgcggatagtaacggatcgaaaccgggaagggaagcggctgagcaaaaaacttttatcagctgcctagaaaaccacgatagaccagcactgttacggcggccgc

SEQ ID NO: 133860 - DNA, 765 bp, Homo Sapiens
cagcttgccgataatcggtagcgcagatctcttccagcacgccaaacacatcactggtgtatccgcatcggtatagacgttgatcgccttttgagtgatcaggttctggttgtttagcggcttattcagctcaccaagatcgtccttcaccttgcgcgattttttaagatcgcgcacatcgtctttatcgataaacccggtgccgtgaccgaatttgaactcgtaatactccgcatccgccgggaacacctgaatcagctgcccctgcttcacttcgccgaccggaataacgtgttcgccaatcagcgaataaacctcgctgtcgcgctgcgcttccatatattcggatttaacggcgctgtcttccgacaacaaacttgccaggccggccggggaagcaaacgacaacaggatgccgagtactccagccgctatcttgtgtgtagaccgcatggttatattctacttacgagtacgtaatacccgtcgtatttcagactgcagcgttgttacctgcactcgatcatctcatgatttacctgaggatgagtgagctggccgcctggctgcaacttgaaattcatagggtatataacaaaatggagaaaatgtggagcgtcagcatagcacgatttgaacagcggggagaaaggggttattcgagcaattttattgatttacgggatgcttgccgcagattgataaacgcgtccccgtacgtctgcccggggacgccatactatcaggtgcgcaaaccgcggccgc

SEQ ID NO: 133861 - DNA, 622 bp, Homo Sapiens
agaattcggcacgaggccgagggttttgttgagaggtggattgatcattgggcacctccgggctgggcggtggtgtgggttgcagtattacaaggataaaacctttcagaaatgatcattggtatagctcccattctttatagagagctgccccattcgtttccaggcgaatgggtggcagctgtgcgcaggctggaaaccgggggaataggcaaacccggcagactcgaaagtctcccacgcacagccgccataacacgcatatgctggcacaaaaatggcaccagcggtcgtgataaatggtggcgcctatgcgcctatacccacgggtttccaggcccggtcgctgattcgcagcgacgagcgagaacttagctttaaaaaacagatgatcaaagccgagccttgtgacgaaaaatgtcatgaggctggtacgggggtaaatgcctgttctttcgaggaggccaaagataagcaagccaaccagagtgatgcccagcaaataggcccgctcattcgaacctacaacatcaccccatatggcccaagcaccttactcgtctgcaccaacccctggcgcatcaacatctcaagataactcccagcctccatcggcggccgc

SEQ ID NO: 133862 - DNA, 378 bp, Homo Sapiens
gcggccgcccgggcagcgcgtggcggtcgcccgggatgcggcgttcagcttcctctatccgcatctggagaccggctggcggatggccggtgccgaactcgtccccttctcgccgctcgccgaccaggggccgccggaggattgcgacgtctgctggctgcccggcggttatcccgaactgcacgcgggccgaatcgccggtgcctccttattccttgagggtctgcgcaacttcgcccgaacacgccccgtccatggggagtgcggcgggtacatggtcctcggacagacgctgcaggacgcggacggcgtcactcatgccatggcgggactcctgccggtggcgacatcctatcatcagcgcaaactgcatctcgg

SEQ ID NO: 133863 - DNA, 1158 bp, Homo Sapiens
ctgcagggcaccgaggatgaactgcacgcggcggtcggcccggggcagggcgtcgaggatgtcgcggtccaggatgaaggcgcagaacacctgtttggaggcccgcagcgcctggtagagggcggcctggtcgtcgacgcgcagatcgcggcgaaaccagaccagggcacgttcgattcgggtggacatgaccggcagaataaaatgaagtcatgcctgccgaccgcatcgtcctgaccaaccagttcctcatcgccatgcccggcatggccgatgaggctttcgcgggcacggtggtctacctctgcgagcacaacgacaacggcgccctgggcctggtcgtcaacaagccgacctcgctgaccctgggcagcttgttcgagaaggtcgagctcaacccgcctgccgatcctctggcagacagcccggttttttacggcggcccggtgcagaccgaccgcggtttcgtgctgcacgagccgctggacgaggagggcggccactacaacgcgacgctggccgtgcccggcggcctggagatgaccaccagccgcgacgtgctggaggccctctccaacggcgccgggccgcgcaagatcctcgtcaccctgggctacagcggctgggccgccggccagctcgaggaagagatcggtcgcaacggctggctgacggtggatgcgacgccggagatcatcttcgacacgcccgtcgagcagcgctacgagaaggccctgggcctgctgggcatcgacccgcgcatgctcagttcggacgccggtcacgcatgaggcctgacgtggcctccgccgatcctgcccgactccaatcctttcttgcttttgactttggcctgcgccgcatcggcgtggccagcggcacgcgcctgctcggctcggccgaaccgcgcggcaccctcaagggcggtgacttcgacgccattgccgcgctgatcaagacctggcagcctgaggccctcgtcatcggcgtgccccgccaccccgacggggcgccgcacgagatgacggccaaggcccagaacttcggccgccgtctggcggggcgctaccacctgccggtcttcgaggtcgacgagcgctacaccagcgtcgaggctgaaagcctgggcgccgatgacgtggacgccgccgcggccgc

SEQ ID NO: 133864 - DNA, 780 bp, Homo Sapiens
ccgatcctcagaaccagctcagtggaaagagtccccacaagcgcaggtgctagtcgcgttaggggtgtcgatagtgaacccctgcttttcgatggtgtccatgaagtcaatcgtggcgccagctaggtatggagcgctcatacggtcagtgaccacatcgaccccgccgtaggtctttacaacgtcgccctcgaggtgacgctcgtcgaagaacagctgataccgcagccccgagcaaccgccaggctgcacagccagacgcaacgcgaggtcgtcacgaccctcttgatcgagcagcgacttcaccttcgcggcagccgcgtcggtaaggatgattccgtcagtggcgggaggggtaagggcgtcggtcatatgggctccaagaacgtgtgatggacgatcccgggagatgacccgggtggtcgatcttgatggatcgggcgggtgtgtcgtcccgtcgcaatatccactgtatccgcagcacgccgtccacaccgaacggtaccggttcagcgcgcagcggaacaagggcattcaggggatcaaccgggtataagaccgtcgccggccgggttctccgacagccagactgagacttcctcgatcgtcgcagaaacgtcaggaacgatgaggtccgagtcgatgatgttgtcgtcagcaatcggagtaccaacagtccgcaccgtcgtcaccagctcagttaaggcttcggtgagctcattttgcgaggttgtcccgatagcgtgctcgacgcgggcatcgatgcgattgagatgaccc

SEQ ID NO: 133865 - DNA, 1388 bp, Homo Sapiens
  misc_feature (327)..(335): n is a, c, g, or t
aaaatcattaaatactttatttaaggacaagtttgtttaccaagttaggacagtggttatgatttctcaatttacacatattccttttgaaaatcttagaaaaaatgtttcaccaatgttaaggtacaactcttgaatatgcagcgtagtcttctctctttattctgaataacagaagcacgtaaattaaattatcctctttgcacaattattccccccaaaactaatttataacatataattatctccctaaaaagcagttacaaaccataaattgaatatgaataaaatatgaaaaagagcacaaattttaaagccctccatgcnnnnnnnnnttaatacattggctttacctataaaccttattttgttaatgctaagcacagaacccttatgggctcataggagtcagcaaacagctacagatgagtcttcttgttaagaattcattcaatgccttctcagaattagcagattttaaaaaatgaattcactgaggttcttaaacctctgaacataaggcaaccagttcacaactgatttcagaaatagaaggtaagtattaaattacaaaattctactaggtcagtgggagtgggcggattcacctggagtggagcagtgaaggtttattttacctctttcaagatctctccatatattccaccagtttgagataggctgggggaggaggtggaatagcttaaaaggttatatttcttattttaaagtataaaaacatacacttaaaggctaaacctatctataacctacatcttaatgtcagcaaaacatactgctttctacccaaatcaccaattgaatcagcctcgctcatgatttcagagcataaggtgtccagagaagaaaactcaagactgaatgggctgccataatggggaagtacaggtagccaaaggccagcaattgagacagcattagagaaactatctactatgtctgaataagctcccctaccttacaagcatcaactactacattgaaaccattctgagtgctgcatttcctatatgtgcctagacttggtaatgcctgataaattctgtatattaccacgtcttgcatttaatagacaatttgtttaatgatactaactttactcacacttactggacggtgtcatatctctagagatgaattctgaagaggactatttcaaatgagtaaactatgtaaaataattcctatgaacgcccaggccgtaaatggctcgaatatccccgggcatactcgtccgggtaccgtcgactgatacgttcgtataatgtatgctatacgcaagatactctgccggcttcctcgatcactaacttcactgcagctcgtcgttcggcgcacaccgagctagcgtcctataggatcatcat

SEQ ID NO: 133866 - DNA, 1103 bp, Homo Sapiens
gcgggccgcgggcgaaaaacagcttgggtgcccgtgttgatcaccgccgcccccgccaacgtagcaccgacgaacacggcatgccgccattgccgcgccaccagcagcaggccagtgaaaatcgcgctggcgataaacatcttcctgaattcacccagttgggtaatccgcaccatcacctcgtccagccacgggctgcgatgctcctggaccaaagcactgaggccctggtcgaagtggttaaggtggggatagccaataaacagggcgatcaacagcgtcaggctggcgccaccgacccacacagtggcgcgacgatggccgcgcaggctgctgttcaagctcagccccagcaataccgcgatacacccggcgacaatcccggcttccagccagaaaccttccggcagcggcaggcggaaggcggcgccagtggcccagcccggcagcaggtaggccaccgaccagccggcggcggccacaatgcttacggcggcaaaacgcgggaacggcatgtcgcacatgcccgccaccatcggcagcatggggcgcagcgggccgatgaaacgcccgaccagcaggctggcgatgccgtacttgtggaagtaggtttcggcgccgttcatccattccggatggtggcgtaaaccgggcaggcggcggatgttctgatggaagtgtcggcccaggtagtaggaaacgccgtcgcccagtaagccgccgagaaagcccagcagcaaggtttcactcaacgacagcgcaccgctgccggccagggccgcaatggcaaacagcaagacggtgcctggcacgatcagaccggcgatggccaggcattcaacgcacgcgacgataaataccgccaccgccagccattcggggttcagtgtgagccagccggtaatgctatcgagccattggcccataaaacttcactccatttatgtcggcagtggcgatcaactgtgggagcaggcaagccagctcccacattcgatctgctgggctgcttctgtctgttcaaatcaaaaaataatcacggccttcgacctggccccggcgcagcgggttccgggtgcaatacggtgcataacccgcatcca

SEQ ID NO: 133867 - DNA, 593 bp, Homo Sapiens
gcggccgcacatgccgtagttgccggcgccgaaggacccgccgatgatgacggtgaacttgggcacctgggcgcaggccacggccgtcaccatcttggcgccggcgcgggcgatgccttcgttctcgtatttgcggccgaccatgaagccggtgatgttctgcaggaagaccagcgggatcttgcgctggcagcagagctcgatgaagtgcgcgcccttgttggcgctctcggcgaacaggatgccgttgttggcgacgatgcccaccggcatgccctcgatgtgggcgaagccgcagaccagcgtcgtgccatagcgggcttgaactcgtcgaactcggagccgtcgacgatgcgggcgatgacctcgcgcacgtcgaagggcttgcgcgtgtcggtggggatgacgccgtgcaactcggccgggtcatgggccggcgccttgggcgcctgcacggccagcgggttggccttggtccagttcagccgggcgaccgactgccgggcgatggctagcgcgtgcatgtcgttgttggccaggtggtccgccacgcccgaaagccgggtgtgcacatcgccgccgccctcgtgccg

SEQ ID NO: 133868 - DNA, 956 bp, Homo Sapiens
gctctgtaggcaactacatttatttagaatctttggaaatatcttacacatacaaacattcagcagttttattcttcctggcttacttccctctcatgctaattccgattagtgatatcattactatactgaaatggcccaaatgatgaggccaaatataagagcactacttctttcacaaatttccatcttcatagcctctcagcttgtcagtaagttctgaggcaaaaatatctttttggaaaggcaattacgtattagtcatgtgagcggagacagaaccgattatgacaagtactagttctatcaatttagtgcagtaagaagtataaagcatcataattccttcatcaatatacttttactagcacgacctaaaaggataatgtataaagaaacaccacaacaatgtattatctcaaaatgtgtatttaatggccattccatcaaaataaagcagaatcccatttcaaaactattatatgtatatatatttttaaggtgcattttcaagttttatttgggtttcatttcttcttggcttgcctgaggtgttcttgcaggtacaattaacacaaaatgttctgagggtagtagcttttcatgcactgaagaatgagatcctaacaacattgcacatcttggatacattagaaattttaaaagccatgtgtaatttcagaaaacttaataccgtcatgaaagacattttcaacacaaaatttaggcactctatactttggaatagccataaaatattccaacaagagttaatgcactttgtgattacatctactcaaagataattctcaattaaaatctatacttattaaataacattttaaattagagcccattaaattttgataattactgtgaaatatttgcagcattgtgttgtagttaaataatgctgaactacttctattactgactctagtactcatccttcatgg

SEQ ID NO: 133869 - DNA, 563 bp, Homo Sapiens
gtgaacatgaagtctttattctctttgtcctcaaagcagggaagggctggtgcaggggtcagggcacgcatccagcaggagctccacatccaatgtctccatctgagggcataagcccaggcagaggggcatctcagagagtgttccagctctgggccagggctgaaggcagggcctgcctgtggtggcagagggcctcagcgggccaaggcgaagccactgacggttgttacgccgatcaaactctgtgtagaactttcggatgaaggtggcccccagggcccagcgtgggtccagtgggtggcgggatatccatggcgtggattgccagtgtggacagctttttactactgtaggattcctgaaatacatagtccgcgctggtgagcggtgtattctttgcctcccaggtggaaaagagatgtcgggggagtgtagggtcctcgttacacttcacgacataattaaacaggctcttctttggctccaaggcctccaatgagttctctattgagctggtaaaactgagatggtagaggcaacggtgctaacaatggcaagca

SEQ ID NO: 133870 - DNA, 819 bp, Homo Sapiens
aatgtggtataaattcattgttaatgagaacaataatgttactctgctggaggacagagtcctgaaggctgagtttggcgccatcctgtcactatgtgagttttctcttgatgatagtgagctctttctgaagttcactgaacttagggcgattttcaggtttataatcccaacacttcatcatgattttggaaatatcctctggacagtgctggggagctgacatccggtatcctctttctacttgctctcttgcttgctgatttgtcattccagggtacggacaaacccctaagctgaaggtctcccagagaaggatgccaaagctccacacgtcactctctgaactgtatctcccataattaagagcttccggtgctgtccatttaatgggaatctgctttaagccagaagatgaatacactccaccatcctcttgacgagacattccaaagtcactgattttcagaacattattttcacctaccaggcagtttcttgcagcaaggtccctgtgtatacagtttttactctcgagatacaacataccagcagcagcgtctaatgaaaatttcactaactgtttgagttttagttcatccttcttccttctcagtaaggtgcggaaatcacctcctgaaaccagttccataatgatgtagacaggctgtctttgtgtgcaaactcctataagtttgacaatattgggatgatcatattgcttgagaattttggcttcttgtaaaaattttattttcaattcctgaggaagatcttctcctcgtgcggaattcgccacccaggcctcgctaccttgac

SEQ ID NO: 133871 - DNA, 1370 bp, Homo Sapiens
agcgaaatcaatccctgatcgaacgcgcgatcatgaatcgcggagaggcaaaggccattgctcggattgagccgattcgccctgtcgtccttccacggcacgatgtggctcgccacgagcaggcgcggttcggcaagaccagacatgcaacagcgaccccgataactggcgaggacggcgcggcgaaagaagttctgcttgatgcgctgttcggtcaggacccgacgcgtctcaccggtgaaatcgtcagggatgtcgaatccatcgagcctttcctcgtccatcgggtcggccgcaacatctgccacgaactgcgtgcgcaatcgctgacactcgagcgccagcccctcccaatcggcatagaaatccgcccatatttcgcgatcgagcgccgacgcgccgtcgagccccttgcggcccgtgctcgtgatcgccggatcgaggctggcgaagttcacgagcttcatggcgaccgccgacggcgttcttccgatcaggctcgccagccgcatcacctcgttgtttctggcgtgcaactttccaaatggaagctggcagtaaagatgaaatgcgagcttcagctgatccttggtccaacggctttcacgcatgacgatccgaggcagtacagccgaagctgctgccagctccccggggctgatgacatcagcgctgagtttaacgaccgtagccctcgctccgctatgccggcggaaatcatcccgggttcgatgcgatctggcaggcggccgtccgcagcccgcccgccatcccgatcagaacgcgacgaccttgcggttcggctccatcagtgcgcggcccatggcgtccggcttggccggtgcgatgccgtctttcagcatgtccggcttgtggccggtgttcggcaggtagatggcgcacacggatgcggtcgcgcccttcttcatggcggcgtccagcagttgcgccggcgtgacgtccttgggcttgagcggcgtgccgccagcgcccttcagcgcgaggtcgcccgccttgtcgcacagcaggatgtcgacctgaccgccctgttcctgcatctggttggccagcaccatggccatgccctgggtcatgccgctgtcggaactgagaatgacggtgaccggctgcttgtcggcgaaggcagcggacgagagggctgcaagtgcgagggcgacgaaggatttcttcatggatggactcctggtgggtgacggatcagtgccgccggatagcgggagaagggcgcgcacgccgctgcgcggtcgtgcgtcgggacagcatttcggtgatgaaggcgtcgcgactgccggtcagcagcgaggcgttgcacagccgctgttcgccgagcagcgcgacgcggcggccgc

SEQ ID NO: 133872 - DNA, 1292 bp, Homo Sapiens
  misc_feature (985)..(1021): n is a, c, g, or t
atggctttgctaattggggcccccccttggggggattccatcccggagttctccacctccaaaagttgggtgtctgttgcccacaacccacaggttccagcaggggccccaccacttggccaagactgttctggcgatcgggcatccctggatggagaacttggggaggaaggggatgccaggtctgtagcacgtggccaatggtggtgccctggtggagcctgtacttccatctcctggaggccacaggggcagcagctgcagccacagtgcagcgggcggagcaaacgcagcacctcacggtccccggggtcggccaggcggacacgcagcggccggcgggcgccacagcacagacgggcgcagcagttgctctcctcggccgcctgacccaggggctgcccggccccagagcgcagttcataccgattacaggtctcccagcctaggaacgtttccactcgctcagccttctggtgaatcaaaatctgatcaatctgcaccaggaattcgaggccagaaggcacccctggcagtggcaagaagggggcagcagaccccaaggccacggggccaggcgaggggaagagggcgaagccgggagctggggcaggtacctgggcgggcactggcgcctgcccgggcccaggatgtagcgccggctccgggtacccaggggtgacagggtagggaggtgggggcgaaggggcgtagcctttggggggcaagtagcctgccatgggagaagggctggggttttcgggatgatggtgtctgggtggcttagttctggaagcggaggcaaactcggagatagccagacagacacagagacagacacaaagacggagaggcagctgcgcccggcgccggcccagggtctcttgggcggcgcctctgactggagcccccagaagagcccgggtgcctagcactcggcagctcacaggagctggcggaggcggaggcgggcccgagctcggannnnnnnnnnnnnnnnnnnnnnnnnnnnnnnnnnnnntcctgggcggtgcgtttgcgccgggaggaaggcagccgtccgctgccccgggaagccgatcgtgggctttgctcctcggcgtcgccgacgttcccgccccttccgctcggactgcagatgcccagagagtaggagcgcctggagaaggcggcggctggtcccgggccccgcgaacgccgccaggccggcggcgtgcgtgctcagcgccctgggtgggaggcgagggcggcccggcctcgtgccgaataagccacccaggcctcgctacctt

SEQ ID NO: 133873 - DNA, 794 bp, Homo Sapiens
  misc_feature (351)..(351): n is a, c, g, or t
gccgagtgctaggcacccgggctcttctgggggctccagaactaagccacccagacaccatcatctcgaaaaccccagcccttctcccatggcaggctacttgccccccaaaggctacgccccttcgcccccacctccctaccctgtcatcccctggggtacccggagccggctgctacactcctgggccctgggcaggcgccagtgccctgccagtgtacctgccccagcgtcccggcttcgccctcttcccctcgcctgggcccgtggccttggggtctgctgcccccttccttgccactgccagggtgccttctggcctcgaattcctggtgcagattgatcagattntgattcaccagaaggctgagcgagtggaaacgttcctaggctgggagacctgtaatcggtatgaactgcgctctggggccgggcagcccctgggtcaggcggccgaggagagcaactgctgcgcccgtctgtgctgtggcgcccgcgagcgctgcgtgtccgcctggacgacccggggaccgtgaggtgctgcagaatgctccgcccgctgcactgtggctgcagctgctggccactgtgtgctccaggagatggaagtacaggctccaccaggaaacaacattggaccacgtgctaaagacctggcatcccttccatcaccaaagttctcccatccaggatgccgatcgccagacagtcttgcgagtggtggggccctgagtggacctgtggcttgtggaaccagaacaccaactatgaggtgaagactcgagatgattccc

SEQ ID NO: 133874 - DNA, 1236 bp, Homo Sapiens
caatgtccaaaaagttacaaagtttatatgaatgtaacatataaagatgcagcctttttcctagggcaagggaaggaagggcagttacataaggcacaggaatcgcagcaagcaccagctgaaggcagggccctagtgggagaggaagttggcactggggtccccctgcagctgttgatggggaggtagagaccccctcaaagtgccatggtctgaggctgaactaattggccaagcagatgctaggcagcggcgggggggcggtggctatatccaccgtctttggtgcagcttgcccttccacaccccagccctcttgtaaaaccccagagtcctgggttccagaggcctcctttggagcagaggccctggaagggggtgggagagagtgcatggggaaagtgtgaaagctgatatgcctgtgtgccgagggactgctgggacagtggtgggaggtagcaggagagcggctctcatacatacccctccttgggaaccacaggggcaggcggccagggagtagggtagggatggggccccccttctgtcccctgcagtgtacatggaggaaaggggctgcccagaggaggggccagggcaggtgaccatctggagttctggtcgaggtgatggtctcctcacaccatggtggcctctaactggtgatggcagagggcccagcgcctcctcgcttctcaaagaacatgtagtcaatgaggaatgtggctcccagcagcacagccttcaccctctcatccaggtccagcgggaactgtaggccaaagtcatctgcatctgtgagggcttctcggaccaggcccccccactgcttgctgatgcggcccacactgcgggattcatcccgagtcttcacctcaaagttggtgtctgtgccacagccacaggtccagcagggccccaccactcgcaagactgtctggcgatcggcatcctggatggagaacttggggaggaagggatgccaggtctgtagcacgtggccaatggtggtgcctggtggagcctgtacttccatctgggagtgggaagcagacagggtcatttccactcgctcagccttctggtgaatcaaaatctgatcaatctgccatgggagaagggctggggttttcgggatgatggtgtctgggtggcttagttctggaagcggaggcaaactcggagatagccagacagacacagagacagacacaaagacggagaggcagctgcccc

SEQ ID NO: 133875 - DNA, 582 bp, Homo Sapiens
gcggccgcggctgtaggcttttttctgggttttaaaagtaataatgtggacaaagatcagtggagtgcctggcatgctgaacccattccatgactgttagatatagttgttatgatttgtatcaatccattttcacactgctataaggaactacctgagactgggtaatctatgaagaaaagaggtttaattgactcacagttctgcatggctgggagtcctcaggaacttacaatcatggcagaaggggaagcaagacatttcttatatggcagcaggacagaaagagagagagtgaagggggaagtgccacacacttccaaacaaccatatcttgtggttaattaaaaagtactcattggtgtgccttgtatagaaaaaaatatacactcactatcatgagaacagcaaggagggagtctgcccccaagattcagtcacctcccagtagacccctcccctgacatgttggggattacaattcaggatgagatttgggtggggaaacagagtcaaaccatatcgtgattgttctataataaagagatgcccacatgtgtttcatcagggacagtgctcatt

SEQ ID NO: 133876 - DNA, 619 bp, Homo Sapiens
gcggccgccttccacgagccgggcaacacccgcgtgctcgacatcgacgacgcctacctgctgctggcaccggtggccggcacggcgctggcggcgaccttgttcgcgctggccttgctggcgtccgggcaaagctccaccttcaccggcaccatcgccgggcaggtcatcatggagggtttcctgaagatgaagatcccgtgctggcagcggcgcgcgctcacgcgcgggctggcgctgatcccggccatgatcggcgtgctaacgttgggcgaacactcggtcggcaagctgctggtgctcagccaggtggtgctgagcatgcagctgccgttcgccatgtatccgctgatcagcctgacgtcgcaacgccgcatcatgggcgacttcgtcaacgcctggtggaccacgggattgtcgtggttcctgttcgccgtgatttccagcgccaacgcgtggctggtgtggcaagcgttcgcggggtaacgtcacgcgaacgcgatgccccctgtcaaattaacgaaaccgatgattaatcgtggagacacgtagggcggattaggcggaacgccgtaatcggccatctttgagccgctggcggcgcatccatcctcgtgcc

SEQ ID NO: 133877 - DNA, 647 bp, Homo Sapiens
atgaaagaacaaacttttattatatttatcacattatctaaatataatctttctgtcttctctttaacaagacaaatacgaatcattagggaagaaaatgcctaggccagtatgaataaaaataaaatatacataatgccctgatcctatgtttaattaaaagtgaaagctcaaaaaaattacaaatgaaatgttttattcttgaatgcagaacgattaatcatgttgagttggaccagaaaagcattgcttgtctttgtgtgtaaaatatcaatatgtagtgccttaacgtatgaaatctgagcactgtatcaaatattttctcagaaagtctcaaagagacaaaaatacaaacactgcatggaatccttggataacctacaatcagacgcctattttctcacagctggaaaaacttggtctttctcttttattttgaatattttcaaacaaaagcaaacttatcagtgttatggcaaaaggcagagctatatgcatttggctctgaatgattgctgttatagataacaatatcagtgagctagagaagtggaatggaactgtagtacttaaacttttgttttctggatggtaagatgaagctactgtctcaccaacacagaaatgtgaacttcgagcaagcttat

SEQ ID NO: 133878 - DNA, 867 bp, Homo Sapiens
  misc_feature (49)..(49): n is a, c, g, or t
agggcgccgtgtcaagatgctcggccaactccggcgtatcataggtganaccagcgggccaggctggctaactgctcccgagtgagcgacggtctgagcaccaactgctccagcaggcggtgaatgagtcgccccagcccgtccctcccacagactcgtcagagaggccaggagaggcgtgcagaccaggcgtctgttattcgccgtcacagactggcgtcgccagccaggcctggcgcattccgccaattgtgtggctcgatgctcctcctgtgacaaaatgctttcaaggctctgggtggacaacccgatgtccgcaggggccgcctccttcaactccaggggttccaggtccgcaaggaatgggtctagcgccacccagggtcgcaaggctgaggcgtgattcccagcccactgactcgccaccagacactctcgcgcccgagtggccgccacataaagcaagcgcaggtgctcggcttgcacaaactcgatctcgcgctgctcaatttcactccagttcgccgggtgggccagtagcctgcggttgcgaaagaggcagaaagaaccgcgcccatttgtaacactatgttccggcttggccggcagcccggaggtgggtgaggccagcaccaccactcgagcttccaaccccttggccttgtgtacattcataatgcggacgccctcacgtccgcccgggctgggcggcagagcaattgcctcggcctcaagtagctctcgcaagccctgacccaaagtaagccccttctggccacggtcgcataaatagtcgacgattccctccaactccaggtccgtcttaaggtgcagccccatctgcctcataaccaggctcgcggccgc

SEQ ID NO: 133879 - DNA, 610 bp, Homo Sapiens
tttactagtctttcacttctggctgaacatttttctttctgctttattgcaccactttactgctcattaaaatcactaattcttcctgattaatttgaaatcaaatggcaatgcaaaacatatacatccaatgtttctcctactttaaaaaagctttggccaaagcttttattattcaatatggtggtgggaaactatcataatgcatgtggtcatacgcctaagtgagctactttgttgcgggacagaagcggataataggagcataggtaatggagccaacaaacttgtacttgaaagccagctttgccactacaagtaagtaggaaagtttatgcatccattggatgaagatccatttgataatcttcctcagtggacagatgggaggatacaatgagaatttatatgtagagcacccggccagcatatgcctaggatagaagccatctaagcaagcgctttgtatgatgtgaaatccttaaacgggtgtgggtcaaaaaaatagtcaaaatatattctaacaagcttttctgcctaataacattagaaatcaccttttattatattacaagaagagatatggaaaaaagcctacagccgcggccgc

SEQ ID NO: 133880 - DNA, 1024 bp, Homo Sapiens
gcggccgcccagcactttatcgacctgggcattgacctggtcgatgccgaccatgccgcacgctgggtggtcgaacccggccggccagcactcgcacgcattgccgagcattttggtgcaggtgtgctgcaggcggacggccagttggaccgcgccgccctgcgcaagctgatctttgaagttcccgaagaacgtcgctggctggaagccctgctgcacccgttgattggcgaagaaattcgcagccatctggcgcgtgcgcaatcgccttacgcgatcctggtctcaccgctgctgatcgagtccggccagtacagcatgacccagcgcatcctggtgatcgacgtgccgcaatcgctgcagattcagcgtaccctgcagcgcgacggcatcagcgaacagcaggtgcaggcgatcctcaaggctcagtccagccgtgaagaccgtctgaaccatgccgatgacgtgctggtcaacgacaaggacctcgcctggctgcacagcgaggtcgagcgactgcaccacttttaccttactttgcgtggaggccgatcatgagccaacccttgaccgtcgactgcccaacctgcggcgcacccgtggaatggaaacccgacaacctcaaccggccgttctgctcggaccgctgcaagcttatcgaccttggcgcctgggccgcggaagaacacaagattccggtgagcccggatgccgaggacgagctgttctcagaagacctgccgccgcgccactaaggccgcataaaggcgtattcctgctggtcgtcgaggttttctgcaaggtattgcagctcgtcggccaggtcttcaaaactgcgcacacccttgctctgctgcaccaccgcactgagcatggcgcgcagggtaagacctgggtcaaaaccaatttcctgtgccgcatcctggcttctgcgcaactcttgccgcgcccattcgtacacactcatagtctgtgccccgccctgctcagtaaaatttcgcagagcatgggcctgcgcggccgc

SEQ ID NO: 133881 - DNA, 1218 bp, Homo Sapiens
gcggccgctggcaccttatcgcctggtggcctgcgccgcgcctgcctacctggccgcacggggcgtgcctttggtgccggcagaccttgagcatcacgaatgcctgggttatgcgttctggtcacgcccggcagagcgtgaatgggtcttttaccaaggcaccactgtgcacaaggtgcaggttgccagccgtttgcaggtcaacgaaagccgggcgttgatgacggcggcactggatggtttcggcatcgtgcttggccctgaagacttcttgcgcacggcactggccaagggcgagttggtgcgggtgctgccaggcttcgaggcgccgagccgctcgatgcacctggtctacacggcgaaccgccagcgcacggccaagttgcggcgctttgtcgaggcggtgctggggcgtttcggacccgcttgagcgctcaaataccggccctgtggtgcgaatacctcaggttcagcaacctgacagacaccacctgttaaaaataacccagagccaagcaggagcgaggctgcagcaagggggcattttttaccggtgtattcgttgggcgctggcgcccgaggggtgtgtatgttgctacgttatgcggcattggcggcgtttgtcgtcgcggcgtccgggtgtgtacaagagcgcgtggtgcacgagcgcgggccggtgcaacgagagtatgtcgaggtggtggcgccgcagccgccgccggtgcaggtgatcgaagtcgagccagcggctcgctacggttatgtgtggtcacgcggctactggcgttgggaaggtgggcgctatgtggcggtgcacggccattgggagcaggtgcgcgaaggttatcgttatgtgcatccgcactgggtgcagcgtaatgacggttatcacttgcagggcggtggctgggttcgctgaacctggcacctgacaaaacggctagctcggcttttgggtgcctaacagcttgacctcgcgcagcagcgcggcaccgagttgatcgctgcccaactcctgatagccaactatctgggtgtcgccgtgttcttcggcctggatgatgatcaccggtgtttccttgccggtggcttcatccacatgcagggcgtactgcggcacatccaccttgatcggtgaacccgcgggcttgccttgcacattcagcgtaaacgccgcgcagccgctgtcgatatccacgctggtcgcggagcggccgc

SEQ ID NO: 133882 - DNA, 703 bp, Homo Sapiens
cgagccagctcccacctttgactgtgtttgcaaatcaaaatgtgggagctggcttgcctgcgataacgccggcccaggcaacttttaaacgtcggtcaacccaaactgcgtcaggcaaaacgtcggaatgcccatatcctgcaggcgttgcgaaccacccagctcaggcagatcaatgatcgccgccgcttcgaagatcttcgcgcccatacgtcgcaccaggttcgcggcagcaatcaaggtgccgccagtggcgatcaggtcatcgaacatcagcaccgagtcgccgtcacacaggctgtcggcgtgcacttcgagaaacgcttcgccgtattcggtctggtaaccctcggcgagcacgtcagcgggcagcttgccctgtttgcggaacaggatcagtggtttgttcaattggtaggcgatgatcgaaccgatcaggaagccacgggcatccatcgcgccgatgtgagtaaagtcggcctcgacgtaacgctgggcaaaactgtcggccactaggcgcaaggcgcggggcgattggaacagcggggtaatgtcacgaaagatcaccccaggcttggggaagtcgatgacggggcggatcagggatttgatgtcgaacgaatcgaaggtcatcgtcgaagagtcctgggagcggaaaacggactcgaagtatacctgcggccctgccgattggcgcggccgc

SEQ ID NO: 133883 - DNA, 623 bp, Homo Sapiens
gcggccgcgccgtgcggcccaccgagatcgacctgcgcaaggtgccggcggtgctgtaccgcaatggcgtgatcgaagagtccggcgtgtcagcggcggtgctcaaccacccggccaagggcgtggcctggctggccaacaagctggccgcgtacgacgtcacgctactgcccgggcaagtgatcctcggtggctcattcacccgcccggtggcggcccgccctggcgataccttccatgtcgactacgacatgctcgggtcaattgcctgccgtttcgtttgagccctggaggttagccatgaacatgcccatcaaccgcttcaaacaacgcttgcgcaacggcgaggtgcagatcggcctgtggctcggcctcgccgatgcctactgcgccgaactggctgccaacgccggtttcgactggctgctgatcgacggcgaacacgcgcccaatcagctgcacagcatgctcggccaattgcaggccatcgcaccctaccccagccaggcgctgattcgcccggtcatcggcgacagcgcgctgatcaagcaactgctggatatcggcgcccagaccttgctggtgccgatggtggaaagtgccgcccaggcccgcctcgttcc

SEQ ID NO: 133884 - DNA, 1020 bp, Homo Sapiens
gcggccgccatgccgggcaagacccgctgctgttcctggacctgcgcacacccgtggctgggtcaaggaccacagcgccggcaaaagcgtgctgaacctgttcgcctacacctgtggcgtaggcttgagcgccgcagccgggggcgcaagcgaggtgtgcaacctggacttcgccgaaggcaacctggcggtcgggcgcgaaaacggcctgctcaacccgcacttgccgaccatggaattcgtgcagtccgactacttcccggcgattcgccaactggccggtttgccgatcacccagcgtcgtggccagaagctgccgagttatccacgccttgagcagcgccagttcgacctggtgctgctcgacccaccggcctgggccaagagtgctttcggcaccgtcgacctgttgcgcgattatcagagcctgctcaagcccgcactgctgaccaccgccgacaatggcgtgttgatctgctgcaacaacctggcaaaagtcagcatggatgactggcgtgagcaggtgctgcgttgcgccgaaaaagccggccgcccggtacgcgagtggcaaatcatgacgcctggggctgacttcccgtccctggatcagcagccaccgttaaaaacactgatcctgcagttgtagtacttttcccaaggagtccagtacttcggaaccgaaaacccgtgccatactccaaggcactctcgttctacatagatggcgtcactcatgcccaaaggattgatccgcgccgctggcgccttgttgaccgccctggctctgtacagcttgctggggctttctgattctgccgggcattgcccttcgcattgccaaccaacaactggccaattacgccacggtgccggcccgtatcgagcgtatcgagctcaacccgttcagcctggaactgacggtgtggggcctgaagctcggcgagccgggtaaggagcaagtcggtttcgagcgcctgtacgccaacctgcagatcgacagcctgtggacgcgcgcgctgc

SEQ ID NO: 133885 - DNA, 952 bp, Homo Sapiens
ttttttaacttaacagatactttattgctcacctttcacacaaagcacacctccagccattttctttcacagcttgacaatgtttacatgtacaaaaacccagcaagaagcatcatgtcatgtagatttcagtaagggagaatgtaaaacatcaactcagccaggcttttgttttctgcagcaataataaagggcctcctgcacttagcaaaaatctgtcttaactttgtagtgcatttcttccattacaaaaaaagttacctgcttaaagcaaactaacttgtatttgctgagccagtggtattaactcatgcataaaacaaatttcggtttgctatttcttctagcaaatttcaagtaaaaataaggttgaaggaggaatttgttttggatggatgcaggtcagtttgaattgctatacttaactaaatgcctacatgtactatagcttcacaacttagtttgcttttataatctttatggattttggccgtgttcaaggttttcagagttgagcatatgatacagtattccatcaacaaaataaggctactgaatgtgctatctgcagaagagctcatttaataggaactgacctaaaagttccatcatgaagcacacgtggcataaaagtcaaccggggggcagaactgtgcttggaaaataggcattggaatactttaagcaaaacacatataaatggttattcatatgaggaaggtttcctagtagtaaatctaaaaaagtgtaggtgaatcctcattttcaaaactgcatattgaaaacatgaaaactacttattcaagtaatttcttcaaaaaagtttgcatgttctgactgtggaattagtctactgggcaattaaaggcaattttaaccaccttttaaaaaatttttcatagaaaggagagatgttatgtgtttctcaaataaacggcattatgtaagtcca

SEQ ID NO: 133886 - DNA, 1163 bp, Homo Sapiens
  misc_feature (356)..(367): n is a, c, g, or t
ttttctaataaagacatgggtactttattttcaaaacactcatatgttgcaaaaaacacatagaaaaataaagtttgggtgggggtgctgactaaacttcaagtcacagacttttatgtgacagattggagcagggtttgttatgcatgtagagaacccaaactaatttattaaacaggatagaaacaggctgtctgggtgaaatggttctgagaaccatccaattcacctgtcagatgctgatagactagctcttcagatgtttttctaccagttcagagatgggttaatgactagttccaatggggaaaaagcaagatggattcacaaaccaagtaattttaaacaaagacacnnnnnnnnnnnngcaacacaatatacatcacagtgaaatgtgtaatccttgcaaattgcaagttgaaagaattaaattcagaggaggggagagaaagagtactcagtagggactgagcactaaatgcttattttaaaagaaatgtaaagagcagaaagcaattcaggctaccctgccttttgtgctggctagtactccggtcggtgtcagcagcacgtggcattgaacattgcaatgtggagcccaaaccacagaaaatggggtgaaattggccaactttctattaacttatgttggcaattttgccaccaacagtaagctggcccttctaataaaagaaaattgaaaggtttctcactaaacggaattaagtagtggagtcaagagactcccaggcctcagcgtacctcattagtaattgttttgttgtttcatttttttctaatgtctcccctctaccagctcacctgagataacagaatgaaaattgaaggacagccagatttctcctttgctctctgctcattctctctgaagtctaggttacccattttggggacccattataggcaataaacacagttcccaaagcatttggacagtttcttgttgtgttttagaatggttttcctttttcttagccttttcctgcaaaaggctcactcagtcccttgcttgctcagtggactgggctccccagggcctaggctgcttcttttcatgtccaccatgagcctcactggaagctcagtaagctggccttcatctgcgcgtgttctctctgtgaaatccatactcctactctctg

SEQ ID NO: 133887 - DNA, 818 bp, Homo Sapiens
  misc_feature (79)..(137): n is a, c, g, or t
acaccaagtttcagtttaagaatcatgtaaaacatttccagttcaacaaatctttactcagtgcctctcaagcattctnnnnnnnnnnnnnnnnnnnnnnnnnnnnnnnnnnnnnnnnnnnnnnnnnnnnnnnnnnnacctattgtgtatgattcattaatggttgtatcagatcatgtaaaacgtttccagtttaacaaatctttacaaagtgcctctcaagcgttctattttaaattaataaaagtaattactaaaagttattaatttttaaaaacctattgtgtatgatccattaatgattgtatcaaataccctatgcaactaaaaataacacctatgatcacatttaaatcaagagctatgtatagtctaaggattttttaacatatctttgaaaatatgcaaaatggaaaagaaatctatgattgccttgatgacatttacagcaattacaaagagatttcttctgaaatgcaaactatctgctttccaatgttacctcctgtcatcatggactggaatgcagctcccatgttttccaacccatttattaccgtctctttaatctttagctttccttctttaaaccactgactcagctgtagaatgccaggctcaaatttgtctttataatttaataccagaaatctttcccttgtgatgtttctttctttctggattgcctctatagcaggggatagcgggggaggataaggcacatctttgttgtactgagaaatttgaccacacaggatgatgtggctgttctcattcatctgacttatcactgtatcactgatgttaccaccaacatt

SEQ ID NO: 133888 - DNA, 750 bp, Homo Sapiens
gcggccgcacctttgatcccaagcgcacgattattgtcgcgcagtacaccaaggatgacccgacgccgctggcctatctgggcaacgatcatcaggtcatcacgacccaaccggacaatggcgaacggttgttccacaagcgtgacggtggcagcgtggcgtttgtgcccaacgccacgccctagcactggcggcatgggccgggcattgctagtgtggcgcgcttaagccaccgcccgagcccggccgcccatgccctactctttccccgcagttgccgcccttagcctcctggtgctcgccgcgccggcagcggcagacacgccaatgccagccaacatggtttacctgcgaagcctcgatccgagcatcgcgcaggacattcgctacgccagcccccataacttcaccggtgcgccactggacggctacaacgctgccgaatgcgtgctgtctgccgacgcggcaaaggccctggtgcgggtccaggccgagttggccaggcagggttacggcttgaaggtattcgactgctatcgccccagccgtgccgtggcgaacatgggccgcttcgccagcctgccgggcgacccggccaaggccgagttttatccccgagtgaacaagcaggatttctggcgcctgggctatgtggccaaggtttccaatcactcccgaggcgcggcagtcgacgtgaccctgaccggccccgatgcactgccagcccaggcctggagcgccgacaccgcg

SEQ ID NO: 133889 - DNA, 724 bp, Homo Sapiens
gcggccgcaacgtggcggcgcaaagtgcgctgctggtgtcgtccgcgccttatctggtcggtgtgaaaagtcaggattcgctgtcgtacgtcgccaaggacgccccgcgtcaggtgcaatggctggccgtcgcgccggacctcacgccgatggccgtggatggcctgaccagtgaagtggtcgaacaccgttacgtatcggtactggtgaaacagtccaacggcacctacaaatacgagtcgcgcatcaagaacatcagccagccggcctcaccgctgacgatgaccaaggacggcgccaagcagaccctgaacaccggcacgccgggtgatttcaccctgcaggtcaaagacgccaatggccgcctgctcaaccagatcgactacagcgtggccgggcgcggcaacacctcgcgctcgctggagcgcaacgccgagctgcaactgcgcctggataaacgcagctatgccaccggtgatgagatagcgatcagcatccgcgcgccttacaccggtgccggcttgatcaccatcgagcgtgacaaggtttacacccagcagtggttcaaggccgacagcaccaacagcgtgcaacatatccgcgtgcctgccgggcttgagggcaatgcctacgtcaacgtgcagtttgtgcgcgacatgggttcacctgaggtttatatgagcccgctgtcctacggcgtggtgccgttcagcctcgtgccgaa

SEQ ID NO: 133890 - DNA, 1068 bp, Homo Sapiens
  misc_feature (810)..(810): n is a, c, g, or t
  misc_feature (914)..(914): n is a, c, g, or t
  misc_feature (931)..(931): n is a, c, g, or t
  misc_feature (1004)..(1004): n is a, c, g, or t
gcggccgcctgacagtactgaaatatacttgggtgagtccacacagcttgcctcagtctaggtaactgctggtaagaaagtcagtccagttgcttttctctactcctggggtctacgaactttcaccaacatcactatcagacacagagggacatcaggtggggaggagggtgaaggcagaaggtctttggtgggtcagaacttcaaaaaggcattgagaatctgtccacagttctgcccctcccagccagaaggaggtggccttcaacgcggtcatcttttagctgccagaactttgttaaccacctgggaccgtggacatcttctctcgtgtcttgagccctcatccccacccctccaagccctcatgcccaccacaccgtgtcccacattccccatcctcccctgtctgctccccatctcaagtccaattccaaggccagagccctggcagcttttctgggagacagcatgaaaaggaggggagtggagatggcagagatggggtggagccagtgcgctgtggtcctgttggcgtggtgatgtggggccaatcctgaggccagaggttcatcaccgtgatctggaagcccacggggccccctggtagaaactggaagaacaaaggggaaaagaaaccagaacaggaagaagacgagtaagcatccgagtgcacgagagtggagccggagccacgtggaggcagggccggcccgtctatctgttgttgagctgtggagagccggtaccatcctcctcttcctccttgtcatccttcatgcctttcagtctctggcgagcaagtcctcnatacatgtcgtcatcatttgtgtcaagtctatgagattggatctactggcgctcgttctctggaactcccgatgcgggggttctctttgggctggggtgcatanggtgaagggagttcacngcacgtcgccgcccgagacacacagctcacttcacttggtggaacatgatccaggatctcacgtgcacttccntcacaggtgctaagcagtcgctcgtgcgatctggctcgaggcaatcctaatgatctataatcta

SEQ ID NO: 133891 - DNA, 1097 bp, Homo Sapiens
  misc_feature (413)..(471): n is a, c, g, or t
  misc_feature (552)..(624): n is a, c, g, or t
  misc_feature (811)..(819): n is a, c, g, or t
  misc_feature (855)..(863): n is a, c, g, or t
  misc_feature (889)..(943): n is a, c, g, or t
  misc_feature (1064)..(1064): n is a, c, g, or t
agaatgggagctgcacttggggatggtgatggtgttagagattgcagcccaggacaaagcatcaccttgctcaaggggaacaaactgcagcaggttgtacaaaacattcagagagctcacttgacccaaccgagggttttacttggtgagcctttctagtagtcttgagtctggggctcagttttagatttttatttcattaatgtttgtttatttctaataaattttaataagcgagtaatttaactaggtcgccagaagaccattatttttgtttgtctatttttgttgtcgtcactccctctctcgtcatctgtctgccagtctgttcacagatcaccttgtagtcccttgtggtttttactccatccagtgcttaaagctgatctaaggacttcgatggttccagcctnnnnnnnnnnnnnnnnnnnnnnnnnnnnnnnnnnnnnnnnnnnnnnnnnnnnnnnnnnncaaacaaaatccataaccccatccattacccctccccccatcacctaccccctcttcatatttcctctctcctttttatannnnnnnnnnnnnnnnnnnnnnnnnnnnnnnnnnnnnnnnnnnnnnnnnnnnnnnnnnnnnnnnnnnnnnnnntgcgggcgcttctattccttaacagccccctttcccttttcctgcctcgtccccgttccaccaacaatacttccttatttacctcctccttgggcgggcagccaccccacacagataggaaatacctggattcccccctgtcttccccccacacaatacattttccctttctacctgaacactttgnnnnnnnnnccaacaaacaacaccgttccggcgtgcgggccgccnnnnnnnnncttccccccaacctctgcggaaatcnnnnnnnnnnnnnnnnnnnnnnnnnnnnnnnnnnnnnnnnnnnnnnnnnnnnnnngccgtacacctttcaattcaatttccccctccgggccgtcctcccttcttggacgagtgggggtattttacatcacatatcacctaatccccgcgtacctcgcccaatactaccacccatnatgcctccggcagcacttccccacaccccccct

SEQ ID NO: 133892 - DNA, 719 bp, Homo Sapiens
  misc_feature (666)..(666): n is a, c, g, or t
  misc_feature (685)..(685): n is a, c, g, or t
tatttctaaatctttgcttgctgttagtggaccatcaacagttgaatactgcagagcttggacagtctgtgttgactcttgaagttttctactgagttcaagtttttcttgctcaaggcgcttaattcttctttcataagcttcagttgctaagttgttgtctagagtcctctgaacattaacatcaagatccagtgaggtgggaccagccgtaactcttaaacagctccgatcagaaagtacacagctactagtatatgtaaaaccaacaaatggcagatggtggccagaaaatgcagtatgtgttggtgggggcatcgtttcagaattttttaaacaatcatcatctacatcaaaattcgatgtatctgttgggctactaacttctggaatataaggtgcttcacagttccgaatattatcccaatcaattccactgaaaaatgggtgtttcttaaagtcttctattccattttgaccaagtcgatgttctctgctacaaatgagccttcgaataagatccttagcattttcagacacatcagtcacttgggctggaaactgaaacctctctttgtggttcatgatttttccgtatgtctccaccagcgattctgcataaaatggtgtttctccgtaaagcatttcatacatacagacccccanagacaccagtcacattcanggtcatatctcccttttccatcttccatggcttg

SEQ ID NO: 133893 - DNA, 1103 bp, Homo Sapiens
cgcgacgctgcccgcgtctatcgccagtagtaggtggtttttctgaaaagcggacgcaaagcgtccagggctgcatgcccacgcagagcgtgggaacgatcacgcggcgaccatggcccaaactccatagagggagaactccatgagccgagcttttgtaaatgaagacaacgccgccgcccaggccgaccagccggtggagcgcctggtgagtgagcagcccaatcgtctcaccgcgcaagggttagcgcagttgcaggccaaggttgcgcagttgcagcaggaatacagcctcgaatccgcccaggacaataagcaacgcctggcggaccttgagcgcgatttgcgctacttcaaccagcgtgtgcaaagcgcccaggtgatgccaccagcgacgtctaccgacaaggtgcaaatcggcagttgggtcacctttgccaacgagcaggacgagcagcagcgcattcaactggtcggcgaagaccaggccgacgcccacgcccatctgatcaactggggctcaccgctgggccgcgcattgctgggcgcccaggtcggcgacgaagtactgtggaagcgccccgtcggcgatcagttgatcgaagtgctgcgggtcgaacccgaggcctagacgatgccttgggccagcatcgcatcagcgactttcacaaagcccgcgatgttcgcgcccttcacgtagttgacccggccgttttcttcgccgtaatgcacgcaggcatggtggatcgactgcatgatgttgtgcaatttgctgtcgacttcgcccgcggtccacagcaggcgcatggcgttctgcgacatttccaggccactcacggccacgccaccggcgttggaggctttgcccggtgcgaacagaatgcccgcctcgataaagatatccacagcctccaaggtggtcggcatgttggcgccttcggccacgcagagacagccgttgcgcagcagcgtgcgggcggcgtcggcgtcgagttcgttctgggtcgcgcagggcagcgcgatgtcgcaggccaactcccaaggggttttgccttggcggaactccaggccaaaacgcccggccagttcgctgatgcggccgc

SEQ ID NO: 133894 - DNA, 1073 bp, Homo Sapiens
  misc_feature (856)..(856): n is a, c, g, or t
  misc_feature (933)..(933): n is a, c, g, or t
  misc_feature (1048)..(1048): n is a, c, g, or t
aactgttgttgaaagctttatttgtcctcacttagggtaaatgaaaaatttcaagatttggctacaacttcattctttgaaaagtaatattttacagaaagagagattaggggtactggctctgaagacaaagcttagattcaagctcagctcaccatttataccagtcccctgattttgccgtttccttatgatataaggcactcaggagcacaagccaagcacacagtaagtgttcaggaagtgctgacattatgaagttcaaacagcaccactggtaaacgaagttcagatttcagaggtggagactgtgtacgcagcctcacagctgagtggatgccgtggtgaaatgtttagatcataggcctttgagaaaaattatgagaatgttagaggaatgggcctcccttggcacccagaaataaacgttaaaggaggctatttcatcatataacaacttctggacttctagaaaagtgaaaagagaggcttgggtaaggaagatgaaagccctcccaccaccctgcatgctgacctagggcatccttccttctactctgttgttagatcctcactgatggccaaaaaaaagcattctttaacctaaaacatccccatggctcaatctctaccccttcatcaccaagggaaaagccccttctcttatctggaaaggccttgttgttcacattaagcaaacactaccccaaaaggcttctccatcatcccgaaagaagaatgcccaatcaaggaatttttacctgcaggggttggtttgggcccctttctaaattaaaccaatgctaagggggttaaagggggaaaaagcaaataaagaaccccccggcttccgatngacaggggggtaaaataaacccacccggcttcaccacattttcgccccttaattgtgtgacgggcaatatagaaccngccccccgcggtgtctgaacacttattcccccgggataatatcgcggacccgtacaccacatattggtttttgtccggaacacccccctgtcgtctcctccgagggccccccctnactaaggcccctcatgtggtggcac

SEQ ID NO: 133895 - DNA, 619 bp, Homo Sapiens
gggcgtcgaccttgccagcgtaacggccatcaagcggggacagggcgagcagggcggaatcggacatgtcggcagggcggggcgagcggcgggggccatattctacgacgtgccggtcaggtagtgccgggcgctggccggcgaccacgcccggcccgcgattccatgcgctgccggccagcggccggcactgcccttgcgcgcgcggaacggccgtgcaggcggaacgatctggcccgccctcgtcatcccacgctgcaggcaagggagtatcgttgtcgcagccgccagcccgggaagcgacaccctgccagccgccgcttccctttccccaactgaagtagtgcggagttgatgcaatgagcaaagctgcaagcaagggtgccaccccgggattccggatcgaacatgacagcatgggcgagctgcaggtgcctgccgatgccctgtggggtgcgcagacccagcgtgccgtacagaacttcccggtctcgggccagcgcatgcctcgcggtttcatccgcgcgcttggcctggtcaagggcgctgccgccggcgtcaacgccgagctgggccacctgcccaagaccgtggccaaggcgatccaggtcgcggccgc

SEQ ID NO: 133896 - DNA, 283 bp, Homo Sapiens
ggcacgagggccagcgtctcggcgatgtcgccttggtcggtggcggtgccatggccgttgacgtagccgatggcggatggctccagcccggcatcttccagcgccagctccatggctcggcgcatggttttctgctccgggcgcgtggtgtgctggccgtcggcgttgctgccgaagccgaccagttcggcgtggatgtgcgcgccgcgtgccaaggcgtgctccagttcttcgagcaccagcatgccgccgccttcgccgatcaccaggccgtcgcggccgc

SEQ ID NO: 133897 - DNA, 746 bp, Homo Sapiens
  misc_feature (736)..(736): n is a, c, g, or t
ttgacctgaaccgcgcgttgcaacagcaatgcgccagcgctggccagcttgccgtttgtgttgtcgagggtgcccagcaggctcagggtcaggcggccattgctggccagtgtgccgctctggttgtgcagatctgtgccggtgacggccagcgtttgctgtgcattgacggtgccggcctggttgcccaaggtggcggcttgcacgtcaaggtcggtgccgctgtcgatcaggccaccgttggcgttgttcagcaaaccgctgacgacgaggctttgccccgcgccgctggagagaataccgccgctgttgtcgaggctggtggcactgacgctcaatgcaccttggctgaccagtgcaccggcaccgccattgagcatttcgccggaaaggcgcacatccaccgcgccgttgcggctggacaaggtgccgttgttgcggttgtcgaggctgccaccgccgacgctcaggccctgccaacctgagaccaggccgttctggttgatcaggttggccgcgttgaccgtcagcacctggctgctgatcaacttgccgccgctgttgtccagggtgccggtgttcagggccaggtcttgctggctggaaagctcgccgttctggttattgaaggcgcgcagacggttgagggtcagcgggcctttggcgaggatcaggccgttgcggttgtccaggtcgctgttgttcaggtccagggtcacgcgctgttcgcccaccnacgcggccgc

SEQ ID NO: 133898 - DNA, 632 bp, Homo Sapiens
  misc_feature (458)..(458): n is a, c, g, or t
tttgagactttgtcacagacatttcttggagcagatctcgtgccccctcccccgatgacaaggctgggtctttggcccccatcctcccccaccacttcagcctgcactgacactaacaatattgaggtcacagactggcttagaaacaagatcaggaagatatatgttggggtgcctcccccaaatctgggggccaagcatccgatctgaggggcaagcggctgggaaattgggcctgggggctccagggtctgaggtctgcctggctcccagggcggccctccatgtacccctgatttgggggcaatgaaggggaatcatggatcagaggtgggtctcagcagggagcaggactgggggacctgggagaggcgctgctgggaagtggcggccaggggacctttccttagcccccaccgcttcatctgcagatcccacagcaccgtacagcactctgngtcccccgtcccacccctccccaaaacgaggtaggttaagaatggagcttcccccccgcccaccatggaaggggggagaccgaggcacagagaggggcatggggacccaggctgccccagcccccaatccctccgccctcagctctggtgggtctgacagtgatgagagctggg

SEQ ID NO: 133899 - DNA, 1323 bp, Homo Sapiens
gcggccgcctgatcggcgacggggaggctggcgtatgagtgcgactcgcagccccaaggtttccgagcgtgtggcgccaaaagccgccgacccgcaaccgccgaagaaaaaacgcgacgaagatgatggcccggatttcgccacgctgctgcgcgcctggatcgaaagccatcgtgccagcttggtcgacagcctgcgccgcctgggcaagcagccgatcggcagctttttcacctgcctggtaatggccgtggcactgagcctgccgatgggtttgtcgctgctgcttaataatgtagagcgcctgggcggttcctggcagcgcgcggcgcagatttcgctgtacctggacctcgacaccagcgccaaagatggcgagaacctgcgcgacgacatcaagaacctgccgggcgtggcggatgccgaatacatcagccgcgatcaggcccttgaagagttccagcagcaatcaggcctgggtgaggcgcttaaagagctgccgcagaacccgctgccgggcgtggtgctggtgacgccgaacgaagtcgacaagccagcgcttgaggccctgcgacaaaaactcgcagagatgcccaaggtacaacaggcacaacttgatctagtctgggtagagcgtctggcggccattctcaagctgggcgaccgctttgtgttcggtctcacggtgttgttggtgtctgcattacttttggtgataggtaataccattcgtcttcatattgaaaaccgccgcaccgagatagaagtgattaaactggtcggcggcacagacagctatgtgcgtaggccttttctgtacatgggcgcgctttatggcttcggtgccgggattttgtcctggggcgttttggcttttggcttgaactggctcaacgacgcggtagtagggctggccggtttgtacggcagcgattttgccctggccggcgtgccggtcgccgacggtctgagtctcttgcttggtgccgtcttgttggggtatatcggtgcctggattgcggtcgctcgtcatttacgtgagctggcaccgaagtagttaatgtcagattaatgtggtttcgtttgtattgaccgtattggtggtttagggaacttgtcctacggttcccggtcaattttcgcagtgctgaactgcacgagttatgtgagtcggaggttttttcgtatgaccacttctttgcaacctgcttatgctctggtcccgggtgcgaacctggaggcctatgtgcacacggtcaacagcattccattgctgacgcccgagcaggagcgtgaactggccgagagtctctactatgagca

SEQ ID NO: 133900 - DNA, 562 bp, Homo Sapiens
gatttatttgcctattatctacttccctactatcaccctaattcaagccagagcctctcattaacctactcagcaccttcctaactagcaacttaatcttcacctcttacaatccattcttcacatagcaatcagtgatctttttaaaatataactcagatgatatcctttcttaaaacccttgaatggctccccataatcccaactcctcctccattctacaaagccctccaatttgcccccagcttcctcaaaatgctctaaaagctcacgtctaaccactcttccccgtcattccatgttctagccacactggccttccatttgctccttaaacatacaagcttgttccttccttaggaacagtgcactagccaccgccctctgtctgggcggctcccccagaacttcatgtggttcgctgcttcttatgtcacaaggtctctagttagatgttaccttctcaggccttttctgctacttaactgaaggcagctactcatgccccccaacaccaccacaaagtttttgttttgttttcaccaacctcgtgccgaattct

SEQ ID NO: 133901 - DNA, 747 bp, Homo Sapiens
  misc_feature (167)..(196): n is a, c, g, or t
tgtaactcacaacattatcaactgttctttattgtacattttagacacagtattttaattctgcattttttcaaaaagcagtggatgacactttaaaaaatatttttcatttgtaaacatttcacaggacatgaaagcacataataatcccctgacaatccacagtnnnnnnnnnnnnnnnnnnnnnnnnnnnnnntatttgtgtccctttctttaatcttcccttggcacagacaccccatcagaatgtctttgggttgaggtttcatttcagaaacctcacagggcaatacatcctcaggcatcctgtgttattttcttggttttgggtttcaaaactgcttgagaatccccaagataccaacagtggtcatgactcttgaagtgtctagtaaatagcatcccttgtgtcatctcctctcagggaacagcccaaggtatgggaatgcagcctctttttggagtggttggatgcactatacctggaaggaatctccaggtatatctttgtgttaaaagcaaaccccttaggacatttaagaatttcttaccccaacgcttattttccattccttagagatacattgcatgccatgcaactgtatgctgatattgatgaaaaactgtcctcagattggtgaagagagagaaaatatttcaaaggacaaagaaacccaacctagtgaggcagtgcaaaaacctgcaaagtaaaatgcacctcacagacacagtggagcagagtgtagc

SEQ ID NO: 133902 - DNA, 467 bp, Homo Sapiens
ggcacgaggcgccatattcggtcacctggaacgctgaacgccaggtaccacggaaagcccgctcattgagcgggctttttgctgtctggggtttgggtttagaagaactcgtccagcaaacagtagaacgcgattcgctgctcatcgggttcgacgccgtactgctcgaagaacggcgccacccaggccgctccgagattgcgctcgatgctgcgggccgcgagtgcaaggtcctgataacggtcactgatgcccaggcgaccgcagtcaatgaaaccactgaagtgatcgccctcagccatgaagtttggcaggcaggcatcgccgtgggtcaccaccaggtcatgtgcggtggggcgggtcgacagcagttcggcgaacacatccacggcggttcggcccaggcgtttatcgtcgaagtcggtctcgtcaaccaaccctgcgttcacacgattaccggcggccgc

SEQ ID NO: 133903 - DNA, 1358 bp, Homo Sapiens
atgagagagaacctttatgtaaagcctcttcaagtacagtgagaattaacttcctcccgacctctctagtgcagacagaaatagattccatattccataccccacttccctcctcacccctcagaaaggagtcattctcccccctccaccacccagccttcctccgggacagggaagggaagatatttctcccaattggtaggggtaattctcaggttcatagggcaaaagtttccccagagacaagggtactggtgttgagaagctgcagttcttccggaatggtgtgtccaatgtcctgatgttactgacaccctggaggagtgccaggatgaggatggatcccactctccccaagccagaacaaaacaactctgccctacctttcctgccccgctctgcccccaacacctagtcaccctcacacaccggcagctgtggtgccctctgtatccagaaggtctcaggttgctcctggcggtagtcgtgaggctgtgagggagggttactgagtacttcctgggctttcagccttctgtctcaacgtttgggcttggtacttggccacagcctgtcagagcccagctggtgcaagtggcgggggatggggggtgggttctcacctttgtggggcatgagtccctgcttgtgccagctccattcggtagtcatggtgtgtcacagactcaacctcgaagagcttccttgtgggttcctgttctgcctgcacctctttactatgtagcccgaggggtgtcaaggccattctcacccaatttttctcctccccatccctcttcccctttacccaatcccttaccagatctgatgctgcaggagcatctccagcatggcttcacgcttccctcgaagtggccaatagacgtttcctggtggctggtacgagtctttctgggtggtgctggagggcatgggtgactttagttgcatagtcagcagtccccggtgtccgtgtcggaagaaaaaactctcagagccatcctgcatgcttgggacttgatccaggtggttggtggctctagggctccccaagaaggctggggtcagaggacggctccatgaactcagaacagggcgctggggtctttgtagataatgcagctgctttggcagtggtgaaggctgcagtagctgcagcagctgatgcagccgctgcagctgctgcggttgcagctgccagggccgacctgggactgtcatctgaagaaggaaacggttccgaagtgggccccagtccttcggagctgggctgtatgtctaaagatcgcgaccgcgaccgcgatccctccgtagactcgttggtctccatctcatcccgggaattccggaccggtcca

SEQ ID NO: 133904 - DNA, 880 bp, Homo Sapiens
ttttgggatgagagagaaccctttatgtaaagcctcttcaagtacagtgagaattaacttcctcccgacctctctagtgcagacagaaatagattccatattccataccccacttccctcctcacccctcagaaaggagtcattctcccccctccaccacccagccttcctccgggacagggaagggaagatatttctcccaattggtaggggtaattctcaggttcatagggcaaaagtttccccagagacaagggtactggtgttgagaagctgcagttcttccggaatggtgtgtccaatgtcctgatgttactgacacccggcagctgtggtgccctctgtatccagaaggtctcaggttgctcctggcggtagtcgtgaggctttgttggggcaggagtccctgcttgtgccagctccattcggtagtcatggtgtgtcacagactcaacctcgaagagcttccttgtgggttcctgttctggctgcacctctttacagatctgatgctgcaggagcatctccagcatggcttcacgcttccctcgaagtggccaatagacgtttcctggtggctggtacgagtctttctgggtggtgctggagggcatgggtgactttagttgcatagtcagcagtccccggtgtccgtgtcggaagaaaaaactctcagagccatcctgcatgcttgggacttgattcaggtggttggtggctctctgggactgtcatctgaagaaggaaacggttccgaagtgggccccagtccttcggagctgggctgtatgtctaaagatcgcgaccgcgaccgcgatccctccgtagactcgttggtctccatcttcagactccagctactgggttgccatagagacac

SEQ ID NO: 133905 - DNA, 767 bp, Homo Sapiens
  misc_feature (752)..(752): n is a, c, g, or t
gcggccgccgcatacagacgcctctggtctcagtcccaccagattcagttcactgctcgcttctttgcgctccgcgtcaggccgcatgctcttcgtttagaaccttttgagccttaactcttcctctcaaacaactccttttttcaaacaggcaaagtgaggcgaggagctgaggggctcacaggttcccaagcttccgaggagggcccgggtccacgtcagtcccggcccgccaaacgagacttcgtgggcacagtctctaacctgacaaccacctgtcccatttcacagcaggcaaaagtgaatttttagtcgcccaactacctgaaagccacaaaggtgcctagggttgaaggccactttcctagcggttctactagggagcccgttagagacatgcctgactctccccctgccctgccccgggggggacccccgcccgccggaggcctcacacgcttggccgtgggatggtagactcctgtcacctctccactaacatcccggagcccatccgtacgcaccctaaccgctcggagcgcaggcccgaggactaaggcggtagcctcgtgtcccctgaggccttctccgctccgtgttctgggtcgccatacacttcccggctaagcccggcgcctttaactcagaacttggtcgcctccaggcgtggagcaggccactgttgccagacgctgcgcggacccgtcttccctgcgcagtactgggcgacaggcagcccgggcagcaccaangagccaccctgcacg

SEQ ID NO: 133906 - DNA, 432 bp, Homo Sapiens
  misc_feature (162)..(177): n is a, c, g, or t
gcttcagatccagaaatttgttaacatgaaaactcaaggatgttttcctcagttgtttcctgtaagtgctgtgaccttttctggaatccacctgttgagatgctttatagccagtgtaacaggaagtcttgactaatggttcccggtttagctgaagattcnnnnnnnnnnnnnnnngctttatgctaactggagttaaatacctagaagaatttcaacattgttttaaatgttgtgcatctgtaacttcaggaggatcacttgagctttaaaacctgtgccttctcgaaacaagaatttgtgcctgaggtgaaaaaagtttgtaagttattgaattatggtgttcattagaacagctactagctgattcccctattttaacaaactgacaaggagcacatccataaaatgaaaacctgttacaactaaaaa

SEQ ID NO: 133907 - DNA, 900 bp, Homo Sapiens
  misc_feature (44)..(61): n is a, c, g, or t
ggtcctaggtagcgaggcctgggtggcgaattcggcacgagggnnnnnnnnnnnnnnnnnnattgttattgcttttattattattgcttttattatcattaaaactctagttcttgttttgtctctccgaatgaagaagtatgtattttcattaggccaagtctgcgggaaggctggggcagcagcatgaagtgtttgaggaagtgggttgggtatgtcagtttccatctcctctctgagcctgtcagggtgtttctggagtgcagagcaggagcaccctgctggagaggccaaggcatagctgtgggcaggctcgggcttcagtttttccatgcccaccatttgcccctttgtcctagggtactttgaccagcagggtatgttggtgctcatactccccaccctacatgttcccaggttctgtcccatggcacaggtgatggtctccctctcagctctgggtccatctccctggcctagttctccagcatctgctcacaggttcgagccacatcactgagcttgaggcgggcatagtccactcgcttcagagccatctgacagtccttcctcgaagagtagctggagccctcatggggctgccctgtggccacctgggtgaggtagcggatctgagctgacagctccgcctccacgtgttgcactgaagcggtgaaggccgccgcctgccggtctaggagccgctcgttagttttttccttggacaattctaggatcacagtacctgcattctgaaggatggcgccgatttcccggttcaatgtctttccagagcgcgtagtctcttcgttcgccaggctgtaggtaagccattatccctctggggaattctccccaagagtttctcctcagaaacgcgacgcttgttccggaagtccc

SEQ ID NO: 133908 - DNA, 755 bp, Homo Sapiens
ttttattatagtatagtttatttaatacaatgtttaactataaaagttaatacagcttccaagtttcaattttgtaaaatgcagtttgcagaaaagttcaacaattactagactaatgataagagaagcagcattttgaaactaattttacaattgagaagacaacagctttttttctaaacttcattaaaaaaatataatcacagtgacttttgggctaggaaaagaagtgcattaacttcatttatgttttttccttccacaaagagagcggccacaattttgtacatcccacatacaaatacccaattcatttatctttcaaaatactatatacacacaaaaggggaagaaaatatacagcatgtgcttttggtaacatatggaatttgcttaaagaaaaaaagtcagaaacacaaatccaccccaccactccctcacataccttttaaaacaaactaaacccctcaacaactccctactccaaccttgttgacggaattttcttattcatgtcatttttcttttcctttaatatatacctctttgtcacacaataggccaaagactttgcacttgcccgaatccactgaaggcagttagttgggaagctcactatgggcagttgtgccagtcaatgctgtacttcctgggggcttattaatttttaaaacaagtatttgtaacaaaacacatcttttcacaataaacagcttatcaacctataatccttattcaattgtaaatgtataaat

SEQ ID NO: 133909 - DNA, 856 bp, Homo Sapiens
ccgaccaatatggtttatttctgccccagccaagcttctttggaccctggctgggggaaaggaccccaggcaccggcaagttccagtcattgcagatcctccaggtctaggtgtgactggtagtagcctgggcactgttgctggacgttgtattctccttccttcttccgccggcgggtggtcaccaggacaccgcagatcaggcatgtgatgagtcccaggagtcctgccaagccgatgaggatgacagcccagaagggaaggtcagaattcccagttaagggctcatttctgttgggagaatacccatccacaaggacactgctcctgtccagggtgaagttctgcagctgggtaccattccgggtcatccgcagaaattcctcatagatggcaactctgtctactctccgagccagtggcgagaagttacacagggagtccaccccggtgtggtgcctgttggggacagacctgaatgttgaaacttgacagtcagaaaaataactcttgatgctgctgtttcggaagagttggttgagcgcatcctcaatattccttttgtttctcttcctttcctggtcctttatgcttctagtgcctgttttctgttgtggctacagggtgaagtaatttgggagaaggccctgggttcaaatttcaaatccttttctgctatgagcttcagattttctgcttggggaagagtctgacttggtcccagtaattttccaaaatgacagagaccaaagttgagttcagttccttagagattctcttatctctgatccagctcctgggacaaaggagatcagtgaggagagggtgagactggagattgcaggaagaactggga

SEQ ID NO: 133910 - DNA, 723 bp, Homo Sapiens
gcggccaattgggggcgattaccgcaccactatcctgagtatcggattgaaaccatgaccaaaactgccagtaccgcgattccggtcttcaagctttacggagaaagtcagcaatggccgactccggatttgttgcactgtgaaaccatttcccgacggagccgggaataccagtgggaaatccaaccccaccggcacgcggacctgtgccagttgctgtacgtacacagaggccaggcgcagctggaaatcgaaggccagcgtactaccctcagcgaagccaccttgcaggtgctgccgccgttgtgtgtacacgggtttcggttttctgaagatgtggaaggttttatcctgacgctggccgcgccgctggtcagccatttgcagacacagttaggcgcgacggtggacggtttgcaggccctgggcaattaccccgccggcaaggacagcgattacctcaacagcctgttcgaccgactgcaggatgagtacgccgatgaacaaccggcccgcgacatgatgatgcacgccctggtcagcgtgctgctggtgtggatcagccgtcaagccatccagcgccgccacccgcgcgccccacgtgggcgggagtatttccgtcgcttcacgcagttggtcgagcaacattaccgcgaacacccgaagattgaagacctggcgcacaagctgggtatctcggtctcacacctgaacggtacgtgc

SEQ ID NO: 133911 - DNA, 995 bp, Homo Sapiens
  misc_feature (121)..(141): n is a, c, g, or t
attaggttatttttcaaacccatacatttaaattttccagaatgatccccttttttattttagagggcccctgcattctgttttggatcaaggtcaccatagcctttacaccaacttttcnnnnnnnnnnnnnnnnnnnnnctacgcaaaatatagttgtatttttaaaataacaaataaatatatagtcagtttggagagacctggagtaccccgatgttgtctaccaactgtcacgatcacttctctgcaaacgctgctgctgccattggagtccttatggttcctcttgctgaggctgtcagttcttcaatctcagcatttaatttatgtattacccattccattgcttctcggcctttactagcatttgaggatatcgtacttgccatcagtccttcaaggtaactgctgaggctaactcctttcacggtaattatggcttcttgtgtcaaaacagttttttctggatcctgaggatgtggtttgtatataagtctctcatctactgaaaccatgtttgtaaatgaaatattagtagatttaagttccattgttttctctacaggatcaactacagaatgttcttgcacatatgttttcgttcttgctgcaccaataagagacttcacaatggaaggcagtccccactctgtgctgagaagtctgtggctgtgcaactttccagagggatctatatgtctgtccaacacatcaactccaaccacacttgggttcatagggtttgggtatttctgcattgcagctgttgtaacagtttcccacgggtggtcaaagacgtgctccgaagtccagatcttcatggtgccggcaccctgagagatgtccgggtagcgccaggggacaacgaggcacagaggctacacctgcccctgccccgcccccagcaccccagccggcggcgcagtgcgcaggcgctgtcgggcccgacctcgtgccgaattcggcgcgccgtcgacttcatactctctaaa

SEQ ID NO: 133912 - DNA, 2200 bp, Homo Sapiens
  misc_feature (408)..(408): n is a, c, g, or t
  misc_feature (617)..(617): n is a, c, g, or t
  misc_feature (630)..(631): n is a, c, g, or t
  misc_feature (644)..(644): n is a, c, g, or t
  misc_feature (650)..(652): n is a, c, g, or t
  misc_feature (654)..(655): n is a, c, g, or t
  misc_feature (657)..(657): n is a, c, g, or t
  misc_feature (661)..(671): n is a, c, g, or t
  misc_feature (822)..(830): n is a, c, g, or t
  misc_feature (1212)..(1212): n is a, c, g, or t
gtgcggggcgcccgcgcccccgccaatagactagcgtgccttgcacaacacctcttcttccggcagcggtgtccgcgcctaggcgcgcgctgctgacaaaccacctcgccccctgacgcaggagagcacgcgggttgcctccgccgcggatcaataacaaagagtgtcctttgcccttctaagccctagagagactgttttctctgcaaagaatatctcttcctcttttccagagcacctacagggtgtgtaacttctcgtactcgccacggcgcgcgttcgtccccccttctatttgctcagcgccccgcttctccgaccggcggcggtttttatgttgttttgtcagagggccagatatgtctctttcgtccggcgcacctttggcttgtgcttttcccctagaanaagttcccagtttactcttcgcctatggtgtgtgttgtgccgccctctgttagttaggtgttatacaaacaacacgggctatcacgctaatactccttgccccctgtggtgacaaaaatggccagaagaaactctcagtaagttgtgcttgccacccaatagggggtcccacgtttgttctctagaatagttcctcgcggggtttcgtngggctgttttccnnaccctatttcggnggcccnnntnncncccnnnnnnnnnnngctccaatgtcatgcatttaaaacaagatagtttaaatatggcataacttttcagacagatatttcagattatcaagcagtttcatcaatatcattattagcgattttttttagctgaaagttattcacttgtaaaactatctccggttcnnnnnnnnntcagaaaccttattaaatttaacctgcttttacaaatgtcctaagaagtcttaagctaaacaaaatttaagtaggaaaacgataatttaaaaatagtgtgttatactatttctgtggtttatgtacatatattaactggtctcttggataggaaacatgactagaagtttatcacactaagccctgtaaaataaagggcaagagctaatcatctttctagcaaaaaatagtctctatgcaacaatttgcaaatgtcaaagctattatttagtagttaattgcctgctacaatacataaaacaaagtacatttactggattgtttttcagtttgcagctgccctcttgacatcccaaataaggaattcccgttaagtaaaacntgcagtgcaattcactcagtggttagtttcaggccaagcctccccctaccattatgcttgttcttccccaccgcccccaaatcctgcagtggcaccatattattaaaaacactaagtacctgggatttatgcctcagagcaagacatcatttgagtaatttcaaatgatacacagctccttcatgtaaaaaagatgttttgtggtcacaattacttcaaaaagtaattatattcaaataacctgacatatcatgccttagcaattacaaaaccatgattttgacacatggcaatttttaagttaggcaaatgtaaaatgctaaaagatgtgaacagctgttcttctgtttaagttatgagcactgcaaaactcaggtaatgactttatttttttcagttaacataaccagcccacgatacagcatactaaatcacaaagtacaaatccaaggaagttaatacctttactaagttacaaaacttgggcaaatcaatacagtactcttttataatgaaaccatacttttgttggagtcatgttactttagtgataattttcactccaaaaatatttaagtaccaaatcaaaacactggtttttaatggtggtttatagcatagtaaggtattttacacaaaatatattttaaaactacacaatttctccttttaagtgagctcccttgtgcaagctgctgaagtgtacagcagcagggcaatgggcgtctataggaggtggctctgctctgttctggggttggtccaaagtcaggtggagttccaatgtatgaaaagcttgaaaaatctaccttaaggagactgaatatcaatacgtttccaaggagttcttgttgaattttcacagaaatactggaaccctcaaaatcagatagtaatttcaaacaacattaatttcagatgatcccttttatttagaggccctgcatctgttttgatcaagtcacatagccttacaccaacttatcaa

SEQ ID NO: 133913 - DNA, 724 bp, Homo Sapiens
agattaactacattgaaaatagttctatttacaagtctgaataaaactgggctatttaaatatatacaacatgtgagtataaagtactaattgtacaacgaagaacaaaagtaacaaccagtcttacctttagtatctgaattaaatattgtccttagaggagcttggaaggattgttccaggagcactaccattgttaaaagcagtttggaaaccaggtgagagctaatttataagcgccactaagaatgctggtcttagtattttagcttgaatccacttgaccaccaatcatgactccaaatggcttatactgtttccaaatatcaaaaacaccttcaagcacaaatataggttccaaaaaaaggtgctataaaaatatatgaataagaaccataacacagaaataagtgtttaatccctttataggaactgctatgaagagaatacttaggtgttctcatattctgcttaaaaaaattggctgcgtttacagtcgcacttatatttagctagaactcactcagaacttaatttttatgtatatataaaatgggatttgactcaatggaactgtaactgtaaaattccatcgtttccagaatacatcacttggatgtacatcacttggtcatgagttaaaccggacgcgtgggtcgacgatatcccgggattccggaccggtaccagcctgctttttgaacgactgtttatagtacatgcg

SEQ ID NO: 133914 - DNA, 1019 bp, Homo Sapiens
  misc_feature (601)..(601): n is a, c, g, or t
  misc_feature (659)..(659): n is a, c, g, or t
  misc_feature (672)..(672): n is a, c, g, or t
  misc_feature (706)..(706): n is a, c, g, or t
  misc_feature (738)..(738): n is a, c, g, or t
  misc_feature (745)..(745): n is a, c, g, or t
  misc_feature (748)..(750): n is a, c, g, or t
  misc_feature (757)..(757): n is a, c, g, or t
  misc_feature (760)..(760): n is a, c, g, or t
  misc_feature (795)..(795): n is a, c, g, or t
  misc_feature (825)..(825): n is a, c, g, or t
  misc_feature (859)..(859): n is a, c, g, or t
  misc_feature (876)..(876): n is a, c, g, or t
  misc_feature (882)..(882): n is a, c, g, or t
  misc_feature (885)..(885): n is a, c, g, or t
  misc_feature (937)..(938): n is a, c, g, or t
  misc_feature (948)..(950): n is a, c, g, or t
  misc_feature (986)..(987): n is a, c, g, or t
  misc_feature (991)..(991): n is a, c, g, or t
atttatttacttatttattttgccaagaatctgccacaagaactgggatgtggggtaggcagcagggagaagacctactgagggaccagaggataagcctgaaactatggaggagtgaggttaggaggcctgagaggtagcaaattggctgtagatcccctaggccctatcttccttctgcagcacaggctgaggacaggacaggttcaggcctttgaaagacagcatgaggggccagggccaggagcctcaccaaactcagcagaagccgaagccagctctagattactagcaaagatgggggccatctgttgggggtcaggctgtggcagcagcttcagcagctccctgagtgcagtccagtcctgtgagccaggcagcccatgcatctgggcatacaggttggcagctgccagtacgtagaggaggtgtgtgtcctgcagccagaccaagagcaggaacagaggcatgggtgcatggggtgggggtcactgtccatttgtggatctgtttgagtgcctgcctttgcctcacatgtagacacccatatatgcacaagcatggctctctctgggcatctgtgcatctctgcagaatgcanaaatgcctacctctgctctgagggggcacatctctatcttggagctccctacagaatncactcactttggntgatgtcaaactccaagggctggggacactgttngggacctgacccagaagggagttcatcctcangcactangtnnngtagtanaanctgctgggctcagtctggtccccctgagcccccancgtcccaacccctagcacacactttattangtgggaagtgcctcagcagctgtttgatgccatnatgaaagcagagttccnagtggncangagcccacgcacacagtcctgcccagttctgtggacgcactctcaagacccnnagcactgctnnncataagtgagtgtctgtggctcatccatgtctgcanngaanttgtgcctgttggggggggtgatggccc

SEQ ID NO: 133915 - DNA, 690 bp, Homo Sapiens
aatgggcttgttgaagatttaaaatctttatttttcaaagtaacaatatatatgcattgcttttgtaagaaaatccacaaaaatactattatgttaaaaaataatttacctagttttggcagatgctgctgggcaggaaactctacagcaattactgacctgttcttcccttgctgcttgtgcttccactctctatagctgaatgctcacccttccagcttccctgactgctggggtggccaagtgataggagttctgcctagtgagatgtaagtggaggtctgctgggtggacatggaagtttctgggaaagttaatggctcctgataaaaggaggggatacttctggccctctacctctcctttcttccttctggaatgtggaagtgatgacttgaacagcagtagtcctcttgtgacaacaaggcaataagggtggtgcagcagaagggtaaagtctaagcttttgatgacaccttaagtcaatccatcaaccctggactccctccaggcttcttgtcatgggtgagaattctgatgtaacagttctggctagctcaggtttgaaggcttttggctgcaagtaagacttaaggtctctcctctaggtcctagatcatccctatcattccacactgccttcatagagagaaacagtgccttaaaggcactcttttcccaagctgatgc

SEQ ID NO: 133916 - DNA, 730 bp, Homo Sapiens
  misc_feature (483)..(483): n is a, c, g, or t
ttttaagatcaaattatattttattctattaaaaaatgtttttgaaaaaagatacttaaattttaaagataacttaattcctaatgatttaaaataatccaagcagagatgaaagagcaaatgcaaatgcataaaaagaccccagagcattgttagcaaaaagcaaatatagttagccaagcatatatatatcataaaagcaataagaaggcataaagcaagtttggggagagcttatttaaaacttgtaaaaatcatttgaatttttaaaagttttcaaacaaattttgttgatgatcagacagtatcccctaggtttgcttttcatttggtaaactttgtccaaagtctgtgattcactatcctgttctcttggagagtccgagattgtcattaccccacacaactcctccccatttgaaaattcatcaggacttccttcaaggctgctgcttctctctttgctgaattcttcatagtcgntgattatcttcagcaggctcttgttgatttgggcacagactcttttcaggatgtccaactttccttctcccaggatgaccctcttctccatctctatgaaaatatccagcaggttcatgtcatcatccagtttgcatttggagatttcctcttgcaaaagaaacttaaaagacctcaattctgatctgctcacttcttctgaaatctgatagagcatgaccctgtaggcagaaatttgagccctgcc

SEQ ID NO: 133917 - DNA, 1677 bp, Homo Sapiens
  misc_feature (557)..(557): n is a, c, g, or t
  misc_feature (867)..(867): n is a, c, g, or t
cccagacttttcttgaaaacggctgtcccagttccgcactgggaattaaattcaccgtcagtgggaaattctccctggagactccttttcgcttctgcaaagtgctggagtaccagttccctcccaggtttcgtaggaacacagttattcacagtggccatccccacagaaagtcagcctcatccgggatatatctcgtttgaggtgatgatcaatcccatttctaaatagggttgctcctcttgaatcagtctcaaccaggtatacctttctggtagttatccccctgacagcctgaataaacacactttgggtttccagcaagggaagggcacttcaaaccagtgaactgagatgtcagctcatagatgggggcctcctgtccatcagtgccatagatgatgcccttgtctccatgggagaggatacagcagatgaagcagtccatgttactgtggtccatgagttggtagattttccaaatctcatagatttgctctactgtgcagtcatcgtggggcttgatctcaaaatgaagctcttcaaaaggtcgtggntcaaagcccctgcatccaagtgtgttccattcctgtccctaatgctgtgaagtttgggcactttctcccgtgcttttgcaaaattgtgattgttgatgatcagacagtatccccgaggtttgcttttcatttggtaaactttgtccaaagtctgtgattcactatcctgttctcttggagagtccgagattgtcattaccccacacaactcctcccctttgctgaattcttcatagtcgttgattatcttcagcaggctcttgttgatttgggcacagactcttttcaggatgtccaactttccttctcncaggatgaccctcttctccatctctatgaaaatatccagcaggttcatgtcatcatccagtttgcatttggagatttcctcttgcaaaagaaacttaaaagacctcaattctgatctgctcacttcttctgaaatctgatagagcatgaccctgtaggcagtgatttgagccctgcctggtgtctgaagttccctttccatctcctcctttctagtgtttaggtaggtaatcagcaaatccagtctattaattcggaagagcagctccttcaggaaggacagattgctttcctccaacattctcttttcctggagtctctggaattacatcaaggcatccttgatgggttcttgcttcctttgcggaatgtagtccaggctcaggaacttgagggaggccagatcttcactgtccagttgttcccctatatcataaagatttctgctgaagtccatcgtttttagaaaggcaggagaatataatccgctccaccctttcctggcaccactcgcacgtctctcgagtccccttacctgccttactccacgtgctcagcagggaagggggtgggaaaggctcccaggaagaagtttcttttactttcaataaccaccctggctcttctgcctccctccatggcctcacttcctgttgagttgactagcaaattcagcagggcttgaacaaaaacactaaagataaaaggaggagaacctgtgaatacacttccctccagcagaaaggcagaatctggttctccgagagaaagagaaaacttcaccacatgaaggaactgcaggtaaacttac

SEQ ID NO: 133918 - DNA, 413 bp, Homo Sapiens
gttacagtaagttaaggttaatttcttattgaggaaaaatttgtaaatcaacgtagtacagcctaagtgttgactgtttataaaactcggctttgctcagtactgtcctgggccttcacattcactcagcactcatcactgacccatccagagccactccagtcttgcaagctccattcacggtgagtgctctatacaggtgaagcaattttcatcctttataccatatctgtactatattttttctatgtctaaatgtgttcaggcacacaaatacttagcactgtgttacaactgcctacagtattcagtagtaacacgctggacaggtttgcagcccgggagtaataggctgcaccaccagcctaaggctctaccacctgtatttgtgtagtactctctgacctcctgcc

SEQ ID NO: 133919 - DNA, 701 bp, Homo Sapiens
  misc_feature (670)..(670): n is a, c, g, or t
gcggccgccggggccgtgacccctgggcaagaccaacatggacgaattcgccatgggttcggccaacgagtcgagctactacggtgcggtaaaaaacccgtggaacctggagcacgtgcccggcggttcctccggcggctcggctgctgctgttgccgcgcgtttcctgccggcggccacggccaccgacaccggcggctcgatccgccagcccgccgctttcaccaacctcactggtttgaagccgacctacggtcgcgtttcccgttggggcatgattgcctatgcctccagcctcgatcagggcggcccgctggcacgcacggctgaagactgcgcaatattgttacaaggtatggccgggttcgataaacaggactccaccagcatcgatgagccggtgccggactacagcgccagccttaatacctcgcttaaaggcctgcgtatcggcgtgccgaaagagtatttcagcgccggtctcgacccgcgtatcgccgaactggtgcacaacagcattaaagagctggaaaagctcggtgccgtgatcaaggaaatcagcctgccgaacaaccagcacgcgattcctgcgtactacgtgatcgcgccggcagaagcctcctcgaacctgtcgcgtttcgacggcgtgcgcttcggctaccgctgcganaacccgaaagacttaccgacctgtacaacgc

SEQ ID NO: 133920 - DNA, 1060 bp, Homo Sapiens
  misc_feature (31)..(31): n is a, c, g, or t
  misc_feature (140)..(140): n is a, c, g, or t
  misc_feature (193)..(194): n is a, c, g, or t
  misc_feature (329)..(329): n is a, c, g, or t
  misc_feature (333)..(334): n is a, c, g, or t
  misc_feature (851)..(885): n is a, c, g, or t
aagtcgcagagcagactcctcacagaggttnttgacgtagaaacacaccaggtgcagcgagatcttgcccttgtccataaatccgggacaacagtctcggcctgagtcgtctgaccagtgggcagcaccccccgtccagntttacgcagcgacatagcaacgtcgtcctcgacaacagaccaacagcatcatnntgaaccagagcaccgacctgggaaacgatgagcggagtagaagccgggacgcccggcaccccaggctcccacgacctggagacggcgctgaggcggctgtccctgcgccgggagaactacctctcggagaggagntctnntgaggaggagcaagagaggaagctccaggagctggtggagaagggcgagctgcgcagcggctccctcacacccactgagagcatcatgtccctgggcacgcactcccgcttctccgagttcaccggcttctctggcatgtccttcagcagccgctcctacctgcctgagaagctccagatcgtgaagccgctggaaggttctgccacacttcaccactggcagcagttggcccaacctcaccttgggggcatcctggacccccggcccggtgtggtcaccaagggcttccggacgctggatgttgacctggacgaagtgtactgccttaacgactttgaagaagatgacacaggtgaccacatttctctcccacgcctagctacctccactccagttcagcacccagagacctcaggtgagaggtcccaagcacgtgtgactgtctcaggcagcagaagttacccgagccggcctcaggcttccccagaggagatgcaggagccgccagcggccacnnnnnnnnnnnnnnnnnnnnnnnnnnnnnnnnnnnggtctggtgagggcaccacgataagtcctgtaaacttggcacctttcccggaggcatagttttgggccattctcacctctgttccaggcaccatccgtagtggttctctgtctgtagcttccgctcgtctgtgtgggtgatgattaaagcattctcattgcacagttctgttttt

SEQ ID NO: 133921 - DNA, 477 bp, Homo Sapiens
ggcacgatggtagcggccggcagcagggcagtccaggcaccgttcatgacgcgggcctcagccacagcagttgtccgcccacccaggccgtcagcggtgcgaaagcctgaccgtcccattcaccggcgaagtccaggggcctgccgccggacagggccagcaggggccaggcctcactctcgcccagggccatcggcaacgcacggccgtcggcgatgagccacaggcgctcgccatggcgcagcggcacggcggcacacgacacgaagggatgcagccccacccaggggcagctggccacgcgctgcgccaaggcctgccattcgtcgccgggctgggtgacgggccagagcgccggtccggccgcgttggcggcgtccaccagaaggccgcgcagcgcgccgctgctcgggaagaaggcgagggtggcatcgaccgccgtgccgacgacccaggactgttcgaagccgcggccgc

SEQ ID NO: 133922 - DNA, 1376 bp, Homo Sapiens
tgcacttcaagaccgtcaccatcgcccgtgactttggcgacagcgtggagatcgccagcggcctgcaagcggctgaccgcgtgatcgatacgccgccggatggcctggccgatgatgattcggtgcaattggctgctgcttccgtcgaggccaaaccccatggctaagcgcaacttgctgggcctgctcgccaccttgagcctgggagcctgctcgttggcgccgccgcttgaagtgccgcaaacgcctgtcgccgcgcagtttcacacccaaggcccatggaccgtcggcgcgcccgacgaccaggccaaccgagacggctggtggcgcatctacaacgacccgcagctggatgcgatgcagcagcagttgctgaaaaacaacccggacctgagcgcggcattcgcgcattaccagcaatcccaggggttcctggcccaggaccgttcggggctgttccccaagctctcggccatcggcagcggccagcgtattcgccagtcggacaccaaaccgctgcgctcggccacctcgccggacgtctataactccgcgacattgggcctggaggtggattatgaagtcgacctgtggggccgcgtgcgcgacacggttgcggccggcaccagtgactctgaggcggccagggccgacctggcgtcgttacgcctgagcctgcaagcgcaattggctgacagttacatccgcctgcgcggtatcgactggcagaaccaactgctggaacagacccgcgacgcctacaccaaagcccttagcctgaccgaaggcttgcacggcggcgggatcgtgtccgggctggacttggcgcgggcgcgcacgcagctgtcgacggtcaagtcgcaattgaaccagagcctggtgcaacgggcggtgctggagcattcgattgcggccatgctgggggagtccgcctcaacgtataccgtcgccgtgaatgtggcgccgattgcattgcccaacgtgcccacgggcgtgccgtcgagcctgctgcaacgccgcccggatattgccgctgccgagcgtcgcatcgcgtcggccaatgcgcggatcggcgtggccaaggccgcatggttcccgcagatcaccttgagcgcccagggcggctatcagagtgacgagtttgcccgtttgctcagcgcacccaacctgttctgggccatcggcccgtcgctggtcggcacaatctttgatggcggcgcgcgccaggcccaggtcgatattgccaaggccgccactgacgaagccgcggccaaataccgtggcgtagtgctgggtgctttcgagcaagtggaagacaacctgtcgcagattacgggcctgggcagcgccctggatgaccagcgtgacgcggccgc

SEQ ID NO: 133923 - DNA, 897 bp, Homo Sapiens
cgcgcccttctcggccgccagctgctgccagggcacgatgttggcgtggtgttccaggtgcgacacgatgatttcgtcgccggcgccgatattcttcgcaccccagctcttggccaccagattgatcgcctcggtcgcgccgcgcacgaagatgatttcctcgaccgaacctgcgccaatgaagcgcgccaccttctgccgcgccgcctcgtaggcatcggtcgcccgggcggccagttcgtgcgccgcgcggtggatgttcgagttctcgtgcgcgtagaagtacgacagccggtcgatcaccgcctgtggcttctgcgttgtcgcggcgttgtcgaaccacaccagcggcctgccattcacccgctcggcgagtatcggaaagtcccgtcgtaccgcattgacatcgaaaggcggatgacggccggcgtcggcattcggcacccgcccggcgtgaccgaccgtgggcgccgcctggctgtcgacgaagtagtaggccggcgccgacggcgcggccggctgcacctcgcgtgacggctcggccagcagcccgcgcagcgcgtcgtcgccgggcaggccgaaggaacgggcactgacgcggtcatcgacatgtgcaggcgccgaccgcagcgcactcgattcgccgaggaaatagtacggcgacgagggtgccgaagcaccgcccggctgcgggaaggcggacgcgccaccgagcggcggcagcgctgccgcgtaggcctcgggcacgccctgtgcaacgcccgcgcgcggcgagccgaccgggtaggcgtcggccgccacgtcgggcacatgattctgcgcggtcgcgtgcggtaccagcttgggcgacgaggcgcccagcgacagaccatgctgcggtgcgaccggcgcggccgc

SEQ ID NO: 133924 - DNA, 1037 bp, Homo Sapiens
  misc_feature (759)..(759): n is a, c, g, or t
  misc_feature (779)..(780): n is a, c, g, or t
  misc_feature (790)..(790): n is a, c, g, or t
  misc_feature (866)..(866): n is a, c, g, or t
  misc_feature (892)..(892): n is a, c, g, or t
  misc_feature (905)..(905): n is a, c, g, or t
acggtgagcacgccaggcattttaatccgcattctcatctcagcctcacgactgccccgtcacatagataacagtattcctgcccaccctgctccccgcatctccctactccaccccacatgcgtgtgacagatgaggggactgaggtggaacaagtttcagcaggaaggcagatccagggctagagttcgagtctcccatctcctcaattaagactctcgtttccaggcctcttcagcccacccagcttctgctcctgtggccctgtgccaacggggcaggatttgggagctaggccctcagctcagtgggtgtatctggctgccggcaggggtgagacacctggaaggcctccaagaccagcagcctcttgttgatggagctgatggtagggtagggggtgagatccaccttgaatctttcagcatttgccacctgaggcaccaagcacagatcagccatggtcacctcgtctcctacacagtatatgcccgctgtgctctgtaggatctgctccagggcgttaaagccacaagtgatggcgttctgggcccaggtcagctgcatctcctctcccacttgcttcaggacagacaggttctgcaggggctggatgccaccagcgatgaggtcagaaatcatacgcacgctggccctcttctttgggtcctgaggcagatgtcgcggagtgggacgcgtctcctctagatactcaatgatggccagtgactggtgaatggtgattccatcaatcttcangggttggcactgcttcatanngattcagtgnctggaagtccttagaaactgtttggcccatcctttatgagattgatgggcacgtctctgtagtcgatgcttttcanggcagagcattcgactctcatgagcngagctcggaatangatagaggatggcttcccgctgctctggactcgcggacccctctccagcgagactcgcgctggactgcgagataggtcatgaactcagatcaggcgtgtcttcgtcggtagctctgcgatctggccgaggca

SEQ ID NO: 133925 - DNA, 1212 bp, Homo Sapiens
tagaggcctgggcttcagtttaattcacgccaaatttcagcgcgggcattctttggagtcacacacaacaaaagcggatgagaaaaggcacacagccttccccgtggtgttacggtgagcacgccaggcattttaatccgcattctcatctcagcctcacgactgccccgtcacatagataacagtattcctgcccaccctgctccccgcatctccctactccaccccacatgcgtgtgacagatgaggggactgaggtggaacaagtttcagcaggaaggcagatccagggctagagttcgagtctcccatctcctcaattaagactctcgtttccaggcctcttcagcccacccagcttctgctcctgtggccctgtgccaacggggcaggatttgggagctaggccctcagctcagtgggtgtatctggctgccggcaggggtgagacacctggaaggcctccaagaccagcagcctcttgttgatggagctgatggtagggtagggggtgagatccaccttgaatctttcagcatttgccacctgaggcaccaagcacagatcagccatggtcacctcgtctcctacacagtatatgcccgctgtgctctgtaggatctgctccagggcgttaaagccacaagtgatggcgttctgggcccaggtcagctgcatctcctctcccacttgcttcaggacagacaggttctgcaggggctggatgccaccagcgatgaggtcagaaatcatacgcacgctggccctcttctttgggtcctgaggcagaagtcgcggagtgggacgcgtctcctctagatactcaatgatggccagtgactggtgaatggtgattccatcaatcttcagggttggcacctgcttcataggattcagtgcctggaagtccttagaaaactgttggcccccatcctttatgagattgatgggcaccgtctcgtagtcgatgcctttcaaggccagagcaattcgaactctccatgagcaggagcttcggaaataggaatagaggatgggcttccccgcctgcatctggcacttcgcgcgaccccctcctccaggccgagaaacttcgcgcctgggacctgccgacgactaaggctcagtgagactcgacgaatcaggcccgtgtctttcgtccgggtaaagcgaggcctcgtgccgaattcgccacccaggcctcgctaccta

SEQ ID NO: 133926 - DNA, 488 bp, Homo Sapiens
  misc_feature (394)..(404): n is a, c, g, or t
tttacggtgagcacgccaggcattttaatccgcattctcatctcagcctcacgactgccccgtcacatagataacagtattccttcccaccctgctccccgcatctccctactccaccccacatgcgtgtgacagatgaggggactgaggtggaacaagtttcagcaggaaggcagatccagggctagagttcgagtctcccatctcctcaattaagactctcgtttccaggcctcttcagcccacccagcttctgctcctgtggccctgtgccaacggggcaggatttgggagctaggccctcagctagtgggtgtatctggctgccggagggggtgagacacctggaaggcctccaagaccagcagcttcttgttgatggactgatgtagtnnnnnnnnnnnagggaatccaccttggaatctttcagcatttgccacctgaggcaccagcacaggatcagccatggtcccctcgtctctacaaca

SEQ ID NO: 133927 - DNA, 1028 bp, Homo Sapiens
  misc_feature (373)..(373): n is a, c, g, or t
tagcccgggggaaaggggcccagattttcccagggggtctaaggagttttggggagtttttcccccatttttccttcaaagttaaagaacttttgcgttttcccaagggcttttttcagaggcccaccccaagctttgggttccctgggggcccccggttcccaagcggggccaggaattttggggaggttaggcccctcaggctacaggttgggtgtatctgggctgccgggcaggggtggaggacaccttggaaggccttccaagaaccagccagccttcttgttgatggaagctgatggttagggtagggggtgagatccacctggaatctttcagcatttgccacgtgaggcaccaagcacagatcagnccatggtcacctcgtctcctacacagtatatgcccgctgtgctctgtaggatctgctccagggcgttaaagccacaagtgatggcgttctgggcccaggtcagctgcatctcctctcccacttgcttcaggacagacaggttctgcaggggctggatgccaccagcgatgaggtcagaaatcatacgcacgctggccctcttctttgggtcctgaggcagaagtcgcggagtgggacgcgtctcctctagatactcaatgatggccagtgactggtgaatggtgattccatcaatcttcagggttggcacctgcttcataggattcagtgcctggaagtccttagaaaactgttggcccccatcctttatgagattgatgggcaccgtctcgtagtcgatgcctttcaaggccagagcaattcgaactctccatgagcaggagcttcggaaataggaatagaggatgggcttccccgcctgcatctggcacttcgcgcgaccccctcctccaggccgagaaacttcgcgcctgggacctgccgacgactaaggctcagtgagactcgacgaatcaggcccgtgtctttcgtccgggtaaagcgaggcctcgtgccgaattcgccacccaggcctcgctacctaggaccttattcg

SEQ ID NO: 133928 - DNA, 822 bp, Homo Sapiens
ggtaaggtccaggcctggctgctgccggccaaggctgaagacgacacgcgcccttacaccagcaacgacatcgacgacgcgatgctggcgcgcagcaccaaggtcagcctgacccacgtgcccagcgtcgagccgctgaacaccctgcatgcgttcaagttcaaggctccggccggccgcgcgctgtatgtacgcgtgcccgccaacctggaagccattggcggttatctggcgaaaaaccctaccgcttcgctgatcagcatgccggcgtacccacgcaccttgcagttcctgtcggacggcgcgctgctgagcctcaacggtgaaaaacgcctgggtttcatggcccgtggcgtgcccggtgcccatgtggaaatcgcccgcctgctgcccaaccagttgcagcatttggtcgaccaaagcagcggcagcttcgcccggccgaatttcggcaatgaatacttcgaccgcatggttgagcgtcagtcgctggatattgcgttgtcgtccaatgacccggcgaaaaccgtctacgacaacgtcgacctcagccactacctcactgccaatggcggccgtcgcggtattttcgtgctcaagctgagcccgcaggatgacccggccgagcgcacgttcgagtacgaacgcaacagcaccagcgacctgcgttttatcgtggttaccgaccttggcatcatcgccaagcgctccagcgacggcagccacgatgtgtttgtgcagtccatcggcaacggctcgccggtcgccgatgcacaagtcgatatcatgggtcgcaacggtctgccggtcgccagcggccgc

SEQ ID NO: 133929 - DNA, 1034 bp, Homo Sapiens
ctaaagggctaaaatttcagttataaaatgggtcagaggctgagaaatcactatttatccacaagaattgccttataaatcaaaagatgactgcaggtttctcttacatatccaaatctaggaataagttcattccatagcagatttgaaaaaacacaaatataatgtaggaagtaatatcattcatggcaaaccaacagcatgaaatttggtaggcttatttaggatgaaaaggaataatctagattgttttaataccctataagagtccatgttaagtcaccctgacaaaaaatctttttaaaaatatggtaaccataaataaagttgctcaaaggcaccacacacagcacacacacggttctctaatcaaataccagaaaaagtgcagcattttcattacagatagtcaaacagctagagctatacaatacacacagatttttcctaatagtaccagcaatcttagttacaaaataatacttttcagtagtctttcttgatgcacatttaaaaaccagcacaactcctctagtgaaatggtcaatttcccttaaaaaacaacatctgaaattataagacctgacaaatcatattatatttcaatattagactgctgtggctctagaacaacagaaaagcgtaactttcaaacagcttagggaaaaagcactgaaatgtagatgtcgtcaatcagcctcaggcattattgatcctgtgccatccacacacccttaaggtttttcacagcactctgacggtattatgtgtgttttgcaaatgacgaatcaacagtatgctgaataatcagcaatgaaacacaggagataaattaaatgtgtttttccaaatgtcagaatatcgaggttcccaggagttggcaaacttctcaagtggccatccagactcaggctgtgcagcataaggcttccttacgtagtgaacggttgagaatatttgctctccacacccagagtcattcaggcatatactgtgcataaagaaactgaatagaatgggaccaatatcctgtg

SEQ ID NO: 133930 - DNA, 1012 bp, Homo Sapiens
  misc_feature (687)..(687): n is a, c, g, or t
  misc_feature (844)..(844): n is a, c, g, or t
  misc_feature (880)..(880): n is a, c, g, or t
  misc_feature (958)..(958): n is a, c, g, or t
gtgggcaaacacctttattctgtgtcccaaattccccagggcaagagaaagaggttgctggggtcagtgctgcagggaccatacagactccaaccgcaagtctggcttggggacagacatgctgtgtttcttctggctgtggctggagatggctcaccagagggggtcagttggtcttcacctctaagtctacctcggagttggagagggaaggaagccgaactccagcgagggtgtggaaccctgtgacctgctcttgctcttggatctggtctctgaggcgctggatttctaggcgctgcatttcaatgatcctcccagtttcttcttgctcattcaaccttgcggtgggagctgtgctgagcatgtccctgctgggttctgtctctgaaacttcttgtggtcggactttcttggtcagtttcagagctgcttcaaggtcatagacttgggaccgagtgaacttcagctccctgcggagctcattaatttccttgatcagagagacattttcctgcatgatgcggacgtagtctgtgcggtgcagctcgccctccttgaccaccttcttcttgagagtggccaggttcctctccaggtgctcccgctgccgggtgtactcctgctgcaggtctgtgttcagccctgcgatctccaccatgtctgctcgctgcacgtacttctcanagagacctcgaaccttctcccttcagcagcgcggttcctgaatataggctacgcagttgtggaggtctgtttttaactttttgacagcgcttcaagtctcgctcctctgtctctctctgcgcatctcctgatcggtggctctcagttttctgcacanttctgtgatgttcagctcagttgagtggtctgctanggaattctcagttagcttcatctctgaatcgtcctctcacctgattcatctctcgagtcattgctctcactcctattngtatcagctctgcgatctggctcaggcaatcctaatgatcgataatcgatcagt

SEQ ID NO: 133931 - DNA, 672 bp, Homo Sapiens
gcggccgcggccgtagtttattttaaaatatatttttaaaagctttgtaaaaattatgtcattctcagaattgttgtcttcaaagcattgtcagatgtagagtgctcagatgtggctcttaaagactatatacatctgaatttttcatcctatagttagtaagatgcataaaatcaatccactactgaaatagtttcaagtcagacatttctgagttcagacatttctcaacattcttttaacaacatttttctgaatcctcaatagaaaatcacattaatcttattttaaaatttggcctttttcaacactaacgttgagtaccggtagcttgtgatcaaaggcatatacttccttatgagatttctttactaaagcaagatttcattaaatctctatttcctaaatatcattctatacaaaagatattttttaaacggtaaggattaagacaatcactgatagctttgttgtgagcaattttgattcccatgtatcacatgaattacacttccttaaataaattacagtttatggctgtatgatttattctctaattctaacatagtctagttgtcaaaaggaaatatgtaatctttttatgattgttgaatcaataaataccaatttgtgaagcttatccaccaaaaccaaatgagtacaaaaccttgt

SEQ ID NO: 133932 - DNA, 621 bp, Homo Sapiens
aagaataaatttatttatttataaattatttggatccattactataataacaattacacacattgtaactcctacacaatttgaaattttcaagttaagacaaaggtaactatatatagaagcagtatgttttctgaacccttacagattgttttgcacactcctggattacacacatctcatcaatctcaagaataaaatcaaagtctttggcttgacagccttccacaatctgacctctgttttctcgccagcctcatctcctgtcattcacaacatttccagcattccaaccagtctgaacttttgcagtttcccacgtgcgctaggctctttcttcatcagcatctctatgcatgctgtctcctgctactggaatgccctcattctcgttgcttcctgttttgaagaaaagctgtgataccggcaacagtgtttaagtatcacacgggtagttaaaaggcaagttggcggccgctccaacatgtggaaatggccagctcaagttagaaggcagtacctggtgaaaccttgtcaccacatcgaatgattttgaacacttcccatcaatcgactaccgactaacaaaaagaaggacttgattcccggcaatcctcttgc

SEQ ID NO: 133933 - DNA, 903 bp, Homo Sapiens
ggggtccagcgccacggccggcgtgtcggtcagagacttggccgtgtagagcacattctgctgctgcaggccgtcgttgcgggtccagaagtagcggtcgccctcgtggaaggggatgccgaagcgctcgaagttgtagagctcggtgtagatgcggcgcgccggcaggcgttgcggcatcgccgccaggaacttgtcggtgacctcgttctgctgcacgacccaggccttggtgtcggcgctgttgtcgtcttccagccagcggtaggggtcggcgacggtggcgtcgtgataggtgtcaacctggtcgaccttgcgggtgacgggatagctgaggccctgggcctgggcactggtggcgacaatggcggcgagggtgatggcggacaagatgagcttcatcgagcggtagtcgggggttccgtagggccacggattgtcagcgcccgcgcagggggcgccgatcgtcatgcgatgaagccctgacagcgcaaacccgaagggctcaagcccgccgtctccccggcaggcggcccccgatcccgactcagcttcgatagtccgcgttgatggacacgtagtcgtggctcaagtcgcaggtccagaccgtagcgctggctgggccgcggttcaggccgacgcggatggtgatttccgcttgcttcatgacgcgctggccgtcttcctcgcgatagctcgcgaggcgcccgccctggcgcacgacggcaacgtcgtccaggtccaggtcgatcagcccctggtccaggtcgccgatgccggcatagccgaccgcggccaggatgcggccaagattcgggtcgctggcgaagaaggccgtcttgaccaggggggagtgggcgatggcataggccgccagcttgcattcggcctcgtcgcggccgc

SEQ ID NO: 133934 - DNA, 755 bp, Homo Sapiens
gcggccgccggcgtccagcgcgatgctgtccttggcggccagggtttgttgcgtggtgagcgcaccttgggtttttaccgacagatcagtaccggcgtagaccgccgccttggcttgcaagctggccgctttgacggcgacagaggtgcctgccgtggttgtgcccatgaccacattgcccgcagcatcaatctggatatcaccgccggcgaccatatcgcccgacagcttcacgcccacaccggcctcggtgccgatcagcttgaccgcgcccacatacatgccgcccaacgccgacgagtcaatcgccaggtctggcgcctggctgccatctgccgcccgtgcggtggggtttaaggtgcgtgcgtcgacatcgttgcgcccggcgacgatggtgagttttttcgcctggatctgcgcattgatggtggtagcgcgggtgatgatttcgaactggtcgacattggtcgcgttgaggcccgcgccttcgatggcgacgttgccttgatcgacttgatagcggctgatctggccgttttcgatcaccgctttaccggtggtcagcgtgacttgcggcgtgttgataaagccgcaaccgttgcaactgatgccatacgggttggcgacaatcacatgggccgactgccccgccacttccggtgtagccgcgcagttggctggggctgcaccgttgacttcgttgaggatgatattggcagcggtgccgcgcaggttcgggttgccgacgatgatgc

SEQ ID NO: 133935 - DNA, 892 bp, Homo Sapiens
ccagtccaccgagcggacacttcacaattctggcgtgcccgaagtgtgcagagccagaagatgcgatccgcacaaccacgctgggaaggaagcagatgacaaaagacgatggccaccaaccatgatgaaggtgatggctctcttgatcttggcaatgccggtccatttgtctctgccgcaggctcccagataattctgcgctgagcaagaacaggaatgatgcccaggggcaggaaggaactccagggaggaacatagcttcgtgccaccggaaggtatggcagatgctgaagctgatgcacacatttgcagggccattctggatcagcaacttcttcttcaggaggtggactgttaggccaacagtgatgccccacagaaggcaagagatgatggctgctgtccaattggagatcttgttcagggcgtggtggggatggaccacccggaaatacctgtctaccgccaccaccgtgaggaagatgatgctgccctggcggttcatggcaaacatgaagagcaccagccggcaagggatgtccccaaacttccagtcccaacgcctcacatagttgtccatcaggaagggcaggcagatgatcagtagaaagtcagccactgccaggttgaacaggaaaatccggctggatttccaggacttgaggtggaaacagaaaatccacagggcaaggccattgcccagaagcccgaagataaactccagccccaacaccggcggcaacaccttgacaatgaagtcatctcggaacacacagcagttcttcttgtctatttccagaaagtgatcctgcagatggtgccgattcatgagtgcggctagtgagtccgatggagcgcctcgcctagtgaatgctccagcaagcctcgtgcc

SEQ ID NO: 133936 - DNA, 662 bp, Homo Sapiens
gcggccgccagccaacttcttcggtacatggtgactcctaactggttgggtctgtgaacccccgcacgatcaccacttgctcgtgggtagggggttccttgccaccggggccggtggcggcgcgcccgcgcggcgcaacgcgtttcgatcgccctcgcgcagggcgcgcaacgcggcggccatggctggggtcatcgtggtgttcggggcaggttccgtgtcgagcgggacatcgacgtcctcggcacgcagcttggccgcctgccgatccgccaggcagcgccgcatccgccgctcgaggcggagcaggtcgcgatccgtcgacagctcgtcgaaggtctctagggcctgcagggcacgggtgagcacgccgtcgcccagggagctgagaccgggcttcggcgcgaaccgcagcgtgctctcgacggtaatcaggctgcgcaactggtgacgctggcgcgggcgacgctgcaatgccgccgtgagggcggccacgtagtccggcacctcatcctgaggcggcatcagcgtcgatggcccgaaggtggacggcggctgtgtcgtgaggaccggctgccgcggcgcgggcgaagcccacaagcggcgccagaagttcagcagagacatgggcaactcctcgggagaccctcgtgccgaattct

SEQ ID NO: 133937 - DNA, 768 bp, Homo Sapiens
gcggccgccgaatggtcgaactgctcaagcagccgcagtacgtgccgtacaacgtgatcgaccaggtcatctcgatctacgccggcaccaagggccacctcgacgacgtcgccgtcacggacatcaaccagttcgaaaaggcgatgctcgcgtacttcaacaccggcgcgggcaagagcgtgcgggatgaactggagaagctgaaggaccttgataaggcgatggaagagaagctggtcgccgcgatcaaggcgttcaaggcggggtggaagccggtgaaggcgtaacgcggtggcccggcactccgtgtcgggagcatcggtacaagctccgagcatcaacgagccccgagcgtgagcgagtgagggcacgccgagcgaaacacacccatgccgcgcatcagctacttctacggcatcgcgatctacatgtatttcgacgaccacgcgccgccgcatttccacgcgaagtacgcagagtcggaagccgagttcaacatccgaacgctcgaggttctcgccggttctttgccgccacgcgcgctgggcttggtggtcgaatgggccgcgcagcaccggtcggaattgctgtcgaactgggaccgggccaaggccgggaccggccgccttgaagcgatcgaaccgctgcgctagagttgttccatggtcaggattactgacgcgaagccgctgcccggattccgcttgttcctccgcttcacggacggatcatccggcgaggtcgatctctcgcacccctccgtgcgat

SEQ ID NO: 133938 - DNA, 771 bp, Homo Sapiens
  misc_feature (554)..(554): n is a, c, g, or t
  misc_feature (575)..(575): n is a, c, g, or t
  misc_feature (685)..(685): n is a, c, g, or t
ttcaaaataaatgtttaatataatttttagaccaaagaaaaactcaatcatacattgtctccagtggaccatatgtgccagaacaggaccaactcagtccagctttgaaggccctgattcagtcctactggtataatctcccttgatttattgatttgtgtatgcttcttatgcaatacaaggtgcattttactcttgaagtccctatcacctccaccatcgccatttaactgcaaaagcatgcttcctaatgggagggttttcttcccccttccctgcagaggttctgaaccttcaaggagtttgacaatcttatgaatctcttgaaccttctccccagaaaaatgtacatacaagtctacaaataatttcattgggttcatggaccccaaggcccacaatggtttctaaggccccaaattaaggaacctctgtgctagtgatttgagcaacgcaattgccctcagaagacactgacacagggcaggtgaaggactgggttaaccaaaatgacaggaggcaatctcataatttctgtttttattttggggcanaatttagttctcagggcctcnctacgtttaagagcagaactactcaagaacctaagcagctatcagcatagtttaagcgatttagaatagggctgtgcaaggggatgtacagggttcctcattcagctganggactcatttagctccttaactggaagctttacatttgatctgcagtgaggggacattttctattttagtttgaccacatggaaag

SEQ ID NO: 133939 - DNA, 680 bp, Homo Sapiens
gtcaaaaaaccctttccggacgcatccatgatgtcgtgcaggcccccgtttccacacagctgatccccggcgggcggccaaccatggcaacggtcagccgtcgcgtatcagggcgcgagccgatggcgttcccttgcctgctgcccggtgcgaggatttcgtcctgtccatggaacgacacgcagatgtcgaccagatcgatgagaacgcaggtagcggttgccattacttaggtatttctcgcggtctcccttcgtgatccagggcgacaaaggcgaaggtggcgcaggtcaccttctcgcttgtgatctggtcgcgcccacgccgccaggcggtgacgtgaatatgcatcgacgtccgcccccgcctggtgacattggcgaacagcgacacctcgtcgcccaccttcaccggcaggtggaagcgcatgccgtcgactgcgaccgttgccgcccggccccgcgcggtcagcgccgcgaggttcccggccgcaaggtccatctggctcatcagccacccgccaaatatgtccccagcgggattggtgtcggccggcatcgcaatcgtgcggatcgccggctggtccggcggaggaacctgtgtgtcctgcatcgcacgcccctctcagacgacaaagccgcaggccgaggccggggtgcgggtgtccatgttgcggccgc

SEQ ID NO: 133940 - DNA, 844 bp, Homo Sapiens
gcggccgctcgacggaattcgatgatggaggccccgatgacttcgacatcccgggtgaaggcggcgcggcgtgcgcttggaccgaatcgctttgcgttgactccgtcacgcgcttcattgtccgggtacccgtccaggaaggaatagatccggaaattgagcggtactgtgaccgacattgggtgctcaagcttgccgaaattattgagacggatatgcctatttgtaagcactctctacgcgaccacgtcatttcgactggtgagctagtcggggatacttgggaggtgcgtaccgaaggctaactaacctcgtccgccttcgtcaacggcgccctgcgctgaacagtgggccgctcaagtattgccaatccggtagttttctgcgagctcgcataaggtcttctccatgggcacccgtagggcactgctccacgggaacatcggcgagtcgtgccagatgagtgcgatctcaatggtggctcccaccagggtccaagccgagattcgcgagcccaatccaggacccagcattttcactgatcgcacccgcccagcagttgcgacccgctcagcctccccggacctgactatatgagttatcgaggttccagcagcttcgaaggagcccggtgaataccctctcgtctcaaccacacaagtacggctcgaacacggcggttgtcgtcggtgggatcaaagccgagcttgatgaagacgttgggcacgtgcttgctgacgccgctacggctcaaaaacaatcgctcaccaatctgagaattggagagtccttgggccatgagttctaggacgtcccgttcccgatcagtcaacatggccaaacc

SEQ ID NO: 133941 - DNA, 837 bp, Homo Sapiens
  misc_feature (726)..(726): n is a, c, g, or t
gcggccgcccaccactgcgtcttgtcacgggataggccaccatggaacttcgccatttacgctatttcatcatggtggccgaagaacgacatttcacccgtgccgccgcacgcctgaacatgcaacaaccgcccctgagccagcagattcgtgccctggagcaggagctggggttcgatctgttcaagcgccaccccaagggcgtagacctgacggccggtggcctggtgtttcttgaagaagcccaagccattttggcgcgtgttgagcatggcgcactcaaggcctcccgcgtggcccagggcatcgagggcaccctggccatcggcttcaccagttcggccgccgcccacgcgctgatcccgcgcatcatccgcgcctaccgcgagcgctacccggcggtagagctttcgatcaatgaaggcagcgcccgggaattgaccgaagacgccatcgaaaaacgcatcgacgtcggcatcctgcgcgccccggtcagtacccatcaaagcctgaccttccaccgcctgctcaacgaagaaatgctgctggtcctgcccaccggccacccgttgctggacgccgcaggcagcgccatcccccttgccgcactcaaggacgaacgctttatcctggtacgccgccctggcgcgccgggcatgtacgccaacttgatcaccgcctgccagaacgccggtttcgaacccaggattgcctttgtgaggtggnacgcatgctgaccaacgtcagcctgggtagcggcggcgaaggatctccgtggtgccggcgtcgatgcgcgatgtgcaccgtgacagcgtggtgtattgccgatcaaagacg

SEQ ID NO: 133942 - DNA, 1077 bp, Homo Sapiens
ggagaaaccgcgcaatgccgcttcacgcatgatcgcgtgcttgggcttgatcgccgggatcatgtctgcaaacgcacgcaacgaatcgcgcagggtgtcggcagcgtcgaacagcggctctttgtcttcctgattgtccttgttgtaggccagaggttggcctttcatcaaggtcagcaggcccatcagcgcgccgaacacacggccgctcttgccgcgcaccaactccggtacatcggggtttttcttttgcggcatgatcgagctgccggtgcagaagcggtccggcaggtcgatgaactggaatgcgcactggtccacagcaccagctcttcggagaagcgcgacaggtgcatcatcgcaatgctggcggcggcgcagaattcgatggcgaagtcgcggtccgacacgccgtccagggagtgccgcccacggcgtcgaaacccaacagctgcgcggtgtattcgcggtcgatcgggtaagtggtgccggccaatgccgcgctgcccaacggcatgcggttggcgcgcttgcggcagtccaccaggcgctcgtagtcgcggctgagcatttcgaaccaggccagcaagtggtggccgaaggtcacaggctgcgcggtttgcaagtgggtgaaaccgggcatgatggtgccggactcacgctcggcctgctccagcagacctttttgcaggcgggtgatttcggccaggatcaggtcgatctcgtcgcgcagccacaggcggatatcggtggccacctggtcgttacggctgcgaccggtgtgcagtttcttgccggtcacaccgatgcggtcggtgaggcgcgcctcgatattcatgtgcacgtcttccaggtcgacgcgccagtcgaacgtgccggcttcgatctcaccgcggatggtggtcaggccgtcgatgatgctgtcgcgctcggcgtcggtcagcacgccgaccttggccagcatcgtggcgtgggcgatcgagcccatgatgtcgtggcggtacaggcgctggtcgaaggtgacggaggcggtgaagcgcgcgacgaaggcgtcgacgggttcactgaagcggccgc

SEQ ID NO: 133943 - DNA, 878 bp, Homo Sapiens
tggttagtccggttcgattatcgtccctaagggccggcggtttcccgtggcaagaagggggcagagaccgctagggcatggcccgttggaccggtgtgctcggcgcgccgtaatagagcgctcgaggggttttgttgtgtgtgtgaaaatcccaaggtgtttaaatataaataagagcgattcccacagccccacggtgctggccagcctcacaggtgcccgctggttctgtgacccatcccaggcacacgctcccctggctgggcgcctggccagggctcccctgtggctggcgtgtggagacacgtgggcccttctccacgtgcccacgagggccgtagcaggctccaaggaggcccagccccggccagcctgtgtggaccccgccggcctgcggcgcccggagctgctgactgtgtcagagcccggctgcccagcgccccggcgcccctccctccagctgcccagcctgggatccgtccgctgtctgtctcctgaaccagggagtctgacccactcgcagctcccatggggtccgtgcagccaaggccccgcagccacactcactctccgccccacagtggctcctggggctgatggctgggtgatcccagggggtccccaggctcttccgattggctcaggtgccctctcctgcggtggcgggcccacctgggtgcctgccagggccatcaggtgccctgacccctggctggagggaggatgggaagtgggctccgagggcctcacaggtgggctctcaggagaggccccacctttggcaggagttggtcggtggggggagcctgttcttccccagaggcctgggcagcctgggtccctacagcactgcagcaagcccgcctacacctctccga

SEQ ID NO: 133944 - DNA, 697 bp, Homo Sapiens
  misc_feature (20)..(20): n is a, c, g, or t
tgcacttaacacgttgattntggctgctctgtgagcaacctacatgtggataagtgggcgtctggccgctacaatggcggctgtttttgcctcaccggctttcaacttaggggatatccgtgtcagtggaactttggcagcagtgcgtggagcttttgcgcgaagagctgcctgcccagcaattcaacacctggatccgtccgctacaggtcgaagccgaaggcgacgagttgcgtgtctacgcgccgaatcgttttgttctcgactgggtcaacgaaaaatacctgagccgcgttctcgaattgctcgatgaacacggcaacggcatcgcgcccgtgctttccttattaataggcagcaaacgcagctctgcacctcgcgctgcgccgaatgcgccgctggctgctgctgcgtcgcaagcccaagcagcaccggcacctgttaataactcgccggcgcccgtggcccaggcgccgtcgaaatcctcgtcgcagaaaaacgcgcctataaatgaagaaccgtcgcgtgacagctttgacccgatggccggcgccagctcccagcaagcaccggttcgcgctgagcagcgcaccgtgcaggtggaaggtgcgctcaagcacaccagttacctgaaccgcacctttacctttgagaacttcgtcgaaggtaaatccaaccagttggcccgcgcggccga

SEQ ID NO: 133945 - DNA, 835 bp, Homo Sapiens
gcgctgcggaacgcctgggcatgcaacaaccacccttgacgcgcttgctgcagagtcttgaaacgcaattgggtgtggtgttgatggagcgcctgccccgcggcgtgcgcccaaccactgccggcctcgcgttgctggacgaggcgcgtgacatcctggcgcgggccgagggtgtggccgacgtggtgcgccgtgccgcccggggtgaacggggccgactcgctatcggctttaccagctcggcggcattgcacccgtttgtgcccagcgtgctgcggcggtttcgcgaggcctttgtgggtgtctcggtggtactggaggaagcgggaaccggcgaactgctggacgcgctggtgcaggaaaaactggatgccgcgtttatccgctcaccgctcagtggcacgcaacagttgcaggacgaaccgatcctggtggagccgatgctgctggcgctgccgaccgatcacccgctggcactcgacgctggaggccccctacccttggcggcgctggcggatgaagccttcgtgctctatcgccgtcgcgtggggctgggtttgtatgacgccattctggtggcctgccgtgaagcggggttcagcccgcaagtggtgcaggaggcgccacgcatgacagcgaccttgagccttgtggctgcggggcttggcgtctccatcgtgcccgcctccatgcagcggctgcgcggcgatggcattgtttatcgcgagctgaccgagtgccagagcctggtggcgccgttgcatttggccacgcgtattggcgacagctcagcggtattgcgcaggttcaaggagatggtggtcacagcggccgc

SEQ ID NO: 133946 - DNA, 919 bp, Homo Sapiens
  misc_feature (149)..(149): n is a, c, g, or t
  misc_feature (152)..(152): n is a, c, g, or t
  misc_feature (180)..(556): n is a, c, g, or t
  misc_feature (575)..(600): n is a, c, g, or t
gtggacaggagaccacgaggagttccaggggaaccctgtatctttagtccttcggtttcccacctctgacttagcgtcgatttttgatgctcgtcagggggcgagcctatgaaaaaccccagcaacccgcctttacgtttctggccttntgntgcctttgctcacatgtctttcctgcgnnnnnnnnnnnnnnnnnnnnnnnnnnnnnnnnnnnnnnnnnnnnnnnnnnnnnnnnnnnnnnnnnnnnnnnnnnnnnnnnnnnnnnnnnnnnnnnnnnnnnnnnnnnnnnnnnnnnnnnnnnnnnnnnnnnnnnnnnnnnnnnnnnnnnnnnnnnnnnnnnnnnnnnnnnnnnnnnnnnnnnnnnnnnnnnnnnnnnnnnnnnnnnnnnnnnnnnnnnnnnnnnnnnnnnnnnnnnnnnnnnnnnnnnnnnnnnnnnnnnnnnnnnnnnnnnnnnnnnnnnnnnnnnnnnnnnnnnnnnnnnnnnnnnnnnnnnnnnnnnnnnnnnnnnnnnnnnnnnnnnnnnnnnnnnnnnnnnnnnnnnnnnnnnnnnnnnnnnaagaattcggcacgagggnnnnnnnnnnnnnnnnnnnnnnnnnnacaaagcaaacacttttattttctatgcaaaggtgattcagagaatttatataaaggcgggcgaggggcagccgagcagggagctttgggacagggctggggcccccatatcccccccgggccacctgctttccctcctatggctcccctggaacaggagggagagccaagggggcggcccagcctggacagcgcccgctcctgcctgggtgcacacacggcgggcctgagctccagcatctgagtttgggggtatgagaaacaggggagcagaaggagaagaaaactgcctgtgctgcaacacgtttcctcatttaaa

SEQ ID NO: 133947 - DNA, 498 bp, Homo Sapiens
  misc_feature (158)..(256): n is a, c, g, or t
aaacaagctgaatgttcccatatggttcctgtgcccaaagtttacttttaaataaagagcagtgatatcatatccatgactgacttgggtaaagcactcctgttaaactcaagaaaattatgtcacccccatcctaatccacaaagactgccagtggnnnnnnnnnnnnnnnnnnnnnnnnnnnnnnnnnnnnnnnnnnnnnnnnnnnnnnnnnnnnnnnnnnnnnnnnnnnnnnnnnnnnnnnnnnnnnnnnnnncatctcaaaaaaggcaataacgaaaacatcaaactatgcttgcattgtggcggcagaataagagagttagggtgagggggaaaatggttaagatctattacaattttaaatgactatgatactagcttaacttttaccaaacttgcctgtaactcccctcgaaatagacagacttcttttaaaagaaaggggttctccttacacaaaatgctttgtgttcacatcaatctgtactattcaga

SEQ ID NO: 133948 - DNA, 371 bp, Homo Sapiens
  misc_feature (157)..(189): n is a, c, g, or t
  misc_feature (206)..(241): n is a, c, g, or t
tttaaacaagctgaatgttcccatatggttcctgtgcccaaagtttacttttaaataaagagcagtgatatcatatccatgactgacttgggtaaagcactcctgttaaactcaagaaaattatgtcacccccatcctaatccacaaagactgccannnnnnnnnnnnnnnnnnnnnnnnnnnnnnnnnacacttgtatctgtgtnnnnnnnnnnnnnnnnnnnnnnnnnnnnnnnnnnnnggtagatacagatacatacatctcaaaaaaaggcaataacgaaaacatcaaactatgcttgcattgtggcggcagaataatagatcttaaccattttccccctcaccctaactctcttattctgccgcca

SEQ ID NO: 133949 - DNA, 688 bp, Homo Sapiens
  misc_feature (107)..(107): n is a, c, g, or t
  misc_feature (169)..(169): n is a, c, g, or t
tttttacaaagcagggagaggtcatgttggtctggaacgcgtcacaggggggacgtgccgcggcaccactgtggggggctccgtctgtggggagggctgccccactnggggagcctggggacggaggccctggtgggccagagtgggagcaccaggcagcagtgtgggntggggttggtggcgccggcacagagagtggtgggcccccagcccgaggatgctccctccagggccggagggggctgtcggcggtgcggcttgactgggcagccttctggagcggccagccctcggctcgtcagtcaacacagtccctcactaggggacagctccgtccttgccacctgagcctgctcagccctggcgggccgtgccctctggctggccttccggtgccagggttgcccgtcctcatcccgcgccagcgcctcccccagggactccggcacagtccttgccctctgtggccaggctgtcccaccgcctctggtcctctcatgggctcgcgctgtgtgtcatatcgtcagggcctgggccgcttgtccacagggcgcctggttacattggcggcagcagcagcagcatggtggcagccaccagtgggcctggggcccccgggggagaggatgccccagaggtgcatgagcagcctcgtaccgtcctccgagcggtctggtcatgttgtcct

SEQ ID NO: 133950 - DNA, 991 bp, Homo Sapiens
  misc_feature (733)..(733): n is a, c, g, or t
  misc_feature (759)..(760): n is a, c, g, or t
  misc_feature (780)..(780): n is a, c, g, or t
  misc_feature (786)..(786): n is a, c, g, or t
  misc_feature (815)..(815): n is a, c, g, or t
  misc_feature (849)..(849): n is a, c, g, or t
  misc_feature (853)..(853): n is a, c, g, or t
  misc_feature (855)..(855): n is a, c, g, or t
  misc_feature (865)..(865): n is a, c, g, or t
  misc_feature (909)..(909): n is a, c, g, or t
  misc_feature (917)..(917): n is a, c, g, or t
  misc_feature (919)..(920): n is a, c, g, or t
  misc_feature (937)..(937): n is a, c, g, or t
ttttttgttcagctgctttctttattagaaacaagtgagatgtattgagcagaacaacaatgcatttggtatttcctccccgaccctggaaatggatgcccccccacagcccaaagaaaagccaagacaaaaaggtgaagctcccccgtccctgttcccagacatggcacctgcctgccagccagtcagtattttttaatttaatggaatgaaattgtcctcaacagcctccgtaggtgtagtcggcttgcaggcccgccttcattttgcagcagagtaaaactgaagcctcaggcctcccctggttctggggaaggtgggccaggccatcagaaggctgcctcacaggtgggtaggcactgacgggagggacactcctgctccctcccctgatctaacatctggttcccctccttctcctagagtgcagctccatgcagttgtccaaggcctttgggcccttaggttggttaaatgctggtcgtctttggggaaagaattcaggaccacagggactcccctaggcttctgagagccagcaagtaggggggcgacagcagttagacgggagttgtggggaaggcctgacattttccataaacctggtgttaaagtagctgggtgtgggctggccttcaaataagacagaagcctcttcagaaataggcatgtgtggggaaacgagccctatacaggcctcgatccggagtggaggcctcctactcagctctcntcctacacacagactggagtccgtgnngtcaatgcagagtcatccanaggcangagggtaaggtcgtctttgaacatggcanctgggaagactgggtggcaaagggtgggggtcangccnangggaggcttncacagcagtgctcgaggaggggtagctgaaggctcagggtcttnctttgctngnnttggacagcatgcgctncaactgcaggctcctgtgggaggctgaccccggatagtgtctctgactgatcca

SEQ ID NO: 133951 - DNA, 483 bp, Homo Sapiens
ttttgttcagctgctttctttattagaaacaagtgagatgtattgagcagaacaacaatgcatttggtatttcctccccgaccctggaaatggatgcccccccacagcccaaagaaaagccaagacaaaaaggtgaagctcccccgtccctgttcccagacatggcacctgcctgccagccagtcagtattttttaatttaatggaatgaaattgtcctcaacagcctccgtacgtcgtagtcggcttgcaggcccgccttcattttgcagcagagtaaaactgaagcctcaggcctcccctggttctggcagtcggtagagcttcatggtgcgctgcatggtcatatttctgctcaggtgggagaacttcacttcaatcaacttccgtgggtttagggaccgatgccaatacctggcaggtgccaacgggctttgggtaagtacgatgtcttctggttttgggaactctgcagaattagccc

SEQ ID NO: 133952 - DNA, 784 bp, Homo Sapiens
  misc_feature (700)..(700): n is a, c, g, or t
  misc_feature (745)..(745): n is a, c, g, or t
  misc_feature (761)..(762): n is a, c, g, or t
aaaataaattttattttatatatttgagattgacaacatgatcttaaaggatacatatagatagtaaactggttactatagtgaagcaaattaacatagctaccatctcacatagttagatttttgtttgtgtgacaggaacagctaaaatctacttatttaacaaaaatcccaaagacaatatatttttattaactatagccctcatgatgtacactagatctctaacttgttcatcctacatgtctgctactttgtattattttaatgtacatctccccatttcctattggtcatttcctatttggcccatttttcaactgggttgtttttctgctcttaagttgtaagagttatttactgatttttggatattaacactttatcagatatgtggtttgcaaatatttcttccagtctgtaggttcccctttcattttgttggttgttcctttgctgtgcagaagctttttagtttgatgcagtcctccttgtttatgtttacatttgtagcctggcttgtggtgcgatatccaaaaaattattgctaaggccaatgtcaagaggctttccccctatgttttcttctaggagttttatggtttcaggtctatttgggtctttggtcttgtatctgttttgagttgatttttgtgtatggtgtatgatcagggtccaattttattcttttgcatgtganaatcctattattgaagagactatcttttttaccattgtgttgtcntgtttgcccttgtcannaatagttgacagtatatgtttg

SEQ ID NO: 133953 - DNA, 1142 bp, Homo Sapiens
  misc_feature (106)..(106): n is a, c, g, or t
ataagcttgctgttaccattctgaaatttttggaaaaagaatagatcccactatagaaacttggagtgggatagggtgagtttggtgatatgatcagcttcacctngagaaacacttcccttcttggacacatgtccattcatcactggtcccagcttcactgggcttatagattcacggtcttatctcctccctagtcccttccacccactcttgataatttcagcattccaagtagaagacccttttgacatgcaaccatcaccataccttccaaactctacgatgtccccacatcatacaccagacccccaactcctggtcagaaaaacttttctcaggacagatccctctctggaaactgaactccatgtttcattctctgatcacatgcatccatcccaccttcacaggcccacttccactcaactgagtcaacctctttgacacttctacttcctgtgagtgcctaggtctcctgtggtcacctctgtatctttcgcaagatgggaccactaaaaattatcatgtccacaattctaatttactgttgcatcaccgttcagctgaaaatccggcaagcaaaaaccccaggatggatcagttctgaatgtagtgtccctgatcctgccgagctgaaggacatgcacaaccatgaagatggtgcctttacaaacactgtccgtgagtcacagcagtccttgtccatcctctgacagaccctcgtccgtgcctcttcttcctctcagtgaccactgaaaacttgaaatacactaggcccctcaacagtttatctgttataaagaagccaaaataaaatctttggaaagataagtagatatggaagcacttgtaagtaaatacattttttaaaaagtgttttgcctggaacattgattggatgaaggcaccaatacagacctgagatagtggcttcccgttggcacagttgatgcccccaatgaagaccatgttgggcatgatcggcctggggtagtccatcacaaagtcccctcggaacagccacacggatgcatagctgacaagatccaccactgacacctctctctgaaaaagctcagaggcaagacttgcataaggggcagaaaaagtatggcaaatgtaggacagggccagagggt

SEQ ID NO: 133954 - DNA, 506 bp, Homo Sapiens
atacaaagaaaaacaaaaagctgagacaaaatctacaacaatcacttgcgactactctcttctcccctcccattgaataatctgaaccaagagcaagagtcctgtagcagtgtctgatttcttctcttctatgaccttgaactccatcaggggttcccaagaaagtgaaaatgcggttaagcaaatctaaacagaaatagtccttcttcgccttctcttctggagccggtttacttgctccacctttacacttcccactgagcctctccctgggatggctcctgatgacagtgactcttccataaacgagggcagttctccagaaaccaaggcgtcggtcagaccgtgaatcaagagttagtatgctacacaagcgatgtagcttcaatccaagatgggagactgtggtcacacagcaggccccagcccaaacctgccccctgctcagaggacaaaggccaattagactctctgtgtgtgtgcgcacagagagtctccgttgactg

SEQ ID NO: 133955 - DNA, 991 bp, Homo Sapiens
  misc_feature (311)..(311): n is a, c, g, or t
  misc_feature (314)..(314): n is a, c, g, or t
  misc_feature (354)..(354): n is a, c, g, or t
  misc_feature (472)..(472): n is a, c, g, or t
gggcgccagcaccgatgaatcgcctgaactgaaactggctgaagacaagttcgccaaggcccgggccgacatggccgaccaatcctacaaagatgcgcgcatgcaggccgaacaggccgagctggacgcgcgtctggctgaagcgcgggtattgacgcgcaaaagccaggaacagttgaacgtgcttaacacccgcatcgcccgactgcgcaaacaattgcagctgggagaagcccaatgagcccgctgatccgtggtttgagttgtgtgttgctgctgggcagcgcggcaatgggcggttgcgccagccnaancccaacagcgagcaggcgttgcagcaggccggcagcgacnttccagaaggtcaaggaagacgcgaatgtgctgcgttttgcgcccaaggatgtgattcgtgccggcgaatccctggcccgcgccgatcgcttgtccagctactggggcagcggccccngacgtggtgcattacgcctacctgagccagcgctacagtgagatcgcccgcgaacacaccgagcaggggctcaacgccgagcgcggcaccaagctggagctggaacgccagcgcctgcaattggccctgcgtgagagcaagttggcgagcgtgcagcagcaaggcaagtggctcgaagagcaaatcgccagcctgaccaccacccagaccaatcgcggcctggtcatgacgttgggcgatgtgttgttcgacaccggtgacgccgagctgcaaaactcggccaaccgcaccgtgctgaaaattgtgcagttcttgcagttgaaccccaagcgcgtggtgcgcatcgagggttataccgacaacaccggtggcgagcaggaaaacctcaagctgtcgcgcgaccgtgcgcaatcggtggctgatgtgctgatggacctggggattgatgaaaaacgtatccaggtcgagggctacggtgaccagtacccggtagaggccaacgcctcagagcgcggccgc

SEQ ID NO: 133956 - DNA, 780 bp, Homo Sapiens
  misc_feature (25)..(25): n is a, c, g, or t
  misc_feature (73)..(73): n is a, c, g, or t
attcaaaccatatttatttataaanctggttgagagggtatactgtacttaaataaatccaactcccaacttntaagttaacctcaatctaaaaacaagcattttcttaaaccagtatactcagctacttttctcaaaaatatttccattctgaaataagattttttgtgagatacaatagtttcatcttttattcctaacagaactcatgccgtactttttttctcaaaatatatttgatatattctgtgcaaaatgttaagttctgtataggcatgtaccttatattgaaaaagtttataaaacataattcctaaaaacaacctcaacattagacaatagaggaaggaaaaacatcagacaaagcctaagttttcacatgagaaactgaagtatgttcttaaagctccagtattacattccttgaaaaaactcagaatgcactttggtcattattaaacatatttgaacataggcaaataaaatgaaatgctttctgttgtttttcatagaaagaaaaaacatactacacaatgaggctgaattgaggctgatcaaaaggaatggtaagagcaaagtgatatgacatggctctgttctccacacattcctgattttaagattatgatttagggattagaactgcaccaatcaaataaattatttacaattaatcgtcttaaagttcttaaaatatggtaaaaatatgaggatattccacatgatacactttgcaccaagaaaattctagattgtttcaaataaatttttagaaacccc

SEQ ID NO: 133957 - DNA, 951 bp, Homo Sapiens
tttaaaatttttaaattgacatttattaaattcaaacagtatttgaggactatctagtttatatacatgttgaggttgataaagtattgaggactatctagtttatatacacgttgaggttgataaagttcaaattctgttttaggaagttaacaatgaattgagttcattttaactgaatgttactataaaagatggttttcttgctgcaatgtaaatctgctattaagaaattagcaaagtggctggtggtgtttgtgcctttaagatcatcgttcaaaagaattcagcaaactcgataacaaaggtaagacaaacataacctttattctctctcaaaaacccagagaacagggcctggaaccatattcgttaatttaaccagaatcagaatactttaactttcatagtctcatttaaaattttatagcaatatactgaccattctaaaaataacaaaatacatgttgctctcaactacatagttaaaaaaggtagtaaattctcttacccaaaatagaggaggggtgggctagtgagctgctcaaacatttgtaacaaataaaaatgtatctatatacatataatgatcatgttttcatagcctaaaatcaccatacaaaatctaataataaaattgtgtcgtgttcaggagttgggaagccaacacattaaattaacaaagtatttttggtatatgtaaataatgggatagaatctctcgaatcaggattgtcccagaagttctaaggcagatgtcaatgacatgcacattgtccatgttcagtaattttcaaagactagaataaactatgtaaactattcaatacaattcaatattacttaactgctaaaaagtacttcaagatcttgcactgccttgagtgagtataatcaagttagtaattgggaaatagctgtaatagcaggcactgaagaattccctcgtgc

SEQ ID NO: 133958 - DNA, 725 bp, Homo Sapiens
  misc_feature (418)..(675): n is a, c, g, or t
tactgattattcttggtttaaatttgcatgtaacaatttttagaaaataatatactgcaaaagaaagattggaaacatgcgtgacatgattaatctttatgagcaccaaataggcattaataatttaatggtaaaaaatctaatgccatcttatggtctttggattattcattttttcttaaataatgaaaatcaaactatgataaaagttaggaaacgtgcagaaccaccaggaaaacagcaatttgctttcagcgtacctttgcaaggatgttccaaagcctcatgtacgagtgagatttctgggccacttgcacaagtagataaaccctcttctcaggccagttataaagggctgagatgagccacagaagcccaagatctgctctgattgtctcctagctattttctttcctcnnnnnnnnnnnnnnnnnnnnnnnnnnnnnnnnnnnnnnnnnnnnnnnnnnnnnnnnnnnnnnnnnnnnnnnnnnnnnnnnnnnnnnnnnnnnnnnnnnnnnnnnnnnnnnnnnnnnnnnnnnnnnnnnnnnnnnnnnnnnnnnnnnnnnnnnnnnnnnnnnnnnnnnnnnnnnnnnnnnnnnnnnnnnnnnnnnnnnnnnnnnnnnnnnnnnnnnnnnnnnnnnnnnnnnnnnnnnnnnnnnnnnnnnnnnnnnnnnncccggccgtaatggccgaattcccgggcatatgtccggtaccgtcgactg

SEQ ID NO: 133959 - DNA, 708 bp, Homo Sapiens
ccaagaaacacatttctgctgtttccgtaagggcactccggaggagtgctctttcggtagccccgggtgcagagcacccgggataaaaaaggtgggtgatggacgcggcaccccggatggggtgctcttttggttgaccccaacgcaagggggcacctttggttgcaaccgtcaaccgaaagactaccccttcggggtagcacgaaatcttccatcgctctttgccccgggttacaaacccggggctaccgaaagggcacccttccagggtgcgccctgccggtgaaagatgtgtccacacgatagccgggtcggagaggggccgggaagggggtcaacagagcggcttaactaaacgacattgcattgtctgttgcacatttccccaataaaaaaggccccgcgcctggggcggggcaagcccttcaggccttctgtttacttactctttctctccgccgctggcgcgccgaaggatgtctttctcttcttcggtcagcgacttgaagcctttgaggttgatcttgtcgaggatctcatcgacgcgctgctgggtgaagttggattgtttgcggaagggggttaccgaggccttgtagaacagctgctctttcacgggcggctgtcccttgcgcggccggtcgggattgaacaggttgttgaaccattcccagaccctgttcatccaggcgcccatatcgcggccgc

SEQ ID NO: 133960 - DNA, 537 bp, Homo Sapiens
ggcacgagggtgctgaccgacaagctgcatcccggcgacgactacgaacgcgccgactacctgcagaacctcagcgtgctgcgccaacgccagggacggctggccgaatccctggacatcgtgcgccagacccagccactgtgggccagcgccgacccgcggctgaccctgcccgtgctggtgctgcgctatggcgagatctcgggcatggctcagaacgcgctgttcgacggcatcgacgcacgcgctgccccgctgctggccgacatccgcagcaagctcggccccggcaacgatctggtccggcaggtcgccatgggctgggccgacgcccagcagttgcaaggccggcatgccgacgaggtgaacacccgccaggccttggtggacggcgcccgcgccgacgggctggccgccggcgagctgctcgaataccggaccgagttgctgctggcccgcgcccgcagcggcgtcctcgaacccggcgtgctgcgcagcaccctggaagaagcggcggcccaggaaggcggcggccgc

SEQ ID NO: 133961 - DNA, 902 bp, Homo Sapiens
gcggccgcaaaggctcctgaccgacccccgttccccgtgagcggtgcccgccatcggcggcgtggcccgtgttccgcatgccctgcgggacgcccagcgcgcaacgccttcttgtccgtgtgcgcgtcccgttcagccgcccccggccgcgggacctgaaggtagcttctccgcgaaccgcaccccgcgcgttctccccgtccgcatctcttccgcacgctgcgaagggtcccccgatggcttgcctgtgcgagccacccggagacccttcgtggtcagcggtattcggtgccggtgcccgccggcgcaaaaacgggctccctttgtgcgcggatgtgcgccagacgatgccggccccagccacgacatgggccgggtgtgattgctggatgagcagacggttctagcgacgaccgggcctgccaatcagcccacgggtggttcttctttcctcccgagccgaaggcccctggggccttcggcgcctttctcctgcctttcaacgccccggccagggcgatggccctgcgccatacgaacaggagaccgacaagcacccgaaactttgcgcaccgccgcgcaacacgccgctgctctacggcagcgtctgcagcggcatcgaggccgtgagcctcgcttggcaaccgctcggcctcgaagccgcgtggttcgccgagatcgagccgttcccgagcgccgtgctcgcccaccgttacccccgcgtgcccaacctgggcgacatgaccacgatcgcccgccaggtccgcgccggcaccgtgcccgcgccagacctcctggtcggcggcacgccgtgccagtcgttcagcgtggccggcgcccgccgtggcctggctgacccgcgcggcgccctgacccttgcctatgtggagcttgcaaatgcc

SEQ ID NO: 133962 - DNA, 1189 bp, Homo Sapiens
tctttagagaaaaatatttttaatgtagaaaagatgaatagctgtaatgaaatacaaaccgttcctatacacagtaaacttactaagaactgctaatccttctccaggttcttagaatctgggtacagcattatagaaagtaaccacgctatgaaaacacacacccaaaacccgatgggtggcaattgtgatagattaggaagacaaaacagattcagaagtagcagagaatactgcacattttcttggaaaatttcttaattgttcagtgctttctgacaagtttccccagcccaatttatctcttagctattctctgctacttagtcctgtcttctgacaatcatcatacggggacgatcatctgccttacagtgtaacatgtttttcctaacacagccgcattttatctgccctaagagaatagcaactaatggctttcaatgaagtcaccatgatttagaaagtttaaaaccacaaattttccatgtggtaaaacttctaattactaacattgcacattcaccagtccgtttaaaagttgggtttaaaaatgcattaaatagagttcaatttaatattcaggagaggaaaaggcacttaatactgcaatttccagaatataatttgtctgtcttcccctcctgtgatgatactgctacactgttcattcatccatatacatgtcacagcacctgtgtggccctgtattctctcactgatttttgctccaaggaggtcccaaacgagcagttcaccagactgactgccagataaaacggaatttccatcccagacaaagcacctctggggctcatctgatgtcatggaggagatgagcattcctgtctgcacatcaatgacattaagacagccatctgttcctgtgctgaggacatggcgactatctgggctaaaagcagtgtcacatacaatccctgaatggcatggaatctggtgcattaaggtggccgttgtgaggtcccaaatattcactgtgccttctttggtgccggaaactaacagtgtgcttgcagcatttaaactgattgtatctacactgacatcatgttccagctcggccagcaagtcaaagtggtgtcttttggtgcctggcatctctgcaggaacaccagaccacaccttcactgtagagtcccacgatgcagaatatagcctgttgtcatcc

SEQ ID NO: 133963 - DNA, 993 bp, Homo Sapiens
tttttagtgtttttctttgtaagttttattgtttatttcaaaattaacaatattgtttatttcaaaattccaatttacctagtattatctgttttaaaaaggataatatctacctgggctaaaagcagtgtcacatacaatccctgaatggcatggaatctggtgcattaaggtggccgttgtgaggtcccaaatattcactgtgccttctttggtgccggaaactaacagtgtgcttgcagcatttaaactgattgtatctacactgacatcatgttccagctcggccagcaagtcaaagtggtgtcttttggtgcctggcatctctgcaggaacaccagaccacaccttcactgtagagtcccacgatgcagaatatagcctgttgtcatgccaacagatcttactaacagcatcatcatgtcccattaacgtgtcctggcgtcttccaaatgctatggaataaaaatagacattattatcccatgaagaagttatgacagtggcatctcctggtaaaagtaaacaagacgataaagccatatttgaaaatgatatacttctttgtagcatttttgattctttagaaaacatcttcaaggtggaatcttgggatgttgtgaatactgaagatccattgcgagagaccgtgattccagtaactgcttctttttggattttatagtgctcgtgtaactgcagtttggtgatgttattccaggccagtgttttgctttcttcggtcaggtcttcaaaagactcttcacctggggaatctgccatagaagcattataactggaggtctgggacaaacttttaaactttggggtgatccttcgaggatgtggtgtcacaaatagttgttttggtgtctgcccaaattccaagatttgcgtaagcatggctaccttctcatcaggatcctggatgctgttcaagtctacacctccttcataggtcaggggatgaaatacattatgggccccaactgc

SEQ ID NO: 133964 - DNA, 911 bp, Homo Sapiens
gcttcgaggactttttccagcgcgtccggagtgtgggcgtaatcgaccaccaccagtggctgagagccgccacccaaacgctgcatacggccggccgggccttcgagtttgggcagcacgcgcaggatttcgtccagggcgtaatccaggccaagcaatgcgccaacagccgcgagcacgttgctcaggttgaaacgcccaagcaaggtgctgcgcaagtggtgttcgccctggggcgtgaccagcgtggcgagcacgccttcgtcattaaattgggcttcacggcaatacagatacgcgctggaatcttccaggctgtaggtgatcaggcgtgcttcgctgtcttcggcagccagttgacggccgaatgcgtcatccaggtttaccacccggcacttcaggtcattccaggcgaacagcttggccttagcggcggcgtacgcctccatggtgccgtggtagtcgaggtggtcgcgagacaggttggtcattaccgccacgtcaaacgccaaggcagtcacacggccctggtccagaccgtgggatgacacttccatggcaaccgccttggcaccggcctttttcaggtcggccagggtcgcttgcacggcgatcgggttcggcgtggtgtgcaggccgctttgcagcgcaccgtaaaaacccgtgcccagggtgccgacaatgccgcaatgctggcctagcaggtcgagtgcctgcgcaaccaattgggtcacgctggtcttgccattggtgccagtcacaccgatcaggttcaactgacggctcgggtcaccataaaaacgcccggcgatgtccgacagttgcgcggccaggcccttgaccggaatcaagggcacgtcggtgatcggcagcacggtggcgccttccacttcataagccacggcggccgc

SEQ ID NO: 133965 - DNA, 729 bp, Homo Sapiens
caccgcagttcaaggcaacgaactgatgggaatgacgccggctgaaatcatgcaggcaacgggcgaccagttccttgccggtgccggtctcgccttcgatcagcacgttggccgaggtgtcggcgacgttggcgatcaactcccgcaagttttgcatggccggggagcggccgatgattcggccttccagggagtcgcgctcggccagttgccggcgcagcgaccagacttcccgggccagcccgcgttgctccagggcgcgacgggcaacgtccaccagacgctcgggcgagaagggtttttccatgaagtcataggcgccgttgcgcatcgcgcccacggccatggagatgtcgccgtggccagtgatcagcaccaccggcaggcttttatccaaggctttgaggcgagtcagcagctccaggccgtcaatgcccggcaggcgaatatcgctgatgacgatgccggcgaagttttcgccaacacgggtcagggcttcttcggcactggccacgcccacgctgggaatgtcttccagggccagggcttgctggcagccgagcagtacatgagggtcgtcttcgacgatcaggacggtcaggtcggtatttttttctgtgttcatttcgactcgacttgttgagggctcgccagcggcaaactcaggacaaaggcagtaccaccgctggccggatgctcgacggcaaggttgccgccggtggcggccgc

SEQ ID NO: 133966 - DNA, 1053 bp, Homo Sapiens
  misc_feature (59)..(77): n is a, c, g, or t
  misc_feature (680)..(680): n is a, c, g, or t
  misc_feature (687)..(730): n is a, c, g, or t
  misc_feature (763)..(820): n is a, c, g, or t
  misc_feature (829)..(829): n is a, c, g, or t
gtgccaagctaaaattaccctcactaaagggaataagcttgcggccgcggctgtaggcnnnnnnnnnnnnnnnnnnnaaataaaagacttaaaaagtaaagaaggattctaccatatttttaaaaacttttaatcctggtttacttttctaacaaatttatctatggcttcaaagtttaagcggcacttgaattctggatgttttcatgatttaacaagcggccatctcattagaaagagagaaggtaaaatgtttcattttatacgtgggacggcttataaacagctttaaaaatcaatacattatatctttcaccccatctatattttccactatagacttcaaaagtggctttggaattagcatgttttgaaacagtcgaacaagcaagtaacatttacacctaaccacgaaccagtcgctacatacccaggtaactcagtaatggcaaaacacttaaaggcttctgggcctctcttaccctcttagtccaaagctaagtgattatcctttcctgcccttgtatttgcacttgtgcagtttaatgactagatattaaaattcatgctttataagcaaaacctttcacttacggacacttaaaaagtacataaaaagtgcagactgcatttcttctctgccatgctttccctcagtaaggtcacctgtgaggactcanaacctannnnnnnnnnnnnnnnnnnnnnnnnnnnnnnnnnnnnnnnnnnngcctacagccgcggccctcgtgccgaattcttnnnnnnnnnnnnnnnnnnnnnnnnnnnnnnnnnnnnnnnnnnnnnnnnnnnnnnnnnntcctgtgtngaattgtatccgctcaaattcacacacatacgagcgggagcaaaagtgtaagctggggtgctaatgagtgacactcacatattgcgtgcgccatgccgctttcatcgggaactgtctgcactgcatatgatcggcaccgcgggaaagcgttgctatggcgtcctcgctctcgccatatcctggctggtctcgtgcggacgtacatatcaagcgtaacgtatcac

SEQ ID NO: 133967 - DNA, 1139 bp, Homo Sapiens
tcgatctcccatcgctcgatcatgctgggctcattggccgacggcgtgaccgaagtcgaaggtttccttgaaggcgaagatgccctggcaaccctgcaggcgtttcgtgacatgggcgttgtgattgaagggccgcaccacgggcgcgtgacgattcatggtgtggggttgcacggtttgcagccggcgccggggccgatctacctgggtaactccggtacgtcgatgcgtttgctgtccgggttgctcgcggcgcagcgctttgacagtgtgttgaccggtgatgcatcgctgtccaaacgcccgatgaaccgcgtggccaagccactgcgggaaatgggcgcagtgatcgagaccgggccggatgggcgtccgccgctgacaattcgcggtggccaggcgctcaaagggcctggactattcgatgccgatggccagtgcgcaggtgaagtcctgcctgttgctggccgggttgtatgccgagggcaagacctcggtgaccgagcctgcgccgacccgtgatcataccgagcggatgttgcgtgggtttggttatccggttgccgtggcgggggctacggcgtctgtcgagccgggccatgcattgacggctacacatatagaagtgccgggggatatttcctcttcggcgttcttcctggtggcggcttcgattgctgaaggctccgagttgctgctggagcacgttggcgtcaacccgacgcgcactggcgtgatcgatatcctgcggctgatgggcgcggatatcaccctggaaaacccgcgtgaagtgggcggtgagccagttgccgacctgcgcgtgcgcgccgctgagttaaaaggcatcgagattcccgaggccctggtgccgctggcgatcgacgagttcccggtgttgttcgtggcggcggcctgcgccaaagggcgcaccgtgctgcgtggcgccgaagaactgcgggtcaaggagtccgaccgcatccaggtcatggccgatggtctgttggcccttggcgtgaagtgtgaaccgacacctgatgggattatcattgacggtggcccaatgggcggtggcgaagtgcaatcccatggtgatcaccgcatcgccatggcgttcagcgtgcctccctacgggcggccgc

SEQ ID NO: 133968 - DNA, 1436 bp, Homo Sapiens
  misc_feature (76)..(76): n is a, c, g, or t
  misc_feature (92)..(387): n is a, c, g, or t
  misc_feature (405)..(422): n is a, c, g, or t
  misc_feature (768)..(799): n is a, c, g, or t
  misc_feature (1060)..(1060): n is a, c, g, or t
  misc_feature (1188)..(1188): n is a, c, g, or t
  misc_feature (1195)..(1195): n is a, c, g, or t
  misc_feature (1201)..(1201): n is a, c, g, or t
  misc_feature (1224)..(1224): n is a, c, g, or t
  misc_feature (1238)..(1238): n is a, c, g, or t
  misc_feature (1258)..(1258): n is a, c, g, or t
  misc_feature (1284)..(1284): n is a, c, g, or t
  misc_feature (1289)..(1289): n is a, c, g, or t
  misc_feature (1298)..(1298): n is a, c, g, or t
  misc_feature (1315)..(1316): n is a, c, g, or t
  misc_feature (1321)..(1321): n is a, c, g, or t
  misc_feature (1332)..(1333): n is a, c, g, or t
  misc_feature (1355)..(1355): n is a, c, g, or t
  misc_feature (1418)..(1418): n is a, c, g, or t
ctgcttggtgctttgtacatgttttctggtatccctgatctgtgaaacgtatacgcctttgatgactgtaccctcncgcagccgacgaccgnnnnnnnnnnnnnnnnnnnnnnnnnnnnnnnnnnnnnnnnnnnnnnnnnnnnnnnnnnnnnnnnnnnnnnnnnnnnnnnnnnnnnnnnnnnnnnnnnnnnnnnnnnnnnnnnnnnnnnnnnnnnnnnnnnnnnnnnnnnnnnnnnnnnnnnnnnnnnnnnnnnnnnnnnnnnnnnnnnnnnnnnnnnnnnnnnnnnnnnnnnnnnnnnnnnnnnnnnnnnnnnnnnnnnnnnnnnnnnnnnnnnnnnnnnnnnnnnnnnnnnnnnnnnnnnnnnnnnnnnnnnnnnnnnnnnnnnnaagaattcggcacgaggnnnnnnnnnnnnnnnnnngactttgatatgtttatattatagatataatacataaaacatctagagtgagactctacgttctccccaaaagaagagaaccaagccgtccttccctgctcccagccccagtgatgcgttggcgggaggccacctcccttcccgaccaggagccagggcctctgggggacaagccttgtgggcagcccaggccggaggggctggggaaagctgagggcaaaggagaacccccctcacctcattggtcccccaggatcaaaagtaatcccaaaaccaaaaggaaagggagtctcagacccttcccccagctgccgacggagagtctcattttggcaagtatccgagnnnnnnnnnnnnnnnnnnnnnnnnnnnnnnnntggtggtttagcagagacgcgcacattcacattgcacaaggcactgctggggcacagaggccagatacaagtgttgatatcggctgataaagcaaaatatttggaaagcttgtcataactccggtccctctgggatggactgatcgtgcttcgtgttcctaggcaatgctgaaggcatacagtacaaacaaggctgagggtcccagtggcccttcaccccccatgcccgccccacagccagatctctaggtctccctctcncaccaggggtatacatcctcagagctgacccacgacctagctttctggtgtgactcggggtgggggctccactggtacctggtgaccccatcgcagtgagttccgcccaaggggaagctcagctatancagctgnggtggngtgtgtgcggagggaggtggganaggcgtgtgactanagaccctctacttcatgtangactaggggaccatcttaggtttcangcccnagtcctatngttcccaccctttctanngacangcgttggaganncggtggggctggcgggctgtcnggatttcactcctgaggcctctctggcacgggctgctccctcttcttcatggggtctgcgtanctcggcacgaggcagacc

SEQ ID NO: 133969 - DNA, 697 bp, Homo Sapiens
ctgggcacacagtctgggggcccccgaagccccctcatctttattccagttcctcagatgtggcagttcccccagcttccctggaaacaagtatcagacaaaggtggtggcagacacaggacagggccctgggtggggcttgctggcgctaaaaggatttctcagcaggctcagggtctcccgccccgaatgacccttctggccacttcaagctactcctctgctgcccggcttccctctgcctctggttcccctggctgagcagggccttcctgggcttgaccctggcccccttcagcagttgtctcagactgttcccgaatgtccctggggctggctttgaccccagcatccccatctccctggcacccttgctcctcccctctgcttcttgcctctgactgcccactgccctcctcctctgtcacagccccctgggtctcaggccactctgcccgggggtagacgaggtagccagtggtggggcagcctgtgggccagggccccagggggcaggcggtggtagccctgctccttgtacaggaagaggccaacagtgttgggctgggtcactcggaacttggtggcacagagctggttcagggtggcaatcgaggcctctgggggcacggccagggtcttggaggtgcagccactgctgggatcctgataggctactcggaggaggtgctggaag

SEQ ID NO: 133970 - DNA, 1095 bp, Homo Sapiens
ccttacttggacccaagtgtaatgatgaatttccttgctagccaggaaattcaccaagataaacaaggcaagcttaaaatgttataagcagccaaactcctagtgaggtgctctggaaaagaatacactggatattctgggaagcaagaacagcaggaaattttctggaggaaaatctcaggccactgccttaagcaatgttggtgataaaatcagagatgcttcatgtttaggtataacagctcacctgctatctgtacgtatagtcaggatttcccagtagagatggggtaatcacattttcaatgcttgaaaaggccttctaaaatttctcaattaaaaaaatatacatttgcatgattcaatccaaacctaaacacccaatgttcaataccagaaaaataatgaggctgttttcatctcataagctgtggaactcagagaaaggctaccagattatcttccacttacaaaaatattttaagagtggcacgggtgcctgggttttctcttcttcctgtgaggctgtgtctgtcccagaataaagtaaacatgcacagtaacaacgcagcgtcagacagagccaaggcaacgtgcccattaaacaacagctctgggcagctccctcctgaaagctaacttgcccctggtcaggcatgaggtgggggtgggcccctcaggaccaaggccaggtccagagccttccccaggccactccttggcctccagggggagggcgggtattctcatgagctcaggcagacaggaggagcctccccttggcaagtggcaagtttaaattgctgttcccaagcgtgggatcttgataatgaaagcagaaagacaatccaaacagcactggcccgcctctcttccaggagcacaacttgcgctccgttttggccgcaggtgttaagttaaaattctcgttattctggctcctgcttctctgtctaatgcccctagggaaacagaggctgccttttcctattcttgaaaccactgcaactacaaaagatgaattcacatcctagccatgctaaggagaagggggttttctcagtcagcagtacgtttcagtttctaaatcagtcc

SEQ ID NO: 133971 - DNA, 540 bp, Homo Sapiens
  misc_feature (317)..(330): n is a, c, g, or t
gccttgcctaaggttggttttagaatatgatttgcagtacacttttgaaatgtcttcattcatatatgtaatatatatttatacttaaagggccatacgcgatttcaataaaacaagaagtactggaaagaataaacaaaaatagccagaagatgcctagaaaagaacaatgtggaaggagggataaccctattaaatattataacataatgtttacaatatgagaaagtctaggaatttagtacatgataaagcatctcattcagagaaaaaggctttaaaaatggtgttgagagaagtgtggttaaccatttggnnnnnnnnnnnnnnttgaatcgatttctcacaggatacacaggataaaatctgaatagaacaaagacccaatttttaaaatgaaaccctctttctaactagaagaaaacatagatgaattattgtataatctgacagtgagaaaaactttcctaggactgaaaattcagaagcaataaaaagagaagtctatagaagaattttcagcctgatggaatggctcat

SEQ ID NO: 133972 - DNA, 339 bp, Homo Sapiens
  misc_feature (199)..(208): n is a, c, g, or t
aatccaaaatagttttttttaatcctttgaagttataccatcaaacttgatggtagttattttaataggtattcttgtgcatacttcttaagtgtacttttatctttaatgcataacttttgaaattaagaggaaaaacagcaagcaggaaggatacaatgcaataagcatttgattttgttctaaatgagcagctttnnnnnnnnnnggtaaaatacattaaacaaagtgcatcagttccaacaagttagtattaaaaagaggcctaaggacagtgctggaaccagccaggagtccctccctggcaggcctctgattgtcttcagagaatattcaatg

SEQ ID NO: 133973 - DNA, 657 bp, Homo Sapiens
cctcacagaactcaacagattccttttagaagttttaggctatgaaatcctgagccaaggcatcatgtctgatgatgctcaacactactaacactacttgcaatcacaattacacatcagacattgttttatttggtaatccccaagtgatttttgttggccagggatcctatcttaaatttttgagtagaatacttagcacaatgctatgcatttattaaatgcataaaaaaactgaacattaatggaacagacatattttctgttctcaggagcaaacaatacaaacatatcattaatagcaaagacagctaaatatatgtaggcctcaacacttccttagagttcccattgtgtatacctatactcatcaaactttcttagaaaacaataagtaacatggaaatgtttttgaaagttcttataattcatctattaaattccaatagctttagcagtacacttctaaacttctcaggtcacaaggcaggaagggcaagaaataaggggagaatacatataaaataggaatttcaagcaaaacagtaacatttttggatgaaaattacttaagtattgactatataccacacactgttcttaattcatgccactggaggaaagtagaaatttggatatttcaacaacaaaaaaatc

SEQ ID NO: 133974 - DNA, 633 bp, Homo Sapiens
cttggcgacgcttttaccgaccgccgccggggtcaaactcagatgccgggcggcttcggcaaagctgccaccttcggcgctgcgcacaaaacattcgatactgccaaagctctccatatcgaccactctaaacttttggtttacacagactatagcaatcacggtctaccggcttgggtgggtgaggccgatactcggtccatcaactacttggagaacgacatgaccacacacaatctcagcggcaaagttgcattgatccagggcggttcccgcggtatcggcgccgccatcgtcaaacgcctggcagcgcaaggtgcagccgttgcttttacctacgtcagctctgccgccaaggccgaggcactgcaaaacagcgtgatcagcgcaggcggcaaagccttggccattcaggccgacagtgccgatgccacggcgattcgcaacgccgtcaacgccaccgtcgaagcctttgggcgcctggatatcctggtgaacaacgccggtgtgctggccatcgcgccactggaagatttcaagctggaagacttcgaccagaccctgacgatcaatgtgcgcagtgtatttatcgccactcaggaagcggccaaacatatgggtgaaggcggccgc

SEQ ID NO: 133975 - DNA, 1030 bp, Homo Sapiens
  misc_feature (579)..(642): n is a, c, g, or t
  misc_feature (750)..(750): n is a, c, g, or t
  misc_feature (833)..(834): n is a, c, g, or t
  misc_feature (954)..(955): n is a, c, g, or t
  misc_feature (965)..(965): n is a, c, g, or t
  misc_feature (974)..(975): n is a, c, g, or t
aagtctgaagacattttatttttcctatgtgggaagcaatgatgatcttacactttttgttttctgtttttaagaagggcagcacaaggatatgtgcagattttcttttaagtaccttgctaagcgacactagactaataaccattttctagaattaggtgacctacttctgaataaaattgaaactggattgcgtattcccttactaataataatactaaatatattcttaaatcagttttcaaaattcaagatgaaatctagaaatatggaacaactagcaggaataagcccgaagatgattctagctccgttactactaaaacctagtttctaaactttcgaggattttatatgaactcgcatgaaaaaatgagctcagaggctagaatatgactccagaacataccttggtcgggtatgttcatgctcaagtaatcagactctgctccaaatttcttgacataagcccttttatctacctaataagcatagcattatgccaaggactatattgaaaaaagaacactggcctaagattgatagtctggatttaagtccagatttagtcacagcctnnnnnnnnnnnnnnnnnnnnnnnnnnnnnnnnnnnnnnnnnnnnnnnnnnnnnnnnnnnnnnnncaactgggcctgaggttccttctagctttaactttctttgcatctaagtttcgtagctcaagcatctggaattccaggtgagagaaggtatggtagattgaactgttnggcccaattcttcatgccttcctgcatcctcactcttgtcatggcttcactgtgggcagtgcatatttcctgcctcttcatcnntggcctctgacttcctttgacaatgagatatcagtagcatgaacaacaggggctgacatgtaccgagcagtgggctcaatctatgcactctgcatcagatgtctggtatcctttggctanngagatgaganagaagctannactcagctatgcagagcaagtgcaagcatctctactgtagaaagatgcattagca

SEQ ID NO: 133976 - DNA, 1076 bp, Homo Sapiens
  misc_feature (204)..(233): n is a, c, g, or t
gcggccgcatgtgaagcagtttgtgaagcgcgccgacgcgcagacgggaggttgcctggatttccagtggctaacccaatggaagggctgtcttttttgtatttcatggctggggcggtaggattcgaacctacggtacacggtaccaaaaaccgatgccttaccacttggccacgccccagcagtgcgggggtgtttagccannnnnnnnnnnnnnnnnnnnnnnnnnnnnncaaaaacttgtggccctcgccggggcgggctatcggcgcgggatggatcgggcggatgtcgtcattctgggggccggcgcggccgggctgttctgcgcgggcagcctggcggggcaggggctgcgggtcgtggtgctggatcatgcccgcgaccccggcgagaagatccgcatctcgggcggggggcgctgcaacttcaccaaccttggcaccagccaccagaccttcctgtccgagatgccgcggttctgcgcctcggccctggcgggctgccggcccgaggatttcgtggcgctggtggaccgcgccgggatcgcctggcacgaaaaggcgcaggggcagctgttctgcgacgggcgcgccacgcagatcgtgcggatgctgctggaccgcatggacggggccgagctgcggacgggcgttgcggtgacgggcgtcacgccgggcgccacgctgcgggtcgagacctcggccgggccgatcggggccccccatgtcgtcgtcgccacgggcggcaagtcgatcccgaagatgggcgcgacgggcatcggctatgacatcgcccaggccacggggcatcgcatcgtcgagacccggcccggcctggtgccgctgaccttcgcccagcaggacctgcggctttgcgcgccgctgtcgggggtcgcggtggcggcccgggccgcgctgccggccgccagggcgctgcggcgccccgcgatcgcctttgacgaccagttgctgttcacccatcgcggactgtcgggtccggcgatcctgcagatttcaagctattggcgcgcgggcgaggaactggcgctggacctttgccccggcctcgttccg

SEQ ID NO: 133977 - DNA, 890 bp, Homo Sapiens
ttttcttttaaagcatttatttagaaaaataaccgttccctgcccgccttgctctgtgccatgggacttgagcatctttcttaatactcttctgcattgggcctgcaacccacagtggtggggtccagcacacgcccctcgaaacgctgcggcactgctgggaggcctcacgcccttccagtcgtgacagttcccgtgttcactccttgtccaggcctctgtctccgggtctccaggtggacaggggcctctgcgggatgggcgcagctctgccacagtctgtgtgcccctcccgaggctctgctctccccgcatcggaagctcagggctggaagcgcggggagctgacatgaggttggtggaatgcgtgggcgctgtacaccacctcggggggcgagggcgtgctggcggccagcaccgagcacaggggctcgtggctgttcagcaccgacgtgaagtacttcagttcctctgtgagctgcttgatctccttgcgtagagccgcgttctgtttctccaggtcttcgctctccaggtgcagggtgtcggccttctgtgtctgcctctgtcggctcttctgggcggcaatacgatttttctccctcctctgaactcttctcacatcatcagatgagtcctgtttgccagggggaggagagcggctgaagctggagtcactgctgtcggagctgtgaggcatggctgaaatcttccgggctctcacactcagccccaggcacctctgggctctcttgtcaccagctgggctcccttcctgacttctcctgggccaccagcccaccaccccctacaggtgcctcctctgcctgccctgtagccacctctgacccctgcgtcctcctcactctggggtgcagagggactgcccc

SEQ ID NO: 133978 - DNA, 1282 bp, Homo Sapiens
gcggccgctccaacatcaccggtccatcatgctgaggatcatctcgggcgtgaggtctccgttgggggcatctgtggcagctggctgggcctcctcttcctctccctctgcgggctcagcatctggctctttttttacttcaactataatgttctcaattgcacctgtattctggtcttcaacctgaatgatagctgttggctggttctgtttgggctggttggttctgccagggggtcgtcctctccgcttcttggcgggtggtggggctggggtcacaggctgaggctctggctcaggttcaatttctacggcaggctcctcctcatcctcattgtcgtccagatctggttcagcattttcactgtcagaggaatcttctttcttagagcgcatctttctttttcttccacgtttactcttcttcgtttctcctccattttccccctctacgccatctgggccagcacaattatcagcatgtcttgccatggtattccgacgtgtaaatgttttcccacacttagaacagacaaaagccgcagggacgaagttggggtcgtgatagcgcttgaagtgcatgtcgagaagctgcttctggcggaaggtcttatcgcagtggctgcaggcgtaaggcttctccccggtgtgggtgcgcttgtgcatgatcatgtgcctctcctgtctacaagcgtaatcacactggtcacacttaaagcgcttctcattcttgtgtgacttctgatgctggatgagggcatagcgctcatgaaacacagcatcacagtaacggcatttcttgccttgctcaatataggaatgctgctttcgcaagtggacacccaaatcactttttcgggctatgactgtgtcacagtggggacagtgataatttggccacattttctgtgtgcttctgtaaaatgtgcatcttcatggtaccactttgggtaaaccgagcatgacaaatataacattcataaggcttttcccctgaatgggttctcatgtgccttttcagcttgtatgtgtccctgctggcataactgcacaaactgcactgaaacggacgctctccagtatgagagcgaatgtgacgttttaatttgctgacttctacactggcgtaatcgcacatggaacacttgaatggcttctcgtgggtgtgtttgtaacgacgatgccgaaccaattctccactggtcacaaaggccatgtcgcagtctgggcacttgtgaggcctcgtgccgatttaacaccccaggcctcttcctagtcgatg

SEQ ID NO: 133979 - DNA, 819 bp, Homo Sapiens
  misc_feature (754)..(754): n is a, c, g, or t
gcggccgcctctcaggtgttcttcttaagaatactttttatttcttctaatacctcggctgctattcactcaatggttacttttttgagtgcctactatattctggacatcttctaggcatggggaaacagcagggaacaacacatggccccacagtcaggcaacggggacagacctcaaacgtgaaaacccacccagaccagagccatccttgggcaccctgatgcctgttggactttcctatcctactttgggactcttccttcccagggccttgctcaggcccctacctggaaccaacagcctccagctgctctccttgtctgaagcgtcctcagcatgcccttcctccctgcagatcgctcccagatggctcctaaagccatcaggtggagttcagcccaggctacccagaggacaagtgaggggacccctgggggatggggagagagcggcctgagaagaggaggtggctagaaagaggaagggaggaagaacaagactgaggagtcttttaagagcgtgaaacctgaggagcaaatgtcccagaaggtttgaggaaaggttcactgggaaatgcactgcaggaaacccctgcatggcctctcaggaaaccctaccatggagatcacattaggcctgaaaatatttgcagttacatatgtttctttgaatgcaagaccaagtggaggccatcttccagggagggctggtcacaccaactgcaagcacaattttaatctgtcatccacanagcatcctagaggatggcgcctgcatacccttcctgccttgtttcctacaccccaccccacttct

SEQ ID NO: 133980 - DNA, 1199 bp, Homo Sapiens
  misc_feature (672)..(681): n is a, c, g, or t
gagtgagccaccgggcccagcctgttttctcttttctcctttccctggggaagagggttggccggacagaccctggtgtggctgggatgggggactgctgcagagaggtaacgggcccctgagatagacatgggacagcccgaaaaggtgggactgagaggggacacttgtggccagcagtgtatctctgacacagtctcaccccgcagggctcctgcagtctcgattcagggtgcttggtgttcccagatggtgtttgagggtcctgacccgacctcattctgctatagccatcagtcccctgctgtggctttggggatcagaacttcccagctagggctcccactgttggactcaggggacggaggcaggctagctgaaggggcagtgcccatgagctgggccccccgcagagcgggctcctctctctgcctggcctccacacctctactggtctccacgcccttgcatgaggtgacaggagctgaaatcacacatcccaggggctgaggcagctgtctgatttggagacttgctctgtggcccagggatccgtgcctcagcccagcctcacagggagtggggaagagagggagtaaatcagtggggcttcccttgtccacaggttatttagaaaaacagaacataataaatataccaattctttccttnnnnnnnnnngtgtttaaatgtgtttttccctgaagatttccagtgtattccacagtgtttaaaaaatagtttccccaaaaatatatcttgaaagcatttgacacagtggtatttgtggcgtatctggcgcttgtcagtgtggggcccaggcctgatgagccaccagcccagcacccgaatgcctgctgaaggtggcgcacacgtgtgcctgggatgtccggctcttcacaggggatcagactgcgggtcacgttgagagccaacaccatgggctcggttccggctgaaaacccgccagtgtgaggaagcagggccccgggtggccaagcgggctgagcaatgccctggaggctggatgggggtctcgtcctcagccccttcccctcctccgtcttggctctctccgcttcgtccttaccagacttcgcacttgtgaggcgggttcatgggtgagccaggtgggcagcggaagtgttctgagaactcccggacgcgtgggtcgacgatatcccgggaattccggaccg

SEQ ID NO: 133981 - DNA, 2834 bp, Homo Sapiens
  misc_feature (2598)..(2643): n is a, c, g, or t
aaaaaaataagtgtttaaatgtgtttttccctgaagatttccagtgtattccacagtgtttaaaaaatagtttccccaaaaatatatcttgaaagcatttgacacagtggtatttgtggcgtatctggcgcttgtcagtgtggggcccaggcctgatgagccaccagcccagcacccgaatgcctgctgaaggtggcgcacacgtgtgcctgggatgtccggctcttcacaggggatcagactgcgggtcacgttgagagccaacaccatgggctcggttccggctgaaaacccgccagtgtgaggaagcagggccccgggtggccaagcgggctgagcaatgccctggaggctggatgggggtctcgtcctcagccccttcccctcctccgtcttggctctctccgcttcgtccttaccagacttcgcacttgtgaggcgggttcatgggtgagccaggtgggcagcggaagtgttctgagaactccttggaattggagagggagccgatgacccggaagcgagaggggctgtggggatcggtgatgaggccttcgtgggagctctcaggtgtgcggacggagcaccagacctgtgcaaagcccaggaagaagagctggttattggtgaggcccagggtggggagcgagtgctcagccccgttcttcttcacccagttctggtaagcccgataggccgccttgagacccccgttgtcggcgatgttctcccccagggtgtgccgcccgttcaccggctccccgttcacgctgtagttgctgtactgctctaccatgcactcggtctgacgcttgaaggcctccacggatgagttcttccaccatggccggaggttcccgtccttgtcatactcccgtccttgatcatcaaaagcatgagtcagctcatggcccacgacgacacctatgccaccaaagtttaaggccttgggtgaggagcgtgtgtagaatggtgcctgcaggatcccggccggaaacacaatctcattcttggtgggcgagtagtaggcgttcaccatgggcggggtcatgctccactgatctctgttgggggctttcctgagctgatcggcagtgaccctccatgagaagttgaaaaaccgcatggcattttcaaagtagaggtctggaactgcagtgtagtcattaaacactttgtccagctccttgggatccatgatgaagttggggtatcctatcatgttgtagatggcatcggccttttccttggctgattttcgggtttcctcatccatccacttcagggtgctcaggctttcctcaaatgccttcttaatctccaggatgatctcggtggctatgctcttgctgtcctcggcgaaggttgctttgacaaacatggggcccaacgcaaagcccaggttgttttctgtgtcactcacgcaaaacttccagcgaggaagacaggtcttcttggtcccgtacatgactttccatgaactttctcatccggcgtcctgaaagcgctggtcagggaaggagcttgttttccgcaccaggttccagatcatgtagttgttgagcaggcatctgtcggtggtgttgatgagagtggagatctgctccaaggtattccttgtcatagaccacaataggctcgggattcattgatctccacggggtagaagatggtgttgagaaaaggcaaccagttgatggcgggtgccaaggtctgcagctcggctgccgtcactttgtggtagatgagctcctcatcacggcgcttctcctgtgggatggtgatgttggccagtgccgtctcaaagtccaagatctgctgcatctggggccggatggcctcctcgtccccgccgcccagcagcttccccagctggaccatgtagttcagatatccggtcagcaccttctcgttttcagttttgttcaggtaatagtctctcgagggcaagcccaggccagactggtccacctggatcacgttgctgttggagttcttggaatcggcactgacatagacagagaagaagggtgaggtgcggtagtgggcggtgaccacctgcagggtgtcctggaagttgtccttggcccagggacctgtgatgttccagcccccgagcctctcaatcaactccattagaggtttggccctgagctcctcgatcctggtctcgttcatgcacgcacggtagtatacttgcgcctttctctctgcctcgctcacgctggccgtggagttttcgaggaggtgcttgatgattgcttggttgtgttcccagaggttgctgaaggtcccccagcgtgagtggccatcagggactgggttggccttgatccagcccccacaggcgtagctgaagaagtcatggcaggggtccactgtggggtccatggagctcaagatggagctggtcactgagacacaagcttcgctcaggcacacagagggggatcttgtctggtactggatgcccagtgctgccaagcaggccaccagtcctgccgccagaagtaccaccaacaccaccagccgcttctccacctgggtccgtgcagcccagcacctctggccactccgggggctgtggaagttcacctnnnnnnnnnnnnnnnnnnnnnnnnnnnnnnnnnnnnnnnnnnnnnngagaccctggcttctcaccacccagctgaatggggacagctgggattggaacccaaagctgttgatgcccgagcccaccagtggatcagaggtggatcctgggagatgttggcagagatgcaaggagaaatagctccattcaggtcctgaaagggaggaaaaatccctccagcctaacagtctagctaaac

SEQ ID NO: 133982 - DNA, 1125 bp, Homo Sapiens
  misc_feature (118)..(143): n is a, c, g, or t
ccttaggaaaaacagcttatggacccatgttccaattacccttctggggccccgcgcgcccaaaacgaattggtcttagaaagcttcctcgaggggccgaggcgggccgaccatgttnnnnnnnnnnnnnnnnnnnnnnnnnntaaaagattttattagaggaaataatctagtagataactttcttacttccacaaaaacaaagtttctcaaggatacaaaccaatggatttatctgtgaactcggtcccagaatagaaactagcaaaaagtcagtacagtactcaaaaaatacttttgtggtatgaaaaaagggcaggtgcagatgtagaactgtaccatcttcagtttctgttcacaattgttttaaaacaattctcatctatccagtctgctctcccacgcctcagatgagggaagccaatggtcaatgctctgtgatagcccaagtaggatccaatctaggtaatccctgtccaccttagctctgtcctctgagggatttgccaggttgcaccacaatagttctccattctctttagtctgaacttatgctgtaaacccaaggcctggcacaggggtatgcaggaaagtttgagtgaatcagtcacaacagctctagtacagtactgcatcgatatgctctggagacctgcagcctatttttcccagagaaataaagtggagtggagatcagaagccatggcttcccccctacctcctctggtcagtgcaggctctggctcaaatactgaagaaacatgttggccagttgcggcaagttctcattgttgcggatgcattttagtgtacgaaataaactggcgacgaaggcgactcagttctgccatggtcaagggccgggtaaaccgcaagtgctctgtgagtaccaggaagcgtgagcaagtccccggggacagcgctcttctgcgcttccatcaatccggacagtacttgactcgtgacctggtccaactggtgcagaaagctagcagaacgcaggggctgggacatgcgatgcactgatggagatggatgagagccgattactcaacacggcagaccggatccccgcaagagacacggctcctctaggaccaccagagtgaataaagggcgaacaca

SEQ ID NO: 133983 - DNA, 649 bp, Homo Sapiens
ggcacgaggtgcacgggtgccggttcggccggttgcggctgcggcccgggggcgtgctgcgccagggcgttgagcaggtcgacgacgccgaactccttcagcgccgagccgaaatagaccggggtcaggtcgccattgcgataggcggcagcatcgaagggcgcgtaacaagccgacgcgagttcggtctcttccttgaggagcgaaagcgcatcgccgctgagctgcgccgcgagcccgtcgtcgtccagccccgacacggcggatgcggtcgccctcatacatgcgcgacgcatcgccgccggacttcatgatcgccggatcgacgagatcgtaaatgccctcgaactgtccgcccatgcccgccggccagttcatcgggcaaacgtcgagcgcgagccggtcggcgacctcgtcgagcagctcgaacggcggcagcccttcgcggtcgaccttgttgatgaaggtgatgatcggcaccgaccgcagccggcacacttcgaacagcttcagcgtctgcggctcgatgcccttggcggcgtcgatcaccatcaccgcgctgtcgaccgcggtcagggtgcgataggtgtcctcgctgaaatcctcgtgccctgaccgcggtcgaccattctgatgttggagcggccgc

SEQ ID NO: 133984 - DNA, 1290 bp, Homo Sapiens
  misc_feature (1021)..(1051): n is a, c, g, or t
cggcacgagggatgctaccatcctcgtgggtccctgggtttctctgatccaaagaggactgagcagtgtgtacagataatgcaggacagacagagtcaaggtatttgcaaggaaaatatggagtggggccacaggggtgcctggatgccggggttcagctctgtcttctggctttggctgcaaggtgtctccttctgactccaatattagtaataatacctgtcataattatcgtggaagctaccatctactgaacgcttggccatgccaggccacaaatagattgtctcatttaatcttcccaaaaagcctatgacataagtactataattattccccattttatagatgagtaaatggaggctcagaaagggtaagtcacttgtcaaagatcacagagcaagtggtagaggcaggcctccaactagggttcatctggctgccaagccaataatatttaccctccaccttcaggcctcctaacactaaccttttcagcttagcaggctcagatttccaattctttcggggcttccagagctatgcaatattcagcagccatttattaagcacctggtctatgccaaccactatactggatgccagggacacagcagggagcaggcagacccagccctccctcccagagctcacagcttggtcagggaagcagaggctgaatcattattgcaagggtctcagaagagctcacactgctccagggcacaggagacacatgtcatccggatgccacatttgtctttggcaaaaagaaatccacatgctgaaccaagcgaggggctcagatctctgcagcgtctcccctccctccaagcaggacagtccacaggggcaggagcttccatggggggctggcagacagagccagggtgcaagctggagagctcaggactggactacagatgttgatgccacacccctgtggagggaggggacagagcagccaaggggccagaatacccccaagctcctctccctggcatgagccacagggcccttnnnnnnnnnnnnnnnnnnnnnnnnnnnnnnngcccttcttttcctggctccaagaagccattcagtccctccccagcccccttagtattgcagattaagcaaagagctttttcacaactttgagtcctacctggctcctcatttccttcctgcctccaaccttcatgtcttgggccccaggacaacatttctccaagtgtggtccaggttccctgtctgcaggacaggggaagctttatagggaaagtgacaaacctagcaggcggccgc

SEQ ID NO: 133985 - DNA, 345 bp, Homo Sapiens
ggcacgatgagaatgcggttagttagaagcaaccaggagacacatgtgcctaacaactgggctactgcaacctggatgtttttgctgccaaagtgtctaaatggttatgtataaattgctgtgtaagaggcatttcagaagtggctcactgtgagtggtctatactgttctcaccagccttgtcatagcaagtcaaagagtttgaaattcacttaacagtaaacaccatcagcagcaggttgatgtaaggtaaagtcatgatattggctcccatctcttgccatctctcagtaggacgagtgtagagagtcacttttctcctagagcctccacagccgcggccgc

SEQ ID NO: 133986 - DNA, 1441 bp, Homo Sapiens
  misc_feature (87)..(95): n is a, c, g, or t
  misc_feature (394)..(409): n is a, c, g, or t
  misc_feature (845)..(845): n is a, c, g, or t
  misc_feature (892)..(1270): n is a, c, g, or t
  misc_feature (1364)..(1364): n is a, c, g, or t
tagggtctcacagaagagaggacatatttaattaatcttgtgaattacagaacaggttgtggtccagacaccaagaatcataggggnnnnnnnnnaaaaaacctaatagaagtagggtgacctctctctttggtctaagagttctaaaggaaggtaggcatctgtttaattagttggttcaccctggctttacctctggttaatgctttgtgttaataggaaggaaaaatcactttatcttttctttcaagcccctccctgcctgacttacccagactggggattaccagatacccaggtgatttatgtggagatgatttttcacctttaaactctaagccaagtgtaagaaactcttgatagctatgtctattttatatcagtcactgagacnnnnnnnnnnnnnnnnatttattattaagacaactttgccaaaaaagtcccctaagcacaactatttacatttctttatagcctcttctgatctctaacacatatgcagttttaactgttattttcatagtaactgatcttttgtctaaggatttttacctgaaagcacaatgtattgagtctcttgaaaatcatctttcagatctttttacagaatgaacttatgcactgctactgtagtattctcaaggaatatatgtaaacacaaatgtatgcctgaggttggtttttgcagaaaacagtctctgcttctaaaaacttctatgtctagtcttccataggaaatcctcactgtttaaccatgtgaggagcctaagtcattaaacggatcatgtctgtacattgtgtaatgaatgaaaagcacataaatgtaatctactttgaactttgtnaaaaatgatgtgtggaggctattgttgtttctcgttctgaattcttnnnnnnnnnnnnnnnnnnnnnnnnnnnnnnnnnnnnnnnnnnnnnnnnnnnnnnnnnnnnnnnnnnnnnnnnnnnnnnnnnnnnnnnnnnnnnnnnnnnnnnnnnnnnnnnnnnnnnnnnnnnnnnnnnnnnnnnnnnnnnnnnnnnnnnnnnnnnnnnnnnnnnnnnnnnnnnnnnnnnnnnnnnnnnnnnnnnnnnnnnnnnnnnnnnnnnnnnnnnnnnnnnnnnnnnnnnnnnnnnnnnnnnnnnnnnnnnnnnnnnnnnnnnnnnnnnnnnnnnnnnnnnnnnnnnnnnnnnnnnnnnnnnnnnnnnnnnnnnnnnnnnnnnnnnnnnnnnnnnnnnnnnnnnnnnnnnnnnnnnnnnnnnnnnnnnnnnnnnncgcatgaatatatgtgatcacaggccagaataggccaggatcgtcacaggctgcgtgccggcgttttcataggtccgccctctgagagcataanaatcgagttaagtcaagggggaatccgcagatataagatcacgggtcccatgaatccttcggcgtcctgttcgaccg

SEQ ID NO: 133987 - DNA, 456 bp, Homo Sapiens
  misc_feature (83)..(83): n is a, c, g, or t
  misc_feature (86)..(86): n is a, c, g, or t
  misc_feature (91)..(91): n is a, c, g, or t
  misc_feature (396)..(396): n is a, c, g, or t
  misc_feature (406)..(406): n is a, c, g, or t
  misc_feature (427)..(427): n is a, c, g, or t
ttcaggtcaaaatttctgtttattttttaaagtaatttctgttctttacaatgtgttattacacacacacatgtgcacttgcnacnacgtnacacacaggacttgagatggagaaacaagaatagcctccacacatcatttttacaaagttcaaagtagattacatttatgtgcttttcattcattacacaatgtacagacatgatccgtttaatgacttaggctcctcacatggttaaacagtgaggatttcctatggaagactagacatagaagtttttagaagcagagactgttttctgcaaaaaccaacctcaggccatacatttgtgtttacatatattccttgaggattactacagtaggccggtgcataggttcattctggtaaaaggntctggaaggntggattttcagggggctccantaccttgtggctttccgggtaaattcctt

SEQ ID NO: 133988 - DNA, 492 bp, Homo Sapiens
ggaggtgtgttcctaagaaccaaaatccagcacagcatcctgtgaagccacgtgtaatgatggtcccataaggaaagtatgtgaatatggctcttgtaaaggattaactattgtaattttagcttatgctctgtattctgttttctatggaattatttaagcccttttagtgacctttgtcctggcccatttaaaaactaaaatgtagtatatattgtataaaatggaaatatcattattgcttcattaggggaaactgtacataggcattgaaagaagggtaaaagcaagcagttttatcaggcagttgtaaaacaccaaaaatatagattcgtctttgacgtgtaacacactaaatgtattttgtacagcatctggtttaaaaggtgccttaagagtttaccattacttgctttgttctatatacagattatgtccaatgtatcattttgaagtaaataaccttattttagtataaaaaaacctcgtgcc

SEQ ID NO: 133989 - DNA, 465 bp, Homo Sapiens
ttctaaacagcttatctgcccctactgtggaatgatgtgacagacatagaataacacttacagtgattctagttcaaaatgagggaacatggaggggataaagaagtcactgacccaaaatagtttggaaatggagctgggcaaaatccagcaggagtttcttagttaggatccacagcctgggactgaccctctgtcctgtgggtctttgcctctgggctctctgctgtgcatttcttggaaccattattatttatctttttttctcgcacttttttgggtatggcttctatcgcactccaaatgtttttgagattcatccttgttgttctgtgtgtcaccagtttgttcctttagccattccatggaatgagtgtatcacagtttattgatccattcttgtattgacagatacttgaatgttttcagttttttgtattatgaataaaactgctatgaacaaac

SEQ ID NO: 133990 - DNA, 727 bp, Homo Sapiens
gcggccgcatcctgatgaacggcgtagacgtcacccacaagccggtgcgcctgcgcaacgtgtcgatggtctaccagcagttcatcaattacccgaccatgaccgtgttcgaaaacatcgcctcgccattgcgccaggccggtgtgtccaacgaactgatccacagcaaagtgctggaaaccgcgcagatgctgcgcatcgagaagttcctgcagcgccacccgctggagctttccggtggccagcagcaacgcacggccatggcccgcgccttggtcaaagacgccgagctgatccttttcgatgagccgttggtaaacctggactacaaactgcgcgaagagctgcgtcaggaaatgcgcgagttgttcaaggcgcgccataccattgccatctacgccaccaccgaacccaatgaagccctggccctgggtggcaccaccaccatcctgcacgaaggccgggtgatccagagcggcagggccgccgaggtgtatcaccagccccagacggtgctggccgccgagctgttttccgagccgccgatcaacctgatgccggggcgtatcagcggcaatgaagtgagttttgccaatgtcgtgcacttcccgttgaacgtggatctgcgtcccatcggcgaaggcgagttccgttttggcgtgcgccccagccatatcagcctggtgccgagcaacgacgatgaccctcgtgccgattcttgggctcg

SEQ ID NO: 133991 - DNA, 1289 bp, Homo Sapiens
  misc_feature (44)..(44): n is a, c, g, or t
  misc_feature (53)..(53): n is a, c, g, or t
  misc_feature (111)..(111): n is a, c, g, or t
  misc_feature (169)..(169): n is a, c, g, or t
  misc_feature (172)..(172): n is a, c, g, or t
  misc_feature (199)..(199): n is a, c, g, or t
  misc_feature (405)..(405): n is a, c, g, or t
  misc_feature (1141)..(1175): n is a, c, g, or t
  misc_feature (1179)..(1219): n is a, c, g, or t
  misc_feature (1275)..(1275): n is a, c, g, or t
tcgttctttcctgccaacgtctcctaacaccggccggcgtcganatggcgtcnagacgactcccccctcaaggggcggtccgcgggcaaaacccgcgaagggggggagtcngtgtgtgtacccgccaccgcacacagacaaaagcgcgaggcctttaataatttccccngancccgggcaccccctggctatgcccatntgtgtttatgtgagcgaataatctgttaaggggggcgtcttgcacgggttcggccaaaggtagttccaggggattaacaaacgtgcccaatacaatgaggttacaattcccaattgggtgggttcatggcataaggttaccctttttaggaaaaaaaaggcttttaattcaaaaaaaccccttatatgtttagtaaaaggtttaancttaaaagggagggtataaaaaaccattcccagaaaatatttattatgctactctttgtactatgtatgggaacagtatgtttgttaagtccaagagaaaagataattcactgacatgaaacacccaaatgtcttcattttaaaagtagtttagagatagcatcaggtaggccaaacaactgtactgggcccctgtagagattagggtttggtctattaaaaaaaatctttgcttgctggaactgcaagcttggcttccctgcaagctcaataggttctggagctcatttaccatgtcgctcgctggatcccagaaagttgcccatggtcagctaagtgacggaagactatacgactaagcctccagcgccgcttcacaccacgcggacgggacgtcataacacaccgatttctgattctaacaggacagctatcccgggggagggcagcaatttcttcatcagccacatcctgaagaatttttggcaaaatggtattcttcctgagtgaattaatacgtagcctctcatctgcgtattcataggccatttttcgtctcttcacatcgcgccacattctccagtctacatagtgacttcgaacttggcctgaagctgatgaaggaaccatctgcttgaacgtccgcagcagcgagcccagcatgaaggccgccatgttgtccgcccccggccgtaatggccgaattcccgggcatatgtccggtaccgtcgactgnnnnnnnnnnnnnnnnnnnnnnnnnnnnnnnnnnncggnnnnnnnnnnnnnnnnnnnnnnnnnnnnnnnnnnnnnnnnngagaggcgagctagcgccctatagtgattagtggttgacgggcggtgggttacggnggggcgcgcggcgg

SEQ ID NO: 133992 - DNA, 656 bp, Homo Sapiens
ttttttaactacaaaaataagcactttactaacaacaggattctcagggaatgggggctttcagaggtgtcactgggctgcactgttgaggctgtgtgcatcagtggagatgtgagaccgaaagaaattatccaggacttgctggcccatgcggggctttttccgactgcacggagaggacacctgggaccttttggaacccatacaggtccctggctgttggccctgatacacacggaaaacctttttcatggcggtggaaacagctgcggtgtgaaattcctcctgcgtcagccagcgagcacctggtggtacggtggtcactggggtctgcccttccaaggccagcccatatacttgatatgtcagcttgatgtgagagaaggtgtggacaacctccccaaggtgccggaggtgcgtggctgggaggggcccagcccaacgctgtagttcctgcagcagggccttgcgctgaagctgctctgagggctcccaggtcacggacgggaactcccacagtcctgccagcagacctgagttgggcctctgcaccagcagaatttgggccccaagggccccaggctgttccagaacacaggtggcagagctctcctccctggggggcttgcggctggctttctggggaagttgacact

SEQ ID NO: 133993 - DNA, 1013 bp, Homo Sapiens
gcgtttaacatttttatttttaactccgctttggtagtacaaaagtcataaaagtacaaaccagacagttaaaaatacacttgacactcgaaatggtgaaaattttccttacaaatttttacatcaaggtagtagccaactcattgatgacaccaaaaagttgtccatcattagtgttttctagagaaagtctgttgtggattccctcatccttagaaaggaggaggagaaacacaagacctgtaaacatcagttgctttgggaacacaggaattctcatcagatagttcagtataaaccagtaaaaagcgtatgtgttgaaaatactgaacgcttaattttggcaaatttggaagcctgccagacaaaaaccgctcaagtatttattagaaaatatgttaagacatactcttggtatcaatacagttttaaatatttttgagtattctcttgcctgttgtattgctatttaaaaaaaagtgctctgacttgaataagatggaaaaataattaaagctaaagaatatcttacattttatcccccaccattttgagggcatatttttaaagcaaaaaagtatgcttatttgtttttaattaaaatgattagcctagactgcacatatattatttacactaatacatacccctaaaagtcctatattgctactttctggatctcagtgaaatttatttccatactgactttctccagtccacagtgtatatgaatatgtacacatacagtgtttattagttgtcagtaaaaattctcatgaaactaaattccccatttatttaaaaggttagaaatgtttagtttgatgctggaaataaaatcattgaagtctatgtacagtaaatactttgaagtatatttttatggaaatcatcttttgggagacaaatgaaagatgtgcattttcctatcggacgcgtgggtcgacgatatcccgggaattccggaccggtaccgcctgcttttttgtacacactgttcatagtgtacatgc

SEQ ID NO: 133994 - DNA, 896 bp, Homo Sapiens
  misc_feature (469)..(523): n is a, c, g, or t
  misc_feature (818)..(826): n is a, c, g, or t
gatacccacatgttttcaacataataccagtctgcgtgacaatactcctacagtaaaatctcgcttgcgccacaaggaatatccccccctttcacacccttaccgtttttcctctactagtggtgttcggctcgttcgtgtctcgtctatccttctccgctttgtgtagacacttgggttgctgaagcttcattgtgacagctttttttggaaggtggcacagcactcttcctgttcgtgcccctcgtgtatatttagataagccttatttaaacttatctttatgaaagagttgcgttgcccccccttaatgtgttcacaaaagtttcagactggaatttatagcccctaattttagcaaaacacatttgtgaacactctaatctgcgccactttttggtacccggaatccccgcactgtgggtaagattacttggatctaatcgttaaaggctatcttgccaattgnnnnnnnnnnnnnnnnnnnnnnnnnnnnnnnnnnnnnnnnnnnnnnnnnnnnnnnttgtttatagttgcacaattaacctcttggctgctagcttgatgccaacatatgtaaccatacaccaatttaaaaatttttttattctacataaaagctgtcaaagttttgacacatcaaaaatgcaaaataatggaatatactttaaaaaaattagttgcaagtctagcagcaaagcaattaagtgagaacatatttaatattaaaacaaagggaactgtgcatctatagatgaagtcccactaccttaattctactgatacaaacagaaattaaaacattctcccttgagggnnnnnnnnngtgattatttaaaatatgagcccggccgtaatggccgaattcccgggcatatgtccggtaccgtcgactg

SEQ ID NO: 133995 - DNA, 1186 bp, Homo Sapiens
  misc_feature (456)..(456): n is a, c, g, or t
  misc_feature (471)..(479): n is a, c, g, or t
  misc_feature (1154)..(1154): n is a, c, g, or t
tttgagttttaaggttttttgatggccatgagatgtttatagaaaattgttacaggtgtggcgtaacaatcgactcgcagtgccttatcttgtaagaagcctctcctggaataaagacgccagagtactgcgacaccgtttcatgccttcatggaagagtcggccctctactccagtacgatgacacacaaaccctggctgcactggggattatgggatcggcttctctgaaactctcttactttttaaaaatcctgtagaaggatcaggtaacaggaaaatggccggtgaattctgtaaaaggaagtgagtagaacttgtccttgagaactggtgttgctgtgtttcagttctgtccagttctccctggtgaccttttcctcccttgattagttccatggcactgaaggctaaggaaaaaagggagcgggtgggtccaggaggggactgacctangagacaggctgatannnnnnnnnacttttagacaagtaagaaatgaaaaaatgtgcaagactattccctcagcaaatgctcccttcaggttcgaacttggaacttcccagctttggtcatgtattttatgcccttaaagggtttgtacttttctccatacatatccagacgattcaccttgagtccagaaatggccaagctgctggatcttaaactgcaggttaattgtggggttttcatctggtttggaagctccagcctgaagactcatggtccccttcaaacttggtagcttttgtggatttatttttcctacatcccaagacagcatctttgtgactgggtcgaatgtgtgtgtcccctgtgatggagtaaggctcatgttcaggacccccttgggcatctggctggtgacagtcactccctcaatggtcttccccatcgtctgcttgggtcccaccgttatttcaaagcgtccaagggaactactgtcccggaaactgatgttatgtttgacatacactgggattgcaaccagattctgtgcactgacatggtaagacagcaggcggaagtttccatcaggagggatgaaggagaggatgcgctcagattcccagcgtttgaaacgaacacaaggatggaagctgacatcatccaacaacctagggttcatgaaggaaagtgtaaggtctggncatgcagtcagcttgacacaggcatcaaatca

SEQ ID NO: 133996 - DNA, 1698 bp, Homo Sapiens
cacaggccccaagaaccccaggtggaaggagggctgagtggcagcgcctttatttgtgggggccttcaaggtagggtcgtggggggcagcggggaggaagagccgagaaactgtgtgaccggggcctcaggtggtgggcattgggggctcctcttgcagatgcccattggcatcaccggtgcagccattggtggcagcgggtaccggtcctttcttgttcaacatagggtaggtggcagccacgggtccaactcgcttgaggctgggccctgggcgctccattttgtgttccaggagcatgtggttctgtggcgggagccccacgcaggccctgaggatgttctcgatgcagctgcgctggcggaaaagcgcattgaccaccgggctgccgggcggcactagtggcgccttgaagaggaagctgagcagggacagcacggggtggaaggtctgcggctcggggtccatgtcagtgcagaagctcacgcgctggcacagctcggtcagcagcgctaggtccagcatgatgggtgcggccagcagcgagtcctcacacgtgttgtgcagcaccagtgtgttggttccgcccagcatcagctccgaggtatactcatccagcgcgcgcttgctgtcacccacgtacggcacatacttgatgacacgcagtggtcaggctcttcgccgggcgtatagagcactgggttgctctgcaccatgtcgtccaccacgttgctcttggacacctccttagagcggaactgcaatggcgccgataggttctccccatcgttgttgcccaggtggttgtaactcacgatggacatggtcttgaggccggagccaatgaggaagtccccaagcacggacttgactttggtctggcctgacttgaagtcatctccgcccccaaaaccccggtgctgccacgcgagctcaagagctccgggcaccagggtgttctgcggagacccattgaggaaggcacagccctccaggatgctggccacggcgaagagcgtggagggcgacacctccagaccgagctcaatggtgcgcagcaggttctcggctgtgtcgttgaggcctggaatcacctcacagaagcgctccgtgttcgccgtccacagcactatgactttgtccagccccgcgctagaccggaagtctcggatgtccctgcggatctgctccagctgctgcgcacgcgagcctgggatgaggttgtccgcgcgcgcgctctggttggccgcgatgaattcggggatgtaaacagaaggccggggccgcagggcctccatgtgcggccacagttgctcctgcagcccccagtccagcaccttcgcgcgccgcatcgcctcggccaggttcagcgacgagatgtcccagccatcgaacacgaggtcgttgggcgccaccatgggcagcaccgcgctgaagggtacgaacacctcctggccctcggcgtccaggcccaggctcacggtgcccgcctgagtcagcgagccgtagtagttggcctccttgagaacgccaccctcgcggctgacgcgcgtcgtccggtactcgtattgcgcctcgatggcctcggggccgtagaccacgtccgggctctcgacgaagaactgggcggcggcctccattcgcggcgggcggcgcagagtcgactcaggcagcggcgatcccgggaattccggaccg

SEQ ID NO: 133997 - DNA, 642 bp, Homo Sapiens
agttgctcctgcagcccccagtccagcaccttcgcgcgccgcatcgcctcggccaggttcagcgacgagatgtcccagccctgggtgggacccgtcacacgtcggccctgcccggatcctgggcccctcccagaccccatctgcccatcgccgcgcccacctccggtcccagggctccgcccaccatcgaacacgaggtcgttgggcgccaccatgggcagcaccgcgctgaagggtacgaacacctcctggccctcggcgtccaggcccaggctcacggtgcccgcctgagtcagcgagccgtagtagttggcctccttgcggccgctgcgcgtgggccaggacaaacgcagtcgattggccagcaccgcggcggtgagtgtggagccgttgttcccgccccagccgacaagcatgaccccgagccggggcacctgccgggcggtccggaaggtgaagcgcgtggacgtggggtgcaccttgagaacgccaccctcgcggctgacgcgcgtcgtccggtactcgtattgcgcctcgatggcctcggggccgtagaccacgtccgggctctcgacgaagaactgggcggcggcctccatcgcggcgggcggcgcagagtcgactcaggcagcggcggcggac

SEQ ID NO: 133998 - DNA, 598 bp, Homo Sapiens
ggcacgaggcccttgccgccaccactggtccgacatcgtcgccgacaaagacctgctgcgtaacgagtacaaacgccaggcgcgcaaagccggcatgccagtcaccatcgacccgcaaatcctgcaccaacatgcgcacccgttgctggccgcttggggcaaacagggccgcgactacattagcctgctggacagctacgacgaccccaacagctaccgcgccgccttccgtgatggccgcatcgacctgttcagcgacaacgaacccaccacgttgctcaaccaattgcaggacgacatcctcgaactgcgcccactcaatgaaacccgcgaactgtggccgggtgtcgatctaaatcacgacagctccatccgcttccacgtcgcccacagcgcccaacgcgaagtggaaatcctccatgaccaattgctccaacgcttcagcgccgaccccacactgcgcccgcgtgacatcatcgtcatggtccccgacgtcgacagctacgcgccgcacatccgcgccgtcttcggccagcttgagcgaaacgacccacgcttcatcccgttcaccctcaccgaccaaggccaacgcggccgc

SEQ ID NO: 133999 - DNA, 932 bp, Homo Sapiens
  misc_feature (95)..(104): n is a, c, g, or t
ttaatgatacagaaaattgtttatattaattttgtttgcttacttctgcatttatattttgttccactagtcctcagacttcttcagtgaataannnnnnnnnnctccaaaattaagataagttctttgtttggagctatgtaccacatcctttcaggtgttcttctgaattatatttaatctttgataatgagtgaaaagcacagacattcctggagtaagacatctatgtgttctctcctagatgatcctaccagacaatatgaaggaccattacatcactatcgaccacagcaggaatcaccatctccccaacaacagctgcccccttcttcacaggcagagggaatggggcaagtgcccaggacccatcggctgatcacacttgctgatcacatctgtcaaattatcacacaagattttgctagtaatcaagtttcctcgcagactccccagcagcctcctacttctacattccagaactcaccttctgctttggtatctacacctgtgaggactaaaacatcaaaccgttacagcccagaatcccaggctcagtctgtccatcatcaaagaccaggttcaagggtctctccagaaaatcttgtggacaaatccaggggaagtaggcctggaaaatccccagagaggagtcacgtctcttcggagccctacgagcccatctccccaccccaggttccggttgtgcatgagaaacaggacagcttgctgctcttgtctcagaggggcgcagagcctgcagagcagaggaatgatgcccgctcaccagggagtataagctacttgccttcattcttcaccaagcttgaaaatacatcacccatggttaaatcaaagaagcaggagatttttcgtaagttgaactcctctggtggaggtgactctgatatggcagctgctcagccaggaac

SEQ ID NO: 134000 - DNA, 634 bp, Homo Sapiens
tttttcagttaaaatagtttaataaaagcaacaaaactgtgctaacgatgagaatcaaaaatgagatattaggtagacttataaaacaaagtatagttattttttgatttcaaataaaccatgtgcaaaattgtaaaatgccaatgtgtctgagaaaagcattaacagtccttttagcaatttatatataaagatgtttttaaagtgccacagcttaaggcattatattttaaagtttaataaacatctaatttcaacatctctccaagaacagacttcttctcaataagctataaactatttggttaggaatattgaaaatgcatgtataatttaaggagtaatatacttgttaatgctgagttattagtgcaattcaaaagcatatgaattccatatcaagaacaaactctcccgcccaaggtacagtgtaatccacactgtatcatctcatctaaaaatctatacagcagctaccccatccactcagttcctctgcagttaggctattagcttttctttttcaaaaagcaaaaattcctaagacacctaaagattagcctgtatttcatttatttatacggaaagtgcttagtaatatttctaaaaaggaaaagcctacagccgcggccgc

SEQ ID NO: 134001 - DNA, 778 bp, Homo Sapiens
atgccgatcctacgacccattgccacattgcgcccgccgggatctccgccaactgccacggcgtgagcaacgcaccaggatgatcgccagcaacgagccgaccatatacggcaaaggccagccgacgaggctggccaggtaaccgccggccaggccgaccagcggtgttgcccaccattgtttaaaggtgacctcagacatcggccagggcgcgacgctgttgggcacgtttacgccagatacgcagcagcggcacgaacaacatgatcgccgtcagtacccacacgccaaaggtgatcgggctggaccagaggatttccagcgcgccgttggagatcgacagcgcgcggcgcaggttctgctccatcaggccaccgaggataaagcccagcagtaccggcgacagcgggaagtccagcttgcgcaggatgtaaccgaagatgccgatgccgaccatcaggaacaggtcgaaggtggtggcgtgaaccgcgtacacaccgatggcggtgatgatggcgatcaccggcaccagcgcccagttcggtacggcgaggatgcgcgtgaagatgcggatcatcgggatgttgaggatcaccagcatgatgttggcgacaaacaacgaagcgatcaggccccagacgatgtccggttgttgttggaacagcagcgggccgggggtgatgttgtacagcgacagggcgccgatcatcactgcggtggtgccagaacctggcacgccgagagtcaacatggggaccagagcgccacaagcggccgc

SEQ ID NO: 134002 - DNA, 594 bp, Homo Sapiens
gcggccgccagatcaatcccggggccggttttgatctggatcaagcattgctcaaagagtagtcccattttcggacgaaagccgtgtggttcattgacgcgtgacaggttgtctcagctcagttcttgcaactatttgttacagcttgatgctaatctgcctgcaccctctgctccagacctgacttcccgatgcccagtgaacccgcattgctgttgcgccaccaccgccctttcatcgcgttctggctggcccggatctttaccgccagcggtttccagatgcttaccgtggccatcggctggaacctctatcaactgactggcaacgttctggacctgggtttggttggcctcgtggagttcgtaccacgggtgctgttcatgttgcacaccgggcatgtggccgatcgctatgagcggcgcaaagtcgccgccatctgccagaccgtgcaggcattgattgccttgtccctggccatcggcggcctgaccggcaacgtgacccgcgagatgatctttatcctcgcgttcctgctcggcgccgcacgctcgtttgagatgcccaccacccaggcgcctcgtgccgaattct

SEQ ID NO: 134003 - DNA, 913 bp, Homo Sapiens
ctttgctcacattttgttttaaccctgaattacttatgatgtctgttctcaaagtgtacttagggtttgttttaatcagatataagacatgctgacacaaaaatgactgtcatgaaggaagaagtccgtactcacagatccctagaaacagtagacactgcacaccatgcagggccatgtggggaatgaccagggtaggtcaggaggtgagacgaaagagcatggcccaaatccttgttggctatttattgaaaaggaatgagaaaggcagggtaggtacactaagtaagcttaggattggatagcttgaataattttgcaggactctgggctataggaactgtccctagttgtctgatacctggtcctggggtgatttagggcaggagaatattaggttgatgtgtaagagagtttgataaaggaaatggttaggagcatgggctctgcattgtttggcttgtgtgtatatgaaaagtgtacttgcaggagggtcatttgctatctctaggaattagctagctctgggaggggcaatctctccaggatcaaggcccgagatgccagagaatcaaggtcacagaaaaaacagtaaatgtcgtgtatcacaatatcatgttcttttttccttccccttttctcctgcagcttcctctatctgaaatccttctcccatatacttctactttttaacttatttttatattttacaactcagttaagttacaaattcatctcagaagccttgccagatcactcttgctagacctagactgggaaattgccactccagggtgttcacaagatattgtaagcataattctatcaccctttgtgtcatatttataagtgtatcttatttctaagtcttaattataaatatctgttacccaccatacaatgaacttcttcg

SEQ ID NO: 134004 - DNA, 411 bp, Homo Sapiens
tgagtacacattctttaattaataaattaaacaaagaatagatgaaaagataagtggatgaacggatcaatttttaagtcatggcacagaaagtcaaatattccatgttctcactcataagtgagtgctacaaaatgtgtacacatggacacagagagaggaacaacagacagtgaagactaagaagagcgagggagcagaagggggaggtgaatgatgagaaattacttaatgggtacaatgtacactgttcaggtgataaataccctaacggccctaacttgaccattacaaaacctacacacataacaaaactgcatatgtactccctaaatttgtacatcacaagatcaggagatcgagaccatcctggctaacatggtctcgatctcctgatgttggagcggccgc

SEQ ID NO: 134005 - DNA, 1376 bp, Homo Sapiens
  misc_feature (1325)..(1325): n is a, c, g, or t
agggatttacgggggaacaatcgcgccccccgggcctttggtaggtgtggtaagggtctattttccaccgaagaccattttttcttgggcatcaatgcgcgccacttcaaggaccacccacccccatcttcggctgtgtagggtccaggagtcgcggatttctaggtctcctctgggaggtttcgcccaggctctgtcgtgccccccttaataatctggttgcccaaccccagcagaggcagggcgccccggtgtttccccgccaggagcagcagctggggccgccagaacttcacgtgatccttccggacgtccagccgaagcagatacttacgcacctggtggaaaagcaaggcctggctgacatagccccagctactggggcctcctcgcgcggtgagcagggcagccagcagacccatgaggagcagggagccaccagccgcgccaggactgatgaggaacatcatgagcaggcaggaggccacccccagcaggcaggtgtgccaggagaacaggctgaaggtggggcggaagttgggggccgaggcccactccaggctcaggcaggacaggtccacggcagcataggccaccagggtagaagacagtgaccacagcggccagtgtgttcagcttcccagccaggagcaccagctgcaccaggccccaagaataaagtacagctgcccaggggtttccccctcgggacacaaccttggccggtgccaagatcacgccaaagaggtcatcccgggccagggcatggaggatgcgggaggcaccaatgagcgagctcatggacgctgagagcgctgtggcatagattccgatcaacaccagtgggggccacaggctgatggcgcggaagaacccatagtcttcctgcagcagggtcctgtcacaagtgaagctggagagaaagaaaagcaggacatagacgaagaaggtgtaggcgacggcgacgatcgtgcccagagggatcgcccggctggggtccttcagctcccctgacatgttggccccagccatgatgcctgtacagccgttaaagaggacagcaaagacgctggcaaaattcatcacggctcccgtggtgtagtcctcagcatagccagcgcccaagttgtccttcagggtactgctgttgaagccggtgaagtggccaaaccggggcggcagggaggagccattggggccaggcctaggagtcaagcggatgtccctcggccccacagccacaaaactgatgagcacagaggccagggagccagagaccagcaggaatgtgaggaatgaggcccgggcatagaggccggctcccnagggtgcagaccccacccacaaggcccagcagcagggagccaggcggccgc

SEQ ID NO: 134006 - DNA, 570 bp, Homo Sapiens
tgtgtgtttgtgctggagggaagggagctatgagtgtgtgtgttgtgtatggactcactcccaggttcacctggccacaggtgcacccttcccacaccctttacattccccagagccaagggagtttaagtttgcagttacaggccagttctccagctctccatcttagagagacaggtcaccttgcaggcctgcttgcaggaaatgaatccagcagccaactcgaatccccctagggctcaggcactgagggcctggggacagtggagcatatgggtgggagacagatggagggtaccctatttacaactgagtcagccaagccactgatgggaatatacagatttaggtgctaaaccatttattttccacggatgagtcacaatctgaagaatcaaacttccatcctgaaaatctatatgtttcaaaaccacttgccatcctgttagattgccagttcctgggaccaggcctcagactgtgaagtatatatcctccagcattcagtccagggggagccacggaaaccatgttcttgcttaagccattaaagtcagagatgaattttgg

SEQ ID NO: 134007 - DNA, 1091 bp, Homo Sapiens
  misc_feature (59)..(59): n is a, c, g, or t
  misc_feature (61)..(100): n is a, c, g, or t
  misc_feature (103)..(137): n is a, c, g, or t
aaaggaagaaaaaatcttgtataaatttgagcgcctcaactatgggcgctagcgggtantnnnnnnnnnnnnnnnnnnnnnnnnnnnnnnnnnnnnnnnncgnnnnnnnnnnnnnnnnnnnnnnnnnnnnnnnnnnncagtcgacggtaccggacatatgcccgggaattcggccattacggccggggacactcggtcccgacatgatggcgagcatgcgagtggtgaaggagctggaggatcttcagaagaagcctcccccatacctgcggaacctgtccagcgatgatgccaatgtcctggtgtggcacgctctcctcctacccgaccaacctccctaccacctgaaagccttcaacctgcgcatcagcttcccgccggagtatccgttcaagcctcccatgatcaaattcacaaccaagatctaccaccccaacgtggacgagaacggacagatttgcctgcccatcatcagcagtgagaactggaagccttgcaccaagacttgccaagtcctggaggccctcaatgtgctggtgaatagaccgaatatcagggagcccctgcggatggacctcgctgacctgctgacacagaatccggagctgttcagaaagaatgccgaagagttcaccctccgattcggagtggaccggccctcctaactcatgttctgaccctctgtgcactggatcctcggcatagcggacggaacacacctcatggactgaggccagagccccctgtggcccattccccattcatttttcccttcttaggttgtcagtcatcagtagtgtggtgtgtgtcgtggagggccagggagctatgaagtgtgtgtgtcgtgtaatggactcactcccaggttcacctgggccacaggtgcacactttcccaaaccctttacgttccccaagaagccaagggaagttcaaggtctggcagtacaggccgttctccaagctctccatcttacagaaacgggtcacctggcaggctgcttgccggcaatgaatccagacgcaattgaaatcccctaggctcaggcccttagggctggggacagtgggcacatgtggggcaccatgggg

SEQ ID NO: 134008 - DNA, 930 bp, Homo Sapiens
  misc_feature (111)..(111): n is a, c, g, or t
  misc_feature (813)..(847): n is a, c, g, or t
  misc_feature (906)..(906): n is a, c, g, or t
agggtgccacccccgggggcccaggggaaccctggggagtgaattcccattacccaaccacccccccgttcaataggttcctttcccttccaccaccgcacacacacaaanttaatgggttaacaacctaagaaggggaaaaatgaatgggggaatgggcccccagggggctctggcctcagtccatgaggtgtgtccgtccgctatgccgaggatccagtgcacagagggtcagaacatgagttaggagggccggtccactccgaatcggagggtgaactcttcggcattctttctgaacagctccggattctgtgtcagcaggtcagcgaggtccatccgcaggggctccctgatattcggtctattcaccagcacattgagggcctccaggacttggcaagtcttggtgcaaggcttccagttctcactgctgatgatgggcaggcaaatctgtccgttctcgtccacgttggggtggtagatcttggttgtgaatttgatcatgggaggcttgaacggatactccggcgggaagctgatgcgcaggttgaaggctttcaggtggtagggaggttggtcgggtaggaggagagcgtgccacaccaggacattggcatcatcgctggacaggttccgcaggtatgggggaggcttcttctgaagatcctccagctccttcaccactcgcatgctcgccatcatgtcgggaccgagtgtgtggcacccgtggcctccagcaggaccgagctccgacccgcccccggccgtaatggccgaattcccgggcatatgtccggtaccgtcgactgnnnnnnnnnnnnnnnnnnnnnnnnnnnnnnnnnnncggccgcttcctcgctcactacttcgctgcgctcggtcgttcggctcaagcgagctagnccctatagtgagttatcaaagtct

SEQ ID NO: 134009 - DNA, 966 bp, Homo Sapiens
  misc_feature (714)..(714): n is a, c, g, or t
  misc_feature (719)..(727): n is a, c, g, or t
tggtgatatagacaagtgtgtcaaaaaagcaggctggtacggtccggaattcccgggatatcgtcgacccacgcgtccggtcccgacatgatggcgagcatgcgagtggtgaaggagctggaggatcttcagaagaagcctcccccatacctgcggaacctgtccagcgatgatgccaatgtcctggtgtggcacgctctcctcctacccgaccaacctccctaccacctgaaagccttcaacctgcgcatcagcttcccgccggagtatccgttcaagcctcccatgatcaaattcacaaccaagatctaccaccccaacgtggacgagaacggacagatttgcctgcccatcatcagcagtgagaactggaagccttgcaccaagacttgccaagtcctggaggccctcaatgtgctggtgaatagaccgaatatcagggagcccctgcggatggacctcgctgacctgctgacacagaatccggagctgttcagaaagaatgccgaagagttcaccctccgattcggagtggaccggccctcctaactcatgttctgaccctctgtgcactggatcctcggcatagcggacggacacacctcatggactgaggccagagccccctgtggcccattccccattcatttttcccttcttaggtgtggtagtcattaaattgtgtgcgtgtgtggtgggaaggaaggcactatnaaatnnnnnnnnnttgcgtatggactcactccccaggatcacactggccacaggtggcaccctgtcgcacacctctttacattccccagagccaggggggaggtttaagttttgcaggttacagggccatgttctcccagctctccatcatttaagagagacagggtcacccttgggcaggccatggtttgcagggaaaaattgatttcgaggcagcccaactccgaaattcccccctaaggggtcaaaggc

SEQ ID NO: 134010 - DNA, 725 bp, Homo Sapiens
gtcagtttatattttcttttatgtagatattatgggctccagagtttaaattagtatttgatttcacattacgaaaccattataaaaaagtctcaaattaagataatttaaggtgatgaacacacaaacgtacactttgaaaggagaaggcaatgaaaacatgcattccaataaagggggaaaatgaggctgatgtgcaacatagttggggaaattggtaagaagctttctgttaccacacagttgagtagttctaaaaaaacagagatatggtagaaaaaggagaggaaattttcattacaaaatcaatagttacaactaaaagagaaacatgtacacaaaatatatccatcagtacaatgatcacacttaatcttaatcaatgcctagaggagatcctgtggagagggcttttgagtagcattttacttcattcattcctttggggtcagcctccagatggactcctggggctcttttagaggaagtgttcagcatattggaagaatccaggtcagcacaggaatgcgtcacaggcactgctaaatctacatctgctactttcacagagacctgccctttcagaattcccagtttctcactgagttcattcctttctatttgaagagccttgtacagcttctctaaccgctccaattttatttgaaagaccttataatttttatcacgaatagttttctcttcagccatttgcagaagtgttt

SEQ ID NO: 134011 - DNA, 912 bp, Homo Sapiens
  misc_feature (716)..(716): n is a, c, g, or t
ttttttcatcattcagaagtttttaataaacaacttcattataaaaacctttttttgaaaatgtaattctgtaaaacattgaaaaatctactttaacaaagatatgccctgtgcattttctaatggcacttatactttacaattaaaaaccttgttttatataaagccaaaaatactccaagaggttattcactgtgtttacaaagtgctagaagatttctgtcttgtacttttctctttaaataatctggagttacaaaagagtggctccaaagccttgaccgctggtagggagggagaagcatgagaagtggtgtctcaggagttctagtgccaaaggtggagaggtgcaagtgggaacaatcagctaaggaagtcagctgacacacaaagaaatcggactggaatttttccaaacccctctatggaggcactaggttatcatggtgaacacccttttccctcgccatagaccctactctccagaggtgaaggtcatggccaattccttccacagcaggttcagagttccaggagaggccagggtgggatcccagaggaatctggacttttctggccaacacctgcctaaggcaaagtttcttattacataaatatccttgttaaaaagcaaaatattgatcctgtacaatataacctgttaaaaaaatcgtgcttacaaacagctcctagataagagggcaggtggagagagnacggacggagaaaacagctaccaaaaagggaggggggagtttaaaggactactagggaaagttttagggcagtgggagaattccaacttaggacaatatctacgagcaaaaaagtaatcacacctgcttcccggattttcaattaagaaaatgccatttgtaaaaggttgggcggtgggctggagggcggactggt

SEQ ID NO: 134012 - DNA, 949 bp, Homo Sapiens
gcggccgctcgccgccacgcagtacaccaaacactgcagtggccagcggcagcaggccaatgaacacgatggagtgcgccgaggtcacgtattgcagcgccagtgccgtgagcagtggaaaaccgatcaccacacccagggcgacgatcaccagcggcccccattggtggcgtgcagggcgtttttccctgaacaaccacaacaacagcacgccgagcacggcggcaatggcggcgcggatcatggtcagaaacaccgggttgaactccatcaccgccaggcgcgtggctggcaaggagccgctgaagatgacgacgccgataaagccgttgatccagccttgggcgctggtatccggtgcagtgaggcttgcggtgcgttccatggtgagggctcgaactaggtggttgcgtaaacaccatcctaggggccaggattaagacaatcaaaaaattgtcatggatacatcgcctatgccgcgcgcccgctacaagtcgctggtcgacacctttgcccaagacatccgcagcggcgcactggcgcccggcacacgcctgcccacgcaccggcaattggcggctgaacatggcctggcgttggtcaccgcgagccgggtgtacaccgagcttgaagccatgggcctggtcagcggcgaaaccgggcgcggcacctttgtgcgggaaatcgcgttgccgccggggcagggcagtgggcagatgaatgtggccaccggcatgcttgacctgaatttcaattacccctcgctgcccggtcaggcagacctgctgcgcaccgctctgcgccaattggcgctgtcgggcgacctggaagcgctgttgcgttaccagccgcatgccggtcgcctgcatgagcgcgctgccgtggcacggtatctattgagccgaggcctggcggttgaggcggagcaggtgctgatggtcagcggcgc

SEQ ID NO: 134013 - DNA, 1204 bp, Homo Sapiens
aatcttattttggggaaaaagataaaaatcccctttttccaaaataatgttggaccagaaaaccacagggtaattccatttttaatatttggggtttcccacggaaaggaacatttcgctgaaaattcggttgcccaagggttttaattttccaaagggggttcccacttaagggaattttttcggaaatgtttttaaagattgggctgtagcctaggagttttggattttccaattaggacccctggctttcccttcacctgtttggaagggtggttttgatttttggccatctttataaggaatgggttgcccatctccttttctctccatggaaattctttccactgctccatatagtttttaaaataaccctgattatttccaaaaatcttttccatatccacaggaaagctcaggcaaacccttgcctggcatctttctgcctgtacaacacaggctacatgtaggcaagctaaagctatcatgaaaggaggatacagtaggcaaagatccgttctgtaggtatcattcactatcctccatgcaaggggaagcaacatgtcttcttggcccatgtcctgcacatactggagcaaaggtctataaggatgatacactatcaagcaacaatccattagttctaacagatagaattcacattctaatatatgattcatcctataaggaaattcctttggaaaggcatatgaaaatctagtttttaatacagaagtagcagcagcaatcaatcttgtatttgaaactactccaaattcctctactttggatgccaaaaacacacatgtaggagccattaatacaggatctatacttttcagagaatacctggcatagaatctcttgaaatataccgtagcagtggcaataacttgttgtcttaatttaagatgttcacctaatgcttggataacatttgtaaaaaatatttgtaacttccaatattcttcctctgagagaaactttaaatccttttggcgctccttcaacagatcttgtttatccaaaatccattgcaaatagtgggagctctgccaaaagttccctgccatggaacacagcttgccctgataaaaaagcaccagccggcggagcggcccgcggagcgaccatagacccagcccgtccggtaaccgcgctcctcgatcaaatcagctcggctcgactccgctccgccggccgc

SEQ ID NO: 134014 - DNA, 1877 bp, Homo Sapiens
ggcacgaggaaaatttttccaaaccagagccaatttccttggctctaggtacaccccttccaagcaatgcaaaggacatctccaatcatgacatttaagacaattctttatttctctgacagtgacttcttgaagtgcacatataataaataaatagaaaatatatctttgttcatggtgatgcctacaagaaatgtttacatacaaacactctatacatctaactcccgaaaaaggaccagctatttcggcaacagaaaaaagacaagcatttcagaggagcgttgctttccttaaagacctaactcacttaagtcttacaaacagaaataacaaggaggacaattttctaagcaataagaaaatttgtgctaccaagaaaatgcctagatattggctcttggtgaatggtttaggaaagaaacttttatgtacagatcctgtactgtgaaacatatgtacaactctgagaactttcaaatagatatcttttttaaatgaactgagccaaagacattcaacattcctggccacctgaaagtgatcacatcctaagtggttcacagtgtgagacccttgcattagaagagtgaaaactcaacaaaacccgtggacaagaaggacatgaggtcattttaactctcctctccatcaccactaatctccctggaagaagtccttcctgtgactctggcctttgaagcagccatatctttaaaagcagagccctatggtcacctcccagcagctgaaagatgtttggtgggaaagacctccctgacagttggctcccacctggggaatggactcttggaccgagtctcatgggtgcagttggttggagggagccaggcaggccctctttgaaggaaagagtttgtgtttggggcaggaaaggggataaatgtagttcatcacaagacccagggagactctggtgcctcgtgcaagattataaaccacagatagagttctccctcttacaggagctctttgggctctctataaggtgggccagggagagagcagggcattaagcagcagctgaaagggactggggtggacccaatagctgttcagacacccaagatcagccaaattggctcaccagaaacatggcgagccctactccctctgctgggcctcacctgtagagctgcagagacaggagagccaggtagcaccaatggggagttgcagctactgtgcacccaggctgggctgacaggtagtgaacaaagtgaaggccacagggaccgccaacaccaaggggaggcgggtttgtgtgcgctgggagcaggagggaagagatctgctagctgtcattctactctagtcatttcctttccttcgaggggacttgtccccatttccagaagctacctcaggagtgcctgggcactctggggccggttgttgaggcaatgtggtgtggcagcaagggctagggtggggctccccaggccctcccttagctgtgtggttctttcccatcttgggggctcactttccccatctgttaaaatgaaggctttgggctagatattttctatatttccagctctgaaatcccaggccgagggagtacgagcacatctagggtctcctggaggccccctgtgctcagttcctggatgaagagcaaatgaggccctaaggcaggagctcacttctgtggacttcaccctcttggagtcagaggcagggctgcctggggactgaattcctctgtgctcataagcagcaaagcccattgctcccctctgaccacacttctccatcatgagtgggccagagagacgtgagcaaaggcgaccccgtagtcaccagctctgccccctcgtgccaaattcaccacccaggccctcgtactagcc

SEQ ID NO: 134015 - DNA, 462 bp, Homo Sapiens
cagacatgatttgtcagcctttattaatcaagagtaaagccgagccctagggtttccttaacaacaacaaaaagaacatcaaccttgtttatggcaaacagtgacttaattcttaatgactgttcattatatgtttaacaccacagagcaagaattgatcacgtttcaatcacttattcttctgagattaaaatacaagattaaaacagattaaaataaaattcactccaagaatttaaaaaataattccaaatgaaagacatttcaaacactgtatatagaactcaggaccaaaagaagaccttaaaacattttttacctttgaggtagcacaataatgctgaattagatttattttattacagtgagcttaaaaaaacaacacggaatctaccctttgctcaaggtgggctaaatggttttacgcaaacccctccatgaggttagtgacagttcttgtcc

SEQ ID NO: 134016 - DNA, 1112 bp, Homo Sapiens
  misc_feature (43)..(94): n is a, c, g, or t
  misc_feature (666)..(697): n is a, c, g, or t
gtgatggcgttctagagtatccccggttgtagtaaatctggcnnnnnnnnnnnnnnnnnnnnnnnnnnnnnnnnnnnnnnnnnnnnnnnnnnnnttaagaacaacctataaaaaggttctgggtagcagccattagggtaatgtagtgtctgttggcatcttttttggcatctgcaattgaaagagagggtaagaaaaagaagcaaagaagggaggaaagacaatggcacgtggcatttcaaaagaaaggactcctgtgtgtctttgatcctgccttctgcatatttctctgagcaatcaagctatggctgaaggtaaacatctaaaagaaatgacacttaacttttagatgggcatccactgtcccagtccaaagtgagacaagacagtatattctattaaaaaagaaactatgtgtgtatccaaagcaacacatttaaaaccgtaagtattaatacatataatccttcagcaaaaactacaaacttaaattaagctgatgatggcttaaatcgaacgatgtgtcctgactgtatcatttgagagaaaaacttgaccaagaatggaactaggataaagggcattgtaacctgggaaaaacatcaggagggaggtatgaattagcgggggaagaccacagggaaatcaggtttgttttgctccatnnnnnnnnnnnnnnnnnnnnnnnnnnnnnnnncaagtcttatctttgtgagtgcatgactgagaatttaaaatacactgagtcacaaggttttgcctaaaaaaaagatagagaggaaatgtgctgggactgtacttcagcatcctctgtttttcctctgaatagtttaaataaaatcataatatttactacaaactctgtggacacgctcacacagagtccaggacggcaataaattagtattatgcaaattgttttccacagaaatacagtccctcttgtgtatcttcaatagcccaccagggaagggcagggcgggtgtctaggaggcacaattataccagattgtactccttcaggttcaactggaggatggtgtccttgacggcagcaaagacaaagcggatattctcggtgtctgtggcgcacgtgaagtgggagtggccgc

SEQ ID NO: 134017 - DNA, 582 bp, Homo Sapiens
  misc_feature (405)..(424): n is a, c, g, or t
attccctgtcctcggatcacagtctcttctcactacagtgtcgccgcctctgcctgcgtagccccggccatggctctgtagcctcgacccctttgtgcccccggcccgtctccgcgctcaccacgcctgcgctctccgctcccaccttctttcttcagccgaggccgccgccgcctctccttgctgcagccatggagtcttccactttcgccttggtgcctgtcttcgcccacctgagcatcctccagagcctcgtgccagctgctggtgcagcctctcctgttgccatcagtgcccagcacctgtgctacagccatgtcactcctggcgaccctggggctggagctggacagggccctgctcccagctagtgggctgggatggctcgtagactatgggaaactnnnnnnnnnnnnnnnnnnnntggctccctatgaggtccttgggggagccctggagggcgggcttccagtggggggagagcccctggcaggtgatggcttctctgactggatgactgagcgagttgatttcacagctctcctccctctggagcctcccctaccccccggcaccccttcc

SEQ ID NO: 134018 - DNA, 452 bp, Homo Sapiens
  misc_feature (247)..(313): n is a, c, g, or t
ttttttcatgccaccaggcgtggataatcttttttatttttggtggaaatgggatctcactctgttgccctggtcttcaactcctgggctcaagcgatcctccctctttgtcctctcaaagtgccaggactacaggcgtgagcgctaaagatgatcagcagtatccttagaagacggatttgactgactggagaagggaagaaagcttgtggtgacacgagcagactggagtgatgcgctttggaannnnnnnnnnnnnnnnnnnnnnnnnnnnnnnnnnnnnnnnnnnnnnnnnnnnnnnnnnnnnnnnnnnagggaggcccgctcagtatcaggattcctccaccttctctggaccttgattcagtctcctaactgccacagaagggatgaaggttgaactccagctgggatgtcctgatgtggatgggacaaggtgggtttcacgcctg

SEQ ID NO: 134019 - DNA, 1788 bp, Homo Sapiens
tggtcacgtcctccacgtcgctgtggcaccaggcccgagttctggtcgaatccactgcagggagtccaatgtgcgcattgaggatcttccagatctgctgcagtggtcactggtgtcggcggggggccccggacgtggttcaaggtgcttccgatgatgtccttgaggatcctggggccatgcgccttgacctgtgcgtcgatgttctcagccagcttgtaggttttctcacgctcctcatccgcgtgctgcaggtagatggtcccgctctgctccttgaccaactcctccagtgggctcagcaggtcttccagctccttctgctgggacaggatgaagtcgagctcctggtccagcctcttctggtccagcttcaccttgtccacctcgcggtgcaggctggtgatctttgtcgtccattctcgatcagcgtgcggtccacaggcgttgacctgggtggcctgctggaggaagtgccgctcctggtcctctagctccaggctccatttgttgatcaggctctccagctgcagcgtaggtcatggcggagctggcagccagcacccatgcagcatgcgtccaagggcacaaggatggagcaggtgcatcaggcagcatgcatgtattgcatggggatcccggcatggcagcacagtggttttaaattcaaggcaaagccaggtggtgcatgctgcatgcatggtggtggtggcggtggcaggtggcagcggtggatgttgttgtggaggtgccggaagctgctccaggtgcctttaagctgaagccctgtgtcccagcagtgggggcgcccgctgtggtcacaggggtacagagggagagtccagtggtggcagatgaggttggagcagttgctattgacgcaaagaggctgggcccagtactggtgatggtggctgtgggtgtgggagcagctggctgtgtggcacctgctgtggtggctgctggcgtggccggagtgaagggcaacgtggcaggtgccgtgggctgggctgaattccctgctgagccaatgttgaaaccggagggttgggccgtgcttccaccagtgaatgagaagcctccagatgtggtagctggagccacagaggtggtggaggggccaaacacaaagccggtgggtgctgtgccctggctggaggtgacggtgctcgatatggcattagtgaggttgctgctgcccagcccaaagccgctggggtttgccatggctggggtggcagctgtgttgctcaagttgagctttgaagcaccgatccccaaagaaaatccagttccccccgaagcaagagtcgctgttccaaaagtgaagcctgtcgtctgtgtggccggagtctgggtggcaagtgagaacaggccggtggaaggggtacttgtggctggttggaagggagccccaaaattaaaccctccagtgccagaggtggagaaagaaaaccctgtagcaggtgtggttgttgccgtctttgcagtgccaaacgtgaacccgcctgtaggggccccagtgcctccaaaattaaacccgctcatggctccggactctggtggcggcagctactctggctcccaaagcaaatccgtcggtgtctgcagccttgggaagatttcacgcctgcgctctccgctcccaccttctttcttcagccgaggccgccgccgcctctccttgctgcagccatggagtgagtaaccgcttacctcttctcccctcgtgccgaattcgccacccaggcctcgctaccttaaaccgttagagtactgcccgtttca

SEQ ID NO: 134020 - DNA, 1885 bp, Homo Sapiens
  misc_feature (197)..(459): n is a, c, g, or t
  misc_feature (1575)..(1625): n is a, c, g, or t
attgtggaggaatcccaaggcgttaagttcaggttccgggattttctttgggaaataatgttatgacccaagttccccttaccttaaggggtccgggtccctcaaatgaaatggtttagaaagctttttgaggggccgagggggtcccgccaggttttttcatttttcttttataagtgattccggggacagagtannnnnnnnnnnnnnnnnnnnnnnnnnnnnnnnnnnnnnnnnnnnnnnnnnnnnnnnnnnnnnnnnnnnnnnnnnnnnnnnnnnnnnnnnnnnnnnnnnnnnnnnnnnnnnnnnnnnnnnnnnnnnnnnnnnnnnnnnnnnnnnnnnnnnnnnnnnnnnnnnnnnnnnnnnnnnnnnnnnnnnnnnnnnnnnnnnnnnnnnnnnnnnnnnnnnnnnnnnnnnnnnnnnnnnnnnnnnnnnnnnnnnnnnnnnnnnnnnnnnnnntgacttggaggttctcttacatttggtattttttcatgacacctatgactatgctttggagagagtggctgcccccacgaccctggctgggaccaagaccatcagcacttctccatcaccaggctgagccaggatgaggtgggtggtcgcagtaggtgaaaaggggccaaagatactcaaatgaaagccacagaagccacacccatgaggctgctgcctgggcagaaggcccagaataccctcctaaatggaaaaacgcaaagcacacagcgatcatgtcaagggcagtcatgtgaaagaaagaaacaaacaaacaagtatcttgccacaaccccaaactacagacaacagggcgcattcccctcatgaacttcccttagggacttgcgggccccagggcttgtgtcgctcagtcaaaggtgatccggaacgtgcgctcctgctccttgcgccggccctcgcacaccttggtcacctcctccaccttcctctgcagcagggccgagtttctggtcgatccactgcagtgagtccatgtgcgcattgaggatcttgcagatctgctgcagtgggtcactggtgtcggcgggggccccggacgtgttcaggtgctcgatgatgtccttgagatcctgggccatgcgcttgagctgtgcgtcgatgttctcagccagcttgtaggttttctcacgctcctcatccgcgtgctgcaggtagatggtcccgctctgctccttgaccaactcctccagtgggctcagcaggtcttccagctccttctgctgggacaggatgaagtcgagctcctggtccagcctcttctggtccagcttcaccttctccacctcgcggtgcaggctggtgatcttttctccattctcgatcagcgtgcggtcccaggcgttgacctgggtggcctgctggaggaagtgccgctcctggtcctctagctccaggctccatttgttgatcaggctctccagctgcgcgtaggtcatggcggagctggcagccgcccctgcagctgcgccagggccaggtggagcggtcacggcagctgctgtattgctggggatcccggctggcgccagtggttttaaattcaaggcaaagccnnnnnnnnnnnnnnnnnnnnnnnnnnnnnnnnnnnnnnnnnnnnnnnnnnntgttgttgtggaggtgccggaagctgctccaggtgcctttaagctgaagccctgtgtcccagcagtgggggcgcccgctgtggtcacaggggtacagagggagagtccagtggtggcagatgaggttggagcagttgctattgacgcaaagaggctgggcccagtgctggtgatggtggctgtgggtgtgggagcagctggctgtgtggcacctgctgtggtggctgctggcgcctcgtgccgaattcgccacccaggcc

SEQ ID NO: 134021 - DNA, 1025 bp, Homo Sapiens
  misc_feature (226)..(278): n is a, c, g, or t
  misc_feature (403)..(448): n is a, c, g, or t
  misc_feature (580)..(599): n is a, c, g, or t
gcccccctcggggggtggggttgcacccggagatgtgcggggttagggggggcccgagggcggaaaaaagtgttttgaagggtggaaagaaagagagggagggggggtttccttgtggtcggggggcagagggcgggccattcccccactttctttcttggcccggggcttctgtggcgggcagttagatggcccaggcaagtcccagaagtttcccaagaccagnnnnnnnnnnnnnnnnnnnnnnnnnnnnnnnnnnnnnnnnnnnnnnnnnnnnnctggtgatagtggtggtggtggtagtggcggcggggagggtggtggaggagcggggcatctaggaagaagtcttccatctgttccagctccttcttgaggagggaggccatagcttccaggtcannnnnnnnnnnnnnnnnnnnnnnnnnnnnnnnnnnnnnnnnnnnnnctccagagggaggagagctgtgaaatcaactcgctcagtcatccagtcagagaagccatcacctgccaggggctctccccccactggaagcccgccctccagggctcccccaaggacctcatagggagccannnnnnnnnnnnnnnnnnnnagtttcccatagtctacgagccatcccagcccactagctgggagcagggccctgtccagctccagccccagggtcgccaggagtgacatggctgtagcacaggtgctgggcactgatggcaacaggagaggctgcaccagcagctggcacgaggctctggaggatgctcaggtgggcgaagacaggcaccaaggcgaaagtggaagactccatggctgcagcaaggagaggcggcggcggcctcggctgaagaaagaaggtgggagcggagagcgcaggcgtggtgagcgcggagacgggccgggggcacaaaggggtcgaggctacagagccatggccggggctacgcaggcagaggcggcgacactgtagtgagaagagactgtgatcctcgtgccggattcgccacccaggcctcgctacctt

SEQ ID NO: 134022 - DNA, 446 bp, Homo Sapiens
actgcttcggatgttttggtaaggtttaccaatttgtgttaggctgcattcaaagctgttctaggccgcatgcaggcccacgggtgggacaagctcagtctatgctcttagctgctactctgtatactgcctcagtgataacacagcccctataggcccaagaaaatatagggcaagtgctcaaaaactggcagagtggacagtaagtgctctaagggaaggtggtcagatcccaagaaggacttcctgcccgcaacaggtaaggaaggagaaagaagcttgtgtgtaccgctcagtatcaggattcctccaccttctctggaccttgattcagtctcctaactgccacagaagggatgaaggttgaactccagctgggatgtcctgatgtggatgggacaaggtgggtttctgcaacagagaaaagacggacatccacctcgtcc

SEQ ID NO: 134023 - DNA, 1041 bp, Homo Sapiens
  misc_feature (846)..(898): n is a, c, g, or t
gattaccagaactgacacacgtacacacacgtacactcactcactcatctattcatctatttttggcctaagtgcctttggacacttcttcggaaaagcacatgaactctttggagtctcctgttccacttggtaaatttcctatagccacgcactgaaagtccctgctgccctccttcctctgagcttgtggggcccacagatcccctgctccacttcctgcttcatttcagctgatggtgagtccagggcaggcttgtaggaagggcgggctaggcgtggggaactgcagcacccaccccaccccccgccccagtgcttgttgccccagcctctgtctccctcgctgtgcccttcccttaagccccactcttggcctccccaaagacagagtttgttctgtttttattgataggatgacactccctcgttctaataccatctgaatgcctgagcaattacatcttacaacctcatgaaaaacacagcagcttgtcacgatgaatgatgttaccgtgaataatgcagttttgagttcaaactccttcttattccaagaatgagtaaatatccctattccctcccctccccattgcatttgggtttgacatgacatgaatcattgtggttttactcctgggtagaattgtttttctgtattgcattgccaattgatggaaggacaaaaaaaggaaacttaccaatgagcagtttcagatgaacttaaattctcagaaatcttgaagaatgaatgaactataactttctgaagttgcaaaaatgttcaagtcggaagtgacccatgggaagcaacctggtccttaattaggactggaaagaaaacgnnnnnnnnnnnnnnnnnnnnnnnnnnnnnnnnnnnnnnnnnnnnnnnnnnnnntggcactagtcacccaggagtcctcctgactccatggtatcctgaccccagaccagcagccttatttgtggttaaagaacgtggaaaaacagcttatgtttgaattttaaaatcatgccagtactaaagatctgcattccatg

SEQ ID NO: 134024 - DNA, 1205 bp, Homo Sapiens
  misc_feature (552)..(552): n is a, c, g, or t
gggtcacggagctcaaagggctagcaactcacatcctggtaggtagcgtgacctgtgagaccaaagagctgtttgcagcccgacctcaggtagtggctgtcgacatcaatgaccttggtaccatcaaactgaacctggaaatcacctggtatccatttgacgtggaggacatgaccgcatcctcaggcgctgggaacaaggcagcagcccttcagaggagaatgtccatgtacagccagggtaccccggaaacgcccaccttcaaagaccactccttcttttcaaatctacctgatgacatctttgaaaatggaaaggcagccgaggagaaaatgccactgtcgctcagcttcagtgacctgcccaacggggactgcgccctcacctcccactcaacaggctccccttccaactcaacaaatccagaaattaccatcacccctgcggagtttaacctcagcagcttggcctcccagaatgagggtatggatgacaccagctcagcatcttccaggaactccctgggaggaggccaagagccaaagtcacacnctgaaggaggaagacccagaggagcccagaaaacctggctcggcccccatctgaggctttgccgccgacagtcctcaggtgctggggctgagcacctgttccttgagaatgatgttgcagaagcacttctgcaagagtctgaggaggcctctgagctcaagcctgtggaactggacacttcggaaggaaacatcacaaagcagctggtcaagaggctcacatctgcagaggtgccaatggccacagacaggctgctctctgagggttctgttggtggagaatctgaaggctgcagatcctttctagatggaagcttagaggatgcttttaatgggcttttacttgcattagaaccacataaagagcagtataaagagtttcaggatctgaaccaagaagtcatgaatttggatgatattctaaaaaagtagagaagatcctctaatggatcccagtgtgcccatccctcaacctcctcagtgatcaactcatggccaatcttgtttcctattcttcaacctgctgacttccctctggattcttctgcaaccagtcccagatattgtgccattttatccatggttgtacttcttttttggatataaagatttttaaatgcattttttaaatgctaacaaaaaataaaaacttga

SEQ ID NO: 134025 - DNA, 1143 bp, Homo Sapiens
gcggccgcatgaatgcctggccaacctacaagaccaacacgtcaatgggctattaccgcgagcaggaattgccgttccagtttgcgttggccaacacctttaccctgtgcgatgcctaccactgttcggtgcacgccggcaccaacccgaaccggctgttccattggaccggcaccaacggcccgaccggcgccaatgtggctgcggtggtcaatgaatgggacggccctggcgcagtgagcgtgggttacacctggaaaacctaccctgagcgcctggaagaggcgggcgtgagttggaaggtctaccagttcttgccggataactttggcgacaacccgctggctggttttcgccagtaccgcgccgccagcgttgcggccggcaacccggcggaaccaccgaaagacttcaaggcctttgtgccctacagcgatcaactcaacgcccgtgtgccgttgtacaaaggcaacggcaacacactgccatcggcaaacggcagtgacctggaagcgatcatccagggctttcgcgatgacataaaaaacggccgcttgcctcaggtgagctggctggtcgccccggccaattactccgaacatcctgggccttccagcccggtgcagggtggctggttcacccaggagattctcaagtcgctgactgaaaacccgcaggtgtggagcaagactgtattgctggtcaactacgatgaaaacgacggtttcttcgaccacgtcccttcaccgtcagccccgtccaagcgtgccgatggcaactttgccggtaaatccacggtcaagttcgacagcgaaatcttcacgcacccggcgccgcccggcaccacgcaacagcctgcgcctgacggtggtgtttacggacctggcccacgggtgccgatgctggtgctgtcgccctggagccgcggcggttgggtcaactcccaggcgttcgatcacacctcggtgctgcaatttctggagaagcgcttccaggtgcgcgagcccaatatcagcgcctggcgccgcgccgtatgcggcgacctcacctcggcgttcaacttcgtcaaccccaacaccgagttgttgccgccactgcatgaaaccacccgccgggcggcggatttgctgcgccagcgccagg

SEQ ID NO: 134026 - DNA, 525 bp, Homo Sapiens
ggcacgaggacaaaacccagcttctgcgcgcgcagggcggcgcgggcgtcttcgtccagcgcgaacatgtcctgcccgtccaggcgcacggtgccgctgctgggcgtgtccaagccagccatgatggacagcagggtgctcttgcctgaacccgaggcgcccacgatggccagggtctggtgcggcgggacgctgaagtggatatcgcgcaaaatgtcgagcgtgccggtcgagtcggtgacggacttgagcacatgctccacggaaatgatgggttcggacatgggtttttctttcttgcgtcgctactgtatcgtggccttcctgctggccggttttctggggttatctcaggcggccccgcctcgcacggtgctggtgctcggtgactcgctgagcgccgagtacggtctggcgcgcggcagcggctgggtggccctgctggagcagcgcctggccggagaaaagcaggcagtgcgtgtggtcaacgccagcatcagcggcgagaccacctttggcggccgc

SEQ ID NO: 134027 - DNA, 854 bp, Homo Sapiens
gcggccgccacgctggccgccacccgatcggtcaccggtcgcccggtcagccgtcccagcaccgacttgcgcgacagtccgacgagcaatggataaccataatcggccaacgcacgcagtcccttgagcaaggtcaggttgtgttcggaggtttttccgaagccgaacccagggtcgagcatgatgcgttcgcgcgcgatgccggcatcttccgcggcgcgggcctgttgcagaaggaaatcagtcacttccgcgcacacatcggcatatcggggatcgttttgcatggtctgcggcgtgccctgcatgtgcatgatgcagacgcccgcatcggtggccgccaccgcctccaccgcaccgggagcgcgcaggccgttgatgtcgttcaccagcgtggcgccggccgccagcgccgcgcgcatcacctccggcttccaggtgtcgatggacagcggcacgccgaggcccgacagcgcctcgatcaccggcacgactcggcggatttcctcgtctgccggcaccggatcggagccgggacgcgtcgattcgccgccgatgtcgagcatgtcggcgccgtcagcgatgaatttctcggcctgggcgaccgcccggccgacgtcgaaggcgatgccgtcaccggaaaaggagtcgggcgtggcgttgatgatgcccatcacgagcgggcgatcgagcgagaggcggtaagggccgcagtgcaaggtcgtgttcatggtcgtcacaaatgaaaaccggaggcagcgcctccggtcgtgggttgaagtgcagcaggtgtcaggccggcgctgcggcgttcgctgccgctcccggagcaccgccgtcggacgatgccttgg

SEQ ID NO: 134028 - DNA, 554 bp, Homo Sapiens
ggcacgagggcggagggcatcgcgcggacccgggcgcggatcgacacggccgatctggtaatcgcgctggtgccccccgacgggacggtccccgagctggggccgacccgcaatccaatcctgagggtccacacgaaggccgatctttttgccggctcagaagttgcgcagggcatcgactttttagccgtctcggcccgcacggggcgaagggcttgcgacgttgctcgatgccatccaagccgcggccgaatccggcctcggcaccggcgacgcgctgatcacccgcgcccggcacagggccgcgctcgaagcctgcgtcacccatctcgaccgcctcctcacgggcgcaggcggtctgccggagctggcagcggaggatctgcggctcgccgtccgggcgctgggcgaggtcgccggccatgttggggtcgaggatgtgctcgaccggctgttcagcggcttctgtatcggaaaatagttatgttgccggcaaaagacagcgtttctcggcgcgtctgacctactgcggaattcgcaggatccgcggccgc

SEQ ID NO: 134029 - DNA, 1687 bp, Homo Sapiens
gagagagaaaggtgggacaccagggggccatcgtggaggctgtgaaggccccgagctctgggagcccacagtgtttattggtaatccaacaaagaaacaggtggtgataacgtggaggtcaaaagggcaggcgcatgatctacaactgtgatggtttagcatttacatggaacatgttctgctacttgagatactgggaatagggacctaggagcctaggaaggctagaagcaaggagccagcaagtctagacacattccagaggacattatgcaagccctgcctcggtttcccccccaacactcagcttttttcccaacatgccccctcttttttataaaagagaaggtatcattattactatcattattacttagctatcattagctaggcgattgcaggctgtgcagcccttaattgccggtaggtgacccagcttctcttttcttagcccttattcaaactggagtcactctggtttgaatgcttcccacatatctcccctttcccttctacaagaggacccttaatcctaggggctgcagaaggatgaaggtctgtcttctgtaacttcttcatgctgaataggggcgatgatattcctgcctaactattagggtctctcatattcagggtagagaggagctgagtcagaaagcattggtctgttaggcatcgtgactccggtcggtcctcattccttcttcgcattcagattcaactggcttatggctcatactgggggaacccggtccaaggttgggatccatgggtccctccagtctcccattccatggtcgtgcacatcttgagggcatccacacggtttcgttcatctcctgcaaaaacacaagcataccctcacccccatgttaataaatctactgaaacagaagcaaaaacttttgtggctgtagccgggccactgatagtgagaaacaggccttttctgattaacagaaggcatagagaaagcaaatcgaggcttttcaaaccttcaattcgcactgtactctgcaggtgggtccactagatgccatggctcgtgatagatcttcagatggttggtgggcacccacacagacacctgattgtcacctggggagacacaagcaaatcctcttccccataaaattatctttaggcagggatcggaggatgtagattcagaggtgaagagaatttggggggcctaatggcttcctgatgtttgataggtgttccctcggaagttaggaattccctttctccccatattgctgcgtgggcttggaggactaggtaagcatgcttagagtctgtatatttaacctttttccttctaattctagtgtataatggcccctgcttttgctaggatgtctctccctaacaaaggagtggggcttttgggcataattagaaaggcatgtgaaaagcgtaaagttccccagtcacaacttagtggctgggagaagtatcaagtgactgcccgtcctaggacccctcggatagcgacagatctggaggacagttgtctgggacaggagagtaagacagaaggccgcacgagtgtccaggaaacagttaacctcctggccctcaatggtcaagcatacccggggctctgtgagggtaatggcatgggctggtgcttgccccggtaccctcagtcctgctgctggatcatctggtgaatggcggccgc

SEQ ID NO: 134030 - DNA, 987 bp, Homo Sapiens
tttttttgcaaaatagaagcaactttaataaaggagggaatgaatagtgactccatagacagggtagggcatttccaaaagtaagaaaagcatccagcctaggtacaatgcgtatttaaaactagaagtgcttttgttctcaaagtatcaagacgttcctgagtctgttaagtcctgagtctgtttaggaaacattattaatctgttccctcaattgtaaacatcttgaggctaagaatgcttaacctcctgggcatgcagcccaacaggacccagcttcatttttcttagcccttgttcaaaatggagtcgctctggtttgaatgcttcttacatatttcccctcccttttacaagaggacccttaatcctaagggttgcagaaggatgaaggtccatcttttgtaacttcttcatgctgaacggggcgatgatatttccacataactattagggtctcttgtattcagggcagagaggagttcagtcagaaggcattggtacattaagcatcatttgtagctctgagttccagcaaaaggtgaaactgtgttccaccaagagagacaccttccaaagcaagaaattgttggacaaacttcaataggatgtctgagcatgatccacgtggcagaggtttacttcctgaagaatggacttcaccttttaacaccacttcatactgaggtccaaatggctgcacaaacattttttagatcctttcctcccaaactttgggatcccttggagaaaaagaaactataacctcatgttcttctccaggtttaacgaatagattctctagatccactaaagagggactttctcattctgggacctgtaagtccctgggagcaggagttgtagctctttctgctctttcttggagatcaatacttctaagaactggtgtggggtttgggctgtcaacttctacgtcaactctcactacgaagtcttctcctgagtcctgaatctctgaagagc

SEQ ID NO: 134031 - DNA, 706 bp, Homo Sapiens
gatgacttaagctcatttatttatttttgtggcagtgggtgatccatcagtattgaaatagaaataaaaattattttgtttaatattttaaactaaaataatggttctccctttacatcaatacaccttgaacaagaggtatcaggaaaagacaaaggatcctgctggcacagcttcgaatccggggggacatcactgaaatgtattagcaacacacaccactgctttactcaatgctaggtgcagcttatcaagctatcaaagagaatctgctgaatataccaagtgtgtctcagaaaaaattctttgtattagctagaacaaggttaacaaacattataactgttcataaaaggattctgtgattaatatatttccacaacttgctggagcttgtactgattagtctttgccaaagaacctttcccagctgcattcagcaatatcctggaatgacaaccctgtcaaattaacttgaaaacatctaacgttttattcacatagttccctgggtaaaaaaattccatacttcttattatgttgtgccggtgatctacattcttctttagaataaaataatggggataacataagatttattggaggagagctatagtttttatgcatataatgtctataacacttatgagtaagtctttcaagcaacattgtctcttccaaatataaaacatacagccgcggccgc

SEQ ID NO: 134032 - DNA, 566 bp, Homo Sapiens
gcggccgcaagaacgcgcccgtgagcacaccgactatgcccgatagagagaatttgatttacctgtacccaattgcgtggcatgtggtcttcaagacggccgtcgctcagaatcgactcctcatagccacgctggtgaaagcactacggcaacttgacaggtaaccacatggcgaacgttcgaggcatgttggcacgactgcgcaagctcgaacagtcacggactgcgggagatcagattcacgaatggatcaatgattcgttcggtgctgccattgcagaaggtcgcatgtgccccgtcgatggccccgtggtgctgcgttgtctgctcaactggatcggtgaccgatccatgctcagccaccctactgtagagggatgggcacctctaaaatgacgacgagagtaggtttactgtcgtcactattccagtcgtgccacgctagagaaagactgggcggcctcatgacgagccatgggcatgagtgcggggttcggtagccgaacgttgtgctgaaaaccgccggacggttctttcaacgggtgccacaggggtcccctcgtgcc

SEQ ID NO: 134033 - DNA, 421 bp, Homo Sapiens
ggcacgagggcctcgcaggagctggtcatgcctgccttcggcgataacaagaacgtcatgtgctacctgccggacatatacacgtatctccgggcccgctcggacggggcgctcggccgcaaccggccgcccgagcacgagcccaagcccgcggccttcgagaaggccgaggatgcctgcatgaagtgagcgctcaccctccggtccggcgtcgagagcgaaccagaccgggggtaacaggccccgttgcaccgctcggttgcgcacgacatactccgcgcaagacgctgaagagcgggcaccaagcctgccgagggggtcgcagggggtggaacgtggctcaaggatcgggagtgcgccgccatctttgcggcatctggacggcctggacggacgcggccggggccgccgacgcggccgc

SEQ ID NO: 134034 - DNA, 780 bp, Homo Sapiens
  misc_feature (193)..(332): n is a, c, g, or t
  misc_feature (625)..(625): n is a, c, g, or t
  misc_feature (713)..(713): n is a, c, g, or t
tttttttaaaatcacaaataatttattcttccgttagagttgatacagttttaaatagcaacaaagtacacagtggtggaaaattggcacagaacctacaagcatttcaatcacaataaggctgtccatgatttatctgttcaaacttgatgtccattttctactgatcaagttgaaagaaaaaacctattcnnnnnnnnnnnnnnnnnnnnnnnnnnnnnnnnnnnnnnnnnnnnnnnnnnnnnnnnnnnnnnnnnnnnnnnnnnnnnnnnnnnnnnnnnnnnnnnnnnnnnnnnnnnnnnnnnnnnnnnnnnnnnnnnnnnnnnnnnnnntgagccactgtgcccggccacacctttcgaacccctgactttcctgctggcaggaagggtggcttggaatcctagtgatgcctacaccccaggacaaatcaaaaagggctctgggtcttagggagcctgcctggccactcttctggatctctcatctagttcaaagtagctgctttatcaccaggaacaagaacgtcatttccacccccaacagaagcagtagccgagaatgctagggctccactcattattgggaagaggaggagagagggtaaattagtcatagcttccanagaaagagatgtttcttaggaaacgcatatcatcagttctaggaaacatcctaagccaaggctaagtagtcatcttcagaactgtganatgctgagcaccaggcaagatgaaacagaccctcctatctgtcagtgaggacagaactgcacctgag

SEQ ID NO: 134035 - DNA, 581 bp, Homo Sapiens
ggcacgaggcgcacgttcgccttgcgcaccaacgcgcagcgatacagacgaatctccagcggcacatgccattgcgggccgccgcacacctccagttcgccacgtgccagttcggcacgcacgctcaactgcggcacccaggcgatacccaagccttcaagggccatgctcttgagactgtctgccatggcagtttcgtaaatggtggtgaaacgcagggcgcgctggcgcagcagcaaatttaccgagcgcccgagaaaggcgccggcactgtaggccagcaacggcacgctgccctcaccctccaggtcgaacagcggtttgccgtcggcgtcggcggcgcacaccgggagcatctcggtgttgcccaggtgcagcgacgggaagatttccgcgtccatctgcatggccgcatccgggtcgtagaacgccagcatcaagtcgcagccgccttcgcgcagggcgtgcactgcatcgccaacgttggtggcgaccagtcgggtcgcgatgttaaggccctcgttacgcagttgcgcgatccagcgcgggaagaagcccaatgccagggagtgcgcggccgc

SEQ ID NO: 134036 - DNA, 1314 bp, Homo Sapiens
  misc_feature (353)..(372): n is a, c, g, or t
ctgttagaatttatacagtgttattatttacagcaaaactatcgatgttttaaaaaagaaacaaatagtgtttataccctgacagtttgggtccaagaaaaataaggcgagctgttgtagatttagtaattttagtgtttctctgtgatttgatcattccatctccttctgtcccttctgatggcaagaatttcttccttttgtaaatgacaccaaattacttgagataaactgttaacagcatggcttcttgtatatacactgcattgctaattgcacacgcgccaatccggaaatgaaagtgatttccatgctctgtaaattggctcatgctaaattaaaatgtgggtggnnnnnnnnnnnnnnnnnnnngcataaaaaaaatcatgccattaatgtgtggaagcagcgaacacacacacacttctcggtgaatttttacttcctgctgacatttcttccacgaatttctcaatactggcagtaaaaacttatgatccttgactgaccgttcgctgttacgagtggctcttcttttccacatgccggatttctttcttcgttttcaccttaaaaccttctccctgcttttgctcagacccactggacccctcttcttcatggaggctaagccttggcttgccatctgctggagaagtcctactcatctttttcatactgacaggcacacagggtttagtctcttctattataagcttgctggtttcttctagagatttctgatatgctgctagtggtgatgctggttcttcaacatgaccagatccatgtatttttggtttcagagtttccttggtactctgttttcctacatcattttgggattctggaaagtaagattttgtctttgcttctggagtgatttctgtatggcttccatttgcttcaaatttgccagcttctcctttgagatatgaggtaatggaatctctacactggtcagggctgtcatccagtcgatctagtaacccaccagttactcttcgagcttgagcgcaggactctaggtttccacttgatgtctcattctgccaactcagacatacattctccaactggctctcatctacatccactgcttcaggcatttctgttaaaggcactgagtcttccagtttgctgtcttctaaggaagcgtcttctgcagttacgactggaggtccatctgcggaatgctctatgttcccctgggaaggcactagcccatcactcagtctactaggggttctaaggggagattctatgctagagatatcactaaaataatcatcttgctggaaaggggtaggtggt

SEQ ID NO: 134037 - DNA, 298 bp, Homo Sapiens
caagaggcatcacttttacaagaactagctagaccaccattattcctttatcaagaaaaagtttcttttttaaaaaataaataaaactctggctatacatagtacaaagttcatacataatacatctggaaaaaaaccgaagagtataccctgaagcaaaaggtttattggagagagaaagcctcttccattataccaagtctgaagatggcagttttcaaagttcagagggtggcagtgatatataattaatgccaaactgtttgttcatgggtatggcaggatgcaatgaaggacc

SEQ ID NO: 134038 - DNA, 815 bp, Homo Sapiens
  misc_feature (55)..(55): n is a, c, g, or t
  misc_feature (784)..(784): n is a, c, g, or t
ccagatccgcgccggcgcacgccggaatcgatgtccgacggcaaaagcatcatgnccatgatgatgctggctgcggggcaaggggcaccaagattcacttgaagacggaaggcgaacaagagcaggaagcgatggacgccctggtcaaagttgatcaataactactttgacgagggtgagtaaacccaccctttgagacaggtgtgaggctgcaatggcctcaccctaatgcggtatccatcaccatcatcaaacaaaacccgacgcacaaccccaggctggcaagcttttcgtgaccgttgcggcgcgattccgggatcacttcgtgagttaccaccagcaacatagcccccgccgccagcgcaagccccaatggcaacagaacctcagccaggctcaccaaccacgcacacagcacggcaaacaccggctcgaccaagcctgacgcggcgccgatcaagaacgccttgacccgcgacatgcccgccccagccagcaccagtgcaatcaccaaaccttccggcacatcctgcaaggcaatgcccatggccaggctgtcggcgtccggcatgccgccaccggcagaaacgcccactgccataccttccggaatgttgtgagcaatgatggcgaacacaaacaaccagatacgcggcgcaatcacgggtttacccgccgtaaccaccagcatctccgggctcgcgccggaaaccttgcggtctaccagatacagcccgcacgcccccagcatgatgccgaagctgatcaaaccactggcaccccnaaggcgagagccccaggccttcagcggccgc

SEQ ID NO: 134039 - DNA, 648 bp, Homo Sapiens
gcggccgcgtgcgtgagcgctgcatcttggcgcggatgtaactgctgagcaccacgcgcgggtcatcgaaggtttcaaagctcagggcgtcctgcttccacaggtccagcaggtcaaacagcacggcgctgtacagctcgcttttggtgctgaagtagtaatgcaggttggagcgcggcagttgcacttcttcggcaatatcggccatggcggtgctgccatagcccttctcggcaaagactttctctgccgccagcaggattttctcgacgttgctgcgccggatgccgatcttgtgattgcccatggatgatggagccccagtcacttttaaatacaattcattttcaaccatcacatcatgaaccgcctcattaggctacacgccattgatcgccagatcggcgccagcgcttcaaagcccgcagtattccaaggcgtcagcctgcgtgatcgagctatgatcggcgcatctgaaccggacacccctgacctatggccgttgacctgcacgccctctacccgaaattgatccacttgatgctggacacggtcttcgtggtcgacagtgacaacctgatcgtgtttgtcagcgatgcctgcgaagccctgctcggttaccgcgccgatgaactgacccctcgtgcc

SEQ ID NO: 134040 - DNA, 612 bp, Homo Sapiens
  misc_feature (434)..(434): n is a, c, g, or t
  misc_feature (445)..(445): n is a, c, g, or t
  misc_feature (461)..(461): n is a, c, g, or t
ggtggtggtcttgcttgagaacaagccgttgctgcctttgaacttgtgtgcttcatcagcgaattggttgtttttcgcagccgtcatgttcacgtcgcgcccggcgtcggcaatgatggcaccttgctgactggtgacgctcgcgcctcgggcattgaggtcctgcccggcgctcaagcgaacatcgccctggccctgaacggtggagccgacttctgtctggcttgcgtccttgcgccagttgctgctgttccagctcaccgattgctgatgggcctcgccgaccgtcgccaggttgatggtgttgcctgccttgagcgatgtgctaccacctgtgccggcgttgaccacttgggcgccggtcaggttgaggtccttgcctgcgctgacgtcgagggtgccgccagcaccgctgacaaacagcccggccaccncgcgagagatntggtgcgcgtaccttnggatgctgctgctgtcacgactgctggacacgacgttgacgtttcgcccggcggttgatggcgaggctgtctgtcgcgccgatcaggccgccgaggttgtcgaggttttcccgtgccgtcagcgagaccttgtcggcctggatgcggccgc

SEQ ID NO: 134041 - DNA, 904 bp, Homo Sapiens
gcggccgcccggccctggttcgagcgtgcgatgcaggctggccatgcgggcgccacgctggccctggccctggccgcccgcaacggcgaggcgcagccccgcgatgcccggcgcgcggtggctctgttgcagctggcggcccggcgcggcagcgcccgcgcgatgtatttgctgtcccaggcctacgcccagggtgagggcacttcgcccgatgcggccctggcccgccactggctggagcaagcagccgaacagcatctgccggccgccatgcaggactgggccctcgccctcgaagacggccgcctgggtgtgccgcaggacgcgcaagcggcgcgcgagcagtggcgcgaggccgcggaagagcggcgcaaccgctggaccatgcgctgagggcaggccctggtcggtcgacgcgggtcggtgtggtcgtgtgcgtcgcttgcggtcctgccctcaggcgtcgcgagcgagcgcgctcggcgcgcgccgtgggatgcgtgaagccgcgcggccggcatcgccgagctcacgggtcactgccgcagcgggggcttcttgttgcctgaccgcgtcaggccagatggcgggcgccttcgaagccgacgtacaagcccaccaggaggatcaacgcaccggagaagtagggtgccttgcgcgcgaactccccgaacccgctccagcgcttggacacgtgcttcacgctgagggcggccatcgcgcccgatgccaccatcgtcagcgccagcccgacgctgaagcacagcaccagcgcggctccgagcgtgaactgcttcagttgcagacagagcaacaggaccgtgatcgaggccgggcagggaatgaggccgcccgtgaggccgaagatgatgatctgcgtcgtcgtgacctcgcggttggcaaa

SEQ ID NO: 134042 - DNA, 560 bp, Homo Sapiens
ggcacgagggcgggtcaggaagtcgcggtcggagtaggagtaggtgtcggtgcgcaggcccggcagcccgtagcgctcgatccaccacagcgtcatctgcgtcagataggcagcgagctcgggccggcgctggttgaggtccggcatgccgggcacgaaccagccgtcggtgaagcgcttgcggtcctcggccgatgcatacgggtcctgcagcgtcatgcgggcatgatgagtctccgtgtactggggccactggttgacccaatccggggccggcaggtcggccatccaccaatggccgccgccgatgtggttgagcacgatgtcctggatgacgccgaggcccctggctctggcctccgacacgaaggcgccgaagtcgtcgttcgtgccgaagcgcggatcgatccggtagaagtcggtcgcggcatagccgtggtagctgtacttcgcgctgttgttctcgaccaggggcgtgggccagacctgggtgaagccaagcccggcgatgtagtcaaggtgctggcgcaggccggccaggtcgccgccatggcggccgc

SEQ ID NO: 134043 - DNA, 659 bp, Homo Sapiens
  misc_feature (88)..(104): n is a, c, g, or t
gcggccgctgcagacgctgacgccggccacgatgcggctcatcggcgagctgctgcgcgaatcgacccgcggcgccgtggagctgctnnnnnnnnnnnnnnnnntgaagcaggaggtgcgtgcccaggtgacgatgatcgtcacgcgggacaacaacccgctgaagttctcgcccaatgtcgacgcggcgctgacccatctgctgggcccggcagccgccggcttcatgccgccggcgcgcgcgatgcgcgacgccttcgacgacctgcgcgcccacgagatcggcgtcatggccggcatgcgcgcggcgctcgacggcgtgctggcccgcttcgacccggccgccctcgacagcgccatcaccaagcgcggtgcgctcgccgcgctgctgccgggctcgcgcaaggcgcagctgtgggagcagttccagcagctgtacacccagctgtcgcgcgaggcggcggacgatttccacaccttgttcggcaaggccttcctgcaggcctacgaggcccagctcgacgcgctggaagccgagccgggccccggccacgcgtcgggccgctgaagaggccgccatgctggccatggaggtcgccatcctgtccgaacgcggcgggcgcccctacaacgaagacgcctgccctcgtgccgaattc

SEQ ID NO: 134044 - DNA, 827 bp, Homo Sapiens
gagcgtgcgatgaacaccacccgtcgcccgaaaggaccgacagcgagacgtatcgccgatctcacgcgacaggcgtcgaggaaggctgcgtcgcgccgtcgagcccgacggtggcgagataggaatagccgagatgcaggatgcgcggcgtcagctcgtatttgcgccggtcgaccgaaacgaagccgagctcctgcagcgtcaggaggaggcgccgcgccaccgcgcggtcgagccccgtcttcgtcgccacgtcggcaaccgtcaattgccgtgcggtcggtccgaaggcctcgatgacggaaagcccgcgggcgaagcctgaaacgaaacgatagctcttcttcgggtcggcttcggccattcctgtcctcttggcgcgcaacacagcgcgaatccgccacttctgtcgccctatccgcggaccctagtcgagttcaccgcaagcgtcagcgcgtgcccgccgtttgacgggcggatttattttgctatataacgcacaaatgagcgctaagcgctcaaaagatcaagcgacagcgagcagccgtccccttcagaggagaagtcccatgctgatatcgaggcgcgcggtgatccgtgctttgccggcgctcggcgccgtgggaaccctggcttcaggtctgtcccgtgcccatgggcaggatctctggcgggtcgcttccgccgccccctcgaccggcatcctgcgcgagcatcacgagcgcatcgccgtccggatcggcgcggccagcggcggcgcggtgcagtcggtcttccaatatgtgtccagcgagcaggaggcgctgcagcagatcgcccgcggccgc

SEQ ID NO: 134045 - DNA, 992 bp, Homo Sapiens
  misc_feature (981)..(981): n is a, c, g, or t
ccgtcgaccatcgattccggcgtgcgcccggcgcggatctggcaagggaactgcccggcaacgccgacaaatttggccgaggcgcgggcgtgcaggcccagcttgttgatgatttcaatttccagagcgggcatcgcgggggtgttcctttcagctaaggtcgcggtggcgaacctggacgttcttgagggtttgttgcagcacctggcccaggcgttcggtcaggtagacggagcgatggtggccgccggtgcagccgatggctatggtgacataagcccgataccttgcggcaaagcgcggtaaccatttgagcaggtagctggagatatcctggaacatctcctcgacatccggttgcgcagccaggtactcggctactggctggtccaaaccagactggtcacgcagctccggcttccagtaggggttgggcaggcagcgcacgtcgaacaccaggtcggcatccaccggcatcccgcgcttgaacccgaacgactcaaccagaaaggccgtgcctggttccggctggttcagcaggcgcagcttgattgcatcgcgcaactgatacaggttgaggtccgtggtgttgatcttgagatccgcgaggtcaatgatcggccccagcagcgtggtctcatcctctatggcttcggccagggagcgatgcggactgctgagggggtgacgtcgacgggtttcggagaaacgcttgagcagcgtttcctcgtcggcatccaggtacagcacatcgcaatgaatatgcttggcgcgtacttcctcgagcagttgcgggaagcgctcgaggtggctgggcaggttgcgggcgtcaatcgagacggccaccagtggctgcggcagttcagtgtggatcagggcgcgttcggccaattccggcagcaggcccgccggcaggttgtcgatgcagtagaaaccgttgtcctcaaaggacgttgagggcggtgcttttacccggagccnggagcggccgc

SEQ ID NO: 134046 - DNA, 589 bp, Homo Sapiens
gcggccgcccgaaagtcgcctttccacgcaatgaaacagcggcattcatccaggaggccggtctgaaccatttcacacccgtcgccttcaaggttgttatgtccggcgaagcaatgtccagcaatccaagcccatatcgatccacagccagttcaatgaattcacctttgctggggaagatgcgcagatcgcgtgtgtcgtgaacgaaggaatagcccagcgtcaggaatcgcgtaacagtggcatcgccggtgaaatattcctccgcggaatgcgcaatggtatcagtaatgctcgcccgggtgaaactgctgcgccaatagtgcctgtaatcgtgtgatggccgaagggtgaattccacatctgccagtttttattcgcggttaaaatcatggggatccctcaccaacagccgttcattcccgatggtggccacagtgacctcctcctgttccagcaacgaccccccgatgctcattccccatcgttgtttcttgtcgatgtatggcactttgtagcggaacgaatatttgttcgcgtacccgaactgtgtcattacatagatcgtctcgttctgcctcgtgccgaa

SEQ ID NO: 134047 - DNA, 728 bp, Homo Sapiens
cggcacgaggcgtgatcaaaggggccaggcgcgggctgttgcgcagcggccggtaggcgactttttcgatggtgaaattgagtaccgccgccactacgcaggcgatcagcgtggccagcagcagaatgagccagccgggcgcgcccggcatggcctcctgcatgaggccgatgcagctccagctggtcagcgcgccgaccatgagcacttccccgtgcgcgaagttgatgagctggatgatgccgtacaccatggtgtagcccaaggctatcaaggcgtacatgctgcccagaaccagaccattgatgatctgctgcagcaagatgtccatatgttgagtcctttgtatcgactattgacgtgcacaccagccaagcaccgcgaatcgatgcagccttgtgggcccgttcgccatctagcaaaaaacccgccaggcaagggtctgcgcgggtttgtgaagaaattgtagtcagaggaaacacgccgtccctaccacgtttggacggggttttcccttgattggagggcgcatcaggcgggtgccgcgcgcattagaaatattgatgattgcgacgcgatcagggaatgcgcttattcccaatggtcatggattgggctgaacaatgccgtgcaacgggaccgtggtcggcccgccgctagcccctcacacagccactcgaagcctaggcgtctgggggcatggcgtcggggccaccctgcgcggccgc

SEQ ID NO: 134048 - DNA, 695 bp, Homo Sapiens
  misc_feature (51)..(51): n is a, c, g, or t
gcggccgcggctggctgagggaataaatttaatcaaggtaaagtttttttntcatattggttgttttgtggtggtaattgagctgggaaaaattcagaattgggtcataattaatggtaactaaacagatttgtgaatatgggacatctgtggtcttgaaaacatcagtatgatttgtccccatatttcttcagcctggacaatagaaacagacaggggaggggggtaaagtgcagtaaagtaggttgagtgatgtggtgctagcagctggagtccagagaagttctgacagtgcagggagcagcccctttgttctttggagcactggaagggctgagctgcatctgaggtgttcaagccaccaacaggacagggtagaggactaagtagcacatgtcccccagagcagcttcctgtctttgtgtggtcacatcacatcgggggaaatgggcatgtgtcaagaagtggagagtgtgatgcttgtatatcatcaagccttagctgtattgtcattttggagctgcatacctctcaaaaccatgggcttatgtacatttatctgtaagtgctgagagttgagatgatattttcaggaagggaaggggaggagattgtataattaatttcatctcttctaatgctcagaatatacatggttttgtggaactggcttctatcctagtaatactgtttgc

SEQ ID NO: 134049 - DNA, 600 bp, Homo Sapiens
gcggccgccactttgtcgccagcgctgggcagtgccgaccatcttgcggccgttgaggttgacgttatagcgaccgtcgcaaaaggcgccgtcgatttcgccaacagaagcgtcaccgcccaactcaatcagcaaatcacagatcggctggcacaaacgctgataaccggtttcgatgcggccttgatcaccttcgctgcgtggcggcgcgtaaaccagcgcgatattgaccgtggcggccgactgcggcaccggctctccgccggtctcgcgcagtagcaccggccaaccggcagcagccgaaacctggctggccgcgtcaaaagccggcaagcggctcaaacggcgcggcatcaccaaagcctggtcatttggctgccagaacagtagcccgaatgcctgttcaccggcgcaaacggccgcgagcaagtcttgctcggcggcaagccctgcttcaactgtcatcgacaccggctcgatcatcggacacctacttctctaaatagacacaaatcaaatgtgggagctggcttgcctgctcccacacaagccagctcccacatgtttaccgtatttcaaatcagtcgagggtcgaaccac

SEQ ID NO: 134050 - DNA, 1136 bp, Homo Sapiens
gacagtcttgccaacaatgcaagcatgcagatttatagacagaaaagcagcaactccttgggaacaggtcagcacatacctggggccaaatgaatggtggcggcaataaagtcacaggagggagaaaccaggtgggctgtcccctcagaggcaaccccatgaaccatgtggaaactgctagaagaactggcctgagactggcagggcctaattccagacagagagacctgcctgaggaagttcacatggcatccaagggacacatgtgattgtaatgaggggatagtgtagggtgttagcaggaaaggctacataaactccttcaactattagctatttagactttattttcctgataggagaaagcaaagtaatgtttttgatgggatgggatgggttttgccaaacaatattttaagatgttaacgatgataaacatacttattcatccaataatactgaatactgaaagaagttagccttgggaaaaataaagtccctcaaaataactaaataaattccatttccacggatacatgcacatatgtttatgtgtgtaaatttcattacacaataggcaagtgatgaaactcattgccccaggagagatctggaatagagtagattggctcatgaatgataaatccagagtgtgcaagactgtgaccctaacctttaaagcaaatctcactggtgcccgtggtctaccacagtgctcccctggtgccaccatcagagacagaccactgtaaaacctcatggccccttgttttgcagcgtgcaaggccaggcttatgaatagatatcatcatctgccacccatgtaatgtgatctgagaggcatcactttgtacggaagttttaaaagatccctctggcaggcgctaaagtagggttattacaaaggaaggcaagagatggtagtgtctgtccagggaggcagggggaaaagtgttgaatttgggttctgtatttgaagggagagaatcagctggtgcattggatgtgtgaagtaaaggatgacttcagagcttttggcctgagcaactagaagaatgttattgccatttatttgggaagagaggagacttgggaaaagcatgtttcaccattttggctcaagaatgatacacatt

SEQ ID NO: 134051 - DNA, 697 bp, Homo Sapiens
gcggccgcaccttgaggcgcggcttgtcttccagggcctggtggaacagaaacagcagccacacatggctgacctgctccaggccctgcaccgcctcgccctgatcgaacggcgccaccagctccagcacgccgcgtgcggccggggccagctgcggctggcgcgggatggcgaacttctccttgaagcaggagcgcacgaagccgacgggcgagaccgagtagctcatggcttacgcacgaacccgcagggtcaggcccttaaggaaattgcgcagcaactggtcgccacaggtgcggtagttggtgtggccgaacttgcggaacagtgcgctcaactcaggcttggacaccgggaactcagcagccttgaggatggcgtgcatgtcgtcttccttcagttcgaaggccacgcgcagcttcttgaggatgatgttgttggtcaccggggtttcgatcggctgcggcggacggctttcgtccttgccacgcttgaagatcaccaggccatcgaggaagtgcgccatgacatcgtccgggcagaacacaaaaccttcttcctcatctttcttgaggtaggtcagcaggtcttccttggtgacgtccatgccgccgagcttgatgatctcgaccattttgttgtcgctgatgtcgagcatgtagcgcacgctgcgcaatacgtcctcgtgccgaattct

SEQ ID NO: 134052 - DNA, 641 bp, Homo Sapiens
gcggccgccggccttttaaccttcttcctgcttgagaaggctttctacgaaaattgaatatgagctgtcgtaccggcccgactggctacgcgtgcccttgaccggtatgatccgactgctgtcgcaaccctctcccgaggccgcatgaccaagctacccgccgaggcctatgcgatcctggaaggaaagcactccgacccattccactatctcggcctccatcatgagggcgaccggaaggtggtgcgcgcattcctgccggaagccagcaatgtcgaggcgatcggcgaacacggcgagaccgcgccgttgaagcggatccatgccgccggcctgttcgcaggctcgctgccgaacggttcgacgcgctatcagctgcgcgcccggttcggagagaatgtcgtcgagatggacgacccctaccgcttcccgccggtgctgagcgacttcgacctgcacctgctcggcgaaggcacgcatatgcggatctacgacaagctcggcgcccacccgatgacactggaaggcgtcgatggcgtcgccttcgtggtgctggcgccgaacgccaagggcgtcagcgtggtcggcgatttcaactactggaacaggcgccggcatccgatgcgggtgcgcctcgtgcc

SEQ ID NO: 134053 - DNA, 768 bp, Homo Sapiens
  misc_feature (710)..(710): n is a, c, g, or t
gcggccgcgctgggtcgagaaaccgaggtggttcacctcgaacaccggaaaggtgtggcggctgtcgatggtgaagctgtcggcggccatcgcgccggcggtcatggacaggccggcgaatgcgccgaacagggcaacagcgatcttcttcatgcaggaactccttcttattgatgtaccggcgcgccgcgggcgggcgggcccggggattacttgccggcgacggccagccggaagcggatctgcacctcgtcggcgaccaccgaggtgtcaccccaggcgccggtgccgaccccgtaatcgaggcgcttgagcgggaaactgccttcgagcaccgcaccggcgccttccggtttcagcgtgaagggggccgccacctcacgcgtcttgcccttgatgctcatctggccacgcacttcgtacttgttgttacccagcggcttgaccgaggtggacacgaagcgcgcggtcggaaactgcttcacgtcgaaccagttcttgcccttcacctcgtcgttggcttccgggccgccggcgtcgatcgatgccagttcgatgtccagcgtcgccttgccggcctcgggtttggtcgggtcgaagtccagcgtggcagcaaacttgcggaaggtgccgtcgaccgacacccccatctgctgcgacacgaaggccagtgaacttttctcgggcagcacacggctgtaggtgccggncgccagcgccggcaatgccagcgccagacccgcagcgatcacggtcgaccggcacacg

SEQ ID NO: 134054 - DNA, 1097 bp, Homo Sapiens
gctggcggtgaacgtcacctatcgcagccgttattgggtgacggttacgtcccgcgcttagtgcataaaaaataaatgaggttatttctcattgccgctcgacctgtaaggaaaggccgatcaacaggccggttctgttcacttccttaaaggagcatcccgcggtcatgcaagcgttcccttcccaacgttcccccctcaagcgcacggtgcaggccgccctgctgggcgcctgcctgagcggcggcgccctgccgctggccgtgatgtccgaaacactcgccaacgacacccaggcacgcgattggcagattgccccaggtgcgctggccaacgtgctggaccagttcgcccgccaggccggcatcagcctgtcctacgacgctaccagcgtcgccaacaggtcgagcccaggcttgaacgggcgctatgagcgcgagcaagccttgggcgaactcttgcgtggccacggcttgcaggcacaacgtcaaggcgcaagcacttggctgctattgccacacatcgccgagaccggcgcgctgaacctgggcgccaccaccgtcaccggcgagcgtctgggtgccaccaccgatggcagcggttcctacaccacgggcgcggtcaccatcggtaaaggtcaacacagcctgcgggaaaccccgcaatcggtcagtgtgatgacccgccaactgatggacgaccagaacctcaccaccatcgaagacgtgatggaacacaccccgggaatcaccgcctacgcatcccccatgggcggtaaatatttctattcccgtggcttcaagatgctcggccaataccagtacgacggcgtaccgctggacatgggcaaagactacgtacaggccgacagtttcagcgccaacatggcgatctacgaccgcgtggaagtgctcaagggcgcagccggcatgctcaagggtgccggtaccgccagtggtgccgtcaattttgtgcgtaaacgcccccaggccaagccgacctccagcctgtcgctggccgctggcacctgggacaattaccgggccgacgtcgacaccggcggccccttgaatgacagcggcaccgtgcgcggccgc

SEQ ID NO: 134055 - DNA, 960 bp, Homo Sapiens
  misc_feature (429)..(462): n is a, c, g, or t
  misc_feature (911)..(911): n is a, c, g, or t
ctaggaccttcgtttgttttgtggacctgcctcagtctcctcagtatcaggcgatcttaagggaagatggagtgtttcaaattggagagaagttcatgggtaggtatcgtcctgtggaattctgaatgcaaggaagtcaaccccagaggccttggtacccccagctttctaaaactactttattacaatttatatgtatatacacatgcacatataaacgtgtgcatttatgtatgtgtgtatagtaccttttttaaaaaaacatttcctccaagctgctaagcaaagggtctcacaggtcgagcacagtgctgagaggatggtgtctgcataatgaagacatggatgaagctgagaccgtgttcaaactcactgaaaacaatgaagttctattccttttttcttcctctccaatgatcttgcagttgnnnnnnnnnnnnnnnnnnnnnnnnnnnnnnnnnnaacgttgaaaaaatgctgcgtctttctttaagccttcccagtaacttcctgccttttttttccccgtgggcttttaagtgaagctgcaggattttatctttcaatctgccctttctacccttgtcctattgaaaggatgccctcttcccttgcttttttggtctagggcctgtttggagctaactaggcttggctgagtccgggcaagaccttcttccgaggcatggacaagccccagagaacatgcagaacattgacctttccattgactgtctttcaagcagccagtgaaatcactaagtggggttcttccatgacatattttgttaatatgggtttcactttttccaagaatagtcccttgttgccacaatgttgatttactttacacaatgacagtatgtattaatttgtaattaaacccatccagattgttttagccttttccncaatggggtgggggagggaagaaggatattaaaataagttttaagaagc

SEQ ID NO: 134056 - DNA, 1048 bp, Homo Sapiens
aaaaattatttttctttcacacacatgcccacactcctggtactcatcatcacatacatatatctatttgtgagcctctcagctgagaacttgccttccgaggcaatggaagttcaggggcccgggatcatgttagaaaggtcacttcttgggaacatgggcctggtaaggacatagaatagccagagccaggctgctgcagccagaggatgcccacgcccctcccaccaggccaacaaagggcatgcacagaagccagaaaacagaggggggggcctggctctcagctaagcccattgcaagcagcaagtggtccctggtgtcacatgagggcaggccaggcagcccggctttaccagtgggaactgggtttcctaattccagaaggttggccaagaacaacccacgcccttccttactctgtggtatgattcaggggcaaaagacctgcatgcaggctcctgggagaggggaagagaaggcagttgtgaactcttccctgggatcccagctgagtggtcctctggccccgcttccaacctccagtgatagggagcctacatcctcctggggtggctgtgataatgtcattcatcagcccagcaacaccatccacctgactgtagctcctcccttcagagtctaagcaggccccttgaagcctcccagggcttgtggaatccttatgcaacccggcactcaacgaccctcctccctgacaaccaggtttggcctgctccaggccaacaccccgccttgctttcccatctgctcagaccacctcaaccaggtccctcctacagcaatcggacctgggacggggtcctgaagacagcagtttgttggagtcaataagagacaattggaaaatattcaggaattttttgagtcagttattaaactattagttgtttaaaatctgccactgtgggggcatttacatcaaggaaattggcaaacactgtaaaccaggaccttttccccacctggagaactgatttagtagcatgccactgccccattcccacagcccaagtgtttggaaagg

SEQ ID NO: 134057 - DNA, 710 bp, Homo Sapiens
tcctttgcttttcctccatcctttttctttggtggcgcttttgctgagaacagtatttcgtccagaagctggctctgatttgtcttctatgggagatccaaatccagcactaaaatgataactattttttttattcttttctttacttgatcttcttaaggaagatgaagaagaaatacttcgtccataaccaacatctgatttatcttccatagatgaaggtggagaaacgtaagatttactgttgattaagagtacagcccgtaggtcacttggttcttgtaagcagagctccttcaaaggcaacagtttggtgccgggatttatccgaccataatcatagaatccatcgttaattatgttacttgatgacaaatagccagtctggctgtatttcagggaaagattgttattgagcaacttattataagctgcctcactgaatttatttttccgagttcctgatacgttaacttcttcaaggatatctaaagccccgagcctgcataattcattggccgtcagctcgtcaccagcacagaccatcactgcccaactggcgtgcttcctcacttcatcattcttggagcgtagcagctctaccaggggctccaatccaccagaatttcttaactcagtccgggcttcaacgtcacacgccccggccgtaatggccgaattcccgggcatatgtccggtaccgtcgactg

SEQ ID NO: 134058 - DNA, 2516 bp, Homo Sapiens
  misc_feature (96)..(96): n is a, c, g, or t
  misc_feature (108)..(108): n is a, c, g, or t
  misc_feature (122)..(122): n is a, c, g, or t
  misc_feature (167)..(167): n is a, c, g, or t
  misc_feature (195)..(195): n is a, c, g, or t
aaggaatcgtgtgcgtgcatagatcgactgaggaggcgcgtgattaacagccgctggcgccgccgatatatctgagagacataggtgttgtgtgtntctacaccaacnagtgatgattagtncggtgctaggaggaacgtgcgcgtcgcgtgcaggatgatctgcgncgaggaggagtagtacatagtatgagcncgttattatgatagcacgaagagagatgcgggcgggtactatactaggacaacgagacatagaatatgttgtgttgagtgttggtcatagagacaacagtgagaccggcgtgatgtatgaagctattgtttcgcgccgccggtgcgtggcggtgttagtgaaatgggggcgagcgaaaagagaggagagacacaattagtattgtaggagggccgggcgcgtggtggcgttcgctaggggtcgtaagaatgtagataatatacatcaagaggagcgcggaccaagaggtgaatcataagtgtagctatgccgctacgcgaagttggacgagagtgtccctacgagcgccggtggtgctcggagtaaggaacgtcccgccaagtgggggaaaaagagagagaattatgaggtgtagagtacagaaccaccacgttctatcgagcgtggagagagggaccaacgggacacgtgggagcggttaaagggtgtgaatatgtgggagcgcggcatctttgagggagcgcagtgttaacgagggagattacacgggtgaaaagggcgggccaaggagatcgcgctatatgggggttatattattggggagagcgcttatggggtgagagccgcgagcgggatagtgttgggattttgtaggggaaggtgccagggccagcgagggtaattaacgcagggggtcgcttagagggggcaaaaggggaagcaagggttcattgtacttatgggggccgggccgaccaaagggaataggtggaaaaggtttttaggacccaagggggccacaaggggctcggaattttgtaaggggaatgaggggaactgggggggattagtgattggggttatgttttttgtttggcggaggggattgcacagtttatttccaaacactcagaggatagggggtggcctatgggctccatctgcctcccctccctgcatttggctgaatcaagaacttctcccccctgacccccaagaccctaggctgtgcccaatagagaaggcactgtcaccccccaccctgaggagacctagacaggtgaggagcatggagggtgggggaacagagttcaagtattcacagttcccccatctacacccctggattacactgtgccagagccatgagggaggatcccacctctgggattcctagtggtgttgatagtccttctcccacttagaaccctccagatgaactccctactccttttccctgaaataacaaaccaagtcctaagccctgtagtctgggcaaggaggagccttagcaggccactcacccaaggcccccagggatgggggtgagagccttcacctgtagtgaatgggttgggagcaagtgtctataaggagagaggaagggagagaactgagaggaccttgggaggcaggcttggaggcttctgacacgtgagttcagacagctctggtctgcgactccaccccaccccacaccccaagcccagaatccctgagagtccaactgcaaaggcagtatggccggagggaggaatgggagcaggggtagagttgagcaggaccttggcccccctctcctagtaggtcctgctcctgggacacatgcttagggacggccaggaccaggctcaggtcctagtcccatctcttagggtgctgatcttccagaatagctgaatcctggggaacatagacccaccaatccccacaccccagacgtcctggcctcaggtagaatggtgggaatgggctctcacaagggtattataaaaagctaaaaccgttaaacactttctggggagaagtggctcccagtctcttgcctccccaagttatcagtctccccagcgcctagcagacagggctaaggaggtcccagagagctgagggaggagacggccacagcccttggcccagagagagggcccactagcaccatgcaatgttgaaggtgcctctgcagcctgactggcccccacgcaggggccctccgaagctggagtgcacacttgctaaagcttctgtactcttgaggggggacccctgcaagggagcagagaaggcaaagacttcgcttaagtccaggcaggggtctgaaccgggaccccaaagggcacccttgggagtcatgatttgaagaatcttcgtaccacaactggcccaacagaaccacacccagaaccaccagcacgttcaggctcggaccattgcccaagttcagggctgccacccagccacccctctgtgcaatccaccgggcaattcagtgatgcagcatgcctcgtgccgatatacaacgcaggcctcgtacctagcca

SEQ ID NO: 134059 - DNA, 534 bp, Homo Sapiens
ggcacgagggagatccagtcgattcaccatgctcgttcacctgcctcgcgagaagggatatggcctgactgcgcgaacaaagaacggacctgcgctggccggctatggcgccgtcacgatggccaacgcactcaagaagactgtagagacgctgccctcgcagctgtggcgatcgttgacatgggaccgcggcaaggagctgtcagaccatgctcgcttcaccgtcgagtctggtgtggacgtcttcttcgctgacccgcacagtccctggcagcgcggcaccaacgagaacacgaacggactcttgcgccagtacttcccgaaaggcactgatctatcgcggtggagcgatcgatatatccaagctgttgccaacgcgctcaacagcaggccgcggaaagcgctcggctggatgactccggccgaggtcttgaaccagcatctactatcggcctgaaaactcggtgttgcgacgaccggttgaatccgccctgactgccctggtccgagtgatgcagcaactcctgcggccgc

SEQ ID NO: 134060 - DNA, 1160 bp, Homo Sapiens
  misc_feature (969)..(969): n is a, c, g, or t
  misc_feature (1059)..(1059): n is a, c, g, or t
  misc_feature (1092)..(1092): n is a, c, g, or t
ctgtgttgaccgtggtccgctttcttggttgtgcggtgtccctgctccggtgctcgtgtgcgccgcatcgttgtggctgggctgcgctgcgctcgctgccgtgtggtttcatgggcgcgcccgttgcccttgggggctgggcctccggcacgcaggaaccgtgtgatcggccctaggccttgcctagtcggaaccaaactctccgtccccgtggttggttgtgtcgcgcctgtgtccacgtattctcgaagccgtgctctacctaagtaggagtctgccgcccaaggtacgaccttttgtggtctgcttcatttgggtaacaattgcacacacagagggatgaagagatgatttggggcgcctagagattgacttgtgcccttggaaagtccatggaagaagcttgaagtgagcaggacacaaagggaggagagcagagacgggggaccgactgactcagggcagcgctgacgggaacatctgcttggggtggggcggggtgggggtgttggctctctgttccatttgttagttacaggaagctaccaaggatgcacatggtcaagtcactttctacttcccaagttcctccttataacctgagccaaacaatttcaacaatgacaatccattgccccttcagtccagcaggcgactctgacagggaggtgtgaccaccagtctcaaggctgagtggggccttcttgctggctctcgcgctttctgggagtcctgggtgccttggcccagggcagtggtgacagcagggtggaggcagaggtggccccggggacagtgaccctatataaggaagggggcggtgccaggagagattcgtttggagattggttacaaggaagcgagggagagcagaggcagagccctttttcagatacaacatacttacttttcaaatgaacaaaggcatttctatgttttaaaaatataagccccaaaaacaatgacacnaaattcatttggttaattcatgtaaaggaaaaaacagcaacaccaccacacaaacaggaaagtgggagtatgattaggaggggtgagatnaaaactattttacagtaacatttccaccaaaanactgtcctaagaacacgctgtcaatacagttcacagggaaaaagcaaatgtggtatttttttgtattt

SEQ ID NO: 134061 - DNA, 622 bp, Homo Sapiens
gcggccgcccttggccatcaccctgcccgcggcgtggtggttcgagcccatgcgcgtcgagtggaatgcctcggtgggggtggccatggcctggagcatcctcgtgctgacggccggtggcatcagcttgatgttctacatgctgcgccatggccgcgtgacggccgtgtccagcaccatgtacctggtgccctctgtcacctcggtgatggcgtggctgctgttcggcgagacactgggcgcacaagccatcgccggcatgggcgtgacgctgatcggcgtctatctcgtcgtcgcgaggaaaacggagactgtttcatgacccgagcgcaccacaaattctggcccgtccgcgtgccgcatgccatcgagccgccggccacggccctgccggacaacctgctggtcaatgcgcggcgttttccgcaccgcccggccctggtcttcctcgggcaggcgacgagctatgccgagctggcggcccaggttgcccggctgtcggcctggctggcccggcggggcatcggcaagggcgaccgcgtgctggttggcttgcagaactgcccccagctcgtcatcgcccactacgccatcctcagcgccaatgcccctcgtgccgaat

SEQ ID NO: 134062 - DNA, 1227 bp, Homo Sapiens
aatgaaatgggcacatgtgaagcttcaggacatagcctgggagcatgttttccctgtctacacacgatccagggttggcatccacaaaatctcagccaacatctccagtccacctgcactcaggttgtcagtgaccttgatatcagttgtgaaatgtttactttccgaggtctaaggttacagctgttcaacaatttttaactcctcgatttcgccaaataaatgggagtcaatgccacatggattagctttttaatcctatcaggttcacattccaggggatcagtttcaatgttcatgtgttaccaaaaagtgggaatccagcacatattgaattagaaacaccttagtgattgcggtacagtgtgcttcccaagatattctgaagaatattactgctacaacatactaacaggtgtgccaggaaaaaaggattctatggcctattaagtccctttcttgggattcatgtgctcatttacttgttaagagctctgagaatattgataatattcaatgttgttttttctttaactctgcctttgccaaatctatttgatacagattctttcaagaaacatccataacattccaggaaatatgattttcaaaatgttgatcaaggccatttcacagataagaaaactgagagctaaggttgcaaagggaatttcttagagtcagccaggttatgacaacttcaggtctagacgccattctgatatcatgaaaatctaaggtggtgagctttgcctggttttagctcaaagtgacaaggtcccatctttttatgtgtgttcatataaaataaaatctaaagactgtattctaaaagtgttattggtgatcattcctgggtaggatttaagatgattttaaattctttaattttaattttccaaattttctacaatacttatgtattaccgtagtaatcagacatatgtaataagagatgcatattttatgtttgtagtaatatacctagacactgaactcatgacaaactgagagacccagttacccatgccatttatttttggagaacaaacaaacaaacaaaaaactctttgaggtgccagcagggtccagtagaatagactagaagaagttttattcaaacaagagtattttcactgacacatttccatgtgtcatctcttggcaatcatcaaaactatttccctgatggcatacttgtgaattactccagttgctggggattcc

SEQ ID NO: 134063 - DNA, 710 bp, Homo Sapiens
ttttactttacccttaccaatttaatcattcacagtggcctcactattagagaacacatgctctctccatgaactctccccttcaaggtacattcacagcctaaataccagaagtaattttctttacgaacaaatttactgattgacaaataagcatccacacaggaagaagaatgttagggtggctggaaataacagacattcaaatacatcacacggtttaaagaggggcctagttttcctgagtccattccaaagtcagaaacaggatgtgagggagtgtgataggtggtgcatgagactccttctccagaatttccaagggatggtaacttagattcaggtctggtcaagaataataatgatgtttgaagatgaggggaatgaaatacatgtagaggcatcctaggatgcttcagttctaaaaagaattaatctacttcttcaattgtggggcctgtggcaggccttccaggcacataccctgttccgcaggcaggcccagtgcatcctccttggtagagttttgtgatgatagggttacacatctgcttcaattcctttctcttatgatcaaactcatctttctctgccagttgattgacctccagccacgaaaggagctcgttgcatttatccaatattttatttttatcagactcactaatcttggcctgtaaactttcacacttacaccactcttcatgtta

SEQ ID NO: 134064 - DNA, 1048 bp, Homo Sapiens
  misc_feature (43)..(60): n is a, c, g, or t
  misc_feature (748)..(748): n is a, c, g, or t
  misc_feature (775)..(775): n is a, c, g, or t
  misc_feature (792)..(792): n is a, c, g, or t
  misc_feature (835)..(835): n is a, c, g, or t
  misc_feature (862)..(862): n is a, c, g, or t
  misc_feature (894)..(894): n is a, c, g, or t
  misc_feature (912)..(912): n is a, c, g, or t
ccctcaactaaagggaataagcttgcggccgcggctgtaggcnnnnnnnnnnnnnnnnnnaagagttaagagtttctgtttattttcattattcgattgttagtttcttacaggcaaggaccaagcctttctggaatcctccatggtgcccaggagtgtttcatactgtggtttgcccacagctaattttcaattagtataggttgatttattcattgccactggctaggaacagtgtcgagaacatataaactctgaagagagctctcatagagctgtttcattcaaagaaatgaaactagggccagagaggacttatctgagccccaggtgtcagccaactggtaggtgttcacagggcatctgtgtctcctctttaagcgggggtaaggggcagtatcttctcgctgatttgttttccttcttacatcctgaggttatagacagtgtctcttgttcattgatgtatcccaatactaagaatagtgcttattgactagaattgaaatatcaccacatttcagcagaacgttcaggaaatctttcttatttacggtgttttcaggccataaagacactacacttcaagtgatgctttgggatcactttactcacgtcaccacgtgggttgcccaatctgtggaagccccatgcaggaggtgcccttgaagccacaattgtagccacttccttggaggctttcattacctttggctctgcttcctgtaggatccccagctgcggccangaagagcagaggacactaaagagagantatgaatgatttcatangctgttcctgactgggacatctctgatgaagaatacatagganatacaaaacaatctcagtgatatggangagctgtgggtgagatgtctttttctctcgtngcgattctggctcgaggncaattccctaaggagtcgtataatcgtatctgtctagtgttccttgtgaatgtatcgctcaatcaacacaacagcggagataaggtaactggggctagatggtatcacatatggtggcatgcgctcagtcgactgc

SEQ ID NO: 134065 - DNA, 649 bp, Homo Sapiens
  misc_feature (332)..(369): n is a, c, g, or t
  misc_feature (379)..(430): n is a, c, g, or t
  misc_feature (435)..(455): n is a, c, g, or t
  misc_feature (490)..(544): n is a, c, g, or t
actcacggtatttatttatacatacactttaaaaatcacgtattctaacactttgctgtttccttccaaagttttgaatagaattcagttgctccaagacacacattcatttacatgtgggttttttttctttactaaaatacatttacttttagtattctcaagtgcaaaagagagttgaatcttctattgcatatgaaatggagactagtcttccacaaagagtaaaatgaagttttgtaatggccatcatctgtaattgcttacaatgacagcataaactctaggattttgttttaacttcatggctacatgggtaaagttaggtttgnnnnnnnnnnnnnnnnnnnnnnnnnnnnnnnnnnnnnnctggacaggnnnnnnnnnnnnnnnnnnnnnnnnnnnnnnnnnnnnnnnnnnnnnnnnnnnntctcnnnnnnnnnnnnnnnnnnnnnttattatttaggtaaagaaagaatttatttaggtnnnnnnnnnnnnnnnnnnnnnnnnnnnnnnnnnnnnnnnnnnnnnnnnnnnnnnnctggaactagcaaaaatatgagcaagaattttaaaacatatttttgtctgatattgaatctgtattaaaggtaacttattatttaaagcctacagccgcggccgc

SEQ ID NO: 134066 - DNA, 1097 bp, Homo Sapiens
gtggccgagcgtgcccacccgcgtcttcgagccctcgccgaatgccttgttgcggtgcgggtgcttcttggcgtagttcttcaccgcgaggggcgcgcggcggtcgctgttgccctcgcgcagcaccgggttgacggccgaacccttgatgcggtcgtagcgagcgcgtgcgtcttcgtcgtcgtcgctcgacgcctcgtcggggtagtcggggatgtcgtagccctgcgactgcagttccgcgatcgcggccttcagctgcgggatggatgccgagatgttcggcagcttgatgatgttcgcctcggggagcgtcgcgaggcccccgagctccgcgagcgcgtcgccgacctgctggtcggcgctgaggcgctcggggaaggccgccaggatgcgaccggcgagcgagatgtcgcgggtttcgacgtcgactcccgcctgcttcgtgacggcctgcacgatcggcaggaacgacgcggtggcaagagccggcgcctcgtcggtgtacgtgtagatgatggtggaatcgggcacgtcagatctctccgtagaggcggccagggttgcgtttcagcctatcgcacgtcggcaaagtctcttgatgtcgagatagttttcgcgccggatccattcccgctccgcgtcccgagccgggggtgcgccaccgtctggggtgaacgggggaaggcggatcccgcacgcgcgggtgacggtcgtctccgacgatgacgggcgatcttggggctcgggggccgtgccgctaacctgggcgcatggctgacctgcgtctcgtcgaactgtccgccgccaccatcgtggcggtgaacactctgtcgctcaagcccggacaggagcagttcctcgctccggtcagctacggcatcgccgcgaccgtgagcaatccgcagacgtcgtggcagcgggtcgtgctcgacgccgacgaggtcgtgggcttcgtcagcgcgaacttcgaccccgaggcgcacgaggagcacttccgctccgtcctgtggcgcatcaacgtcgacgccgacgagcagggccgcggcgtcggcagctacgccctcgccgccgtgctcgaagaggcacgcggccgc

SEQ ID NO: 134067 - DNA, 2129 bp, Homo Sapiens
  misc_feature (21)..(21): n is a, c, g, or t
  misc_feature (560)..(564): n is a, c, g, or t
  misc_feature (1485)..(1485): n is a, c, g, or t
  misc_feature (1950)..(1980): n is a, c, g, or t
atcggctaggtacgaggcccncgtgtgtaattcggcacgaggggcggagccgagaactgtatgcagagcagagcatcgagccaaaggggagatgagtttgtctgtcctctgctgaggctacggccgggcctagggaactgggagcttgggtggaagcgacacccgtggaagtgggaggaggtggcgccgggactttaaccccttgtgggctctgcggcaggggatttaaccctttgtggatctggcccctcggaggcagcgtcatcggtagttttaaccccttcggggctgggtttcacgcactggacttaccctcatcaccttgctcaccaactcctttattggggtgctccgcttggaggtttgaggcccacctccgcccattacgtactgttcctgccgctgcacccccttggacccgctagctggccgcactgtgggcgcttaaccctttactgacttgagctccccagattgcagttggagtttgctgatagaaggactagctaaaggcgtcactgcaggaattacaaactgagtaggactctgttggactgttnnnnnttgattcttttcttttgttaaggaaaaacccatttttttccttaaggacttactagccaaaatttcttaaacttcgaggactctactagccatggccgagccattcttgtcagaatatcaacaccagcctcaaactagcaactgtacaggtgctgctgctgtccaggaagagctgaaccctgagcgccccccaggcgcggaggagcgggtgcccgaggaggacagtaggtggcaatcgagagcgttcccccagttgggtggccgtccggggccggagggggaagggagcctggaatcccaaccacctcccttgcagacccaggcctgtccagaatctagctgcctgagagagggcgagaagggccagaatggggacgactcgtccgctggcggcgacttcccgccgccggcagaagtggaaccgacgcccgaggccgagctgctcgcccagccttgtcatgactccgaggccagtaagttgggggctcctgccgcagggggcgaagaggagtggggacagcagcagagacagctggggaagaaaaaacataggagacgcccgtccaagaagaagcggcattggaaaccgtactacaagctgacctgggaagagaagaaaaagttcgacgagaaacagagccttcgagcttcaaggatccgagccgagatgttcgccaagggccagccggtcgcgccctataacaccacgcagttcctcatggatgatcacgaccaggaggagccggatctcaaaaccggcctgtactccaagcgggccgccgccaaatccgacgacaccagcgatgacgacttcatggaagaagggggtgaggaggatgggggcagcgatgggatgggaggggacggcagcgagtttctgcagcgggacttctcggagacgtacgagcggtaccacacggnagagcctgcagaacatgagcaagcaggagctcatcaaggagtacctgggactggagaagtgccctctcgccgcatggaaggacgagaacaaccggctgcggctggagagcaagcggctgggtggcgacgacgcgcgtgtgcgggagctggagctggagctggaccggctgcgcgccgagaacctccagctgctgaccgagaacgaactgcaccggcagcaggagcgagcgccgctttccaagtttggagactagactgaaacttttttgggggagggggcaaaggggactttttacagtgatggaatgtaacattatatacatgtgtatataagacagtggacctttttatgacacataatcagaagagaaatccccctggctttggttggtttcgtaaatttagctatatgtagcttgcgtgctttctcctgttcttttaattatgtggatctgaagagttgcnnnnnnnnnnnnnnnnnnnnnnnnnnnnnnnccttaatgtgaaagtaatttgaccaagttataatgcatttttgtttttaacaaatcccctccttaaacggagctataaggtggccaaatctgagaacaattaaattcattttagttataataaatttaatatttgtaaatgtaagaacc

SEQ ID NO: 134068 - DNA, 984 bp, Homo Sapiens
  misc_feature (948)..(948): n is a, c, g, or t
gcgagcggccggactcgacgcaagccaccttcgagatcacaaccggcgagtgcttccctcttgccgcgttgctgggtgagcgtgcgacacgcaccgagcacaaagccgccgaagacaccttctgcctgcaactgaacaagccggcgtttatcaagctgttcgccctttccagcccgtttcgcgattttgccctgcgcggagtcagcagcctgttggatcaggtcaaccagcaggtgcagcaaaaggccgtggaaaccctgggcacccagtattcactgaacacccgcctgggtgaattggccatgcgccacccggtcacctgcagcccgaccacgccgctgcgcgaggcagtgacactgatgcatgagcaacaagtgggcagcatcgtgatcgtcgacgagcacaaggcgccgctggggattttcaccttgcgcgacctgcgccaggtggtcgccgatggcaccggcgatttcaatcaagccatcgccggccatatgacccaggcgccgttctttttaagcccggaccacagcgctttcgatgccgccatcgccatgaccgagcgacacatcgcccatgtctgcctggtcaaagaccagcgcctgtgtggcgtggtgtccgagcgcgacctgttttccctgcaacgtgtcgacctggtgcacttggcccgcaccattcgcaacgcgccccgggtggaaaacctggtggcgattcgcggtgaaatcggccaactggtcgaacgcatgctggcccatggtgcctcctcgactcagatcacccacattattaccctgctcaacgaccacactgtgtgccgagtgatcgagctgactctggccgagaaaggtgaccctgacgtgcccttcagctggctgtgtttcggcagcgaagggcgccgcgagcaaacactgtttaccgaccaggacaacggcatcctgtttgaagccnaaggacgccgccgaagccgccgagatccgcggccgc

SEQ ID NO: 134069 - DNA, 508 bp, Homo Sapiens
  misc_feature (32)..(32): n is a, c, g, or t
gcggccgcgcgcgaacggcgcgctacctcttntggcgcggctggctcgcgacttgtcggcggcactgaccgtagagcacatcagcgaagtcgcgctgcgcaccttcagtggcgtgttcgaagcacgcgtcggcctggcgctgccggacgccgccgatggcgtgcacagcgtgagtgccagcggcttgccgattgacgaaagcatcgcccaatggacttacgaccatggccaagccgcaggccatggcaccgacaccttgtcagcagccaaaggttgttacttaccgctcaaagcgccgatgcgcgtgcgcggcgtgctggtactggaactggcccagagcgagcgcctgaacgacccgcaggagcgccgtctgctggaagcctgcatgagccaattggcgattgcgctggagcgcgtgcatttcgtcgaagtggcgcaaagcacgctggtgcagatggaaggcgagaagatgcgcaacaccctgctcgccgctatttccctccgtgcc

SEQ ID NO: 134070 - DNA, 976 bp, Homo Sapiens
  misc_feature (67)..(67): n is a, c, g, or t
aggagagctttgctttttattttaaatctgaatcaactgaaaaatcaaatctgcttttcacaccttnggctcttcatgcccaagtagctgtctgctgtggggactgttcaccctccccatgtctgtttcctccgtcactgctgctgcactgtaacagctaggccatcagcaatatcaggaggtagagaggcagaaggagattgtctatctgtgtagtgtatgcttccaggagggacacagtgctgatggaccccaaaatccaagcataactgtagtttaggtccactccactgtcaaagattaagatcagagctacagaaatgatctgcgcaaatatagatgtcatggtcccctcaaaagtctttttggttccaggccagcggatctcccccatggtgctaccgaagatggaggccacagtatcacccacacccacagccaggacaccggcataggggacgagggccctggctcctcccaggctacccttctgtgtgcagggtctggggatcagccagatgggaagagacatgcccaggagcgtgtatatgtgtgtcagaatgattggtccactgtctcgttcatccagaaaaagggacaggaagctccgttagagtgtgacccaaaggcttgatgcggaagtagcgcacatactccaggaagatgaagaccgccaggcatacagtggcggctacatagagcagtggccggtcaaagatgatacctgggatgtaggtggctaccacaatgaggtggaaatactttcgggcgatggtgggggcctggtgcttcttggactcggaagatgaccgcttggcattctggtacagcaccaccaggcaggccaaggtggccagcagagaccaataggctaggaggtagatgcgggtgtctgtctggaagagaaactgaagaagccagagcaggggattcctgcggatgagccggtgcagccagggtaggaccacaccaaggc

SEQ ID NO: 134071 - DNA, 673 bp, Homo Sapiens
gggccactgttccgtaacgactttgggcccgcgggcccccctagactattggttttaaaaaactctttcctggggcccctggtgcccccaaaagtgttttgtcttttatggctttttgtttggtgtctttcagaatccacctggactttatttgacacagaatacaatatggctacagaaacagcaaactgaaaaaacaaagcagaaaaaaacacagttccatccaatttgtaattaggtaacagcagggaaagtcattaaatgaataacaaaacaattaagcttgatggaagaagtcttttcctagtgcccatacttttggaattcccactctctgttgtccaatggacacacctgtcgtgttttgagccagcgagagatgcagtggaagtgaaaagcatggttacagactccccatgcgacagtacactcttctgaagtagcggacgcctggttagcttgacattctatgcaaagatccataatgtggttcctgcagatggcacagttatcaaccacaatatcccaggcccagagggctactgcattccactttttcacttcaaagcgcttcttgcccgcgccgctgttggtgccgctcggggtatccacatccatcgctgccgccattttggaaacacacggtctgtcgtccgaccaccgcgcctgcccc

SEQ ID NO: 134072 - DNA, 589 bp, Homo Sapiens
  misc_feature (46)..(83): n is a, c, g, or t
  misc_feature (353)..(516): n is a, c, g, or t
ccaaaatccaactggactttatttgacacagaatacaatatggctnnnnnnnnnnnnnnnnnnnnnnnnnnnnnnnnnnnnnncacagttccatccaatttgtaattaggtaacagcagggaaagtcattaaatgaataacaaaacaattaagcttgatggaagaagtcttttcctagtgcccatacttttggaattcccactctctgttgtccaatggacacacctgtcgtgttttgagccagcgagagatgcagtggaagtgaaaagcatggttacagactccccatgcgacagtacactcttctgaagtagcggacgcctggttagcttgacattctatgcctttttatnnnnnnnnnnnnnnnnnnnnnnnnnnnnnnnnnnnnnnnnnnnnnnnnnnnnnnnnnnnnnnnnnnnnnnnnnnnnnnnnnnnnnnnnnnnnnnnnnnnnnnnnnnnnnnnnnnnnnnnnnnnnnnnnnnnnnnnnnnnnnnnnnnnnnnnnnnnnnnnnnnnntgtggttcctgcagatggcacagttatcaaccacaatatcccaggcccagaaggctactgcattccacttttt

SEQ ID NO: 134073 - DNA, 736 bp, Homo Sapiens
  misc_feature (191)..(191): n is a, c, g, or t
gcggccgcctggccgcgtcgttgtaccctgcttgatcgtattcccgataaagacaataaagaggaatcaccatgctggacgtgcccctgttgatcggcggccagtcgtgccccgcccgtgacggtcgaaccttcgaacgtcgcaacccagtgaccggtgaagtggtctcgcgggtggctgcggcgaccctnggaagatgccgacgccgcggtcgccgccgcccacgccgcgttccccgcgtgggcggcgctggcgcccaacgaacgccgcacccgcttgctcaacgctgccgagcaattgcaggcgcgcagcagcgaattcatcgccgccgccggcgagaccggcgccatggccaactggtatggcttcaacgtgcgtctggcggccaatatgctgcgcgaagcggcgtcgatgaccacccagattacgggggaagtgatcccctccgatgttcccggcagtttcgccatggccttgcgccacccttgcggtgtggtgctgggcatcgcgccgtggaacgctccggtgatcctcgccacgcgcgccatcgccatgccgctggcctgcggaaacaccgtggtgctcaaggcctcggagctgagcccggcagtgcaccgcctgatcggtcatgtattgcaggacgccggtctgggcgatggcgtggtcaacgtcatcagcaatgtcccggccgatgccgccgcgattgtcgagcgattgatcgccaacccggccgtgc

SEQ ID NO: 134074 - DNA, 812 bp, Homo Sapiens
  misc_feature (159)..(181): n is a, c, g, or t
aaatttggaaaaggtgcttgaaccttttctcagaggttttatttccccagtatgtttttcactggggcctttacttaggttagaaataataggctttgaaggcctctatcaccagatgcaataaccagataaaattcctgttttttcccaatcgcttannnnnnnnnnnnnnnnnnnnnnnaactgagtagatcattctgacccagaactactttcatgaggtaagatctttgggaaaatctgaatagcgttaaccattagattcaaatctcaaatggtttcttttcaagtctagttgttttagagtatagtgagaaataccttgacacaattttaagagtaaactatatgggtcagcatatccttgaacaaaaagtagactttgtaaaagtattcatttaaattctaacactcgtggcacaaaagaatggaaattgtaaacccatgtaatggaaattggctatctttttgaccccacatgtgcccctcaaaaatgtttttggtttgggtcaacacaaggcaagatacattctttaaaatactcccagatgtgtccatacattcatcctttactcagtgcatatgtgagggttgttgctggaagacaggaggctcatctttcctttccttggtgcattgagatcagtatcaacagcagatgaaatagaatccagcaaagagttgacatgttctgcctccggccaactctagaatctttttaagcaggtcagccagtatttgcaacttccacaggatgaattgctttgcaagtttctggcactcttgtctggttggaagagtacatccaaagg

SEQ ID NO: 134075 - DNA, 476 bp, Homo Sapiens
tcttttgtgaaaagtagaattttctgaatgctttcatagacaaaaacgcatttaaactatgtttaacctggttttccaacagaaatcaaatgattttaatattatgttttgatgggttattttcagagttgtttggttttttaaacactactgaatggtttcttttaaatttaagaacaactagttcttgaaaagcaataccgtatttctctgataaatttgtagttaaggttctagaaaatctaggataaatttacttcattaaacataaagtttttaagattattcagttggcacaatttaatgcataattgggattggatccatttactgtactgtggtacagtaaagagaatgtgttcttattgaacagcagatttgtatacaaatacggaataatgcaactacattataaattgtatacgaacaaaataaattgggtcactctgagcttactattaaaacattgaaaattt

SEQ ID NO: 134076 - DNA, 725 bp, Homo Sapiens
tgatggggcgcgccagtggcgcgagcgcggacgcggccgggtgtcccggctgtccgcttatcgcaccgtggcgcggctagggccggctcggcggctgcggtgtgcccagcaatccggcgagcagcgcgtcgtccctggaaggcccgccgctgccggcgggcagccgcgcgacggtgtatccctgggcgcgaagctggcggatgacctccggcgcgtggtgcgagaacaccttgccggtgccctcggtgtgcgcagtcagcactcgccaggcgtcctcgccggccttcgtgttcggcaggaacaacgtgaacagcccgtcgtcgcgccagccgaggtcgggtgggcccgccgcgggcttcggaccgcggctcatcgccggtcccgcgccgcgggcgcttccgtgaaggcgacgacccattcctcggcgccgtcgttcacgtggcaggcgatggcgaagcgccgctggcgctccgtcacacactcgggaaagtgcgcgatgaggtgcgccacgcagcgcacgtcccagtgatcgatgaggcggtggccacggcgccgcacgtgcagcagccactgcgaccagtcggtccggccggccagcgcctgcgatcgggcccgctgccccaggggcgagcgttgcgcgctgtctgccgcgagcgccctcagcaccgcgcgttcctcggcttccagcagcgtgtagggaatgagcatgcgcacggcgcggccgc

SEQ ID NO: 134077 - DNA, 888 bp, Homo Sapiens
tttgggggatgtgatagagaggatttattcatttgataatagttagaacacataacctctgagatctctgtaatctcagatactttagttctataattctaaatccaagggtctctatagataggcttgagacaagtgtaaacaaactcatgatctcagagaaatcttcaagtggcatgtttcaatggtatgcttattaaacaaatgctcatgacagattttcacaacagtaacgaatgttatttcacaacatcaaatcttccttcctcaggaagaaatgacattaataagaaggttgatggatttggattatttttcatgtttcctggaggtaaaaccagtgtcctcacttgttttcctctttttcctcattttgaagactatttgttttcattttctttgcctcctctctggctatgtgtccccggaaggcagcttggattttgacagcagcaacctcttctttttccttatcttcctcagaagagtctaagatggtgactgatgtctcttcctccttcccagatatctgagactcttcttgtttaggatcacttttctcaggtggttcttgctcctcgaatgcatgattgttatagaagcggtcttctaccttactcccccattctgctggatcaaagttggttttctctcttttctctagaaggctctcaaaataggctgctgcaaaagctggtatattgtccggttgctctctcagaatctcgcgtgtcagcccttcaagaagattcccaaatccttgtggaattcggtagtgggtgttggagaatggaatcgacatcttcttggtaagaactgcctatggaacctcctttctctccgagctggtgccgccggttccggttgtttttctagttgctgggtacc

SEQ ID NO: 134078 - DNA, 894 bp, Homo Sapiens
  misc_feature (165)..(732): n is a, c, g, or t
  misc_feature (750)..(750): n is a, c, g, or t
  misc_feature (812)..(812): n is a, c, g, or t
gaatattaactttcttctggactgcttactctgttttgacccattataatgggtctgtttcacccccaaactgtatggtcacggggatagattgacaagcccatagatgccattttacataatctctaagctgtttttcagtgacttcctcgtgccgaattcttnnnnnnnnnnnnnnnnnnnnnnnnnnnnnnnnnnnnnnnnnnnnnnnnnnnnnnnnnnnnnnnnnnnnnnnnnnnnnnnnnnnnnnnnnnnnnnnnnnnnnnnnnnnnnnnnnnnnnnnnnnnnnnnnnnnnnnnnnnnnnnnnnnnnnnnnnnnnnnnnnnnnnnnnnnnnnnnnnnnnnnnnnnnnnnnnnnnnnnnnnnnnnnnnnnnnnnnnnnnnnnnnnnnnnnnnnnnnnnnnnnnnnnnnnnnnnnnnnnnnnnnnnnnnnnnnnnnnnnnnnnnnnnnnnnnnnnnnnnnnnnnnnnnnnnnnnnnnnnnnnnnnnnnnnnnnnnnnnnnnnnnnnnnnnnnnnnnnnnnnnnnnnnnnnnnnnnnnnnnnnnnnnnnnnnnnnnnnnnnnnnnnnnnnnnnnnnnnnnnnnnnnnnnnnnnnnnnnnnnnnnnnnnnnnnnnnnnnnnnnnnnnnnnnnnnnnnnnnnnnnnnnnnnnnnnnnnnnnnnnnnnnnnnnnnnnnnnnnnnnnnnnnnnnnnnnnnnnnnnnnnnnnnnnnnnnnnnnnnnnnnnnnnnngctctctgttccgacctngcgctttacggatactgtcgcttttctcctcgggaaggtgggcttctcatactacgctgtangatctagttcgggtagtcgtcgctcagctgggtgtgtgagaccccgtcagcgacgtgggctatcgtatacgctgatcaacgg

SEQ ID NO: 134079 - DNA, 1134 bp, Homo Sapiens
tttttttgggatgaataatatattttaattttattttacaatagggaaactgacaaatattgaattcctgaactgagcaatcttggcctgtaggcccatgaacttggagaaaaaattaaatctttatttttattaacctttaactcaaatttagcattttcttaaaatatggatataggcaagaaaccacagtagaatcagcagaacttgtgactttgtcaccaacagaaatcacagatattttcataccacatgatatgttgtagctatctcaagacattgtttctattcatcactactttgaaattctgggagtccttagatcactgctagatcttaatatttcatgcatcaaggaacacatatattactatattacaatttttaaatatttcagtataatcaatttcttcctatgtaacacagcataccttattttatgcgtttaaatacgtaggcttcaccagactaccacagattatgaaaaaggttaagaatctttgcttaaaggaaatgctaccttagagctctgttagcctctcattcactaatttgccatggatcataaattaatataatgcagattttttttgaagcctagcaaaggaagtttagcttttaaagcattgaaaggacgtcttatcactaagggattcccatagatttaataacaaaaatggtactataggaagtatattgatttgatcttctgcattttctggataaaaggatgtatgcagaacctttcagctgtcattaaacataaacaagagctaatgcataaggcagctcatgaaacttattcaagactgtaaataattgataggctgagcttgtggtggtgctgcttcatacatccttaattgattaaacattttttgagtgttgaagttaatggtaaaaataatagccaacagttgggaatgtcatttttccagtatttcttcaattagggtaatgtacattaaacacagacttttacgtcctctgaccactaaagttatggaatccatattaggaaaattcaagtttggaagtttgaggcttttagaaatataagaagtgttatttaagcaaatttaaaattttacattatcaccgcgagcagaaaatgcaagggtttgtgtagaatat

SEQ ID NO: 134080 - DNA, 1105 bp, Homo Sapiens
  misc_feature (158)..(158): n is a, c, g, or t
  misc_feature (176)..(176): n is a, c, g, or t
  misc_feature (220)..(220): n is a, c, g, or t
  misc_feature (400)..(400): n is a, c, g, or t
  misc_feature (1017)..(1031): n is a, c, g, or t
cccagcagaccagggtcaaacatataaaagcagtaaaggtatttgtggaagtagcctgtaaatgtaaaccgggagacaccatgtaactgaacagggcgggcgtgagaaaaatttggaaggtagattattcaaggtaatggaaggtccagtgggggtantggcggtcatgaagaatntaattggaggactcctaggaccaagcaatacagaagggcgtganctgtgatgagattcattatgtgcaaggtgaaagcacaaatcctcacataagagaaatggatgcaacatggcaccccaagaggatctctcaaggggcaaacagctgcatgggcttaccggatagacgttgaaccacaccagaagtgccttccgtgttggaggatcccaagaggaaggagantcctgcaaaacacaaaaaaaccgcagcccagaaggggctttggacctgagtgtaaccctgatgtcccctttctgcatagggttttaaccgtgtccatatccagaggaatgtgattctcatcagtaagtttgtgacaccagcaggcgatgatgagaacagtcaagtgtttaactgtaagatgagtgatgaggtgatcgcatccatatacagcttcaacagaaagtggagggcgtgtaatatgtggcaatcctctcaaagggatgaatatccgaaagatgcagattagtgaaactgaatctattggtgagattatacaggagagtctccttagtcgatgaagtgtgagtacccccattcatgtccgagtggaaccaagcgtggttaagaccacagtgaaggtaaacatcgtcaaccagtgccaagaggtaatgatcccgccattgaaaagatgtatcctcacgtccgagaatgtaggcacagtaaattacttggcttgtggggggtgtctttggggtttggttggttcggggtatggggttagtcagcggtgtgtgtgtgctgggtaggatgggcgggggttgtgttgatgagattagtagtatgggagtgagaggggnnnnnnnnnnnnnnngcctacagccgcgccgacaagctatgccctttagtgaggataattgtagattgacactggccgtcgttaccacc

SEQ ID NO: 134081 - DNA, 915 bp, Homo Sapiens
  misc_feature (560)..(640): n is a, c, g, or t
  misc_feature (662)..(688): n is a, c, g, or t
cctgggtggtggagatgtggttgtcacaggctggtctgaatgcaggatggggacatgacacgtggcttcactaagacatgggccttgagtttggagaacggaggtggcctgagctttggctgggaaagcccgggtgtgggtggggagagggtgcctgagaggaccatgcccagccctggattgaggcatgtgctgcttatttgcaggagtgagacccaggcttatctgtgggattacacatctctgagggagagaagaaccaggaccagaacggaggccagaaagtggcttacctagcatgtccgactggaggggccaagtccaagaaggaagagaggcgaagtggggcctacctcaggcagaggatagattcctcccatgaggagttcaccactagtggaggcggtggggaggataggccataaagaaacacacagcaaatgtacagtatagaaggcagaaagaaacacacagcaggccccggggaggaagaatgggtgccggtgagggtttcctgtgttagacaaggctttctgaaaggtgacctttgtgcagagtcnnnnnnnnnnnnnnnnnnnnnnnnnnnnnnnnnnnnnnnnnnnnnnnnnnnnnnnnnnnnnnnnnnnnnnnnnnnnnnnnnacgagagcaaaactccatctgnnnnnnnnnnnnnnnnnnnnnnnnnnncccagcaccacctttctgccctttctacctccatgtgtgttacctaagtggccaccaaatgatacatcaacatagcttaacccactgcttccaagtccatcaggccgtcttcaccattttccttacatggggtacctgggagctgccctcaccactgagtggactcaggtcttccttctctttgtcacagtcatgctgtggagaaacgggcaggttgtgccatctgt

SEQ ID NO: 134082 - DNA, 1343 bp, Homo Sapiens
  misc_feature (359)..(368): n is a, c, g, or t
  misc_feature (802)..(802): n is a, c, g, or t
gttgattgttttctttgctgtgcagaagctttttagtttgatgtagtcccactgtttatttctgctttggtagcatgtgcttttcatgtcatatccaaaaaaagcagtgctaagacaaatgtcaatggagctttatccctatgttttctttcagtagttttacagctttaggtcttacatttaaatctttaatccattttaagttaatttctgtgactggcctcagatcggggtcgtagttcattcttttgcatgtagatatccagttttcctaacaccatttattaaaaaggctattattcctcattatgcattcctgacacccttgtcaaatattacttgattccatgtgtgtgagnnnnnnnnnnatgtaaaccatttttattttatcatggaactcttttgggcaccattatttccattagcatagaggtagcttcagttaatattctataacaaggcagtaaatgccccatcaagtggaaattctctagttcagttgttgttatagaaaaacactcacagtcttttgccattcagccccgatgaatgctccacacaaagggctatgcagtgactaattaatctagactagcactccaggtactaccctatactttgtgggcttaggtgattttactagttcccatttagcatgtttaattaacatttcctaaaagagcagatttacatgccttcagcttcatagtactagaaaggggaaacatcccagtcagatgcagtacccattttaataagacatttaggtaaaggagttcaactaccttatattaagcttgtnttaacatcttacattttataattctattaatctgtgtgcttttatattctggtcccaggccttttctatccccagaccattttaccttttatggtgaaaaagggtttgggttcccagcagggagttgcatgtttatgtgtccattctggataagtcttgcagaaagtttgatgaacactgtcaaggatgtacagagtagggtaaagcttaggcacaggtctagggcttgaagtgtcaggtggtactcttcgtagtgtggtgggtccacacaggctaatgggaattttgcatatggataaggaaaggtaactgcatagccaaggtaattagtccctgcaatccctgaaaatgaatagaagcaatatgggcccaggagagcagattccaaggctattgcaaaatgaagtggacatcccataatgctcagaatcacaaaggtgaaagtagcttcccccaggtacctctgggtccactctctgtaagccaacagtagaagcacaccagttgtgatggccaaagctccattccagataggacaagc

SEQ ID NO: 134083 - DNA, 291 bp, Homo Sapiens
gggagtactttgttgatttgccagctttcctatctcaatggtctctctaatgctgtgagtagaatgctgaatttctccactattattgtgttacctatagagatattgtgttacctaaagagatgtgtccatctctttctataggtttaataatatttctttttaaagtctgttttatttgatataagacagatactgctgtctgtttttggtttctgtttgtgttaatatctaccccctttacttttagtttatatgtatcttacaagtaaagggggtagatattaacac

SEQ ID NO: 134084 - DNA, 420 bp, Homo Sapiens
  misc_feature (199)..(208): n is a, c, g, or t
ggcacgaggaagatacgcgccgccgagaagcagtgcctgggtccctcacggaggaaattgtcttctccttagcccgttcgcttggcactgaggtccctggcgtccctggtttgatcccagggtacgcctcgggccactagtgttaccccaaggtgggcagaaagcccataaggggaaggcgaggcacctggggcagagnnnnnnnnnncttcgctgcagagaagcgcggcctgattccccacggacgaaagtgtcttcccatcagtccctgcactgggacccggggaccctggtgtccctggttcgagctcagggtgtgcctcagccgctacgtgcaccccaaggggagctttgggagcacaaagcccatgagggaaggtgagttttgagggaggagtggtgaggcacctgtcacagaaa

SEQ ID NO: 134085 - DNA, 695 bp, Homo Sapiens
aggttcattgttaaattgcttatttgaagtttttcctcttttttcatgtaggcacttatagctatcaatttgcctcttagtactgcttttgccgtatcccataggttttggtatgttgtgtttcctttatcatttgtttcaagaaattgttcaatttccttcttaatttcttcattgactcaatggtcattcaggagcatattgtttaattttcatgtatttgtagtttcaaaaattcctcttgttattagtttctagttgtattccactgtggtcagagaagatgcttgatggtattcaacttttttaatgttttaagacttgtgacctaacattttatccaatggctgcagaatacacattcttttttagcacatgtatcattctcaaggatagaccatatgttaggtcacaagtcttaaaacattaaaaaagttgaataccatcaagcatcttctctgaccacagtggaatacaactagaaactaataacaagaggaatttttgaaactacaaatacatgaaaattaaacaatatgctcctgaatgaccattgagtcaatgaagaaattaagaaggaaattgaacaatttcttgaaacaaatgataaaggaaacacaacataccaaaacctatgggatacggcaaaagcagtactaagaggcaaattgatagctataagtgcctacatgaaa

SEQ ID NO: 134086 - DNA, 1024 bp, Homo Sapiens
  misc_feature (793)..(793): n is a, c, g, or t
cagttttgacatggctttactctctctaagtgcgagtgagtctgggcatgagtgagcctgggggtgagccatatgtacagctttagtagggtaaccataccttttacagacaatagtggttctgagcaaaacatgagcgcacgtgtgtgatcacctaatgcacctcacatggtgtggttacataatgtgcagggctgtgcacctgtgctccaaacccactgagttatgctgctttggaaggctgcctcagcttattcctgactaaagtgcagccattttccttaccctccactccctaggccaagagtgtcctccgggcagagacatgtgcccatacagcagagccctgaatctataacccacaataacaatacagagagcaacagctactaggatcccagttatgctatttataactattggggcccagcataggccagagcctagggatgcccctccttctctgcaggggttcatcagtaaggctccctagaaacttattctcccatgagaccccttgaagggctgctgttatgttctgctgactgtcagggataaaggtacaacattgtgttcctaaaagggtacagatgcctccttgggcagcagttactatgtctaaggccattcggttttgcaacaccaccttcctgatctgatcaactgcatcaattgacaggaggagggcccctcgggtgtgattcagagcccgagcggtgtgctctgcaaaagcagtaacttctgcttttacagttatgatacccactccagggatagtcacttccaaggtganagaaccaccagggggctcatcgcactcacaaaaagtgagagcataacacctcccagttattctggcatctgggcaaagcagggagaacagtgccaggtacgtaaggccaaactcaggtacaacgtccaggccagtctgctggtaggtaaggacaccctgtgtcctcaatgacccataaactcccaggggtcataaaatccatcagggcctgaccttgggtggggccgcatg

SEQ ID NO: 134087 - DNA, 670 bp, Homo Sapiens
  misc_feature (84)..(84): n is a, c, g, or t
  misc_feature (90)..(209): n is a, c, g, or t
ctcaaaaaggaaaaaagatagtggttacttaattaataaatctattaactgatatgtagaaaaacaggccagggcacagggcancacacnnnnnnnnnnnnnnnnnnnnnnnnnnnnnnnnnnnnnnnnnnnnnnnnnnnnnnnnnnnnnnnnnnnnnnnnnnnnnnnnnnnnnnnnnnnnnnnnnnnnnnnnnnnnnnnnnnnnnnnngattagccaggtgtggtggtgcatgacagagcaggagcatcgccatcttggacaaataccaacattctgtgttcctcttgattaaaaactgcctaaatccagccccagaacgtcagtcccagaacatcagggcatttccctatgctgggaaaccaactcccagcataaccagaaacattccaaccctaagataaaaccctttccaaccagaaacatgccaaccccaagatagcctcccctctgacgagagacattctaaccctacaataaactttccctcacatagaaacattccgaacctacaatgatcttcccacttcctaaactcttaaatatccttagtctgttagaacactcctgaccaaaatcaaccagaagcccttctcaggtttattctctaaataaacctgtctttggctgttgagcccctttttgtgtttctttcctctttaattcttaca

SEQ ID NO: 134088 - DNA, 1034 bp, Homo Sapiens
  misc_feature (966)..(966): n is a, c, g, or t
ggcttttgcacaatcagtgcaaatatcaacacagcaaaaagggcaaataatcttagtattattatgacattacattcgccctcatggacccgtgaaagggtctcaggtcctccatctcacactttgaccactgcactagcatatacagagttgtgtattcaaaagctacttagcttcgtggaattctctgtgtgggtgtgttgacttaattttacatttagtcaggttccatttaggaaactggtaatccttaatctatttactttcatccttattttaatgcttcttgattaaaaataattagaaaataatggttcaatcaaaggaagtgtaacataaatacagaaatgggataccccaagttcagtgatgctgaagggttaatacaaacactttcccaccatctaataaaatcactgcaagggacaaacaagaacaacacttacagaagtagagttccactaacaatttttttaccagccacacgtagtgcagcactagcaaagcctaactctgacatcattcttggggaaaatattgaaacttttctcaaggaggtatgttaaacaatgtttgccaccttatcttttcaaagacaccttttgttgttgtttagcactcagaactaatacgcaaggaaaacacccagactagagaaacacagacaatacttatgacagtgtgcctatgttgtagctacataatagccactgagttcagtctctgcagaggcactaagagggacagtgtgtcaatttcagtctttttctttttggcttctcaccattctacaaaattcaaacagccctgctggcccagaagcttcttttaacataaatggtttaaaggaggaggagcaccccatttatggatttaatctcgtgccgattcttggcttcgaggccaattcctataggagtcgtataattcgtatcatgtcatactgtttctgtgtgaattgttatngctcacattcacacacatacatccggatcataagtgtaagctgtgtgcctacgagtgcctactcaatg

SEQ ID NO: 134089 - DNA, 670 bp, Homo Sapiens
ccctctcctcgaatcatttcccaatactttactgtgtgtttcttgcaataaggaccttctcctatatgcccataatacaaccattaaagtcaggaaattattataacattgatacattaccaccatctaatccaaaggccccattcaggtttcactgaccatcccaataatgtcctttataatcttgcagggcaagattatcatagcatttaattgtcacgtcttattccggcagattcatcagtctctttgttactttctcgaccttgatacttttaaagatacaggccatttatgttgtataagagctctcaattggggattgtctgatgctttttcgtgactagaactaggtcgtgcaccaattctaggcttcaacaccccatgccagatctctgtcctatcccctctcattgatgcttactttggttggtgccctttagtgactttaacactgaatatttgaggaagaataaaagatgaaacactgattttaattagggtgacatagactctgctttaaacaacaacaacaaaaccaaaaccctctaatttcccagtctctcatgaggctacccaagccatgtgatttagctttggccaaggaatgcaaagagaagagtaatatggacattttctcagaatgaggaccacatatttccctcgtgcc

SEQ ID NO: 134090 - DNA, 1208 bp, Homo Sapiens
  misc_feature (693)..(786): n is a, c, g, or t
  misc_feature (828)..(938): n is a, c, g, or t
  misc_feature (1089)..(1114): n is a, c, g, or t
attagaagtcttataaaagtcaacttttccaacccttcctggagaaatattcctgtacactctcacttctgtgaagtatttcctgagtttctctctttagtaaaaccttactaaaagtaaaatgtaaaattcaacacagtattacttttgctcttttcaatcatttcctctggagctaatctaaacagataggtgatctgattttgaattatttcaggtgacagttttactaattactttgccactgcaaacatgggcctcctttttctagcctccaaatcacattctctaccacctgctgcatcataaataagctgatgtaacatattttaggttattgttttagcagtactccacttcttgtaccaatttctggactagctatggtcattctagctcctatacatataaattctcaaatctcaattttttctcttacagtaagtgcaaaaaggggtgtttctaattggggtggctgtcttccaagtactgtttcagccactcattcttctcttttctggctttggcatctccaatacatagttttgaaggtcaccatgctcaaaggcatcaagttgacgaagaaagagtaagggagaataggaggacttcattaaccctaaaaatgagcacatcatttccattcatatttaattggctagaagttaatcacggccaggctcggtggctcannnnnnnnnnnnnnnnnnnnnnnnnnnnnnnnnnnnnnnnnnnnnnnnnnnnnnnnnnnnnnnnnnnnnnnnnnnnnnnnnnnnnnnnnnnnnntctactaaaaatacaaattagccgggtgtgatggcacatgcnnnnnnnnnnnnnnnnnnnnnnnnnnnnnnnnnnnnnnnnnnnnnnnnnnnnnnnnnnnnnnnnnnnnnnnnnnnnnnnnnnnnnnnnnnnnnnnnnnnnnnnnnnnnnnnagagccaaactctgtccccaaaaaagaagttcatcacatgactataaccaactacaaggaaagctgtgaaatttagtttagctgtgtgcccgggaagaagaaataagtttcatgggctagtcagtccctgccagaggttctaacggggggnnnnnnnnnnnnnnnnnnnnnnnnnntgactttacatgccttgtccattttaatagttttgaaccttatccccgaccgtaatggccgaattcccgggcatatgtccggtaccgtcgactg

SEQ ID NO: 134091 - DNA, 414 bp, Homo Sapiens
ggagacagggtctcactctcacccaggctggagtgcaacaaagagagaccccatctctaaaaataaataaataaaaacacattatggatttggtaagactagtagaaaaggcagaaacaataaacaataaataaaatgaatgggtggaatcttttaaaacaccttttaaactattaataaaacctttcttttctcttcatcttcatatgttagtaggacttcacagtagtcccatgcttttgcctggaaacacagatcatcagtctatttttaagggattcttcttaggaccaaaacctagaaccactaacctggcccccgatctaccctctcttgcccccagtgaatcactgtgacctaaaatgccacagccttcccccagctgtccaggcccggcctgcccttcacagatac

SEQ ID NO: 134092 - DNA, 630 bp, Homo Sapiens
cttttaacttgcttcattgcaggagcaaatgaggtccagctgaggggagggaaccagccatggtgacagagcatgggctgtgtgagcttgggcgagagtgggggccctgtcaccctcagtttccttccactggcttttcagacagctgtggtccctgtaggctcagatttcatccctagcaattctgaagaacctgctatccagtaacaggtcccattccttggagttctttacctagaaacctggaataattttcttttgttgcagaggaaaatgctgaggttgttctttcatggtctaagaacttgagtagtcatggcaacgcatgagggtggggtgggtgaggtgggggcgtcttagcagtgtttcgtttcaaatgccagattaaaggaaaagcgtctttggagttcgcctcattaagacatagctcagtgcagtctcgttgatggttctccagctcatcattttacacattacattttccctacatttcctcgcctgatgggcagtcttctgggacttctccctgagaattttggctccgagacttctccaagaatttcagctcatttctggcaagagcgttggtgggggtgactcttttgttcctgtcgaggacctcctcgtgcc

SEQ ID NO: 134093 - DNA, 841 bp, Homo Sapiens
  misc_feature (125)..(137): n is a, c, g, or t
  misc_feature (468)..(476): n is a, c, g, or t
  misc_feature (686)..(784): n is a, c, g, or t
agaacgagtccaaggtcatacatccgttgtgtggtacagccagaaccctactggacacacacatctgttgagttatatagacaatcttcttggacacacctgtggtgtggggcagtcagtctccnnnnnnnnnnnnncttggcctcggttccatttgtgtctttttagataccgtggtgcttctacttttatctttccatcatctgtggaaaggtagggttaaagtgtaatataatgtgtcactcatatacatcttctgagctaccagtcattaccagggtattcgaagtggtttgctagtactggtgtggatttggattgtctttttgcctctgtgagatgcctggagttaacagttacctgtggccaagaaaagaccgtacttcattagaacagaaccctaaaccaaatgatctgatcatcttatagataatacagtaaatgagaatgtaaggagaattttaaacnnnnnnnnnaatgggtagtttacacataatgatatagtaatcatcacattcatctccttgacttttgtcctcttaatttggtaggtagacatcagtggttttaagatcagtttctagtgaggagggcagggtttgtatccttctctcattcaactgaaaatcatttaggcttttcttttaaaaagataaccaaagtaatctaagcttctggtagaactnnnnnnnnnnnnnnnnnnnnnnnnnnnnnnnnnnnnnnnnnnnnnnnnnnnnnnnnnnnnnnnnnnnnnnnnnnnnnnnnnnnnnnnnnnnnnnnnnnngatttgaggtggtagtgagttaggatcatgtctgtgaatagcattgcactccagcct

SEQ ID NO: 134094 - DNA, 355 bp, Homo Sapiens
  misc_feature (156)..(164): n is a, c, g, or t
  misc_feature (166)..(281): n is a, c, g, or t
ggggctgtatcaaaattttaacattggtgctgtaacatacgcactgttttattgattagttgtgactggtgagaaaattgtagagtctctaaaaaacttaactttaggagcataagtgcattcaaaactaaatccctattgactagcacagcgttnnnnnnnnntnnnnnnnnnnnnnnnnnnnnnnnnnnnnnnnnnnnnnnnnnnnnnnnnnnnnnnnnnnnnnnnnnnnnnnnnnnnnnnnnnnnnnnnnnnnnnnnnnnnnnnnnnnnnnnnnnnnnttagtggagtatggtggcgggtgcctgtaatccctgctacttgggagactgacatggggaattgcttgggccct

SEQ ID NO: 134095 - DNA, 967 bp, Homo Sapiens
ctggaaacatgatggatttttattcagtgttttattggccaaacacatatcttcgggataagatcttcggaaactcacagggtttgatggaaatgctcacagccttcttccacacacatctctgtcatcgctggcttctggacttttcgttactttagcctgggataatattcatccttcacttcatctgaccgagacacaaggaaagtttatacctcaaactatgcacgaagcagaggaagctcagtttcagggatctttgtgaggttgtcctggataagggtcccgtgagtctctcagaaatttgtcctcccagagtcaattcaacctggggacttgtcatagctctgtggcctcaaaagcctctcattcccaggcactgtgacgggaacactgggctattgtgtgacagggctagctagcgtgtgcacagctctcggctgggatcagagagaagtttgcaggcagacccaaggttttagaatcacagaaatcttcacatctcttcccttcccaggaccctccatcgtggcttctggctgagattttaggagaaggatgctcagtccagttggttttcaggttgtgtccactctggtgagaaaagagtccggcttggtgggggtgggcataagttaaccctctcagggtctgaactttggggtggcctctgggtttcagcgccttcctctcattgagtcccaggctgctgacccccctgtctggatgtcctcatggtgcctggggcatcctgccttgggtacccactatttctgcaccccaagggcaaattctgtgtcttacttggtgacccaggcgccaccttcagagtaggaattctataaagactcccataaagctgaatgagggaaggacccagcaaagggtggaaagctgagattgaggagctgtgcttggggaaaaccccaacataactgtgttcttttcagcctcgccgaattcttgg

SEQ ID NO: 134096 - DNA, 698 bp, Homo Sapiens
gatgccttctgtccatatggccggtctttgcgtgggccattcttcaaggtgccatgccttgactgggtcaacatggccagtgcccgtatggtgtgtaaaacccagtcctggaaagctggctcccctggaggtgttgtgcaattggggcagccggcagccagcttctgatgtggttggctgcctggctcacacctctcaggtgctgcggagacagcaagatccagtggccccaggctaccacggaggcgggcagggtgccacgcgccttcccgagccattctgtttcctttgtcttcaggagcccagcgtgcacgggccctggctttccagttcttcaggctggctgcctggcatcacagcgaggcttcaggcgggcccacctgtggaatatattgggtaaggttggctcggcctggcttttgtgaattgataaaaggaactgtggatccagggattcttcttgaatgtagatgtttctagttcggtgtctcctattagataaaataaacatgtagcacacacaaactctttgtccaactactgtttttctgttgtttccttggttaatttggatatttataaatctcaaatgcggtaggccaggatgggaggttttttctgtctaatgctaagatactccactgaacacctctcctaagacatagccctcgtggccggtgtggtggctcacgcctgta

SEQ ID NO: 134097 - DNA, 519 bp, Homo Sapiens
ggcaagaggaatcaaaacgttactctaagtttccttaaagtcatatttcatagattctgtcaaataaggaagtttattttataaatagctcttggaaaaaaggaaggtaggttataattgggaaagcatcttttatagttgtaggtattggaagaagaaatgaaggctaaaattattattagcagagactgcttttaggttttttacgattttctgtttagatgaaagtaggattactaaattgtggtgaaaacttattctgaaaatggctgttaagtcttaagtacaggggtagaatttcattagtttttcattgtttagtaatgtagattgagaagtgtgtcatgactagtatggactaccttaataaatgttaaatcatgatatagtaataaccttagtgcatgtggctattttgtatttagtggtcaaacatttgttgaacatttactatgtatataaatatacttgtcgtcttgtctttttctctctccctcccttcttttaccctctccaccc

SEQ ID NO: 134098 - DNA, 792 bp, Homo Sapiens
catattgtcagatacttttccctttgggatatcagccatcatctaaatgctttgaaaggccctcctaattcagagatgaggtaaatatttacatgtatttcctattaggttgtgtgtatgtgtggagtttaacttcttaattttgactttaatttataacttcattatgatcatgagatgcccaccatgagggcaaagttcctgcaactttttaagcttgtcaacagatgaaaaggtcaaattaccaccccaggaaatacacaagtttaggcaaaagtgagcctaaatttgacacacagtaactcgtaagcatccatgctgtggtccagcaaggccgttaggcataaagggtgagcagatctcagaaggacgccaaacagcatctcctctccacaagccaagccatgttcagtgtttctcctttcacactgagaattccccagtgcttatcatcagcacatcctgatggttttcctggactccctcctcccaccacaccatgctcgacctcacaaagatgcaagggtcctcgctgggggtccctgagctccacttccctgataatctcccaccaacaccaaaaggaaggatgaaactcctcaaacccaccctaagtggtgactagtgtctgcctggatggagaagcccaaacaaacatcaccgaaggtgatggattcgagcctggagcagcgattctcagtaattctcaactgcagagcccagtcagctgtgaaatgtcatcagcaatatccgtgataataaagggatggctgggcgtggtggctccaaccc

SEQ ID NO: 134099 - DNA, 300 bp, Homo Sapiens
  misc_feature (227)..(227): n is a, c, g, or t
ggctgtaggcttgtttttattcttttgtggtggcaagtgccagcatgtggggtaggtagggtgaggcaaggtgggtgacagtaaaggacactgtgctcaattcgaagctacgggaggagagagctctagtcctagatttgcaccaaggagctttgagctctcagtaattcagcaaccctgggctgtcatttcatctataaaatcagagggttaggtgttctccacangcctcctcctgcactcaatcctatgataactgctgaaaactccagcatgggacaattaccagtgcctcgtgcc

SEQ ID NO: 134100 - DNA, 773 bp, Homo Sapiens
ctttgtttttgtttgtttgcttataagtgtgagacccctgccacaattgacatgtaaggaaaggaagttaaattgtatttttatttttggacattagctaaaagtcggtggagattttaaatgctggttgacaattcagagggtcctacatttgaaaaagacaattgcctttgatctgaaaacaaaacagtttatatccatgtttccaggataaaagataaaagggctcttaaaatatatactctgttgtaaccactgtaatgttataatggctttaatttcgtagttaggttttgctgacttcataaaccacaaaattgattcctttctgttcatctgaaagtgaaattacagctttgacctgtcttcctgggttaggtggaatttgtcttgtggtcgaagtataatattaatacatgggctgtttttgtgtgtgtgttttagttcaggaaattcacaagctgaaaaattaatgtctatgcaagtaaaattacttcatggtatgtattgataaaagaataaatgtgctaaaagactagaagtaaacctgtataagtgaaatattaccaaccgatggtgtaagacttacttattcaaagttgaaatttgcatcatgttagacagtaaatgatttactactatggctagtttttctttacaaaatcagtgtagacatcgtttattctattagcattatagtaagaaagaagactaatgccaaaacaattttttaagtgatgctaagcgctggggtcacccaaacttgggtaatt

SEQ ID NO: 134101 - DNA, 974 bp, Homo Sapiens
gttttacatttatttatttagagagttctaaatatatgctggtctgttgaaacagtctctgggaccaagtacaataaaaacattaattaaaacacacaattagaaacacccagcagcgaacctggaacagcatcaaatgagctctcccgtttaaatgtcagtcatagaagataaagcctgcgggtgacctgcaatgtggtcccctggcttttctgtggattcttaactgatgctgaggtgagcactctctgccaatggatgaccatacccaatcagtccatttctctcctaactctttatttggcacagactcttcctgcctcttcttttattctgcaatggactaatgagaaattcacagaatccccaagcttggcagagatctgggcacgagaatcttacataacagttgggctttggcagggcaggaccagaagggctgggagccctcagctgaagtgtgctctgcaatttgtgggcattgtcactctctctgagactgtatacccttgcttatggctctgaatacttcagaatccaaaagcagcagcagaattaacatggaatgcacacagaaagagtcaaagggaacaacactgagggaatagcatagattcagaaaatgtgaactcttcagatttggaggtggggaacccatctacaaaaaaaagaggtaggaaactttcactcccttgtgacatagaaattccaaatttgtttacacagttaattcggcacgaaaattttgaatctagcacagacctgttaagaaataagatcttgttatttgcagacatgttctgtcaagggattgtaacctgtgaaggatgccatcaataggaaatatgactttataaattccatctttttcttaaaggctctcaagtaaaacaaaagcaaaagattttcgcttccttcttttatgtataatttcccacaaacctcccatcttagaaaaacaagaaaagagatgt

SEQ ID NO: 134102 - DNA, 1002 bp, Homo Sapiens
  misc_feature (740)..(808): n is a, c, g, or t
gagggagaagtatgtttatttgcattttacagatggggaaactgagacagagtggttacataaatttccaaggtaatgaatctagtgactggtggggccaagatttgagccctggcagtccagctccagagctgggctcttggctgctggatcacatttccatacctactagaagcagcaaccagcttgttctctgtttcctagaagagcttttccaaatatgatagcagaacaattgctcatatagagagaatccagctacacttatttatgcatttatttatgttggcttttgggatacttctaataattccatttagcatcaacatagtcaacactactaaactgtaggcttgcattgcacatgatcaagaaggccaatctcctgaactttgtttgctaatcattgtacaacacagttgatattataagacaagcaaaattatttacctgattttgctaagaggaagggggaaatgtgaaagtgattcaggcattgggctagagagaagactcatccactctgatattatagcttattgtattgtttatcatatatagagaaaaattcacattgacatcaaaatactaactgactgactataggagaggaagattttcaatttctcaatttgcaacgtttaagacaagtgtgcatttttaatgagatttctgtagttagccagtcaactgttcttgcttgtgtggaggttagctattttgcagtcctcattcattcnnnnnnnnnnnnnnnnnnnnnnnnnnnnnnnnnnnnnnnnnnnnnnnnnnnnnnnnnnnnnnnnnnnnncataagaactagtattctagaggttagacatatggacaaataatcatggaatgagataggcaccctgcagttgaaaggatttcatttagaccagggaatactgccccaactctgctcttggccatagtgatctgtgggtttgccagttctgcatgaccagaaggtggaaggagagatgaagcatttctgaatga

SEQ ID NO: 134103 - DNA, 936 bp, Homo Sapiens
  misc_feature (47)..(83): n is a, c, g, or t
aattacgggtgcctgggcctagaccagacccaatgaatcagaagctnnnnnnnnnnnnnnnnnnnnnnnnnnnnnnnnnnnnnacatgtgttcttgtgaaatcctcccagggtaggaggccttgagccatgaagtcaaggtccactggccaagaagttcctgtcttttgactctgggaagtgacctagtctcagaatcctgtgcagcctcggcagccagcaccccaccctactgcacccaggggatggtcccaatctgccacagggtgggccagaggctggcctcagcccaccaccagccacactgtgcccatgcctgcacccagcacctggcacacagtgagtgcccagaaatgaacactctgaccccaagcacccccacagtctccccacactgcacccagcacagccggagaggtcagcatggccaaccctctggtaggagatgggaaacagcctgtgtcactcatacaaggtcacaggcaacatcctgagagggacttccagtggccccaggagtagggggttcctcctctcccaggcaggaagtgggagggctctgaagagggaaaaacaagcccatctgggccaaggctgttttccttccaccctccagggaaatacttgcttccctgcaggcccagatgcaaatgtcttggcgagaaagtcccttttggaaaaaattaaaacccaacaggcacctttcccacagtgaaacagttcttgtcccaggaacacatgcaaatgatggttctcacacaagttacttccccgctcagggccttagtctcctcctctataaaatgggacaaggcacatggggtcattctgagaatgcaaagagatgaagcaaactgtggtgagacacgtggcagacggcgtctcctcccagcatctgcatgaacggttacccagccagatgcccactcagcgctct

SEQ ID NO: 134104 - DNA, 1142 bp, Homo Sapiens
cgacattccaactaaagggcaccaggcccattgacccttccttggccagtgacagatgggtgagctgaggcagctgggagctgcctgagttgatctcagagctgatgaggtggaggggtcagctgagaaggctgaagccgactgtcgaccgaaaggcacagagctgggcagtgttttgcagcttcagcacagcagaggtcctgcttttggagggagtccgataaacaacggccccacagcttaacaggattgaaatatgatgctattcaaagggaatgtcaaaaggattaataacccatctccttctagcttggtgctaaaaccacaccactgcctcgagttaaaatcatgcttagactgcatgctacattttaaaccttctccagtaacagaccatcatggtcgcagtgtggggcaggctctcaggacccctctgtatgttgttacaattctccagttcagcctttttaatgggggctgagctgagcgcctggagagcaagcacaacttaacatgctgaaccttgaaatacatatctggtcccttccctgaaacatacttccagactcgcctccaaacacccaagaaaaacgggtgcctctgaaactaaagcaacagttacagaccctgttgaatgacaggtgacaagtctggtgtaagctgaatcacgcacaacacacactcatcccacagacggtttatggaagaagagggaaggtcaagggtaaggtgatgggcaagatctaagtttctataccagcagtggttagaccgccgtttcaggcaatcccaccccatgactctgctatgctttccagattcagggtaaaacaacgtaagacgagtccagcatgagctgatttaagaatttccctctctcagcttaggatcctcctcttccaggtgatggctctcaacacgcaggctagacccagagacgcaataccaacatttagaatgacagcactgtggttccttcctcctggtgggaagatacaattaattctgctacccctcccttagcatcctgttgccgggagaaacaactgcctccctatctcagaaggggttctattaagaacggcaaatgcgaaggaggtgataaggaggcggacagtccttttgtcctatccaagttgtcc

SEQ ID NO: 134105 - DNA, 533 bp, Homo Sapiens
ctggcctattgttactattcttaacagataattgtctgtaccttagctctataactaaagatggataatattaatagctcagataatgcttcaaatactttcaaactctggattcctatgattcgctgaagagaaagcagggatatatataaactttaactataaacttatagatcaactacaataagagctaacagctatgactgctcccaacagtgaagcacgtaatatcccatacacaaccttaaaatgtcaggtaatgagaaaccaagctgggctagtaaaaatttagtctttggattcctaagaaaatcaagggaaacaacaattctttctagtgaaggaacgtaacttgctttgtaaagattcctgtattcattatggggtactcataggaaacaaatattcaatttgataccctggatgagtccttcacctacaggaaaaaccagcatgaaaatgaaatccagctgagatgatttttttccccctcagtttatcagacatttgtaaccactcccatctttttagtt

SEQ ID NO: 134106 - DNA, 382 bp, Homo Sapiens
  misc_feature (304)..(304): n is a, c, g, or t
ctatttgctttcatagtttggtgggccattgttatggactgaatgtttgtgtcccatcctcacccctaaattcccatgttgaagccccaaccttcactgtggagctggggctgctaaggaagtaattaaggttacacgaagtcacagtggagaatctgatctgctaagactggtgtccttatagggagagaccccagagagcttgttcccttcctccctgtgcacacaaacaagagggcatgggagcacacagagagatggcagccacctacaagccaagaggagaagcctcacaatgaacccncccccccaccctgctggcacctatgtcttcgacttccagcccccagactgtgagaaataaatttttgttggttcagcc

SEQ ID NO: 134107 - DNA, 594 bp, Homo Sapiens
agaatttggaagcagttgagtggggtggttctggctcagggttgcagtcattttgaaggcttggctgaggctggaggatctgcttccaggctgttggcaggaggccttgcctgttgctctgtggacctcttcttgaatgttctcacaacatgtcagctggcttcatcaagagggagcaaggaggaagctgcggttacatttttataacacacccttagaagacctcacactgccacttctgccacgtttgttagaagggagttactgggtacagcccacactcaagggagagttcaggttctgccctttgaagagatgcaaattaagtaatttgtgaacatatttttgaaaccaccacactagctaagcatattgaggaggagaaacagtggtgaagagttaaaagacggggattctagacccagctctgctgcttgctccatagggagggaatgattcatccttcctgaatctcttattttctctaggaaaataggatcatcaaactgcacagcctgctttacagtggattataagggtgtcttagtctgtttactgttgcagtaactgaatttctgagactgggttatttat

SEQ ID NO: 134108 - DNA, 830 bp, Homo Sapiens
  misc_feature (644)..(766): n is a, c, g, or t
tgatgagccacacaatttatctcccctgcactcctgtcccacctccactaaataagactcaattttatattctcataagcctgggacatgatcaaagggccctggagtaacctatggctccttgctaccacttcccacttgctttaggcaccatgatcttgcaaccttccttattcatgtctctctgactttgactgtactgattccttggcctggaaaactcctagtcatccttcaagaagtagcctgcacatcaccttttctgcaaaggctttcttgatattgctggaagagtcaggtgactggtttctgtattaaaatctcactttctctgtccttctgtgatagcacttctcacactgtattgtaactattgtactgtatctctcttccaactagacagtgcatactctgagatcaaggactgtgtttcacttaacctctagtcctggtccccctggtgcctggcacagagtaggtgggctcagaggcggggaggggggaaggtagcggatttcaagaatggccacaatattttgtagctcttcccatcaagaggtgagatctatttccccacctcttgaatctgggaccttgtgacctgctttcaagaacagaaagtggggccgggtgtggtggctcannnnnnnnnnnnnnnnnnnnnnnnnnnnnnnnnnnnnnnnnnnnnnnnnnnnnnnnnnnnnnnnnnnnnnnnnnnnnnnnnnnnnnnnnnnnnnnnnnnnnnnnnnnnnnnnnnnnnnnnnnntctggtggtgcacacctgtggtctccactactcaagaggctgaggtgggaggatcacttgaact

SEQ ID NO: 134109 - DNA, 642 bp, Homo Sapiens
ccaatgagtaattaattttatttttaaacttatcatacagtaaaattgactcttttggtttacaaagttctatgagttataacacgttgtataggtttatgtaaccatcaccacattccggatacagaacatgactacagctttagagattctttttcaaagtgttttacattcatgttgcaaaacacttttaaaaataagaaaagagatgtagataaacgtgctgaagatgcaaattaatgaaaccagcttttgtgcacaaatctctgcagtttccagtgttttcagcttttgtctgagccatttttgatgtcggctttgcagactatctctttctataaaagtaatcaggcgtccgttggagagttggggtctttcttcacactaaaggcacatgtcccaggcacaagcctcaggatccttatttgatcttttttattacgaccaggtcttaaatttccgaaccatgttttccctaattgccattttctctctaaaatgaagaagtgagggggcgaaccttcttatcccttcggggaaattatttaattgggacaaattgattggttggttaccggaaggatctgttattatactagacatgttttgggttctgaaagccctatcgttgctctctgtaac

SEQ ID NO: 134110 - DNA, 1331 bp, Homo Sapiens
  misc_feature (128)..(358): n is a, c, g, or t
caataaaagacaagttttacaaatgtatttttggattaaatgaaacttcttaacttagctatatgttcagtcacctggaccaaatgataaatgtgttttgatgacaaggaaaaaaatgttagcaccannnnnnnnnnnnnnnnnnnnnnnnnnnnnnnnnnnnnnnnnnnnnnnnnnnnnnnnnnnnnnnnnnnnnnnnnnnnnnnnnnnnnnnnnnnnnnnnnnnnnnnnnnnnnnnnnnnnnnnnnnnnnnnnnnnnnnnnnnnnnnnnnnnnnnnnnnnnnnnnnnnnnnnnnnnnnnnnnnnnnnnnnnnnnnnnnnnnnnnnnnnnnnnnnnnnnnnnnnnnnnnnnnnnnnnggaagaattaaaatgttagcacctacaacatcttttgccccaaagccaattcagtttcatatagaaaagatacgcagcattacttttcatacacagaccaagacaattattttaataatgctagccatgctctaccttggaattcctgagattacgctcctagaaattgtttagttcaagtctacttttcaaattctattgtgaggggactgcaaattgttttgatcacagtagagttgctatttccttgaaatagcaaattggaaaaactggtattgaaaacgtgcagtttcagggcagttaagtatcttgagtatggtctcaagtaacagtctggtttacgttaccatggcagcacttcctttcactgggtctgttcatgaactatcatgaacaagagataaaactctgtatttgctaatctacattttaaagtctacagcaaaaagaaacttatttgtaactaattttccacttaaaagctttggtcctatattattgggcttagatgagagaatacaaataataactgtttaaaactaaatttgcctataacaaaatagccttctgtgctacggaaacaggaaatgagcattctctcattttattattttgcgttttagaactctaaggcttctgaacttacttggtagagaactgctaaaggttttgaagaaattttgaatatactaaaaggtgaactttaaaaagaattgtcttaacagaagtggtaaagactagattgggagaaaaggcaacgttcattattcctaaaatgtttttatgaacttgtcctgtatattttaatagagttgctcaccttgtctactaccaaaaagaaggcaaaatggcaaggcctagataaaactataaagtggtaatgattttcagtggcttttagaacctctgaattaaaaataattaactgattaaaattttaccacactaggaaaaaatttaattccatgtttcc

SEQ ID NO: 134111 - DNA, 567 bp, Homo Sapiens
ggcacgaggaaaaccaacatttgaatatagcatttgaatctgagcatatctagaaggcctaagatattgtattatcaaaatgtgtgtaaaaaagatagtttgaccaaatggatggtcttttgtagtatgacgttgctcatgtgtacatagaagaaggatcacaggcagcattgcagctctttcttttggatgttctcctcacaagtgaaagaactattttcccccaacagctgagaccataacatcattccagtacttatgtccatgacaaatcacggactcactttggattccagtaacttggtaccatcaccacattaccatgtagtagttggaacctactggcagagcatgtccagacattgctgtaaaacagggtgacctttcgttcattttccagtggattcacctttttgtttcagggcaaatgaagcaagaggaataatgggcagagtcatttatttgtgtccagagtattgcatcagatgacaacaaactgactgtatttgcctaatgcttttcctcctgtcccagcttctccgtagactctataaatttaaatggaaa

SEQ ID NO: 134112 - DNA, 221 bp, Homo Sapiens
gtaatatatttttatagagcaaaatgtaaaacctttgtacagccacatcacatagctttttcttcttgccaaactctcttgaggaattcaaattattgtcacctttttttccccatagcaaatacagccaacataaatgtcaattaattaattgaaaaatgtacccaaagctgagcaatgtaaggccctctagcctggaaccgtttgcttttcaaagttga

SEQ ID NO: 134113 - DNA, 436 bp, Homo Sapiens
ggcaaaactctggaataacctgcattttttgaataagtggagcattcacatgtggtttaaaattcaaaatatgtaattgatgacaccatatccgagccattcagtttccttctcaggaggcagtgttgttagtgggtgtgtctgttgtgtgtgttcttctagagatagtttatgtttatataagcaaatgcagatataccttcctctcattttacatacttttcagttttctaagcctttagcaaaagtatataaattaatgttatgggattttacaaaaggcagaagccttcaagactataagcagtgcagacagagtgatttgaatgataggaagtaggtatgctaagtaacctctgaaatgacacccgcacaccacaattttcactttctgtgcacagagatggtactatctgtagatttccagagttttgcc

SEQ ID NO: 134114 - DNA, 958 bp, Homo Sapiens
  misc_feature (300)..(325): n is a, c, g, or t
aaataaaagttttattgaaacacagccacatcaatttcattatgtattatctatagctgttttcatactacaaggacagagtagttgagatagagacattatgactgggaaaatataaaatatttattatgttttttacacaaaaagtttgacaactcttgtcctagataatttggctgccccagaaatctgcactgtatttatttaaataataaaatgtttattgaacttcaatatctacacaagttttctctgtaccattctctaggagataaaaaggtaaaaataatgtgatctttnnnnnnnnnnnnnnnnnnnnnnnnnnccttacagtctagtggaaataatggctatgtttgaaagcaatttcaaccaaaggtaatgattaaaggatcattaaaagggtgactgccttatgtggcctgactgtgattaatataagattagtcagcctgacagccctgactgggaaaccagtttgtgttttgccttgaaagccccactccaggtgcactgtactattctgtattaatcagccccatatggttgtcaggagggatgagagtgggttggatgaaaggctgctttcacagtcccatgtcaggtgcaatgtgtccaaacaccaggtgtttactggtggaatatttagaaacattcaaatcacaccttaattttcttcactcttcaccctgatgttcttccctcaccaagcctatctctgccatattttctgttctttatgatgacacacatgtatctccagttactcagaaccaaaatctagtcacgaatggttcttttttccatcctgatattggccccatgcattgaattttgaattcctataaattccgcctccatggtgactcttgaatcattcttctctttctatttaagaaagtcctttaactccctcgtacctggcccactcgtattctttctccattccttcccaata

SEQ ID NO: 134115 - DNA, 705 bp, Homo Sapiens
aaagtaatcactattttaatggtagttctccatggaatatttcacaaaattattcagcaccttgttaagtttttaagaactaataatgaaataatataatcataaaccaggaacatagtgttataaatagatagaaaatactttagagattgaagttttgtattcacagagataggagtgaaataaagcagttgttcttataactcttggcactgagactatgtgacctgtgattttgatatatgagagaaaagccagattttatatgcaagatgttgggcaatagatttagagagaaaatgtatcagaatacacactgaggcaataattgcctgtttacagatgaaacaggaaagacaagatatagaacttcaaaataaacataaatggtaatacttagcagcatattgagccaatttatttggagaaaataatgagaacatgcaggacaacgctgatgctatagacaaaaatttatattttttccactcaggagactgtttttagtagtttactactagacaagatgctatgttgaataaagctaatgtacttactctgttttgtttcttcttttttttaagttctggaataattttcaggagacagacaatcataagagtttatttaaaatttctttttctttgaacagatttatattattgacaaattaaataacaggtcactacataaatatccctgaaa

SEQ ID NO: 134116 - DNA, 1379 bp, Homo Sapiens
  misc_feature (1121)..(1195): n is a, c, g, or t
attataaagagatttattataatgaattgactctcatgggattatggaggctggcaagtccaaaatctgcaaaaccagtgttctaatttaagtccaaaggctagaagctgctgtagaacaaggaaatgtcaatgttccagttcaagtccaaagaccactaggatgctgtagacagacagccaatatcccagttctaaggccatcaggcaggaaaatcctcttactaggtgggtggagtcagccttttgttctattcaggccttcaactgattggatgaggcccacatacattagggagggaaagctgctttactcagtccaccaatttaaatgctaatctcatccagaaacacactcacagaaatacccagaataatgtttgaccaaatatctggataccctatggctgacctattcaaaataatacataaaattaaccatcataattggttgaaaggtacaggtcccacccatatctgaagaagggaactacataagggtgtaaacaccaggaggtggaaatcataggggccttaaaatctgtccaccacacatactgttattcattacttctaattttattgcactgtgaaatttattgagcctccctttaagatctaatacacagtttatgtttttactttaatgtttcacatgtacctgaaaagagaaaggacatgtattcactgtttgatggaaacgtatatgagttataaatatctaatggctcaagtttattaattaaattgtacagaccttgtatatttgttttctgtgtgtatgtgtgttgcgagaggagaggaagtatctactgtctacttgatctattggatactgagaggagccagttaaaaatctccaactataattctgatttatctgtttctgcctaaatttctgttagctgctgcttaataaatattaaagctgtattgttgggcacatttatgacctcccttatgaactttctatcttaagttttattttgtcaggttttaaaattactacatgagctttctttggttcacatttgcactatatccttttcaagccttttaaccttttagtgtctgttttacacaagtttcttgtagaaaacatattgctgaatcccttgcttnnnnnnnnnnnnnnnnnnnnnnnnnnnnnnnnnnnnnnnnnnnnnnnnnnnnnnnnnnnnnnnnnnnnnnnnnnnttaggaggcagcatagaatagctctaagtatggttctaagtatgggttctagatccagaccacctgggttcaggccttcgttctgccactttctagcaagttagttaatctcagtttcatcatctataaaatgaggatgatgaaagtaatagtaccttcctcataaggttattatgaggatcaa

SEQ ID NO: 134117 - DNA, 952 bp, Homo Sapiens
aagaaaagaaccccatttataataacatcaaaagaataaaatccctggggaaaaaaattcaaccaagggaggtgcaagatgtgtacactggagacagcaacgctttgctggaagaaattaaagagctaaataaaaggaaagacgtcctgtgctcacgaattggaagacgtggtgctgttgaaacggtgacgcttcttaacgtggccttcagatgcaatcgtgactccagtggcgctcagagcgggcgtggccccagataaacactgcccaggagcccgcgatgggcactctgagccgcgggggtgagactgtgtgcagagacatgaccttccgctttatctgtgagggtctttggcctcgatggccttcccccaggaagcatgctgcacactctgtgtgacgtccatccactcgcccaggcctcacctcgacaggatctgggatgggtgtctgctgccgtacccccgatgcggggaagccagcatctcatggctggtgcccttcctgggggctctccagtcccctgcgccctgaggccaggctgtgcccatcctgggcaccctccttggcccagtgctgctgtgctggggacgcccacagggatgcatgtgggtggatggagatgaccagatcctggcacagcaggggctgaagagagcagagggacccatcctggtggggttgctgggcagggtcccaggcaggaccacagcttgggcctggaaaagggtctctaagggttcccaggagctggagcctgcgtgtgactcattcggtcagcaggggcctcaccggatgctgctggaatttggagaaaacgctgtgtgaatggaggggagtgatgggcctgggactgaagcagggaagctccagccagcaggggctccggcgccccccagatccaaagcgcccccctcaggctccagtcctaccgctcttgcccctcgtgccg

SEQ ID NO: 134118 - DNA, 1152 bp, Homo Sapiens
  misc_feature (981)..(1009): n is a, c, g, or t
ctttctgaagttattttattgttacaaagcatacaaatacataactcagtgccaaataaagggattctgaaagaaacagaaagcggtttcaaaactaagtgaatgaatatgagtgaaaggtaagtattatcacaggtattttctttttgcattgcaaaaacaaaacaaatccaatgtttagggcaaaaatcagggctccccaacagtagaccacaatcttgcagatgctcaggcaatcccagagccatgtggccctgttttcagctcatgctccttctgtccctgtagtttcatgggaaggtgatgtgggcagcactgctccactgagcattctcaggaatttcagtgtttttaccccttccctgctcagagacagggcgtgcatgttgtcaatatccttgctcatctttgcagacttacagccacaccctaactaccagtaacttcaaggagctacatatgaataataaaatatgtgtcacagaaaattattatgcttgtggctgtgaaagatgtcctctggttttggtaggagcagacaccatccagctaatcagtgctgcaggaagaatgtgtcccaataccttgaacttctcagaaaccttgaaaactttcttctagaaagaagagtctagactaggctgggaaaagattgggatcagaggtaaggtattaaaaggttaagccagctcctcattaaccccactagtgcaagtaggtgatggagtgtgcaattcagcaaagcaagactcagaatctcagagaggaaggagatctgaggacttgcctcaccctcatgctttattttcagataaacaaagtcagctcagaaacaaaaacatgactgtatttcatcaaatctaaaaagtgtcaactatcagacacttgttattttatgtagtcttaagagtgacacaaaatgctgttaataaaataggatatgccattgattgtgaaacacatctcatttttaaagtggtnnnnnnnnnnnnnnnnnnnnnnnnnnnnntctgatatgatttggctgtatccccactcaaaactcatcttgaattataactcccataatccccatgtgtcgtgagagggaccaggtgagaggtaattgaatcacagggtcaggtttttcccgtgctgttctcatgagagtga

SEQ ID NO: 134119 - DNA, 605 bp, Homo Sapiens
gtcatccttgtttaaaaggccaacactgtatttttaagatattcaagttgctgcgttgacttctcgttcattattgctgtggagtatttcagggtatgcaactactgcaaaggaaacactgccctgactaccacacgagtagaattaaagagttttagtatgtactgtatttaatttaatttcattaggtcttctcagatttatttccagaatggctatacctgaatatttctatcagtagtatgtgaagtttttatctactcatattctaacatgtgatattatctgatattctatttttgttattttttgataagtttaggggataccacttgtatttcacatgtattttaatttgtcttctgtaataatcattataattggcttttcctagtctttgtccatttttatattgggttttgatataattatttctgtttttctggagttccacttaaattccaggtgttaatatattttaaattttagactgcaattatattcttccaaagtactatttgttttttgcaatacttataataacttgcattaaacacaaaattttattttgttgctatcaaataaatctgtgttgttgtcttgtt

SEQ ID NO: 134120 - DNA, 859 bp, Homo Sapiens
gcaatttgcttatttgctcatcagctgtcattagtgttactgtattttatgtgtggcccaagacaattattcttcttccaatgtggctcagggaagccaaaagattgaacacccctgctctagccattacaaccctccccacctcacctacccctcaactcatttcctgggatccctaccccagcatccccacacagggcctccagccctgcagaagcacttgccaccaaacagcactgaggcctgcgatgcttggtttccactgagcagctcagcctctgatgacccagccccagggccatcttctctgacaagtctttctgaccctcatgacctccctcaggatggaccactcccccggagcccccaactctcaattcagacttctagcctgtccacccacatgccctgtggggaggtcctgcagagcagggtccacatttggtcacttctgcccagtccatggcctggaagacagtcgggcccagggatcaggtggagggctcttggttcttggaaggggctggtatcaagaggaagatggctaagggtgggcagaaagagatgccaaaagcaaactctgcccccctaagagcttagcagcaggcttgcctgagcaagaaggcctgggcaaaagtggggtctggcagcctctccataaacagggctgactccgcgcagatctaccccgggcaggttgtcacaggaactcagaggagctgtttgttggggctttttcacatccacgtatgcctttgccctgatcaacagagagacagcctgcgagtacaatgagaggcccccagtaggagatgacgaagggtaaatgatccaaacacctgctctgcaccccttactt

SEQ ID NO: 134121 - DNA, 521 bp, Homo Sapiens
  misc_feature (424)..(437): n is a, c, g, or t
ggcacgaggaggggtggggggagagagtaattgctcatcaatgcaccaaattcctaccaagaaaggaaagaaccattaactgcctgggtcttcatgagctatgaggacgcttctctgccaggggctctcacagtgcagctgggggtctcagcgctgcaagccccactcttcctcactggatgtttgtttcttctgtaacatgaaaaggttcaactaaaagccactggatgctaacatccctgatggcactagcgttcagatgtgtgactccacgactcccacctctaaagtgggtgcatctgtttacctcatagggtttatgagagggacacaaactgcaaagactgggagtgaacacactaaagaaatgcaaggaattactatagaatttggggtcagcccatggtggtatttctttctttcnnnnnnnnnnnnnngaggcgagtctcactctgttacccaggctgaatctcagctcactgcaacctccgtcttttgggttcaagcaattctcctgcctc

SEQ ID NO: 134122 - DNA, 1064 bp, Homo Sapiens
gcggccgcaatacccagagcggtgacgcaccgccgaaatgacaaaacccgccgagtagcagctactcggcgggtttctggatttggttgcgggggcgcgcaatttctcccggaaacgcatcgtgttgacactcggcgaacgcgtctagccgccgtgatgattcagagcatcggcccacggcctcgaaggtgctctatgcagctcggcaagtggaatatctgatcgcctcgattggcgtggcgcccttccaaatcctgaagagtgacaacctgacctgagttcagtaagacgaattcagcaagatcctccgataggccgtccgagtcggtcacgacagtctgcaaatcaccataggcaatcgaaccaaccatgaacccatggatggcctggatgcgtgccttgttgaacctagcgaggcggtcgtaaagcgccttatgcagcccttgctcgaagcactggcgcagcaggcggccgaactcgcgctgacgctcttccttggggccactgttctcgaagtaggtccggagccacatgtcctggtattgcaggcgaagcgatatcgcctcgatccagcaaccggcctttcgcgcgtgctccattcttgacgccaactccgacaaattgcgcatcgcgccttccacgtcagggttctgtgatgtggcgacgaagagcttcactgagcccggggctacagagagcgcttcgaccaagtcggcaggcaaagacattagcgggcgggcgcgttgtagatgcaacgtcgaattgtagaaaccccgagcagaccgattcagggtgcatgtgtaggcgcgcacgtgcggcgcgcagcggacgggagacggcgccgcgcaccaatccctcaagactcgcattgggggctgggagcttgcccccaggagaggccgaaggccgggcgcttcgatagccaccagggtgcgacctgtcggtggggcagcaaacctagaatcgctggaacccttcaggctatccatgatcgatacccctcagccgcaaggcggtgatgccacctcggccgcgccggagaacaccaagttcacctcgttccg

SEQ ID NO: 134123 - DNA, 530 bp, Homo Sapiens
  misc_feature (222)..(279): n is a, c, g, or t
agaattcggcacgagggaagaatctaaaacataattgctatacgccgccagattcttctctgtagaagaatcattctgaaaatatagtataaaaactgtgtgtatgggcaaaaatgataatttaatacacataaggtaaataaacaagtaacttttaactttgtgaagtgttagcatttatattttaatagcaaatgttgtgattttatcatctgacttagnnnnnnnnnnnnnnnnnnnnnnnnnnnnnnnnnnnnnnnnnnnnnnnnnnnnnnnnnnattcaatgagtattgacagagaaggatcagctctcgtgtctattgggtcacagccttattagtttgatacttattagaaagtgtatttcctgttcaaaaacattgattgggattctactgtgggcaagaggctgggacagatgtaaagcaataggttccttattgataagatggttaccacctattgataaaatggaatagtacaagatttgtgcaagaaattcactaagacagccgggagcggtggctca

SEQ ID NO: 134124 - DNA, 508 bp, Homo Sapiens
ggcacgaggtccttgaaggcttttctcaaaatgccacctttcctcattgaggccacagcaactatcctgatttaaaaattccaccctccacttcttcccccaacacagccaatcctccttaccctcctctgctttttccatggcactcatccctttctaatatggtatgtaactgatttatttatttagcctatagactgcttcctgccatgtggcagaaacaataacactcaccaaatattccatgtgcttcctcacatttgctagtttttttgttgtaggcgaggccatgtgattagtcctgagagaaagcattgtgagtcatttccaagctgcagtacctacaagcccatgggaagttcttcggtttctctttcctctgccatcacaactaaggaacctcagatgaaacctcttgggcccctgagtcactgcatggaagacaattgccttgtagaatcacaatggattttgtgtaaaagagaaataaataaagcattgttttgtt

SEQ ID NO: 134125 - DNA, 728 bp, Homo Sapiens
  misc_feature (591)..(608): n is a, c, g, or t
atcggcacgaggttttttggcataaacacaaattataaaagtgaaaaaaagattaaaatatctgtctgatgataggtgctacaaataaggttaaaggacaagggacacgtcgggagaaagtgtttgcaatatagaatgattgagcagctcacaggaaaggagatataaatgactaaatatttaaaatatagaaagttcttaatgtcacttgtaatcagaaaatgcaagttaaaacaaagtgttactgtatcccactcctcagatggggggaaatgtagatgtctggcaatactgaaagctggagaggctacaggaaacaggccctttggcacacggccagtgggagcctggaacaccctgttacagaaacattggaattagtaaaagaatgaactcttgtctcttctgggaaccaaacagtgtgacatggccatgagtgcccacgtttaactgcagcactgtgattgtgggaaactagagaccaccttatactggaatagataaactatggggacattcaccaatggaatattacggagctgttaaaaagaatgagggaggctgggcaacattgtgaaacctcacctcttnnnnnnnnnnnnnnnnnnggtaacacgtagcagatgccaaataaatctgttgtgttgaatgccaagaggcttggggtgctctggaaggacagagcccgacacagtaaaagtccatttcaaataaataaataaataagt

SEQ ID NO: 134126 - DNA, 491 bp, Homo Sapiens
aatagcatcccgctcttatttcagaataaaaaaatttttaaggtatgttgagtaagaatctatagagcaatgaaaatgcaagagcaatagctatgggcaccaaatggtcaatcttcttatcataatgttgagtggaagaagccaggtccaccagacacatgctgctcatttatgcaaagtttggacacaggcaaaacaaaactagtttgatcgtgatgggaaacattagagaaatgcaaagacatgaccatcataattgtcaggagaaggcattggttaggattgggaagcggcaagcagaagcatttagggattggctggcaatgttttacttctcagctgagtgagggttgcatcggtgtttatttgataacacgttctaggggctgggcaagatggctcatgtttgtagtctcagtactttgggaggccaaagatgggaggacttttttgttctcttcttttttcttaaatttaatagcatcccgctc

SEQ ID NO: 134127 - DNA, 1130 bp, Homo Sapiens
aaggagtggggtaatttgggacttttcctggggtaatttcactggagttgtgggagcaaagtcagaaagcggtgcgttgggtgtgagtggtatgtgagaaaacgtaagcagggaccttagaccagcacttctggtctacattaatgtgtctgtgagtcactgggagatcacttggagatcttgttaaagtggagattctgaatcagtaggtctggcatggatgcccagattctacatttccaacaacctcccaagcaatggggatgctgccgttctgacagccacctgaactcagtatcccacattgttcatcaatgtatctcagagcactgtagctaacttgcaagggtgccatggaatatttttaaatttcaagggaaatacaccggcgtcattagattgctgtattagatcactgcattcctttcagtgatgtcatacctttgggaagctggattttcagtgcttgctctgataaaaagcaagtactgcctgaaaatcagtggaacaggaaatgaggctgtcagtgttcaatctgagtccaaagtttgaaaagtatgcagtgcccaacaggcatccagtttttagaacttaaaatacttactaagtgctggctcttactgcttaacggaggcaactacagttgttagatacttcttttggccgaggtttaccctgcaagatcactgagacactaaagattctttgagccaagaaagtttggaaccgttgacataggacttcttcatagaaacttgtctgtggagccaaagagagcctagatgattgggcggtagctaaaagaggaacaaaggagcatttattttaaaataaaagagacagatatgttgtatgttgggggagggagcagctgataaagaagcaacaaatgttgacttagagtaaaagatctctgaggaggtgagaaaggatggaatctgttttctctaaatattgctcccaaaccaacactggtttgttggaagacatgaagaacgttattccccactccagacctcctgaatcagaatatgcattttaacactatccccaggtgatttgtatgcatattaaaatttcagaggcactataggaggcaggattggccttatataggagaaagaatgtct

SEQ ID NO: 134128 - DNA, 663 bp, Homo Sapiens
ctttcatccacctttatttgcgtatctgccatcagcatgtgtccacatatgaatcatttcaaataaatttttggcacaaatatcataaaagattaacattaccatcacaagtccttctagcaaaataagttggttcagattcttgttgtaaaagattgtataataaggtcttcatgttgaatgactaggtgaggatatcataattcttttttgtccttagaaatattttgttcagtcattgatacttaagtttcagaaaactaatctagacttgtcctctgaagactcaagagtttgagatttccaatttcacaatcaaaattagaatctagtatactgctgtctctgcatttatgttttgattaatctgatagttctgaaagatctttctctgttgattttcttcttttatgccattgtaggcataaaattaaaaatggtttcttagccttggcaatacaaaccttttcagtcaggtgatttgttgtgggggcctgtcttgtgcagtataggatatttagcaccatctttgccctctacctcttagatgccagtagcatgctcctcagttgtgacaagggaaaatgtctccagacattgccaaatatcttctagagacaaaatcatctccagttgagaatgattgctttatgcaagtccatc

SEQ ID NO: 134129 - DNA, 524 bp, Homo Sapiens
atgagtgtgaagataaagtcacagtgattctcctttctctgggaattgctcccaacaaatggctgtgcttactgtcaccatgtctgtagttggtgtgactctgttctctgtttacttcagaagaggatatctgactcaacaagacaagtgaaatttgctagggtattggaaattttgaacccaaagacagattggaaataattggaaatcactttaggtcagcactggataagaagtaacatgtgtctcaggaggcatccttcagattgagctgggtgtcagcattcaattccacaaggctacctgtttaagaagaatggaaatatttcataggtaatatgttctaatttctaatatgtcatatgtaatatgttcatttcttaggtagtttcttcctctaaatagctcttaaaatattttccttgataatgttatttatgatatttagcatttgttgagtgcactgtaccatgtgttgtgttaagcactaaatattcatgatgataattaaacctcacaataac

SEQ ID NO: 134130 - DNA, 428 bp, Homo Sapiens
gggtagatatccagtagtgggattgctagatcgaggtgtagatctacctttagttccaaaaagttgcttttaaatattgtgtccatctttgtttgtctctgaggtgcgcgtgtaggtcggtttaaagcaaaatggtttgccattatttgaagtggaagtcctacattttctttttcatttaaattttggaattagcgttgtcaagtttaacaatctctctttggaatttcgaatgtgattactttgtatttatagatacatttggaggagaatagacatttttacagtattgagtctttccattcaagcttatttaaaatttatcttatgccttagtaaagttttatacttttattaatcgataaattgtccactcatttataaatttatttctgagtatttttataaatttcattgttcctcgtgcc

SEQ ID NO: 134131 - DNA, 1026 bp, Homo Sapiens
ctctcttcagttagaacacaggccctggtagtgagggctggttttcacttgtgctgttttctttgcagccctatacccagcagtacccagaacactcccaggtagttggtgactgacccagtccctgtccttgagcatttcacagcccagaacaaaggtccagagggcaggtggctctgagcaccaccgtcagccactagaaccctgctgtgcagactgagaggtcaacggccttttttcatggaagttctgatgctgttaagttctgaaaagagaaacgggagcagtggaggaggcccggagagagatgcgaagcagagggcaggactgagccagaggggctgcagcagcttcagcatgaacagaaaactggtcaggcccagaaaaggtgcccgggggtccctacccccaggcttgttcccaggagtcatggctgggagtgccgcctgaggctgctgtacggaagcccccactccgtgaccctccgggttgagtctgaatcccaggacacctgagaatgtgtctctggcttgctgcccagaaggtctggggctgctggtgtgaggagggctgggagctgggatgggaggagccaggcgagccttttccggatcgaggcagattcaggaggggagggtcctctctgctgagcccctgctgctgtgacagggacagcacactcagactgtgtcactagtccctctgggaccccaggagtgcagacaaagacgtgctttggaacagagacacgggagatacgttttcagaggtctctaataaaaggggtgacttcagtggaaaccgctgcgcaggaggcaggactgggtggtagcaagcatggcctcctgactgcggcgagtaccaggggcacttggttccccagctgccaccgtgagacccccctgggaacccagaagggcctctgcacagcccccggcccgtgtgctgcctcccagtcttgtcaaccctgaccttggagttctagcgggcgtgctcgcctgtgtcctcagctgggggcgcatgaga

SEQ ID NO: 134132 - DNA, 659 bp, Homo Sapiens
ggcacgaggggcaacgtcgaggacaaggtgcgcaagaaccaccgcaagaccttcggcctgctgcgcgacctgcacggcgcgcgctcggtcggcgtgatcgcacaagacccggcgcgtggcatcgtcgagatcgcgcggcccgtgggcgtggtgtgcgccgtcacgccctcgaccaacccgggcgccacgccggccaacaagatcatcaatgcgctgaaggggcgcaacgcggtcatcgtcgcgccctcgcccaagggctggtcgacggcggcgcggctcatcgagttcatccaccagcagttcgaccgcatcggcgcgccgcgcgacctggtgcagttgctgccgcaaccgatcaacaaggcatcgaccgccgagctgatgcgcctgtgcgacctggtggtggccaccggctcgcaggccaacgtgcgcgcggcctatgccagcggcacgccggccttcggcgtgggcgcgggcaacgtggcgggcatcgtcgacgagacggccgacgtacaggcggcggccgaccgcatcgtgcgctccaagaccttcgacaacgcgaccagttgctcgtcggagaacagcctggtcatcgtcgatgcggtgcgcgcgcagatgctgtctgccttgaaggaccgcggcgccgtgatgctcgcggccgc

SEQ ID NO: 134133 - DNA, 687 bp, Homo Sapiens
gcggccgccacgatcggctgttttcgccggtcagcatcagcaccgtaccgacgaccacttcttcgccgttctccgaggccgcaccggtacgcagggcgccgccaatgcggaccaaggcgacgtcgcggacgaacacgggcacgccgccgcggttggcgacagtggcgcgggcgatctcgtcgaccgatttgacgcgagcatcggcgcggaccaggaaggcctcccctccccgctcgacgaagttggcgccgaccgcgaggttggccgcttcaagggcggtggccagttcgctgaacgacacgccataggcggccatgcggctggcgtccggttgaaccacgaactgcttctcgaacccgccgatggagtcgacgccggcgacgccaggcaccgaacgcatctgtggccggacgatccagtcctgcacttcgcgcagataggctgcttgggcggtcgggtcggcgaggcgctcgcccgtcggggtcaggtaggccccgtcggactgccagccgggctcgccgtccttggccttggcgcccttgccgcccggatgctcgaaggcgacggtccacatcaggacctcacccaggcctgaggagatcgggcccatcgccggctcggcgccggccggcaggctctggcgaacctgggtcaggcgctcggccacctgctggcgggcgaagtaga

SEQ ID NO: 134134 - DNA, 385 bp, Homo Sapiens
cacttttacatccattatatttaatttgattcttacaaccaccttggtgagataggcaagatgtgaagtcgatattttatagacaaagcagctgaagcataataggagcttaactggtgggatccatttatccattttctcttccatggagcatcttgttgtattcatccaaatccttgacagaaatgttgaagaggacctctagaggctaagcttatcctgaattcttaaatagcactgactgttacagtttaagcaagtcagtttcacctaaaagtgtgattatccaacccacatgttgcctttctgttcaaaaaggatggtaccaaagacagtcacagtcacctggcttactgacataaatattaatactaatcaaatgagt

SEQ ID NO: 134135 - DNA, 392 bp, Homo Sapiens
  misc_feature (140)..(148): n is a, c, g, or t
  misc_feature (151)..(209): n is a, c, g, or t
ctatcttcttaagttagaagcttaggtaatttattttaaacctttttcttgtttagcgtctagaaccttaaatttccttttaagccctgctttagtcgtatcatactgaccatggattgctttttttccctcaggaaagnnnnnnnnnggnnnnnnnnnnnnnnnnnnnnnnnnnnnnnnnnnnnnnnnnnnnnnnnnnnnnnnnnnnnagctcccattatgatgtattgtattttaattatcgttcagatcaaaatattttctaatttttcttttaatttcttctttcatcataggctatttagaagtgtgctatttagtttcaaaatgtatggggatcccccagatctttgttactatttctaatttaattctatgagtaggtttatagc

SEQ ID NO: 134136 - DNA, 982 bp, Homo Sapiens
  misc_feature (57)..(71): n is a, c, g, or t
  misc_feature (708)..(880): n is a, c, g, or t
gaaaaggagcttatttatcttgcaggattgtcaggaggattacatgagaggacagtnnnnnnnnnnnnnnncaacaacagcaaaacccaacagttattgagagctttctacataccaggtcctagtctaagtgctttgcatacattaatgcatgtaactcaatccaatgaggcaggcacagtgattggcccaaaattgctgttggctgaaggaaccagggcacagagggctgcaatagttgaccccaaatcacatggttagtgagtagagaagccaaactctgaacttgggcaatccagtgctaaggtcaagtgcttcccatcctgatgacattatcaagtacgggaagtacacaaagtgctgggtatggagttggtgcctaacgcatgcttgttctcttctagttagttaagctttggccaacccattcatttgaccatctctttttcttcctagcatttcacattcacacagcaagtcggtgaaagatcaggggccccgccacccgtacccgctgaggctcagggatctttctgttactccaggatgtttgaccaggatcatctcttagcagctggtctctcaggggatttgaaaggctatgatgggctgtgtgatcctcagcaggtcactggagcatcctgggtctctgggtttctttatcctgtggggatgtgggatttctcaggcacagcttcaacactgatnnnnnnnnnnnnnnnnnnnnnnnnnnnnnnnnnnnnnnnnnnnnnnnnnnnnnnnnnnnnnnnnnnnnnnnnnnnnnnnnnnnnnnnnnnnnnnnnnnnnnnnnnnnnnnnnnnnnnnnnnnnnnnnnnnnnnnnnnnnnnnnnnnnnnnnnnnnnnnnnnnnnnnnnnnnnnaggattcagaattgctggcatattatctgccaggataaaaacaggcatctggtttgaccaagctggggccagcaagagcctaagtcgatgactcatcacact

SEQ ID NO: 134137 - DNA, 157 bp, Homo Sapiens
ggaacgaggcgtgcacgtgaaatgcctagcactgtgcctggcatttcacgtgcacgatctcatttatcctcccaagaaagatatcaggcatattcataactttgacataaaccaattatacctaaattccctttcctgaacattgctagcagctaac

SEQ ID NO: 134138 - DNA, 514 bp, Homo Sapiens
  misc_feature (427)..(458): n is a, c, g, or t
ggcacgaggcgctttgcctttgcttggcatcagaggactcagcagcgagtaaagagcacacacgtgccctctgcaccacctcctcctccttttctacaatgtcctgaaagtttcgtgtttagtgggctttggaaaagggtgtggaaaaccagcaggagcagatgagtactggagtggccagcagcaggtgtgaacaccctggggtgatgctggggctgagtgaattggacatttttcagcagggacacccaggccagtggcgggtcttcatcctcccacccttaatggagatgaacggcattattgagaaagctgcaggcacacacagagcactgcttaaatgatgtccctggctgctgctgttactatgtaatgattgtgttattcttatgaaaatctgaaagttacaggaatcttggaactgccnnnnnnnnnnnnnnnnnnnnnnnnnnnnnnnncgagacagagtctcactctgtcgcccaggctggagttgcagtgagttgagatcatg

SEQ ID NO: 134139 - DNA, 604 bp, Homo Sapiens
  misc_feature (149)..(209): n is a, c, g, or t
  misc_feature (228)..(257): n is a, c, g, or t
  misc_feature (391)..(478): n is a, c, g, or t
ctagaatgctcattccctgtctctacctaggaagacttgcccacctttgagggcctaatgcaaatgtgatttcttactgggtgagatctgagggtgaggtgggtcctgcctttaatccctgtgctttggggaggatcactggagcccannnnnnnnnnnnnnnnnnnnnnnnnnnnnnnnnnnnnnnnnnnnnnnnnnnnnnnnnnnnncagatccctgtctcaaagnnnnnnnnnnnnnnnnnnnnnnnnnnnnnngaaatgtgatttccttcatccagttgtactgtcattccaggtagaagtgacttttatctatacttggctaagcttaatttttaaaaactttaagtataatttacatgtacttccttacatacttacctaaatgnnnnnnnnnnnnnnnnnnnnnnnnnnnnnnnnnnnnnnnnnnnnnnnnnnnnnnnnnnnnnnnnnnnnnnnnnnnnnnnnnnnnnnnntccagtcactactcccacctaagggtaactacaactcacactttagggtatagattaattttgaactttataaaagtggaattataacatgtgtactctcttggatctttctcctaacattatgtt

SEQ ID NO: 134140 - DNA, 930 bp, Homo Sapiens
cactataaatatttaattatgttcattctactttaaggtaacaaattttataactatacaagaattgatgactaagatgagtacattgacaactacgtatagagcttttcatcaaaaacaattacaagttgaaatgattaaatcgttttttttcggtcataattagatggagcaggatttataagggcaggtatacataatactttattagccaatagcatctaaagacctatagcttttctttaataccatcatattgtatattacctaaaatctggaataaattagtcattctatctataagaaatattcatgacagttcacagctaagccagataggatatgatcaataaaaagcctactagtctttagtacttatgtcctccccatgaatcttaaccaaaagaagtaataaataagtggcacataagaatagtacctttaaataagcaagtgagccttcttcaagcaacaagcaacattttctggatatcaaaaataataactggttttgcagcaatgcagcatggaaacacaagggtataagatatactgtactttaagctctgtttgatgaatctgagcacagttcctgggggatagattactttaaaccatgctcttttactttctaatcctgacttgatttgatttgtactttaatacagctgcctggcaattcaacagcacatagagactatttatgtaatcagattgtaagtagtgggacaagaagaaactctctagaacctttttggaaaatagtttgttgtactttttatttattgaacagcagggctccgggctttccagtgctcattataattggttttctgcttgaactttcaaaaactgtcatgtcaatactcaaacagaatttttttgcttactatatggctatgggctctattttctcatgtgcaacttgac

SEQ ID NO: 134141 - DNA, 500 bp, Homo Sapiens; identical to SEQ ID NO: 119624

SEQ ID NO: 134142 - DNA, 281 bp, Homo Sapiens; identical to SEQ ID NO: 119625

SEQ ID NO: 134143 - DNA, 664 bp, Homo Sapiens
agaattcggcacgaggataaatggcttttttccaataaatgttcacaccttctctgggtacttggataatcaggatttatcaactgaagaaatattgatggtttgttgtggtggttttgttggttcctcccctcccccctccccatttttgcttttgctttgcatcagtaaattacttaatatcatcccctggagtaaccacctctaaaaataaccctagcacagagtgtcacaatttggctttcataccggcttgaaaaaaaccattaaaattgcattgatctcacaaatattgatctagtgctttatatcaaatatcaaatgagatgctgtcagttgctgctgatcattgtgtcagctgtttgaattcatgtccctttccttcttcattgtcacatggattccagttgcggaggctaagtaagattttcttgattaaaacaaattcaattactttcctgttttgcacatttctggttgaaccaaacgtagtttaatagtctacctgaaattttggcaggtgatatgtctgtacatgtgtgttacaagagtgtgattcagttcctaggttatgtttctatttagcctaatcttgaaataattttaactgtattctactttatttctgatcacctgtatttttaaaaataaaatttgttttttt

SEQ ID NO: 134144 - DNA, 1215 bp, Homo Sapiens
  misc_feature (790)..(790): n is a, c, g, or t
  misc_feature (982)..(982): n is a, c, g, or t
gcggtcgccgcgtttttcaaattcactgcgatgctcgtgtcgcatggtctgtcctccgtcctatttagatataacttaagatatatctgtactggtgaccggtgagcccggagacgaccaacggtcgtgagcagcgtcaagccgctcacgttcgaggggcatggacgataaaagtatttagagttataactttaattagagtttgtgctcgaacaggagcgttaacaggttgctctttatagcagcgcttgtgcgtgtagtattgctcttacagccccttcccgttatgacacttatgttcaagtaggctgattcttacgactatttttacagttttggcaaagtgccatacttttcgttcgccccttgtttctaaaggctactaggccgtgggaagcgacctgcataccggttgttgatttgaattgatcattgcttggcgttgtgcggttcacctaaccgtctgcgttattcgttgttgagaagttgcttggcgacgaatcaatcaatgttgataactacaggtattgatcatgttcaagaagtttgctgtcgctgttcccctggctgttctggcactgtcttcctcggtaacagctactgctgccggtgaagcccgccacaccgtcaatgtccaggcaaacatcccgaccaccgtgttccacgcacaactcgcgtgatccgaactgggggtcgtgacgaaaccatgacctacaacctggtcagcggtgagcttgcttcgttgagggccacctacgacgtcaagaacaccaacggttcggttgctgcntacatcgaaggtggcccggccgtactgttcaacggtgatgccgcgcaaaacatcccggtcaccaccaccttcaatggtgtgatcttgagcggcagccctcaggaagtggtcaacgaagccgactccaccccgggtataggggcggaaatgcacatcgccgcggccaagcctacggccactcagcgtggctcntacacaaccacgatcccggtagtgttcgacgcggtactgccagtcaccccataaggccaatgcgtgctcgttaaccacgggcatctgcttgcaggtcggctgacttccctcctcggtccgccggcctgattttctctccagtcttctggcattcagagtgttccgttcatgtttccgatgacgcctatcgcggctgcgctagcgctgctgatgtgtacgagtgccctggctgc

SEQ ID NO: 134145 - DNA, 1539 bp, Homo Sapiens
  misc_feature (1465)..(1483): n is a, c, g, or t
ggggtttcaaaattttaaatttactaaagatagcatgtttctatcaatcatgtcccccaaaaaatatttccaaagtgttctctgttcagaaacgtcacaaatgcttctgtttgtcagatcattttgcaacaggttaactaatacttatctacataaaaacctgaaaattggcacaggcaggcattttgaattagtagattacccccatggaacagtattcagaattattttgtcttgtgggctctgaggctctgggaggtagaggtggaccctgacagtccaggtcattaacatccacattcagttgatgcctctcagacacagtccagtactggataccatttatcattctgcaaaatgttgtctacatctttcaggtgctggtcattcttagattagcttcttagctgttctgttgataaacagaagacttcaattttcaggatggatgattccaacatcttccacaagctttcactttcactaaattattttgttataaatttgatctccttcaaaagtgccttgaagtcaattttggttgtaatgtatttgtctctgacgtattcttcaaattctctttgttttttttcctgtcattggagaactgcacccagaatcttatttttactacttccatgtgaatgttaaggtactcacagaggtttcatccagaagtcttccctcttctttctggtaagtgcttcaatgtgctcattaagcttctctttctcttcccttttcaacaaagatctagattcccagtggtgatctttttgatgagttctctatcaaactatgacacatctgaagaacgtacctgaacaaccctcagggataatgcaggatttttcgagaaagttccagggtatctcctggtgtcagtatactttcagtcctacacctcaagagttttttaataacagctttattgagatacaattcataccttacatttaaaatgtacagttcagtggatttgaatatattcaagagttgtgcagcctacaccacaagctaactgtaggatattttcatcaccctgaaaaggaaccctacacccattagcagttactccattccatctacagccagcctaggcaaccactaatctttctgcctattctggacatttcgtatgaatggaatcatcatgtgatcttttgtgaccggcttctttcacttaacgttttcaaggtttatccatgtttagtatatataagtccttcgtttctttttagtgccaaataatggctatgggcatggggtagaagtgctaactcatacagcagctgtttcatcttttgaggaactgaccgtctgttttctgaagtggctacaccattttacattcccaccagcaatgtatgagggttctgtaatttctgtacatcttcaccaagacttattattatttctctttttaattacagccattctagtgaatgtgaatctcagggttgcnnnnnnnnnnnnnnnnnnnagagactgtctcactctgtcacccagggattcacattcactagaatggctgtaatt

SEQ ID NO: 134146 - DNA, 716 bp, Homo Sapiens
aaaaaaaagatatttaaggttattttaaggcatagttaaccacccatgatttatactaatggcaagattaatccctcaacgcataaacacagacacatgtaaacaattcaacttggtgctcaaaaagtaaatattccaaagtaaacagttgataaccacagtaaagaagacaaaaaactcagaaagatacacaatggggtgatgtgactgatgtttacagaaaaagtcatggatttaaatctaaccagggagaatgagtaagctcctgcccagaataaacactgcatcacagtattagagagtatgtgatagcctatcgctatcactcaggataaatgatgctttgaaatagcaccatttcaatttcttttgttagaaattcaagtagatttgtcatcgcacatgctttcactatggcataaaagttactattatgactattaaataagtttcttaatgtatctctgggaccacatacattagattaacagaacagcaggctgcaaagtaaaaacaaagatttttactatgtttctcatattaacgggctcatattgcatcttaatatgtatattgattatataataatgtattttaatggactaacacatagagattagcaccaaacagattttttttaccctgctattgggtatgtataattcatgttatttttagacaaaaatgatattcaacaacaaataattgagagaaaa

SEQ ID NO: 134147 - DNA, 1315 bp, Homo Sapiens
  misc_feature (93)..(93): n is a, c, g, or t
  misc_feature (163)..(270): n is a, c, g, or t
  misc_feature (280)..(298): n is a, c, g, or t
  misc_feature (303)..(348): n is a, c, g, or t
accaagtgcttaagcatgagcaattatttctctgtgcttagaatgatcctcataagaggacatttaaaaaaccagcaaaaacctcccttttgntgtgttgagtcatgagacaaatgatatgaaatgcacaataaagcctagagaaagaccagtgcagagacannnnnnnnnnnnnnnnnnnnnnnnnnnnnnnnnnnnnnnnnnnnnnnnnnnnnnnnnnnnnnnnnnnnnnnnnnnnnnnnnnnnnnnnnnnnnnnnnnnnnnnnnnnncttatatctnnnnnnnnnnnnnnnnnnngaagnnnnnnnnnnnnnnnnnnnnnnnnnnnnnnnnnnnnnnnnnnnnnnctagagataaatataatgcaagctattataaactacttagtgtctttgtatcaaaatgagcacgaatgtcaaagctcatttacggcacagtcctaggcactggtgaaagaatgaacagaaggcaggctctacaatgctgaacagtctggttttgaccaactgatggttattcatatctatatatctgaagcaattattaaaaagaaactgggaaaaagtctgtgtctctgtgacggagatatttaaacaagccattttgaaaatgttaaaaaattaaaattgtagaaagtcgaaccataggtgccatgttttgcctgaagtggtaaaaataccatctgcctcagtctttttagcagcatgcttatttcaagtagcagtaggctaaactacaggcatacgctcagctccagctggggaaaatacacagacgtttgtcgatgtttttctaagcaagagtagtcaacatattcgttttcttttagatatatatatattagttaccatggcaaaccaaacgtgaatgtggtccgagagccttctccaccagtcccaacacatctccaagaattcctacaattcaataggtggcactcttccctctagcactgagctgaagcggctctgcctaaccttgaggccagaagcctaaagagctggaacagtctgagatgtgcacctagggctgcaggacagtcactggaattaagatccccacagcattgtgcactggagcaaaagtgttagcttcctggtcacacttcacttctggtaattacattccatctaatacaacttctgcagttttaactaggtaagatattccttgtttttccatcttaaaagcgactaaggtaggattgccttacacagttaaacagcttccatctttgcccactgcccaggtgagtgagtttcagcaatgaggagagtgacttcccagtgctgtgttaactactttaagagacag

SEQ ID NO: 134148 - DNA, 1024 bp, Homo Sapiens
  misc_feature (166)..(265): n is a, c, g, or t
  misc_feature (1009)..(1009): n is a, c, g, or t
cctgagatggggtctcactctgtcttccaggctagagtacagtggcacgatcacagctcagtgcagcctcaatctcccaggctcaagcgatcctcccacgtctctgcctcctgagtacctcggactacaggtgcatgccaccatgcctggctaatttttgtatttnnnnnnnnnnnnnnnnnnnnnnnnnnnnnnnnnnnnnnnnnnnnnnnnnnnnnnnnnnnnnnnnnnnnnnnnnnnnnnnnnnnnnnnnnnnnnnnnnnnnatgagccactgagcccagccagagtattttctttctgttaggtacatgaaatgattcaggctcatcttctttttctcccaatctccgactaggaatcatccctggtccccttttttgtggatagtatttaggaaataataacttggcagttggtgtgtttactgttactgaggtgtgattgtgtttatgtcctctcggtagaatgaatcacaaaatatatgcatatgtgcacacacaacaatttatttatttgttcctatatatttaaaagatatgagttctattctaatgccacactccaggttttctagctctcctcattcctatttttataaataccttctctaatggagaaatcttgctgtcatcattctcaacatatttatttgctcagtgttaccaatctctcaacaatgctgcccatctcctccccctgtcccttccacaccccaccctcagccctcttggtgccagcagacacaaagccacaactcctctcatcccacgaggcaagtctaactcctccactctggggaaggaaggcaggagagatacatgaaaagtcaaaggggggaatcaaaagaaagaggaatggaagtccacactgatttttttaaaataataaatcttttgattgccctaataaacatctcttggtgatgatatagtttatggatatggctagatgtttttttcaattttaggattttgcatctaaatctatgagactttggtctatagctntatgggtttttttgt

SEQ ID NO: 134149 - DNA, 496 bp, Homo Sapiens
ggcacgaggcgcgtgacctctccctgctgctcaaggcgggtgcacggctcgacgatgcgctcgagctgctcgcaaccgacgtggatgtcgggcggctgcggccggtgatccggaaaatcaggacggcgatcctatcgggagacagccttgccgaagcggtcgggcgttatccctcgctgtttccgccgatgtatgtagcactggtcaaggtcggcgagtcgtccggcacgctcgatcaaattcttgaaactctgggactcgagcgcgcccgtgccgaagcgctgcgccgtaaggtcaccgatgcgctccactatcccgcctttgtcctccttgctgcgggcggtgtgctggtcttctttgtcacatttgtcttgccgcaattttcttcggtcctgcgcgacttcaacgccaagacggacacgctcatcgagttcttcctcggactctccgatttgttgcggcaccacggtctcgaactcgccgtctttgcggccgc

SEQ ID NO: 134150 - DNA, 883 bp, Homo Sapiens
ggcaagccagctcccacattttttatccggtttcatcagtgggtttcgcctaacagcaagctttgctcccgcgcacacaactccaccacataatcccacaacacccgcaaccgcactgacttgtgcagctcccggcgcgagctgatccagtagctgcgctggatgctttctgccggcagcaaaggcaccaggtccgggtcgccagcagccataaagcacggcagcaccgcaatgcccaatcccgaacgcgccgcctggtgttgagcaatcacgctggtgctgtggaacaccactttcgggttgcggcaaaagctgctgaggaacttgagttcctggctgaacagcaggtcatccacgtaatcgatccatgcatgggcggcgaggtcttcacgtttttcaatcggcgggttgcgctcaagataagcccggctggcgtagagcgccaggcggtagtcggtgagtttgcgcgtgacgagttggtcaacgctggggcgttcgaggtggatgctgatttccgcttcgcggttgagaatgctcacaaagcgcggcaccgccaccagttccacttccagccctggataacgctcgaacagcccgcccatgcggctggcgaggaacatcacgcccaacccctcagccacgccaaggcggatcttgcccagcggcgcagcggaatgggtgagttcgtcttcggccagcaacgcgacgttttccatggcctcggcgtgcttgagcagggcttcaccggaaggcgtcagttcgtaaccctgggcatgctgcacgaacagcgcggtgccgaggcttttctcgatggcctcgatatgccgggccacggtagcgtgcgtggttttcagccgctgtgcagcggtgagcaggcggccgc

SEQ ID NO: 134151 - DNA, 893 bp, Homo Sapiens
  misc_feature (146)..(146): n is a, c, g, or t
  misc_feature (763)..(773): n is a, c, g, or t
gattccctgaacccattttgtttgtccctagccttctactctgtggcaaatagttctgagcagtgaggaaatgattcttagtcaatacaacaattttccagctctatgaaatggttttcatgatgatcttgtatgtttaaatgtanatgtgaagtgtattatagaggtaccttgtattaacattcagtcgctgaaatactagccacgtattctatgaggaagtcctaatcttgtgaatttgtgggctacaaatgactaatgttattatcaccagtctcccaatcatctaacttcaaaactttgagttcatttttgatgccttccaccgcacattttgttttctataacgttgtgcgtgtattgattttgcctttatgatattccttatgtctttttctgtttccactttcctgccacatgttcaaattctcattatcactcatctctgcaacagctacctaactgttctgatgccagtagcttcgctctcctgtcagctctgtgcattgctgtcagatcaatgttctgaaagaaaaactctcctaatgtttatcgttgactcaaaaatctttgacagctactgactctctacaaaattaaatgtttggtttttgcctgtcactgaagaccctcttcaatttggtgctagttgacttttctgaatttattttctattatttccttttacaaattgatgattcagccaaacttaatcgttcttctgttctccacacttttcagactttctagcctctgtgtttgnnnnnnnnnnnatatggattccttttcctggaatagtattctctactacctctctccatgtcaaatgtagtcacattcagtaaggccaaactggcctgatttcttatctataaatagttcccaaattttcc

SEQ ID NO: 134152 - DNA, 891 bp, Homo Sapiens
  misc_feature (50)..(227): n is a, c, g, or t
cccatttttagtgttgactgaagttaaatgggactcagggaagagattgnnnnnnnnnnnnnnnnnnnnnnnnnnnnnnnnnnnnnnnnnnnnnnnnnnnnnnnnnnnnnnnnnnnnnnnnnnnnnnnnnnnnnnnnnnnnnnnnnnnnnnnnnnnnnnnnnnnnnnnnnnnnnnnnnnnnnnnnnnnnnnnnnnnnnnnnnnnnnnnnnnnnnnnnnnnnnnnnnntgaaacaaaacaaaaacctgctattaaagcgcagattggcttcttatatgatagataaagaaggggaaggagaagaagctgatgttcataatgatgatgaagaagacttgaaacatattttgatgaagaagatgagggcagaggggaagaagatgaagatggtgttgatgtggaagagggaggaaggttgaagaggaagatgactagtggaatactaatagattctgaccctctttttacttttagaaattttgcattctttgggagccagttgccatctcctattttttccccttttgtactcagttgccttgttctaataaggtctctttctctctctctccctgatctggttcttcacttactttgtgggagactcttgagcaaaatacagtggaaaaaacatctctacccatttctgttccaagtttcttgccttaaaaaaatgtgaatgtagtgatgtggaactaacacatcaacctgcactgtgggaaagaagaaattttctccctttgctttgctggaagctggagggtgcttatcccccttgcattagtgcacaaaattcttgattttactttctctaaaggattcagagattacactttgtctctttgtgattatggacatttaacattatcatgtacatgcactttctcttgtt

SEQ ID NO: 134153 - DNA, 621 bp, Homo Sapiens
ggcacgaggagataagccctgaagtttgctgggtaaggtgctattttcagtgattccatattgatactatcggaacggaattcgacctatgattacgctgaaaactgccattattcacagcttcaagaagctggccaagaccagcgttatctccgaggtggtcaagaaggatgtggcgctcgatactgaaaatcccgcgttgcattttctggtcaatggtatccacggcctcatcggcaaagaaggcaacagcgtggtctacggccagtttgccaatgatgaccgtcagggaccgtttccagagcgcttcaccgcgttcgtagaagtacaagatgatgaagcgcgatttatcgacttgacccacttggcaatggaccagttggtggagcaagccggtaatcaagtcttatcgaccggtggacacatcctttgcgctcagtacaccgcaggtgcaaccgactttttcctggtcgccagcatgaaggaacgcggcggtatacagctggacgagaactatgtgcccaaggaaattcaagaggtcgatctcaacaaggttcagcaggccgccaggatcaatttagcgagtttcgtggccataaaggctatggctgctgcggccgc

SEQ ID NO: 134154 - DNA, 1379 bp, Homo Sapiens
  misc_feature (940)..(950): n is a, c, g, or t
  misc_feature (968)..(1176): n is a, c, g, or t
  misc_feature (1216)..(1216): n is a, c, g, or t
  misc_feature (1320)..(1320): n is a, c, g, or t
  misc_feature (1339)..(1339): n is a, c, g, or t
tttttccctttcttttatttggcaaagcaataaaaggccaaggcagctttgtcatggtgagctacttctcgcggaagtcaggatcccgcatctgcagactatacaaacaacacaaattaaaagcacaatcatcattgaaatcacagagcttccaagtgtttttatccattttaatgggttactagctgctaatctgtctgcagctccttcaagcactccagttcctggcattaaggtcaggtgtgcctgggatgctttaaatatttgttcttttaattttgcaatatctaaagacaagtttgtagagtgtctttctagatgcttttttattctttcccaaattttgatcttattaacagacattaatagtttccacaaatccttatgtttagcttctacagtgggccatatcatttgaggttgaggtgccactataccgccatgtttccagataatgggaactcttgctgtatttcttaccatttctaccatctgactgttttgtttagaccagctgaacatagtgtggctgtggcacacagactgagaggtgtaatttaagctaaacatccccttaggggaccaatcaataatgattccataggaatcgttgtgcagcacctctgcctgttctgcaatgcaatcttcccaaacaagtacgttcattatttctggccaggtctaattctatttacaaataggttttgagctgcctttgctttgcctcaattataggagcagatttattatggtaaatattaagagcagaaagcatgtgtaactgtgtcacacagtgattacatccaggcattattgccagccaagattgataaatatgcccaataagtataactgttctctgtgttgttccttgttgaaggaatactcatggcaatggtgatcaccactatcatatctatcattaaattactcattgtgnnnnnnnnnnncctcgtgccgaattcttnnnnnnnnnnnnnnnnnnnnnnnnnnnnnnnnnnnnnnnnnnnnnnnnnnnnnnnnnnnnnnnnnnnnnnnnnnnnnnnnnnnnnnnnnnnnnnnnnnnnnnnnnnnnnnnnnnnnnnnnnnnnnnnnnnnnnnnnnnnnnnnnnnnnnnnnnnnnnnnnnnnnnnnnnnnnnnnnnnnnnnnnnnnnnnnnnnnnnnnnnnnnnnnnnagctgcattatgaatcggcacgcgcggggagaggcgtttngcgtatggcgctctccgcttctcgctcctgaccgctgcgccggtcgttcggctgcggagcgtacactcatcaaagcgtatacgtatcaagatcagggaacgcangagacatgtgacaaagcancaaaggcagacgtaaaggcccgtgcggcgttccaaagtcc

SEQ ID NO: 134155 - DNA, 1056 bp, Homo Sapiens
  misc_feature (122)..(261): n is a, c, g, or t
  misc_feature (280)..(889): n is a, c, g, or t
attaattttatttatttattttaagaaaagtacatcatgagttataagtaataattccaactcaaattttaatattgcttaacttctttgattttatatttatcttttacactgaaaagtcnnnnnnnnnnnnnnnnnnnnnnnnnnnnnnnnnnnnnnnnnnnnnnnnnnnnnnnnnnnnnnnnnnnnnnnnnnnnnnnnnnnnnnnnnnnnnnnnnnnnnnnnnnnnnnnnnnnnnnnnnnnnnnnnnnnnnnnnnnnngcctacagccgcgttcttnnnnnnnnnnnnnnnnnnnnnnnnnnnnnnnnnnnnnnnnnnnnnnnnnnnnnnnnnnnnnnnnnnnnnnnnnnnnnnnnnnnnnnnnnnnnnnnnnnnnnnnnnnnnnnnnnnnnnnnnnnnnnnnnnnnnnnnnnnnnnnnnnnnnnnnnnnnnnnnnnnnnnnnnnnnnnnnnnnnnnnnnnnnnnnnnnnnnnnnnnnnnnnnnnnnnnnnnnnnnnnnnnnnnnnnnnnnnnnnnnnnnnnnnnnnnnnnnnnnnnnnnnnnnnnnnnnnnnnnnnnnnnnnnnnnnnnnnnnnnnnnnnnnnnnnnnnnnnnnnnnnnnnnnnnnnnnnnnnnnnnnnnnnnnnnnnnnnnnnnnnnnnnnnnnnnnnnnnnnnnnnnnnnnnnnnnnnnnnnnnnnnnnnnnnnnnnnnnnnnnnnnnnnnnnnnnnnnnnnnnnnnnnnnnnnnnnnnnnnnnnnnnnnnnnnnnnnnnnnnnnnnnnnnnnnnnnnnnnnnnnnnnnnnnnnnnnnnnnnnnnnnnnnnnnnnnnnnnnnnnnnnnnnnnnnnnnnnnnnnnnnnnnnnnnnnnnnnnnnnnnnnnnnnnnnnnnnnnnnnnnnnnnnnnnctccttcggaagcgtgggcttctcaagctcagctgtaggatccaatcggtgtaggtcgtcgctcagctgggtgtgtgacgacccccgtcagccgacgggggcctatcgggaatatgtctgatcaaccggaaaacactatgcatgcacaccatgtaaacgtaacaaca

SEQ ID NO: 134156 - DNA, 1043 bp, Homo Sapiens
  misc_feature (363)..(780): n is a, c, g, or t
  misc_feature (783)..(863): n is a, c, g, or t
accttgtactttacaaactttattaaataatggacgttactaactttcattatcttatatacagtatttaaactatgtttttctagatgcattttttccccacaaagaatagagcaggtgaaaagtaaacttatataaaaaaaattgaaccttcagtacaggaaactagtaagaacttgacatactttaaagtacatataacttttcctcgttatatacatccccaccccacctctaaaacaaactgttttaaacaaaagcaattgataactttcaggaaaaaaatacaaacatgattatatatatatacacacagctctcaaaatctgtgtcctggccaacagaaatggtctataaatcttnnnnnnnnnnnnnnnnnnnnnnnnnnnnnnnnnnnnnnnnnnnnnnnnnnnnnnnnnnnnnnnnnnnnnnnnnnnnnnnnnnnnnnnnnnnnnnnnnnnnnnnnnnnnnnnnnnnnnnnnnnnnnnnnnnnnnnnnnnnnnnnnnnnnnnnnnnnnnnnnnnnnnnnnnnnnnnnnnnnnnnnnnnnnnnnnnnnnnnnnnnnnnnnnnnnnnnnnnnnnnnnnnnnnnnnnnnnnnnnnnnnnnnnnnnnnnnnnnnnnnnnnnnnnnnnnnnnnnnnnnnnnnnnnnnnnnnnnnnnnnnnnnnnnnnnnnnnnnnnnnnnnnnnnnnnnnnnnnnnnnnnnnnnnnnnnnnnnnnnnnnnnnnnnnnnnnnnnnnnnnnnnnnnnnnnnnnnnnnnnnnnnnnnnnnnnnnnnnnaannnnnnnnnnnnnnnnnnnnnnnnnnnnnnnnnnnnnnnnnnnnnnnnnnnnnnnnnnnnnnnnnnnnnnnnnnnnnnnnngaaccgacagactataagaaccagggttcccctggaagtcctcgggctctctgttcgacctgcgctacggatactgtcgctttctcttcggaccgtggcttccaagtcagcgtagtaccagtcggtagcgtcgtcagcgggtgttgagacccgttaccgacgtggctatcgacacgctgg

SEQ ID NO: 134157 - DNA, 763 bp, Homo Sapiens
  misc_feature (112)..(127): n is a, c, g, or t
  misc_feature (549)..(561): n is a, c, g, or t
tgtgacaggtgcctcggccgcccaagtgcaccccaagggggactttggggacacaaagcccgtgaggggaaggtgagttttgaggaaggagaggtgaggcacctgtcacagnnnnnnnnnnnnnnnnccccgccgcggagaggtgtggcctgggtaccccacggatgaaagtgccttcccatcagcccctgcactgggccccgtggaacctagagtccctggttcgagctcagggagagcctcgggccactaggggtaccccaaggcggtggaaagcccatgagaggaaggtgagctgtgagggaggagaggtgagacacttgtgtcagaaaagaaaaagaaaccgcgccacggagaagtggggcctgggtctcccatggaaagaaagtgccttcccatcagtccctgagctgggccccgtgggcccaggcgaccctggttctaggcctgagtgcacctcggggccactaggtgtaccccaaagcgggcagaaggcccatgaggggaaggtgaggtttgagggaagagaggtgaggcacctgcggcagnnnnnnnnnnnnncatgcggaaaagaagcgggggctgggtctcccacggacgaaagtgccttctcatcagcccctgcgctgggccccctggactctggcgaccctagttcaaggaccagaagagactccggcatgctagggtaccctaaggaagccagaaagcccatgaggggaaggcgagatttaagggaggagaggtgagtcacctgtggcag

SEQ ID NO: 134158 - DNA, 1036 bp, Homo Sapiens
  misc_feature (47)..(55): n is a, c, g, or t
  misc_feature (914)..(915): n is a, c, g, or t
  misc_feature (987)..(987): n is a, c, g, or t
acgtaaataacatatttttatgaaaaataagtatagctttccaaacnnnnnnnnnttaatgaggaatgacattgctttacatgttcgtaaatttttaatgttcaacttactaaaagaaaaccagattctatttgcatctgtattcaatctgttgcaatgtgttgttttcatggaattatgtgaagaaaatccagccttacacaaatatgcaatgggagacaggaaaaggtattttaatagtcttttcaaataattgcaaatattcatcgttgacactgcaccaaaattcaacgattggtaatttcttacgagttaattgcagtgtgggatctgaaactacgtcggtgaactttcataatattacactaaaattcattaatctatcttgcttttggagtgtgaatcttttagccatgaatgattttataccagcatgcatttgtcatttaggaaatattgattcaattagctactcagttattccaaatgttgaccatttcaacatacaatgtgaaaaaatcatatttgttactatctcatcagaagaatctttaagtatgggaaagctgccaagcccatggtagtagatacaagttttccaaaattctcattttctcttggaagttggaattttatcattggcaacaaatactgtcatttgttctccttgatgtttcagactcactttcattttggaggaaacatctgccagatatctaagtctgaataaacatagttgtctgttattcattcttgcacataaaatggtgttatgtgaaaataaacagacggttcaggcatataactcagttactcgtgcttctcctcagcagtaaagtgcttatgtgtattccctatatgtacacagaatatacaaagaatttgtctaagctcgtgcgaattctggccgaggnncaatcctataggagtctataaattcgatctgtcatactgttctgtgtgaattgtatcgtcacattcaaacanacagcggagcaaatgtaactgggggctatgatgacactcatattgctgc

SEQ ID NO: 134159 - DNA, 354 bp, Homo Sapiens
ttttatttttagtttctgtatttccctaaccagggcagctggcacagggattggcttcttggtctctgatttccactccagcactttggccatcagaggatcctgtgtgagctcagctgagccagccccaacaccccccaagcagcttttgggtgggcagtggcagcggtccctgtgcagggcaggagcctggggaagcaggggctgggtgctgctggtccctggaagaaggacttctaccccagtgctttgtgaagaggacatgagggcaaagtactaatttgcccctaggtaacatgtgtgctgggggttgtaggctgaggtaagggtatgaattctgcctgaggaaaggct

SEQ ID NO: 134160 - DNA, 723 bp, Homo Sapiens
  misc_feature (679)..(679): n is a, c, g, or t
ggatttgaattcatttattgagctttaaattattattttcccttcttttgacctttaaagtactccttctcataatgtattatatatacctcttgaaattccagatactacagcttatttcctaaactcaaaatattttttgtcatagttacacactgaactttatattacatttgtatttgatttttagatttaaacaaaaccaaggtcttaaaaagcacgtttcagttatgcttagtttatattatttttattttatgtataatataactcttacctaaatactaaagattttcagcattagcaaatagtctgtttagtgttttcatcttctgcatcatgatgaaaatgtaaatatgaacattaatatattgacgataatatttgtttgactatactaaaaattttacttacataaaatccaatactaaaagaatcaaactttgatatgagtcctcattctctgctacacagttattcttaagatgccttctaatgaccatgcaatttcagttcctcttgttgttctctggagtttcttatttcagtcccttggcttcaatttaatgctctgcgatatagacaggagacagggaaatactaggtagaaaatggtgaggtctctcgtgagggctccaccctcaagcctggaccatggctgggagactgatttgtgtanaaataaactctggtatctattcagctggctctgtgaattattac

SEQ ID NO: 134161 - DNA, 723 bp, Homo Sapiens
  misc_feature (700)..(701): n is a, c, g, or t
actcttccaatgcagcctttaatttagtaagcattacaagaatctattagagcagaaaacgtcaggttgaaaaattaacacatcaccggagttaataagaacccagcctcttattagatacaaatggagagccctccaactgcccaacagactgttgaagtcatgtttgttgcagctccaaagtagttgaatctttactgctcagaggctggaccaaggaaactgcccaggcactcaagccagagttagcaggggcccatggcctacactttattcaggtgtccctatcttttcctctcagaaatgctgtgcatgtcacagggtggatatccctctgcctgggactccctcgggaagtgttttctgtaacaaagacaaacatgccatgcctgtcaccaggggcagattgtggactgtgtaaaccactccaggagagggaggctgaggggctccaggccattcagatttagctctaagttatggtctttgttgtctttccacattcagactgaaatgtgattcccctagctttcttttttggaaaatactggtgatgagttccacgactagaaagaaaagctgttgacagaaaaagcttctgatagggaaggggcttcttcatgtgttctcaaaggagacaattgcttcaagcaagctgaggcaggatgccaggtctaggaataagaggtccagatcacannatggtcatctttaactatggat

SEQ ID NO: 134162 - DNA, 1070 bp, Homo Sapiens
  misc_feature (38)..(38): n is a, c, g, or t
  misc_feature (56)..(56): n is a, c, g, or t
  misc_feature (85)..(101): n is a, c, g, or t
  misc_feature (202)..(219): n is a, c, g, or t
  misc_feature (301)..(301): n is a, c, g, or t
  misc_feature (418)..(418): n is a, c, g, or t
  misc_feature (488)..(488): n is a, c, g, or t
  misc_feature (495)..(495): n is a, c, g, or t
  misc_feature (898)..(954): n is a, c, g, or t
tggtggttaacgatcggccagtgtccatgttcgaaatnacccgtcactacaagggnccaccgtctgcggtcgcggctgttggcgnnnnnnnnnnnnnnnnnggatgtcttttatttctttctcttgcctgactgctctggctaccacttccagtactgtgttaaacaggaatggtgagaatggtatccagagcagtcaggcnnnnnnnnnnnnnnnnnngcctacaacagccatggcacagtttctctctttgtggaggaagggtttgacatttaaactagaggccgactttataacgttntatattttaactaaatttctttcattcatctttgtctttgattccatgtttcatgatccctgtgaattcgatgtaactgaaattctcctttttgtcaatatctgcttctttgtccanttcatccatttcctcatctgttaaatctatcccccatggatttcaccatctctcttatctaaccttcctnaacgctnactgtttgttcttcatcatatcactcatatgattttctgattatatcttcaggatttgtgtcatttactttctcactatacatttctcattatcatggtgtcattcatgggctctttggcttcattcatcattgctatcaacctcgtttctacttcctgtcctccaggcgtatattctccatcctcattctacatcttcttcttactcatgtcatacctctttcctatttttacattgttacccgttcacctttcacctatcatacgattccgctctatcaattctaacccttctggtgcctacatttggtttaattcatattactttctattctctattgttcgtgttttagtattcaccttgtctttgatcttctctacttattctcttcacccatgcttnnnnnnnnnnnnnnnnnnnnnnnnnnnnnnnnnnnnnnnnnnnnnnnnnnnnnnnnngcttatctttcccttctcccgttctttattttctactatcttgttcttcctcttctgtttatctcgcctttctataacctcatccccttcctcctttttctctgcttgtatctgga

SEQ ID NO: 134163 - DNA, 504 bp, Homo Sapiens
  misc_feature (143)..(257): n is a, c, g, or t
  misc_feature (266)..(267): n is a, c, g, or t
  misc_feature (271)..(271): n is a, c, g, or t
  misc_feature (274)..(275): n is a, c, g, or t
cgcaatcttgaaccgggataaccaatttccacccggagaaccaggttttgacttgattacggattttaatccgactccactttaggggaattttgcccccttgggagccccaagaaattccggcaacgagccggcctgtagcnnnnnnnnnnnnnnnnnnnnnnnnnnnnnnnnnnnnnnnnnnnnnnnnnnnnnnnnnnnnnnnnnnnnnnnnnnnnnnnnnnnnnnnnnnnnnnnnnnnnnnnnnnnnnnnnnnnctacccccnncagnctnnacgtgggaggctgaggcaggagaatcgctcaaacccaggaggcagagggagactatttttataatgatactaagatgccatttctgttttcactgtgttgacacttgtactgatggtccaaaagcagtaatagggaaaactgctgggcactttaacgtaaattgaggcagggactccaagtgtcactgatagtcattatattattcgctacctctccacttgcagtttt

SEQ ID NO: 134164 - DNA, 1011 bp, Homo Sapiens
  misc_feature (406)..(415): n is a, c, g, or t
  misc_feature (682)..(682): n is a, c, g, or t
  misc_feature (730)..(730): n is a, c, g, or t
  misc_feature (749)..(751): n is a, c, g, or t
  misc_feature (771)..(771): n is a, c, g, or t
  misc_feature (813)..(813): n is a, c, g, or t
  misc_feature (831)..(832): n is a, c, g, or t
  misc_feature (837)..(837): n is a, c, g, or t
  misc_feature (853)..(853): n is a, c, g, or t
  misc_feature (867)..(867): n is a, c, g, or t
  misc_feature (931)..(931): n is a, c, g, or t
  misc_feature (940)..(940): n is a, c, g, or t
  misc_feature (956)..(956): n is a, c, g, or t
cagagtttgttgtagtttattattaacttttctgaattaattatgcaaaatctgtattatctaccatgtgtggccactaagtctctcctcagttagcttagtggtcagttaatggccagacagagatttccttaaaggcccagaaccagtcatctcccagtttttgttttgaggttctatgcattagagaatgctttcaacactcagtcgggcagttaacaactctgcagtagccctcacttcctgcttgcatagagcctgaaggtcagtaagaagtatgagctcagtgccttctgaggtatttctggagctcagacctgggaatatgtgtggccttctagattctcagaaataggttggattttttcaaagctccccattgacatctcacttcccagattttccnnnnnnnnnncagtttgtctatttcttgcccaactgttagccaccaccttgggcaactgcaaagttcatcaattgcctataattattattttcaacaatagccccaggagaagtcttttcatgctgggtaagctctgaatcaagtcagaaacagacagctttgcaagtggtgtcttctagggaaccaccagataggtcaaataataatgactttctggaaatgaggctttgaaagagctccagctcaggctgttagtttttatcacaaatgtaggtntgttaatttttaaggctactacagagctggagggggtgggttgggaantgcatgctgttctttacannngatcagctattttatcgatnaaataaaataaccctacatagatggctgcacgccttttggtnatttttcagagtacttannatgtnatctgacattttttgncagtttcctcactngctggagggaagatgagaatctcaagaggtcctatgctgcctttttgctgcagtcttgaatctnacgtggatngaaagggacatggcangtgtcctgaaatggatagtcatatcagggaggcggctgtgcaaaaggagaaaaaa

SEQ ID NO: 134165 - DNA, 1038 bp, Homo Sapiens
  misc_feature (110)..(110): n is a, c, g, or t
  misc_feature (138)..(138): n is a, c, g, or t
  misc_feature (143)..(143): n is a, c, g, or t
  misc_feature (153)..(153): n is a, c, g, or t
  misc_feature (176)..(176): n is a, c, g, or t
  misc_feature (180)..(180): n is a, c, g, or t
  misc_feature (191)..(191): n is a, c, g, or t
  misc_feature (245)..(245): n is a, c, g, or t
  misc_feature (260)..(260): n is a, c, g, or t
  misc_feature (266)..(267): n is a, c, g, or t
  misc_feature (278)..(278): n is a, c, g, or t
  misc_feature (287)..(287): n is a, c, g, or t
  misc_feature (306)..(306): n is a, c, g, or t
  misc_feature (343)..(343): n is a, c, g, or t
  misc_feature (348)..(348): n is a, c, g, or t
  misc_feature (580)..(580): n is a, c, g, or t
cagagtgatatcttctttcttttaaccacgcatttgttttctgcaaatggtgaagtgctgaactcccagtggggattcttagggcctctttgggttaattatgctttccntggagcatccgtgtggagaagtttgctntgagntttaaacaanagtgaactgccctgtaggaggtntgtnaagaagggtanaaggtttttgtatttctaaaggtctaagtagaagtggggaaggagtgggggatngtagggaaaaaatanttgaannaatacattttnttaaaaganatatgggggtagcctcagnatcccatagattgaggctcccattcccacaagatgcnccctntccctcagacaccagttgcaagtctgggcctccagaacttctgactgaccagcttcaagttgaggttcccatgaccctctctttgggcttcatttgctagagcagctcgctgaactcagggaaacacttaacatttactgctttattataaaggatacagatgaagagatgcatagagcaaggtataggggaaggggcacagagctttcatgccctctctggatgcaccacncactgtccagcagcccgcaggtgttcagctgtcggaaagctccctaaaccctgtccttttgggtttttaatggaggcttcattacataggcatggttgattacatcactggccattgctgatcagctcaacctttagcccctcctatccctggaggatggggggttgtgccaaaagtcccaatcttctaatcatgccttggtctttatcgtgaccagcccccatcctgaagttgcctagggtctgccagccatcagtctcattaacatacagaaagacttcacattggagatcccaaggattttagtagttgcatgccaggaaacagggatgaagaccaaatacatatttcatagcatcaaagctgcattaaacacttgtgatttcaagtaaaaaaaatctaatttcatatgacaagttggtggtttatctgaaatttcttctgaaatgggcccggag

SEQ ID NO: 134166 - DNA, 940 bp, Homo Sapiens
  misc_feature (239)..(247): n is a, c, g, or t
  misc_feature (329)..(337): n is a, c, g, or t
  misc_feature (353)..(381): n is a, c, g, or t
  misc_feature (530)..(539): n is a, c, g, or t
  misc_feature (726)..(726): n is a, c, g, or t
  misc_feature (806)..(806): n is a, c, g, or t
  misc_feature (822)..(822): n is a, c, g, or t
  misc_feature (853)..(855): n is a, c, g, or t
  misc_feature (860)..(861): n is a, c, g, or t
  misc_feature (863)..(863): n is a, c, g, or t
  misc_feature (879)..(879): n is a, c, g, or t
aataatacatatttaattttcagaaacatatgctaaccatcaacaacatgatcagggtttcattgccccagatgttatttcattggtacattatattgatatttacaaaggctttcaaattcaacaacacaaaacaaaacagcttaatttttaaaaactacaatgctttaaaaaaatgtaaacagtttaatttttacattattgtaaaaaagaagactcactccttaatgtggcttaannnnnnnnnaagtgagcaaagcctggtgctcttggataaagaatgaaaataattctttacatagaaacattgtgctccagtgtggcaaagnnnnnnnnnttatatgtacacatannnnnnnnnnnnnnnnnnnnnnnnnnnnnagaccacaaaaaaaatcttgtccccaaattgagaaatttataaaaaccatttacatatggttgttgacctactggaaacctatataccattttcaaaacaataactcagtcaaaagataccacttttattaaaaatgaaattttgtgcnnnnnnnnnnttgtttaagctagaaacaagactatcccccctagtaagaggccaaaagagccactgaaataatttaactctgttagatttaatgcatgtaaccaaaaggcacatacatgtgattaatatattaatatcttttcatgcagaaacttgtgcatgttcataattatacaacgaaaacacaaacataacanaacataaagcctaatgtttggcaatgttattctagccatattcctttctactctatcagcccagggtttcctagatcatntacactgcctctcaanaaatatattatattttgacaactttcaatannnattannanagtatgtttagctggnacactattttttcagttttgatacatatagaaactactgatatgtttattttaatgcattt

SEQ ID NO: 134167 - DNA, 981 bp, Homo Sapiens
  misc_feature (804)..(804): n is a, c, g, or t
  misc_feature (815)..(815): n is a, c, g, or t
  misc_feature (822)..(823): n is a, c, g, or t
  misc_feature (867)..(867): n is a, c, g, or t
ttttttatttcaggcaaagtttaataggcttgtggctctagcagcacaacggagcagagtacagaaaaggagtcctgatgttagctcccaaaagggctctgctcttgtcattttaaggaagttgaggcaggaaaaaggagcaacgtgtaggcaatgtttaggcagggtcttctctgcacctacacagtgaggtctcatgcccaaacatgaggcacatgtgtcagaggcatttgaaccagagtcactccatcttgaatgggggctgggtaaaataaggttgagacctactgggctgcattcctgagagattaggcattcttactcacaggatgagacaggaagtcggcactaagtacaggtcacaaagaccttgctgataaaaagaagtggtaaagaagccggccaaaaccagccaaaacccaccaaaaccaagatggtaacaaaaatgacctcgggtcatcctcactgctcatgcattagcatgctaaaagacactcccactagcgccatgacagtttacaaatgccatggcaacatcaggaagtcaccctatatggtctaaaaaggggaggaaccctcagttctgggaattgcccactcctttccccagaaaactgctaaacaaggagtaatcaatccctttgtttagcatatactccaagaagttacaagtacaagcagctgagcagccaaagccactgctctgcctatggagtaggcatctttatcctttgctttctgatgacttgcttcacttactctatggctcgcccgactccttgtgcgtgagatcagacctctttngggtctgatcngaccttnnctgtacacagtcagaaatggcaatactccatctggctcgtgcgnatctgctcgaggcaatcctaaggagcgataatcgtacagcaactgtctggtgatgttcgcaatcaaacaacagcgacaaatgaacggggctagaggcataatatggtcgcagcg

SEQ ID NO: 134168 - DNA, 966 bp, Homo Sapiens
  misc_feature (434)..(460): n is a, c, g, or t
  misc_feature (507)..(522): n is a, c, g, or t
  misc_feature (576)..(798): n is a, c, g, or t
ccacatatcaggtggattacaacagtaagaatttattctcacagttctggaggccagaagtctgaagtcagggtgttggctgggccacgctccttctgaaaggtctaggggagaattcttcctcatctttctcttggcttctggtgttgccagcaatccttgaattatggccacataacttcaatctctgtttctgtcttcatctggcattctcctctgtcttctcccttctcttctcagtacacataacattcgatttagggtccacccaaatccaggatgctctcattttgcaatccttaacttaatcacattagaaaagaccctttccccaaaaaaggtcacatccccagtttccaggggtggacatacattttagggggccacctttcaacccactacaaccaccatgaaattaatgggtctttgtccannnnnnnnnnnnnnnnnnnnnnnnnnnaactgaaggaccataagacaatgcttatgtcgtcttgccagtttgtnnnnnnnnnnnnnnnnggcctacagccgcggccgctccaacatcagaatggtcctcgtgccgaattcttnnnnnnnnnnnnnnnnnnnnnnnnnnnnnnnnnnnnnnnnnnnnnnnnnnnnnnnnnnnnnnnnnnnnnnnnnnnnnnnnnnnnnnnnnnnnnnnnnnnnnnnnnnnnnnnnnnnnnnnnnnnnnnnnnnnnnnnnnnnnnnnnnnnnnnnnnnnnnnnnnnnnnnnnnnnnnnnnnnnnnnnnnnnnnnnnnnnnnnnnnnnnnnnnnnnnnnnnnnnnnnntgatcggccccgcgcgggagaggcggtgcgtatgggcgtcttcgctctcgccatgactcctggctcgtcgtcggtgcgggacggatactcatcaagcgtataggtaccaagatcgggatagcagaaaattgacaaagcacaaagcagacgtaaagccgttcggtttca

SEQ ID NO: 134169 - DNA, 646 bp, Homo Sapiens
cttttttgttttgttttgttctggggaagtacaaaggtgaagtgcctggacttgtcagcagccagttccagggacagaggaatggattggatttcagttattttctaaaaggaaagctaccaaaagcaaggggatcttgaacctcaagttctcatgacagaaacattagtaacatagtattacaactgaaaggaaagtatagcattattgcatacgccgttttacaggtgagtttaagggaggtgaaaatggaaccaaggactgtttgccaccagccagtttcccctgtaggctccaaagtgggaatgtgacacccgatgcagctctgtgtcctgggaagcatgcgcaggtgatttctagaccggatcaacccttccttgctttgaggacacagctaaacagacaaaaattggtgccctcatggagctctcaacctggagagcctctgtctactgcggtacatttatccagtgcgtttatgtatgcaggtgcaggtttggatggggaatctgatgaataaactgtggtcctttactgtttatatggaaagattgataattaagcaaaagatagcagacacagctgaggtatgtagaatgctccctgagctcacagaaaagaaaaggggcttccagacctcgtgccg

SEQ ID NO: 134170 - DNA, 641 bp, Homo Sapiens
agctcaatgaaagctatttttattccttcttttgaaaatgcaccatttgtttgctttgtcaaggtacctttaaatgaagtcatcctagggggtcaccatttattaatgcaaaatttgacatattgttgtcattaagatcagtattaagtttttctctttttgggcagattgaatctataaattaccccatttctgttcattaaatttaacatagaatccttaaaaacaggggatctcaggattggtgttgaaaatggcaagacccaagaatgtgcgtattctggcatcatatctaatcttcaagtaatattttgacttatttgatgtgaacagggttgggtgctcagcattttttccctgatatacagcggcattctgtgtaccttttaagctattcctttagcccttagctaaatgcagtttggtgtttgtactctatgatttgcatcttacacatctcttgctgcttctgatattaatgataaaaagtgggggaagatgaaatggtagcactgaaaaatacagagggcctggaagttgaaactattactaaaattttgcttaaaggtctaggtctcttactctttctgatagatggcagtgattgtggtttattttaaagtattctttttttcccagca

SEQ ID NO: 134171 - DNA, 115 bp, Homo Sapiens
gattagctgggtgtggtgggatgattgcttgagcccaggagtttgaggttaacagtgagctgtggttgtgccaccacactctaacctgggttgatagagtgagacccgtctgttt

SEQ ID NO: 134172 - DNA, 667 bp, Homo Sapiens
gttttcacttaaaacttagtgcatttattcaccaattgtttgacataaagctaaggtcttttcttcaagtttgttagctcatggtaatttcttacgggttctgttgcatatacagcccttataaatatatcatctgcaatttccaggtaaagtttctatagaacagagcaccaaaacttttagacattgcaaagaaagctaagtgcaaatctttccagtttttctttttaatttcaataatcttcccatacctaatctaaccataaaaattttagtcactggcctttattgagtttccaggtatgtggcttagattttatagaaaccataccttctttttatgctcatatttcactggtttacataatatgaaatgcagtaattatgatgatatttgcaactggtataaagaatttgggaacaaataaaatgaacccttggtaagtgtattagtccattttcacactgctataaagaactacctgggactgggtaatttataatgggaagaggcttaattaagtcacagttcctcatggctggggaggcctcaagaaacttacaatcatggcagaaggcaaaggggaagcaaggcacatcttacatggctgcaggagagagagcaagggcgaagggagaagtgccacacactttctaacaaccagat

SEQ ID NO: 134173 - DNA, 1163 bp, Homo Sapiens
  misc_feature (927)..(1101): n is a, c, g, or t
  misc_feature (1147)..(1155): n is a, c, g, or t
tttttcctggggtaactggttctttagcaggaggggagcactggggagtatcttcagggtggctggactttgcagcctctttaataacttccccctgtgcaggttgtatcctttatcaccccaccccgatgccccggtcttcaggaaatggcagcaggcccatatttctgtagggttcagagttctgtgaggtagagcattccttccaatgggatcttagaattcctagagttgcagaattttactgactagacccaggaggtctcaggagtccagacttgcttaaagcttggctcaaaattccaagggagctcataactccatggggcccagagttcctggctcgggaacattgggaggcctgggatacagtgccttagcctcaagcagaaaagtgaacacaatatctttatggcttgaaggtatatgaaataatgtcactacatcggagcagcgcctctgcttgcacacctatgggagtctgcagctgtgacacgtagaagttggccacatccaggtcggtggctccaaagtgggcggccacacgcacaccctcgtgcaacgtgaagctcacctgatgacccaccatggccagcaggctgcggaggtaacgctcccgaagggcggctcgtgcccgctgctcctgggattccagggattcttgagctatgggacactcctggatttcaggaacctctggcctcaagggggctctgcgtccatcaggggcaaagccacggctgaagccatcagggccccggggcagccggagcacaggcacgggaatgttcactggagtttgcattgtcttggctgttgagtgaagaaaaagagcaggaagtcattacatggctcttcctgtctctgcacctgaactgtgagccccttgcaagacaggaccctgcagatagaccaaggatgtgaacnnnnnnnnnnnnnnnnnnnnnnnnnnnnnnnnnnnnnnnnnnnnnnnnnnnnnnnnnnnnnnnnnnnnnnnnnnnnnnnnnnnnnnnnnnnnnnnnnnnnnnnnnnnnnnnnnnnnnnnnnnnnnnnnnnnnnnnnnnnnnnnnnnnnnnnnnnnnnnnnnnnnnnnnnnnnnnnctggtgaacagtgaattggtgaatgtgaattgcatctcaatacagnnnnnnnnnaaagtctc

SEQ ID NO: 134174 - DNA, 757 bp, Homo Sapiens
agaggagaaagcacatgccaagtcagcaaagaaaagtagaattcgaaaactttttaaaaatatacgtaaggattttcacaatgctgcactgggctagaaactgaagctaaaacagatacgtggtccctgctgctatggggcttccgttctagaggcaaggacaggttgtgatgagggttctgaaggatagagaccaagcagggagggtgttgaggaggcttctgcgagacctgaaggatgggaagccaggaagtgggaggggtgggggtccaggctggaggggcccaatgtaggtgtagagggactacagccctgaggggctgctccatgcggcattcttggaggtccaagaggggcagcgccaccttgggccaggctcctctccagcagccttggtatggggtgggggtgggaagacccctgatgcagcctgtcctctgggtgtgggggtggaggagagggctccaggggacccagccagccttgaccctggaggaaagtcaggtgggctcagagagagccctcaaatctgggccctgggtcagggtggggtcaagtccagccttgaagagaatggactctggaatctgacgtctgggtttgaatccagcttccaacactcactggctgtgtgactttgggcaagataacttatcctcttgtccccatgtgtcattggagataaactacccacctaccagattgttgtaccatgctgggcaaacactaagtgcttaataatggtagcccactgctc

SEQ ID NO: 134175 - DNA, 492 bp, Homo Sapiens
ggtaccccattcctgttgaatgggctcagtcttgacaaaccaattccctgtaactttttcacaattcttgactctgagaaaaagcagcactgtagggacctgaactctccattttaccagttcacccttctgacctgttctgctcagcctgtggtgaggggaacagatggaagaaggctttccttggggtttgaagaggaagccagttgtgggagtctctttgttacaccccctcccctccagaccctctctctctatgccttcctcctcactgcatatttatttgcgatttgtagcactgatctatggtacagttgttttgtttcttaaacagaagtaggtaagggaacctcagtaataatggaaatctgcctcagtctcctgtttggaaatgatgagaggtgagataagtaatgtttatatacctcctttcttctgtgatgattataaggtatacgaagctggacagattaaacattgagccctgtgcat

SEQ ID NO: 134176 - DNA, 930 bp, Homo Sapiens
  misc_feature (518)..(562): n is a, c, g, or t
  misc_feature (820)..(854): n is a, c, g, or t
gaatgatttgttccctttaattcattctgtggagaatgggtaatggaagggggtgaagattctacagaatctgctggttcaactttaacttttatttctgaactgttggcagtattattagggcctttttctcttttagagtttgttccagaaaggagttatcttgtggacaatttgcataatgtcttttaagcattatttgtgaactatatttcctcttgcacaaggaggcatttgcatgccagttaaattgtattcagcctttgaagaagacttttgttttcgagtcttaaaagattttttaggagaaatagaatccaggaacaaaggttgcccaggctttgttgctatatcaggagtaattgaatccctccttagtcctctatgaacttcatcaaaatgcctccttacattcgcttttgtagcaaaatgatttacaacatactggacaactcctacttaatggaactagaacattcttactgcgtcctttagaggattggtttggattctttcgnnnnnnnnnnnnnnnnnnnnnnnnnnnnnnnnnnnnnnnnnnnnnttttcgaatgtgacggcgaacacctcgtctagaattgaattcttttctacaaagacaacatatcaactggtgaccaaatcagaattgtcagaagtttccaagtcagcctgcgactcctgaggttgttcatcagatgtaggtgcaacttcatctgtaacaatctcaacaggagggggctctacagtttccacctctgtatctgtaacccccggccgtaatggccgaattcccgggcatatgtccggtaccgtcgactgnnnnnnnnnnnnnnnnnnnnnnnnnnnnnnnnnnncggccgcttcctcgctcactacctcgctgcgctcgtcgttcggcttgaccgagctagcgccctatagtgatcacaa

SEQ ID NO: 134177 - DNA, 977 bp, Homo Sapiens
gcatggccaattatcatttgtactctttgcaactttatttaaaaatccctttaacatgttctaatcttttgttgcacagggaataaaagctgcaagactgcaaacttccttcaacagccacacccacaacacctagacatgaaacagatgtaacaaataacaacaccacaaacagaaatactgatttccaccattcaacacagttcatgacagtgtctttagggttcagttgaagagggggtaaacttttaaaaagagggtcagtctgctttccccctgttttataatgttggtggttttaatccgtatttctttgcaacttctgtctgggcatgggcggcatcgcaaagtgaatacagatgggccatctccatttccgatttggccaggttaatagctttgttgaacatgtcaatggctttctccatgtttcctctttgtacttcaatagttcccatggtttcataggcaaaatcacatttattgtcaatttcaatagccttgctgataagttccaaacctctatccagatcttgcttccactgaagttgaagtaaacctttatgaacatatgttgtagcattatctggttccaaatcaatacatttatcatacatttcatcagctttaccaaactgttgttgatctgttaatgcctgggcgtatagtgcatagccttcggcacaccttggaaatttctttatgacctcttcaaaacctttcatagctgcttggatttgtgaagagttgtttcccgtatatgcctggcggtacaatgcaaaacatttctgtgcttgtgccagagcagactcaggtcttaacctaatacattcatcaaaatctgccactgcttcttcaacttgatcaaggagtattttcagctgtcctcggtggtgataaacatctgcattctgaggatcgcggacgcgtgggtcgacgatatcccgggaattccggaccgggtaccagcctgcttt

SEQ ID NO: 134178 - DNA, 667 bp, Homo Sapiens
  misc_feature (63)..(63): n is a, c, g, or t
agaattcggcacgaggcattttcagcttttaacactagatactgcacgtgattagaatgtttntgaaggtttcctcgtttttatttgccttggacagtttttagttgtcagagtcagagctttgcagctttgagggggaacagttctctttaaaatcatttgctattttctattctcccttgttattttaatctaagcattttcccccgtttctcatattttaaccatatgttcggtagataactaaacagtatgatctggttggcattttcttcctgatgatgggagcgtcattcttttgtcttcatggttacttgtgtgatataacatacatctgttaaagaaaatcacttctttctaggggagggaggtagaaaagtatctttcaaacttggtttttgagtttgtgtcttgtcttaactttgtgttggctctaacttaaacatgctgatatgtgttttcaagaattttgtttaaggaagtattgtatggaagtccacaaaatgaaggaagttcatctaggttttaatatgtaagcaagataacacacaagtgtaccaagtgattattaactttgttgttttacaaatttgtatgaacttggagtatctgttggccattactatacatgtgcaaataaatgtggcttagacttgtgtgactgctt

SEQ ID NO: 134179 - DNA, 913 bp, Homo Sapiens
  misc_feature (228)..(241): n is a, c, g, or t
  misc_feature (252)..(252): n is a, c, g, or t
  misc_feature (274)..(333): n is a, c, g, or t
  misc_feature (346)..(402): n is a, c, g, or t
  misc_feature (414)..(416): n is a, c, g, or t
gggcgcgcctgttggaaaaagggcgagaaggagcgcctaggaggagcgcgcgggagttatttataaaaacggcgcttagtgcgccagcgaggttatttctttgggggggagttccaaaccgccgttatgaagcgccatgttgcttttttggagagacactatttggcccgtttttctgtttctaggggggcgcaccgcgccccaaagaagtgttttaaaaaattttcnnnnnnnnnnnnnnagggcaaaagnaaagaaatcgctaaaagaatgnnnnnnnnnnnnnnnnnnnnnnnnnnnnnnnnnnnnnnnnnnnnnnnnnnnnnnnnnnnnttgattaggagtnnnnnnnnnnnnnnnnnnnnnnnnnnnnnnnnnnnnnnnnnnnnnnnnnnnnnnnnnagtttggttgannnggctgcgggctaacgctttatttgccagccaaggccccgggcccgcctgggcttctgctcagaagatcctcacggagtccagctgcacgtccccgcccacctccaccaggcgcacgcgcgccagcggcaggcggtggcggaagtggtggtactgggcgtccccaaccacggccttgaagccgtcgtctgacgcgatgatgagcacctcgaagggctgcccgcgctggaaaggaacgcccggcccgcgctcctcgcggccccaggagccttgctccttgctgttgaagaccacctccgacgtgtccagccgggggttgaaatgcagggcggcatcggagccctgctcctccccgcacagcaggtttacatggaacctgctggcattgggaggaaccaagccgcgaattctcagcaccgtgccagggcggatgccctcgggcagcgaggacttgtgggggacgttggacatggctgggaccgggttgggcagccgtccc

SEQ ID NO: 134180 - DNA, 825 bp, Homo Sapiens
ttttttggagagaaggataagccatttattaaccccacgcccctagcaccagctgtcaccttggacttgttggagatgcaggggctagaaaggaaatgacagagtgtacaggccccttcgaccccgtgtcccataggtggtggcccccagacacaccctctctgctggcagtgcagaacatgcatcccaataccctagaggagaaacaccaccccagggagagccctttctgctccaacctcctgggcaggtcccaggttggggcagcagccatctgcaggtgtttgtcaggcctggccacacatgcggacagaggatacgactggggtaccctagggtgtggggagggtcggcctggggtcagggggcatgaaggctgtgttccagactcctcctgcccccaatcctctgtgcccctgctggagctctcctagcttctctgatctgtgctcctgtctttggggagctgcccggtctccaggaagagccagaggttgttgcatttctccgactccactctcgtcaccccgtagctgaccacagagcctgcaaccacggccactaggaggctccactgcaaagggtatggaaacttcctctgaatgaacatctgcaagccaaaggccatgccggtgcctgtgacgaaggtgaaaacgcccttcatgaaggcgtgtgactggcatgcggcatactccccgagtcccgggtgcttggcagccacggcgtcgtccacccgggacagacccaagttcaccatggttggcagggctcggggagcgggcctgcgcaggcgcaggccctcgtgccgaattcgccacccaggcc

SEQ ID NO: 134181 - DNA, 273 bp, Homo Sapiens
tttttgaggttttgttatcatttatttgtgaagttaaaaacgagcgataaaaagtaaaaactgccatacaattttttttgttgttctcattttgttttcagtttcaatctcctcttgaacagatgaaaagacaacagaccagtcctgggaggggggacgggcggggccgcgggagctgagccagggcgggagggagagaagagggggcttggctgctgggggaaggggtcctgcaatacaacacctggtccaaggaatgttccacctctaact

SEQ ID NO: 134182 - DNA, 315 bp, Homo Sapiens
tttattttggaaaatgttaaaatttattaataatagttaacatcacatagttaattaaactagttatgtattgtacataatgacaacatcttcactagactgagtgctcaaggatttgagatgattcgctattcatcacaccccgaagattgagatccactgtatttacacaaagcaaagccatgtcagcaagggactgtcaacctgattctgagaacataaacattcaaaatttattttccagtgttcctttttggaaaccaacaacacatctttaatacctacacacacacacatctcgtctcttctcttgta

SEQ ID NO: 134183 - DNA, 332 bp, Homo Sapiens
tgccaatgtaacggtattaagaggtggggtctttaagacgtgactgggtcatgagggtgtaactctcatgaatggattaatgcctttcttgcaagagtccattggccagaaccgtgagctgaataaacatctgttgtttacaatttacccagtctgtggtattctgttacagcaacagaaaatggattaagacaaatagcatcttagatttggtgagatgtggcatatttcctaaaaagtgctgccaggatcatccttctagcacacaggatctcatccttgttattctcctgcttcaaatctcctagctgaggctgggtttggtgcctcat

SEQ ID NO: 134184 - DNA, 1052 bp, Homo Sapiens
  misc_feature (369)..(901): n is a, c, g, or t
  misc_feature (910)..(910): n is a, c, g, or t
  misc_feature (969)..(969): n is a, c, g, or t
  misc_feature (980)..(980): n is a, c, g, or t
  misc_feature (1014)..(1014): n is a, c, g, or t
  misc_feature (1025)..(1025): n is a, c, g, or t
ggaattgccctggtttttattgctctgatgtttggggttacctgtgagcacagagtcccatgtttgggagcgtgagtaagaactaactctggcccacctgggcagagagacttggtcctgtcctttaggttggggcagcagggattgggctctgcaggtgctgagtttgccccaaactagcgaacaggagattggagaaggaggctgggcgttgcataggaaacaagctttgtttcctgtgttccattattttttcgtctctaacttcaagtttctgatcttgtctcttcggtaagcagcaaattaacaggaggtggcactgctgttctcgtttgctctggacggtttccccctcgtgccgaattcttnnnnnnnnnnnnnnnnnnnnnnnnnnnnnnnnnnnnnnnnnnnnnnnnnnnnnnnnnnnnnnnnnnnnnnnnnnnnnnnnnnnnnnnnnnnnnnnnnnnnnnnnnnnnnnnnnnnnnnnnnnnnnnnnnnnnnnnnnnnnnnnnnnnnnnnnnnnnnnnnnnnnnnnnnnnnnnnnnnnnnnnnnnnnnnnnnnnnnnnnnnnnnnnnnnnnnnnnnnnnnnnnnnnnnnnnnnnnnnnnnnnnnnnnnnnnnnnnnnnnnnnnnnnnnnnnnnnnnnnnnnnnnnnnnnnnnnnnnnnnnnnnnnnnnnnnnnnnnnnnnnnnnnnnnnnnnnnnnnnnnnnnnnnnnnnnnnnnnnnnnnnnnnnnnnnnnnnnnnnnnnnnnnnnnnnnnnnnnnnnnnnnnnnnnnnnnnnnnnnnnnnnnnnnnnnnnnnnnnnnnnnnnnnnnnnnnnnnnnnnnnnnnnnnnnnnnnnnnnnnnnnnnnnnnnnnnnnnnnnnnnnnnnnnnnnnnnnnnnnnnnnnnnnnnnnnnttccctggnagctcctcgtgcgctctctggttcgacccctgcgctacggatactgtccgcttctcccntcgggaggtgngcttctcatactcagcgtagtatccagtcgtgtnagcgtcgtcanctgggtgttgacaccccgtcaccgacg

SEQ ID NO: 134185 - DNA, 1050 bp, Homo Sapiens
  misc_feature (42)..(69): n is a, c, g, or t
acctcactaaagggaataagcttgcggccgcctgctcaggtnnnnnnnnnnnnnnnnnnnnnnnnnnnncacaaaagacgcctttattggtgcccagatctaaagggcaggatgggctggtgtgaagatgacgtggaagatgacagtgcttcccctcttcccctgggagtcagcctcttcccctctggcacggggcctagggttgggggctctagactcagacccccacagcccagggcaggggaagggtcttgagcttggtcgtgttttcctcctgggccaatcacagaggcaatagtgggagtcctggggaggggcatggctggcgtgggggtggggcctggagccctcaatgcagcaccctgcaaaccccaggggcagccccccaacctgtgcctggccctgcagggtcagctaaggcacagtggctgggtcctgtcctgccggaggccagagcactcccggcgacctggccctctcaggacgtgcagctgggagaacacagctacttctttcgccgggtggtcctcgaactactggagcaggggttgggggctgcggtggcctgttcggaggcagctccggagtctttctgggaggctggcctgcgcttctccccgctgactggtgccagcggggaggaccggagagaacagggtgctagcagggcctgcacaaatctgacagcccccacggccatgaggagcccccagagcagggcgggggcctccaggggagacagctgagagcgagtccagtggagggcctgggccagggtgctgttggcgctgcgggtgcgaggtgggcttttctcctgtagtccaaactgcctgagcagcgtctccagcgtggggtcccccagggacacggatgggaagaactcctccacccactggcgccgccaccactggccctgctccccaggctgggagaaccagtacttgtagcgctgggctcggacgtaggtgggcggcctgccttgtggaagggatacctggccacttggctctggacaaggcggatcactgcagcgagaggcatcagcgtggc

SEQ ID NO: 134186 - DNA, 630 bp, Homo Sapiens
tttttttggcctttcaaagctttattcatagttgggaggccccgtgtgccccacttcccagacacccaggtctcggcgcccacacaggccccactgagtggtcctgtgtgtccacccgggaagcaccaggttgcccaccctccgaggctgggcagatggctggccagggcctcgaagaaggttccagaggtggccctcatgtgggtccagctggccgaggtcacgaggagggacgcaggccccagccctgtgagggtctgggtggctcagtcgtgtggggctgcactcaggagcccccactgcagcgcaaggagggcccgcgcctgtggctgccgcggctcgcccgcctgttcgaagcgcgcccgctccttgcatagcgcctccaggacgtcggcggggaccgccttgcccgtgaacttgcgcaccggctcctctgccacccgcaggaaggggttgtagaggcgctcctcgcccagagtcgacggcgcagtgggcacgtcatcctcatccctcttcttagcccaggacagcttggctctcacgtggtcgttgcagggctccactttctgggcaaactccatgttgctaagcgtgtgctacgtggccgcagaacaccttcgtctcggtggg

SEQ ID NO: 134187 - DNA, 775 bp, Homo Sapiens
tttttttcatgttgatagacactttattgtggcttgtttgtagtaaaacattcaacccctcaacatgggtatctgttttggtggtgtttttctgttggagactacagcgtggtgttcaaaggcttttagcctcatctcatatcagtctagtcagtggttgcctataatttgatagttcaatgagttagaggaaaatgtcaggaaaatctggtcttatcccaaattaagggctgcaagatttgtgacccattagtataaagtgcttatgttcagtgcaaaaaaggcagactcagaagggcaagcagacgccagagaaggacatttcctgggagatggatatgttctatgactcaaggaaggaaaagccaaactttagcccaaatgggtctagtagtttcattacagtctttctcctctctaacaggaccaaaacttctcatctgacagatgtccatgagttgtttattttactactaaaaatcttggttcagagggaaatccacagggtttctaagcaccagagacactgacttcagcttccagtttctgtttgtctcagcgtcatggatgggaccaataggctgagctctggccagtgagaggttcagagctgcagagctttctttaggccccacatttgcaaattgaagtcactgagtatgacacaccttttctcaaacattgtcacatcttgcgtgggaagacaagacagtgcatattaaagaagcacttcacctagttttcccaccaacagatgtgaccctcgtgccgaatt

SEQ ID NO: 134188 - DNA, 558 bp, Homo Sapiens
acaaagatcctgcattttattttgttattctttcaaaaagaactcaatacaaagtcaatataaaaaaatcaatactcaatttaaaacagaaacagtaatttctgaatgtctaacattctcctatgcaaagactgggagaaagaggaagggggagagagaaaataaattctttaatttaaacctttcttcaccctgctgggaatgcacatgccagagcaaatgaatccagcttaaccccttctggactggtcattgaagatagggttggaagaacagtattttagaatggtgatgaacagtgtcattattaactatatgtacatacacttatggcaacttggaactgcactgtatccatgacgtagcaacctctgacacagcccgtctcacacttgccatctcttaccccatttcccaaaatatttcctgagaaagatattgtaaggaacttccagtttgaagggatctaacggcaaaaactaagaacaaaagcaccatggttccatggtatgtgttttttataaacagaaacacatagttgaatagtacatcttggct

SEQ ID NO: 134189 - DNA, 631 bp, Homo Sapiens
tttaccatttggctcatgactaacatttgcttttatagcagagaaaacataattttattttgaccaacatacttgttgcagagttattgtttatcttgctgcccaatattcatatatacttgcttctgataatagtaccctgattccccactctatccatatgttttggatggagttgccctgcttctggctccaggaataggcagtactcagccatggccaaagtcatggtgaatggctcaggactaccgtaggcatgtgggcaatcaggggtcctgagatgcataggcagctgcagaaaccacagagacacaggcatgaacctaagagaatgtaagccaggagctgctagggaaggagaagatcctactcatatagttttagtccttagattcagcaatgcctgtagtctaaattcctcctagatttgataggtatagagcctgtaagaaattttttttctgacttaaactagttagaatagttcacatgcaaccaacagagtcctaactgatgtactatgttttacaatttcacttagtaaaattggtagcctttccaaagaaactgatgacactcttctgatatacatgttgatgttttccataaaatcctcgtgcgcctcgtgccg

SEQ ID NO: 134190 - DNA, 1170 bp, Homo Sapiens
  misc_feature (843)..(843): n is a, c, g, or t
  misc_feature (893)..(893): n is a, c, g, or t
  misc_feature (1109)..(1109): n is a, c, g, or t
gctcttctgatattacatgttgatgttttccataaaaataaattatatgtccttttatttttatagtattttactaaaatatttatactaaaatacttattctaaaatattggctttacatatgtataaagatatattcagctaaaaaattataagctgactttatttcaaaaagtctctatagtatattacgtaggaatactcttttttggtgcatccacaattttaactgctttcaccctctgcaaggctcctcctcgaatgggcagttttttaagagcaatatccgtatcaaccagaggtcctcctactaatcgggcaggagtgctttccactgttactactccaccagagggcaccgttgtgttaaggcctttaatatgtgtttggtgaaatattgcattttgtggtcgtttatggtatctggaggcttctatagctttttcttgaagcctttttgctttctttaacgttttagcgtttgatgttctagccaagaaatcttcccatgatttattagccagctctctttgcttgtgcgtggccctgtatttttgcatatactttttgttcatttttgcatgtcttgggcatgcttggctttcaattatatcacctttgcagagaagaaccatctttccaatattttctgatgctgttgtaatagcttccaaagcttttttatctgtagtgactggtcttaatttttctaattttatttcttcatatatttcattccatatttctcccattttaaaatcacagatatctatgtatgataccacaagggtgacaaatcttcagcagataggccaggtaaattttcaaatctagtttgcccantatagcataaatttttgctctaatattctcagaaacatccataaccgcantagatgggcagttagcaggcagtgggatgattttttgctcttcttgaaagctagtaaatagaggtttttttgtatcatgatcttcccatttttatcacgttttactcctagttctttttcctcctttctccacatttaattaaaagactagcagctgtctgatccttcttcccttgccaagcattgacatgagctgcagttttgggattatcacanaattcaaccatcccggccgtaatggccgaattcccgggcatatgtccggtaccgtcgactg

SEQ ID NO: 134191 - DNA, 752 bp, Homo Sapiens
  misc_feature (636)..(636): n is a, c, g, or t
  misc_feature (681)..(681): n is a, c, g, or t
tttttttattttaaaactagatatctttaatatgacagtaaacaatgtgacagaaacatggctgtttctctcatcttgtctgagatatacattccatacaggtgactgggtcccataagttttctaagaaaaacttttcctttccacttaatgatcctaagaagtcagtgcaatctggttcttctccctgcagaagggttatttagtttgggatgtaacattttacaacaataatacaaacctcctgggagaataccacaataaatgtctcaaaaaccactcagttaatcccagggtataatctggctgttttaaattactgcagggaatattatgggccttaatgacactgtaactgcataaagccaaagaaagctagaaaaaggggccaaaaaaatgagctcagagccagccgaagtgacaacaaacatgtggttgtttactaggactggagaggtttagtctgcagatgtttgtggtctccagaaggttccagaggaacgagttgttatgaagatttgcagagttggatgagagcaagattcttctcggagatggcaggccccaggacagggaggcccagtggtatagacagaatttatagatttctgtggtcagatcatactctactggtcncacaatgtacatcaacacattaatattgtacggatgtcatttcanagcctttctaagacgagagtcattattgaagccattagagcacagatggttcaaactatatgcagatattc

SEQ ID NO: 134192 - DNA, 689 bp, Homo Sapiens
ggtcggctttgacattttattgagaaacatttttattttaaatgatagtacaaaaactgtatatataatatagatctgtataagtatatatacatacaaatgctcatacacacatatacacacaaacttgctcatcagaataaaaccctaaataaagaagtatatttaagtttttctaaaaatacgctgtacataaagctgtcagacaacctgaaaaactgaggacattgtgagaacagtctgggcgcatccccccacacacacacctgccgcagtacacacacaaatggccttgacagaaggagagcacatggggcaaggtcagggagagagctgctaccatcattgttgctagaacaagatgtctaaagccaactagaaagcacaggatatagaaggtgacctagattaactttcagaaacaaaccacctcagaataaacaaaaaatatgtggtagggaaggaggggaacggagagagaaaagacaaggcccagagattagaaatgacctactaactaaattcgaatgcctgggaaagcctcaatgagataggaacaatggaatcacaaaggcagaaaaggtaggaggagggggagatagggaatcacaatttcctgtcactaacatgccaaactgctactgtagagtctaggaatgtcacctcaccccctaatactaaagaggcta

SEQ ID NO: 134193 - DNA, 1773 bp, Homo Sapiens
  misc_feature (64)..(64): n is a, c, g, or t
  misc_feature (67)..(101): n is a, c, g, or t
  misc_feature (1117)..(1134): n is a, c, g, or t
  misc_feature (1153)..(1696): n is a, c, g, or t
  misc_feature (1701)..(1701): n is a, c, g, or t
tgacctattggggctgcgcgtgatgcgaacgacgagcgcagcgagtattgagcgaggaagcggncgnnnnnnnnnnnnnnnnnnnnnnnnnnnnnnnnnnncagtcgacggtaccggacatatgcccgggaattcggccattacggccgggtagttttttcttacttttaaattccaacttaaaattatgaggtttcagaaatatattgaaagtttaacaatgtttaaaaatagaaaagcatgagtgttcatgctttaaaatgatttttaaatttgtattttatattgttttatctatctgtctttgcaagcagtcttcaggttaaagatacttctaacaggttacagtacatttcctctgtatgtaaattagatgggataatagaattcataacccataatattctttgaaagctaagctttaaacttcattttatgtcctttcacaaataaattagtttaaaacagaaagtggctacttgccattttgacatcaactcattttgcgaggcttaggcagctagacatcgtttaaaacaaaatattaacttatattacatgtgtatctatctattgtcagtcgtctctcagttcttgaggtatattattttaatcattccatgccttaatatgcttgcaatacaagaatatcttcagatgggtgaataccaaaaggctttcagtttttagtcagaaatcaagcattgggctgtggtagccaaaaaccataggttagctaaaaagatcatgatacaattattttattaagtcatggttaataacaaatgaatccagacttgtctaacagattttccatcaacaaatattgttatgtgcaaaagtattgcctatgttgttttacacaccactgcattaactagaactgctgagaggactgtatatatgattttaaacctaagttgattttttttctcactcttgaaaggagtacttctttgtgaaagcagttcttacagctttgttttcaaccagctaaaaatgttttatatattactctaacctgttgtcctccacattctattgtcctaattgtactgttttctgatttgtatttatgtcttgagacagtaactttttgaataaaaataaacctacnnnnnnnnnnnnnnnnnngcctcgtgccgaattcttnnnnnnnnnnnnnnnnnnnnnnnnnnnnnnnnnnnnnnnnnnnnnnnnnnnnnnnnnnnnnnnnnnnnnnnnnnnnnnnnnnnnnnnnnnnnnnnnnnnnnnnnnnnnnnnnnnnnnnnnnnnnnnnnnnnnnnnnnnnnnnnnnnnnnnnnnnnnnnnnnnnnnnnnnnnnnnnnnnnnnnnnnnnnnnnnnnnnnnnnnnnnnnnnnnnnnnnnnnnnnnnnnnnnnnnnnnnnnnnnnnnnnnnnnnnnnnnnnnnnnnnnnnnnnnnnnnnnnnnnnnnnnnnnnnnnnnnnnnnnnnnnnnnnnnnnnnnnnnnnnnnnnnnnnnnnnnnnnnnnnnnnnnnnnnnnnnnnnnnnnnnnnnnnnnnnnnnnnnnnnnnnnnnnnnnnnnnnnnnnnnnnnnnnnnnnnnnnnnnnnnnnnnnnnnnnnnnnnnnnnnnnnnnnnnnnnnnnnnnnnnnnnnnnnnnnnnnnnnnnnnnnnnnnnnnnnnnnnnnnnnnnnnnnnnnnnnnnnnnnnnnnnnnnnnnnnnnnnnnnnnnnttccnccctggagctcctcgtgcgctctctggtccgacccctgcgctaccggatactgtccgccttctccctcggga

SEQ ID NO: 134194 - DNA, 415 bp, Homo Sapiens
gaagttttttgtaagaaaatgcttcatagtttattcacatacacaaaaataatctcatatgattcttaaaaagaacaggacaatgaaattctgaacataacttaaaagtgaagatattgtctgatcagactaaataatgataagctccctacttctctcatctctaaaatgtttacaccaaaagataaatggaaaatatcaccaggagaagaaagccagtgctgagcactgaggtcagtgggagagcaagggcatgaggagcctcaagcatcaaaagctcactgggcctgggccttgtctttttattctgtttctcgactcctacaatctgtgatccatgatattaaatatcagaagtcatggtgttccttatggttgatgttctttgttgtactttcctttctttttctcatcc

SEQ ID NO: 134195 - DNA, 813 bp, Homo Sapiens
caggaaagattgattatttctgaggaaaaggtccatttatttccaaactagtctgtagtggtttagagtaagcattattttatgaagtggtacaagattgcaaaggttagtaaagggacctgtctgtcaggtcaatcttcggtcttcacttttactggcaagggattatgtgaagagtaagtcatacaagggatatgattgtaaggaggtcctgaacaaagcatgataaatgttagtccatgtgtattattaaatggtctaaagaaaaatcatgactgatcgcataatttttaatgtaagtaaatgagctcactaagggtaattaaatactagcttttaaaatttaaagttctcacgaatattagtgcatcttgtcactttgatttgtcacctggttaaatagctggaagcttgtgcaaatgaaaaatgaaatggaagactacatttgtatatatatctgtataatttttgtttactagtaggttcagagagagatctgagatgttccttaacatgtagccatgtaattagaactcacaaggggcattgaaatgtttttctttttcagatagtctggggctatttacttattttaagtaagccaagtctaccatttgaaaaatggtgctttatttccatatctgaagcctgaagttattttttagtttgttttcatctaaaagtggaaagatttttgcttctgcgttattaagagcctctttgtttggaggagatggttatctccttcactcattaacctttgagtgcttgttatctacaaagatgaataaaatctttcattaaaaatttaaa

SEQ ID NO: 134196 - DNA, 988 bp, Homo Sapiens
  misc_feature (683)..(812): n is a, c, g, or t
  misc_feature (820)..(832): n is a, c, g, or t
aaaaaggcggggtttttcagtctatgtgctctgattcatgaaaaatgagaagccacctaaaaaagtctaaaataggggatcagttacaaatattgatatactcataagccaaaatactgtacagtcattaaaaatggctggaacaggctgggattacaggtgtaagccactgcgcccggcctttttaactttaaacatgttttagaattcacctaaagatcaaaatatcatggattgaacctcatcaattgatagcagtgagtgactgaagcttccaaatcaagaaaagccggcaccaagaacttccattctaatctagagctgaccagtttgagctgattctctctttgaagagtccttcttgattgcagtgcagtactggcatttctgaatggatgtaagtggagtattttagtctaaaggcttttcaaattacttgaatttttttaaaaattgaggagctttatttctatttacccttccatttttgtatatcaaatttccattgtcattaaaaactgtatcttgaaactttgtgaactgacttgctgtatttgcactttgagctcttgaaataaatgtgatttttgtgtgattatctggtttccagttttaaacattaactgtcaccttttattcttaaacttgaaagtacagaaatcattaaattattaagttgtacnnnnnnnnnnnnnnnnnnnnnnnnnnnnnnnnnnnnnnnnnnnnnnnnnnnnnnnnnnnnnnnnnnnnnnnnnnnnnnnnnnnnnnnnnnnnnnnnnnnnnnnnnnnnnnnnnnnnnnnnnnnnnnnnnnggggcggnnnnnnnnnnnnnaaaaaattttttaaaacctttttttggggcccggcccccacaaggaaaaggaaaagggcccaatcgttctccaagaaaacccgggcaaaaaaatgggctgggactccccccaaaaaaacaccccccgggggacccgagggggcttaaaacaacacc

SEQ ID NO: 134197 - DNA, 890 bp, Homo Sapiens
  misc_feature (59)..(59): n is a, c, g, or t
aacccggcggttggcattacccaaattgggtggcaattttaattatccccagatcctgncttttcagccaagcataaatatattgtacatgcctatgtgattatcctagtggtgctagaattttactataaaacattctgtagattaaattaaaacatataaccataatttgctaaaatggtttctttcagaggtactttcgtttcactagcccagtttttaaaaatcgttactagcaaattttatctcctatacatagatatatgaaaatccttaggggactgtaagaatagctggactgaataaaattttcatttaaagtccaagggtggggagttgacaacttttaggagatacaacaggcttatagttctctgtcaaactcttggttgttaatagctttagtactgtcattcacgagacacaactcctaagagaaaacaaagaaaaggccaatcacgtaagatcttgttaactcaagactgtgacataatgaccccaaataaaaacaatttttaattaactcacagtagaaaacaccaataaaacaactctctaatttccactagtttactgcagcccaatgaagttgattacatacatcagtcattcaattggagtaatttttttcctacaaatttgttccagagatcatgccataagcctggttaagtaaaagaatgatgaaaatgccaaagttctatcaagtaagcaaatattctctttcgtgtggcagacagaactctggaagaaacagaatgcatgtcatgtaatacttacatttaaggctcaggtgactgtcagaaagtatttcttttacccagcaaagaactgtgagctgaaacacaaatggcagttcatctgaaagaactaaaaccatccactggccc

SEQ ID NO: 134198 - DNA, 777 bp, Homo Sapiens
  misc_feature (644)..(644): n is a, c, g, or t
ttatatatcataagtatttatttccacagcagaaaattagttgaacacaagaacattcaaaaaataaacatgtttctcaaatcaagtcaagagtgaaatgttataagggtacaaagtaaatgctgatatattaaaatcttggtttgatttagcaattttactaaaacccagaaaagtttctatgaataaatttatttaatttaataaattattcatgattaaaaatttagtttttcataaacagtaacaacagactaaacactgaatatatgggattccaataaacaatagtaaaaacactttaacattatttacttcaaatattatcttgaaattattcaaatgtattcgaagtttatagttaactgatgtgtaacaatgaattccagaccaaattgatagcgattagatatattagtgctgtctgcttgtccttcacatgatcacaggatgaagctcccttttgtaagaaacatcatggccacactggttacatataataatccaactagttagcgtatttatggaggaagcggtcaaatgcatcatatatggcttgtctgaagagtccttgtttacaaagataagcactaatatgacccccttctaagtatcggatttcacaaccaggccaaatttcttgntaacttcgaactcctgttcgtggaatataggatcttctttggcttgaacactatatgaggttggatcactgggatgagaattgcacagatatacagactcaaataactcaagcgtgtaaaggaagatggttgg

SEQ ID NO: 134199 - DNA, 477 bp, Homo Sapiens
  misc_feature (320)..(394): n is a, c, g, or t
cactatcagtctccaattcccttttgacttcttcattctcagccaaagatcttaattcactgggaagtaatcggaaaactctttcatcttcccaccaacaaatccccaaccctccgttcttctacagccctatgctctgccctcagagctgtaataatcagccgcctgtctcttcttctaaggccaaccactccacttgtgcattacagcctatctctgttgcctacacaaagctttgctctcacagttatcttctctgtctcccatcagttcttctgtctcaactggattatttccaccagcatataaataagctgtannnnnnnnnnnnnnnnnnnnnnnnnnnnnnnnnnnnnnnnnnnnnnnnnnnnnnnnnnnnnnnnnnnnnnnnnnntttttttcttaaaggagttctctgtatttactcttttctcatttttcattctttttttaatccattccaatcaggcctcgtgc

SEQ ID NO: 134200 - DNA, 858 bp, Homo Sapiens
gagtcaatattctccaattctttatttgttaaattattttcatttttataaagtacatctgtcagtttcttttaagtaagggcaaaattatcctaagaaatccgtagtgtagatctcacatttttaacagaaataaccattgcaatgacagccactgttattacactgttattatttatttcatgtgtatttcctgcattaatctgatcttaacacattatcggtagagtctctccttgcaggagggaagcctgctcagtgggagatggatctacaaagctctctcccagcctggactggagctgcgtggctgccttccttctgtgcggctgcacgccccggctaactgagagggaattctcacgtgaccgaagatggccccagacttcccactatctcacttcctttgtgttccttgcagagacacacaggggactgtggaagtcagctgtggaggacgcttgagagatttttgacccagaactcaactttggggtaaaactgagaagaacgttggaggggtctctttcccctcgaatgtgtgcatagaaaatgcaattttccattgtgctggagagacttggactgtctctcaagaaggtcttacagtgatcattagaacaaaaaggcatctcttggctatgtgatcacgcatttacctcatgagatagcagcatattattaaccaccatctccttagcaatccgggccaggacaataagacttttgtacccacagtttgtcctctccaagccctctcagcccatcatctcattctgcctgctcagcagccctgtaagggaggacaggaactacttctcccactttctagataggaaaaggtcacccagcttgtat

SEQ ID NO: 134201 - DNA, 821 bp, Homo Sapiens
  misc_feature (562)..(593): n is a, c, g, or t
  misc_feature (792)..(792): n is a, c, g, or t
ttttttaaggatgggacagaatttgcatgagtgaagtttattaaccagcagactatggggcatcaagcctggaaggttttgatgggtccttgttaacctcctcaggtaaatcagagagaaatgatttcgcattagcttcttgcaacagtgacttccttctcaccgtggaagagacgctgacgtgcacccctttcactttccattatctgctacagaaataacagctacgcaaatgctccaatgccatgtccagtcctaatctacccatttgtaaatgtctctgtttgccttcatgagttattatacccttttgtagccgtccgagatggtaaaaaatcagttttcttgtctcttgagagaccggagtcgtctgtgggtgtgagtacctactatgcatgagttatcacaaatgacacgactggggccttcctcttactcagcttatggtctaatagaggagtaaatgtaagagctaacatttattgagaaggttttatatgccagataaatataacagctaacgtttaactacagccgtcattttggtaagtatcttacgtgnnnnnnnnnnnnnnnnnnnnnnnnnnnnnnnnatgttcctaggaagtagctactctcataacctcattgtattgatgagaatttggggatcaggaaggttaaataacttgccatgagtcatacagctaatgagtagccaagcctggactctaagcccaaacagaagcaagcagggctcccttgtccttaactattctatactggctcagaaaataacatgattagtggaancatgctcagctaaatgccactttacgatc

SEQ ID NO: 134202 - DNA, 1001 bp, Homo Sapiens
  misc_feature (925)..(959): n is a, c, g, or t
tttcttatacaggtatatttttcccttcagcataataatttgatttccattttttttaatattggagaagagagataaaaggaggccgtaacagataagcacactgtattaaaggtccaagaattagcactgagacacattttttccagttaatccttaatacaaatattaaatccaattaactaccagcaacccactacctattctcacaaaatttgtttctcaaagttaaaaattacaaatggctggcctacgatgttcctgaatcagaaaaacctaacttctgattaaaacctctaaatgtcactatttctgttaactagaaaggaaacaagtctgaataaaagtaccataatttgctctaagcagaatctacagatttattgtattgtgagctattcctcctaagatttttcaggtagccaagtcacccaccaagatactgtttgaagaagactagatatttagcaaaatgaaactgatgccagattattttcattttccttaataaaatacaaacaagagcacaaaattcacttatatatcatcattttatacttataaataatgctcagaattcaaatagggtcaagtgcagaaatatttcctatatgctagtgtgtaaatataaactaattatatacataatgtgcctttggcccagttgtaaaataaaagacatcaaaaagaaacactgcagttgactgtttcattgcattctcactgagaattcgtaccagtgccaacgtagttacagttctacttaactgttccactgcattcttattgagaattcgtaccagtgcctatgtggtaacaactttcataccgcttaatgtaaacacctaaatagacatttctcccagttgtaaatcccggccgtaatggccgaattcccgggcatatgtccggtaccgtcgactgnnnnnnnnnnnnnnnnnnnnnnnnnnnnnnnnnnncggccgcttcctcgctaatactcgctgcgctcgtcgttcgta

SEQ ID NO: 134203 - DNA, 492 bp, Homo Sapiens
ttttgaaaagtttactgaaaacttttattgtaatcaaaaagtgacataacagggttgtaatgaattcagcaaatcattctgctgatattttagaacttatatcagcttttgccaggcaattaaaaaattcaaatgtgaaaatttcacattacagtaaactccaccccaactaattaatggtggttaaaaataataggccctagcaaaacctctcatgttacatggtcacaactcacaattctgtacaaaagttcgtgttataaagctctgatgtaaaaatcaaataatcaagcagcaatattttaagtgcagcacagggtcttccatgtcattatttacaaggcttgaatctctttacattataacaaaatttaatacagatgacttagtaattaagtcaatttaaaaaatctgtctttttacacagtgacagatttcactttttggtcatctttctccttctccttctccttatccttggtcttcttgact

SEQ ID NO: 134204 - DNA, 490 bp, Homo Sapiens
tttatcagtaaatcactaacaaactgggctctttatttctgtccaaaacaaggccacaatttgtgttttatcactgggatggcatggccattgtgtcaatggctcagggagacttcaagatcttcgctggaacctctaaggattggaatgttcgattcagcttcagtgtgagcagctgtcagggcatctttcttggagagcatgtccatgcctgggtctattatcttgtccaaatagatcgtctgcccaggcagacacagcctttgtcatctttgcttcttgtttcctgggtttcctagtactgtcaaatgtgaccttgtgcctcagaatcatcatagacgcttggaaatgggagagatcttcttatctcgttgctgatccaataccacagcatacacatggggaaactgagtcggtgatgaactattcactggcagtgccccccgctctgaattgggttttaagtgatgacaagtcggctgagcctcag

SEQ ID NO: 134205 - DNA, 756 bp, Homo Sapiens
  misc_feature (217)..(241): n is a, c, g, or t
  misc_feature (724)..(724): n is a, c, g, or t
gtggtcataaatacattttatttcattagaaatgcataattacagtgtttaagagcatttcccctagaaaagtaggtcagcaataccccatcggaaccgagagctggctttgcaaacacctgcctcatgacactggacagagcacacagcaaagggctcccgtctcatgacactggacagagcacacagcaaagggctcctgctactcccctgggannnnnnnnnnnnnnnnnnnnnnnnngttataaacaccatagcaaattaaaaaaagctgtttaaacagaaaaatatcatagttcttgatttcccgcgcatatgcgacgctctccgcaccgtgcctcccctcgtgctccgacaccaacagcaggactcaaacgaaaggggtctccggctgggggcggcggcggctgctctttcagttgataggatgctgttccccgcggaggcagcggccttcagacgcacttcagcagaacacgtgcagccgctgcctgtgccgaggccgtgagagcagggcgcgtgggggccgggccgtaggcggagccggcgaggggctcctggtgccatgggcaccgctcactgaatctggatggccccgtgctcgagctgcatctccggctgtagcgtgggctgcagggcttcggccgtctgtgccccggccgtgtggtcactcactggcgccagctgcacgtactgaacctggatgtcgctgccctggagtggngaccatccacgcccgccgccgcggggtccgag

SEQ ID NO: 134206 - DNA, 663 bp, Homo Sapiens
acataagttttacaagataatacatttttacagtgacctgatgtggatacaactttgcaacttggcaaaaagcaaatcttaacttacattataattaatttgctgcattttacacatctctgattctcaattttggcaagtacaacaggttaagggttctatttagtgtccccttctgatgaatatgatgatcttgaacccattcttcctcctcaagcacggtcatcctcctctgatggcaacagcagaacctctgggaaaggaacctttcggtatccagaactcccaggtggcagcccagtgtgggatttggagcatgacaacaaaggcattttctcaacatttactaaaggagagtggggtgttctatacgctactgatggggactgtacatgaacacatttaaattgaattacaacaacattttagataggaaatatagaatcttataagaacataatctaaattataaccaattttaaatagcaaagtttaacaataaagctacttaagtgtttgaattagaaataaacagtaaaacatctgtattaattataacagagttgacatttgtttatattttatcttcagtattaaccaaaggagtggaatttagccagggttgcactttttaaaagttgtatatactttaatttattttac

SEQ ID NO: 134207 - DNA, 934 bp, Homo Sapiens
  misc_feature (337)..(356): n is a, c, g, or t
tttttttcgagacagggtcttgctatattgcccagaatggcctcaaactcctgggctcaagcgatcctcctccagcctcccgagtagctatagtttggttttaatcagtaaatatttatttagcacttggactgctctaggcactatagggtacaaaattagttgtattttatcctctcatcccagctgtgaggtaggtttgctaaagctgtaataccactaagcagttttttcaatactgttcccaaggacagataatattagcaaatcccagaagcatttctaaacacttgtaggaaaaataaagtcggacttaaaatttttagtatctttgccnnnnnnnnnnnnnnnnnnnnacataagttttacaagataatacatttttacagtgacctgatgtggatacaactttgcaacttggcaaaaagcaaatcttaacttacattataattaatttgctgcattttacacatctctgattctcaattttggcaagtacaacaggttaagggttctatttagtgtccccttctgatgaatatgatgatcttgaacccattcttcctcctcaagcacggtcatcctcctctgatggcaacagcagaacctctgggaaaggaacctttcggtatccagaactcccaggtggcagcccagtgtgggatttggagcatgacaacaaaggcattttctcaacatttactaaaggagagtggggtgttctatacgctactgatggggactgtacatgaacacatttaaattgaattacaacaacattttagataggaaatatagaatcttataagaacataatctaaattataaccaattttaaatagcaaagtttaacaataaagctacttaagtgtttgaattagaaataaacaaatgtcaactctgttataattaatacagatgttttactgtttat

SEQ ID NO: 134208 - DNA, 964 bp, Homo Sapiens
  misc_feature (797)..(797): n is a, c, g, or t
gcaattgaccatgttttattgctgaattgtcacaacagccctgaccaagtagttattattgccctcccttacagaacaatgacccaaaaaattacccaagatcagactagtgagtagaaccagtatagaaacctagttatctgcgtattccatcctctgggcagcacactactgccatctcctttatcttaaatgtgtgtgggagtgagagagctaacgttacgtgtggctttaaatttttgagccccagtccctggaactaacccatctactttccttgaatctcttcctagacaggccccctgagccagacaggaaatccactggtatttaaaaagataggttgtgtgcatggtacatgacaggctagcagtaactcccttcatcctgattttccaccctctttctgggtacctcagtgtcctcttgttgtaaaagtcattaggtatgtttaaaatcccgaatgcgatgtgtatctgaataaagacgcttattctctcctaccagttactcttcatttttatgtgtcagaaagcgttccttgcataaaccaggtgttatttccatgtacttttgctcaggttctttggataccatgatcttagctatctgcaaagctgaccagggctagaactccattttaccacctctgacatccactctttgccgatagagaaacttgcttcaggacaagatctagcttggagcaggtcgtagcagaggacagacattttacaatgtacagagattattgttacgtccacattattatttttggcactaggaaacatgagganccagtgatgaaatgtctggggaagaggtttcagtcaactgtcactatcttcggcatccacccaagagtgatctaacctttgcaaagccttcactgattcgggaacctcaaatgcgtttcattgttaggttgcaccgttaattctctgttgcattacctatcctgttt

SEQ ID NO: 134209 - DNA, 934 bp, Homo Sapiens
  misc_feature (919)..(919): n is a, c, g, or t
ttttgagccagagggaccatttttattagattccagcaagactactgtacatgtttcatgcagattaaatatgtgtcttcactgcccctgggaggggagcactctcactgtcagctccttcattggtgtgtcaaggggtgagtgtcaaggggagctctcaatgtattccgtatggggggcagttgggatcatgactcggggtagaggtgagacagtaggtagctgagggtccctgggaccttgagtcttcagaggttcagggactgcaggaccttggtcctttgctggtactggcaccagaggatcttgatccttcagaggcactgggactataggaacttgattcttcagaggttcagggactatacgaccttgattctttggaggctgtaggactgtggggccttgatccttaactagtactgggagaatggggtcttgattcttcacggactcggggaccacaggaccttgattctttacaggtgccacaactgcagaatcgtgaacctttgcatgctctgggactacaacatcttgatccttgactggccctgagaccactaaaccttgattctttacaggctcagagaccatggaaccttgattctttatgggtgctgtggccatggcactttcatccttcggatgctctgggaccatgggatcttgatccttgataggtgctgagaccatgggaccttcatccttgacaggtgctgggactatgggaccttcacccttgacaggtgctgggactatgggaccttgatccttgacaggtgctgagaccatgggaccttgatccttgacagatgctgagaccatgggaccttcatccttgacaggtgctgggaccataggagcttgattcttcacaggctcaggaatcctaggaccttgatcctttagagactcntgatcccaaggaatt

SEQ ID NO: 134210 - DNA, 1738 bp, Homo Sapiens
  misc_feature (81)..(140): n is a, c, g, or t
atcatcaaatcggatctttactcaactatggtgaatgcatggaacataatacaaacatggatgttactggagtttatattnnnnnnnnnnnnnnnnnnnnnnnnnnnnnnnnnnnnnnnnnnnnnnnnnnnnnnnnnnnnttctctttcataattctttttgcgcctttgagttgaagccaaaaggctggcgtcttctttttccacaccgagatgtcagtgtcaggccctcgggtggcacggtggggacgggcagtttagaattcagccttgaatccttcaactgggaacgatgtttaatttgattcaggttcgtaacggaaaacagctgttcacaagcgtgggtactcccaaacacagatattcaggacaactactggagatagttgtagaatctcaccatcttcacacagacttgtatttaggaaccagcgccgtattgcactgtagttcaattactatttatggtctgcattcacacaagaaacatctgccaacaaaggcaaactggacagtgtctgttccttctcatgagtctggattccgagagcctttgggggaatttggtcttcaaccccaggacgtaggtgaatacagtccgggccacctctttcatttctgaaagccgactgcagcacaggaaagagtaaggttttttttccttgccggtggattccccaggaccaagcatacaccatcatacattcaagtagctgtttgtggacatccttgcggagaaatattcagtgttcagaacggtcataaccttgaccagaagtctttgactaaccttctcaggggaacccactgtggcttttgcctgatttaaaatgaaccaagttggttaacttgaacagttcagatttcttccacaaccaagtcacagagcttctgtgaaatctctcaggtcaagtcaccatcaactcactcgtgactgaagtccaggagcggaagtgtcgagagcatcgcggtgtgttctgttcagttgctcagaacaagtcaactcctgatgatggatgcaacgacccaacttccgtgtccttgccaaatgctgtcgccttggatcaaggtgtcctgccaagtccccctgtcatgacgctgtctgtagttgtgcttcggaactctggccagtctatgtgaaacttttctctcaatatacaaaaaaaattagtcctttcccagtgttgggcctgcctttgcaccatgccacagacttcttcggtcacatcaagattcttaacaccacaaataaataaagctaactgggtggtaatagtttatgagcagcgaaagaaaaggccacaatcaatttgactctttcaagcaactggacttgtaaatcccccgagttatctcccactcactgtgcaacgcaaatgcccgttagacttaaataacggtctcaacagtcatgtgtttctgtgcaggacacgtcactctgctcctttataaacttgccatctgatgttgctctgaatgcccaggtcattcttctcacgtgattccggaacggcgtaccactgccgcgccacttctgttaattcgcttttcaaaacaaaccctattgacatttgagtccctttttcagttcgttgaggatggcatctcgagtctgttctgtgtactggtcgtagctcttactatgctttgattcatagtggcgtttcaggttgtattctttcaacacagacacgatttgtttgcatattaaacacataggcatgctcttcacttccaca

SEQ ID NO: 134211 - DNA, 459 bp, Homo Sapiens
  misc_feature (85)..(124): n is a, c, g, or t
tatcatcaaatcggatctttactcaactatggtgaatgcatggaacataatacaaacatggatgttactggagtttatatttttnnnnnnnnnnnnnnnnnnnnnnnnnnnnnnnnnnnnnnnnatttaattattaaaattttctctttcataattctttttgcgcctttgagttgaagccaaaaggctggcgtcttcccttccacaccgagatgtcagtgtcaggcctcgggtggcacggtggggacggggcagtttaggaattcagccttgaatccttcaactgggaacgatgtttaatttgattcaggttcgtaacggaaaacagctgttcacaagcgtgggtactcccaaacacagatattcaggacaactactggagatagttgtagaatctcaccatcttcacacagacttgtatttaggaaccagcgccgtattgcactgtagttcaattac

SEQ ID NO: 134212 - DNA, 1074 bp, Homo Sapiens
aaatttagaaaggagattttatttttttataaagggttacagcctgcaagtggccattctgacagactgggaggcatagcttcctgctgaaacccgaaaagtaggtttccagggaggggagggcgaatagtgatttacgttgatctggctggccacatatacatattcaacagggaatagggggagctctgaatatttgtgaagggatcctgctgcatgcatgctgagtaaacatgcctgttacatgcaacccatgttcactttggggtggagacaacatttaaatacattataattaggccctatgcttcaaaaggtgaagcagggacacaaaggcaatcaagtgcatagcttctgtaaactgtccagaacccgcccacggccagtggtctcttatcaagagaaaactactgaaatcagtctcttgtccaatcaaagcagtagttacggcttgtgtagggagggctcagtcagtttatggtaataggtgagctgcaagtgcttcagcattgcttatctcaaggccagtgcttgtttagcttcgacagccacgggaggaccgggaggacctccagaggaggttaggtcgacctcatggtaactttagatcctgaaaactcacaggatttttcttgtcttccctttgatctctcttccgcctactcaacaggacaggactcaccgcctttctttcccgtcagaaagggatcccttccggacaggacagaagtgagcagatggtttcccctacgtgtctttccgggcctgggcgtctcaggagctcaggctgacctgagacctaactcctggcaagtgggaccagcaggagcctggaagagcgcgcgcaccggggtggaggtgggcgccgggggtggagaaccgcagtcaaatcctcttcttccccgcgcacggcacctgcccccggggatgccgaacgaatggcccataaagcttctctgcaacggaaagaagcctgaaagctccaggaggtgcgagaggagcctcgttgagcgagcccagccctctgccggctggccctggtcaacaggtcggaagaggcgattggaggacaaa

SEQ ID NO: 134213 - DNA, 2456 bp, Homo Sapiens
gggggtggcaaaagagctttatttacacactgacaaggctcacggggtgtcagctgaagaagtaggtggaacgcttcacctgctccaggtcgaaggcccctggcttgggcaccgcctgcagtgtctccttcagctggctggcctccaagatcttctggggctcagagcagaaccgcttgaccaggaatctggacaggtcctgcaggatgggctcgctgtgcaagcggacaaactgctcccggcacacctggttcatgacggagacatcagctgcgtgagtccagtaacagtcgtgcacagagacgaaggtcaggcccttcctgtagcagtgcagggcggtgagcatcatgtgggaggagtccagcgagtggatgaagttgggcgggaagccgttcttctgcttacgtgtgttgggctttcggctgatgtctccgttgtgggtgtaggtgatgctctgaattccacctcctatttgcttgaccttggagtccaggcgatacggctggatgacggggacgcccaggggtgtgacccactccaccacagagcccatgtgggagatgaggcgggcactctcggtcagccagtgctggatggcccgggtccccgagaacatctcctgtagactcttgaagacctggcgtacgagatagtgagaggcctcccacacgaactcctggggaaagtcgctcagctcccggaggcgcttctcaatctgcaggcgcccgccatagcgcgtgaccccgtacaccaccgtcatcaccgtctgcttcaccaccttgcgggtgatgaaaccttccagcacctgtgccacccgcatgccccgctgggcgtcctgcctacggaacacctccacctgcgcggccacgccgctgtacacgtcctgcggcacatccgagggctccaggttgacggaggcggcgcccacgctgtcgcggcccagagcagcataatgctgcaggccgttgcaagagccgtcctgatggacggggaggtgggagacataggcggcagggtcggaggcgcgcacagcgttcgccacctccatacagcaggccagcgtctgccagggttcctccgcgcccatccaccactttcggcccgtcaggggttggtccgcggagtccaggatgtcatccatcacctcctccgcaaaggccaggcgcttccgcagcggctcccgcttcttcaaccccgtgagattgaccaggtggatcttgagccaatccaggccgtgcgggccgagcgggcggccctgggcgaactccagcagggcccgcgccacgtcgctgcccaggtggttgaagtgcggcgggcaggggtaggtgcggccgcggaagtccatgttgtgcggcagccagaagacgcggtcccgcaggtgctgcgccagcgagaggcggtacagcgcctccgcccgcaggctgtgcatctcccgggccaccttctggcagtgcgccagctcacggcgcagctcggccttgcgggcgggcgcggcgctgtgcggcaggtgggcctcgggcggctggggcgcctcggagggcggggccggcacgcctagctgggggcagcccttggcctggaagagctgcagcaccaggtccagcacgcgcccgttgacgcgccaggcgcagttgcccagttgggtgagggcgtccagtgcgccatgcagcgcggtgggcgggcaggtttccagcagctcctggtgctgcgtggcgccttccaccgtgcgcatcagcttggtggggtctgagcaggaaggcaccagagtgcggtcgatgtccagggccaccggggggcaaagcatgggtacattccaccgcctcgaaggtcagcgtggggctccgcggccgttctccagcagcctgcacgtaggccgggctgcggcttcaggatgccgatactgctggacgttgcggaaggaatacacgtggtagagcacggggacaagccgagaggaacgatgcggcttgtccaggctgcatggcatctgcgtagcctgcaccagcatctccgccagcagcttgcccagctccatctgcactggcaggggccagggctgctcccgcagggcctcgggcgcccccagcgcctcccagtactgccgcggcaggcagggctcgggcacctcggcgtcggaggccagcaagcagaggtacttcctgtagtggttctgcagcgcctgcacctggccactgacccgctgcctctgcaccacgtgccggctgaaagtgcgcgcactcagctcccgggccagggtggtgaaggactcaccttgggcgggcagcgcctgcaggacctgcaggagcatccgcaccacctcgcgctcgtccagcaggcacaggaaggggtaaagtgagaaccggcccttgtacacctcgcgctctacctcgtgcaattcggcacgagcctcgtgccgattaaccacgcacatgggcctcgctattccttagctccta

SEQ ID NO: 134214 - DNA, 457 bp, Homo Sapiens
ggcaagaggagaaagaatacagcacaacccttgaacaaaatgtatttagaaatatatttagttttatagcagaagcagctcaattgtttggttggaaagtaggggaaattgaagttgtagtcactgtctgagaatggctatgaagcgtcatttcacattttaccccaactgacctgcatgcccaggacacaagtaaaacatttgtgagatagtggtggtaagtgatgcactcgtgttaagtcaaaggctataaggaaacactgtggaaaagttcatattcatcccattgtgattctttccccacgtcttgcatgtattactggattcccacagtaatatagactgtgcatggtgtgtatatttcattgcgatttcctgttaagatgagtttgtactcagaattgaccaattcaggaggtgtaaaaataaacagtgttctcttctctaccccaaagcc

SEQ ID NO: 134215 - DNA, 654 bp, Homo Sapiens
  misc_feature (186)..(203): n is a, c, g, or t
aacagaatcagtataaaatagcagttgatttctccataattatcagaattatttatacttgaggtcttggctaagtggggctgaaatcaacaaaaggtcttggactgttggctcagaaatcatcctagaaagcccgccctgttgatatctgtcatgcttagctcttatgagatgacccagtccttnnnnnnnnnnnnnnnnnngaatctctctttattcattctttggaggcttgaagtgaattcggcagcgttcattaaacaccttccagctcctgtcatttaccacttcttcaacattcagttctgactgcatccatttcaactttgtctgctcttttctaagttgttttaataacgttaaatcgtccaaattcttttctctctcttctcggaggttttttactactgctgaagtctgggctatacagttttttatgactctgtctctactggcatgagctgccatcaaagactcataaagttgtttacaggtttggctggcatcaattttccctgcaaaggaagctgttggaaccgtagtgtttaattcatgtactattctgtcatcaattgtcctcatcaccttgagtaattcctggaactcggcgaactcctcacagttcacaccgccactgggcgccgccatattccc

SEQ ID NO: 134216 - DNA, 904 bp, Homo Sapiens
attggatttaaatattttatttaaagaaatattcttaaggctgcagtttattgataagaaaaatataaagcatacatgtttatagattatgtattgacattatagtatatagattctccaaataacataattaattttgtagtgctactagtggaatgcattctgcagaaacatggctttaccttcaaatctaagcacaatacccttacatcaaaaatgaaggataataaaagcacaactttgattcatttaaattttggtagaccacatctgatttgttgaagagtaaattcgtttatttacctcttcaaggaagtcattattttttgcatctctttctgtgcctctttatcctctttggtaacagtaggaagcaataaagccaaattacagaacttcaaagcattctggttttcctcaagatcagtataacgacttatgctaagtacatgtaattgggattagaataaccagggcatagttcttcagccttaaggaaattgtgtaaagcttcttgtacagttgcaagatggtatttttccaaacagagtagcaggccatttttattactcaagtccagctcagttagagatgacagtatagcagtatctcccttttagaggtaatatacgaaagggttcctactggtaaaagtatgattgctgatatctagatgtacctgggacagaggtgcgcaatagtgagtgtcagaaggagtgagaccggtcgaagactgaggatgagatagcggaacacaagaagctgcaatatcagaagaatgacgaatggtgcaattcaatggatgcgcaatcaagtaggctgctggcgggtaaagattagccatattgagcataaggtagctatcgaagagaggaagtaggaatagtaagaggaggtgtgcaaa

SEQ ID NO: 134217 - DNA, 608 bp, Homo Sapiens
  misc_feature (592)..(592): n is a, c, g, or t
aagtgcccttaaaggtcatcaaatgcaagctaatacttctacctaagtctcctcatcaatcatttaatattgtttacactgcattcacagtttgtgtgttaaccacttatgtaatttatcaaatggcatatttggaaatgtaagggagaaacttggtttaggtaatactctatgtatcagttacccattacatgatttattttcatcattatttgcaacgccacacatcttgtagttttctgtgtagtctctgcatgcagtctacttcagcttctagtgctgtacatatctatatcttctgggtgggactgcccgtgatccatgagcttggggtcaggcataaactgggttgcacctgaagtggattctgatttggtctttgcttcagagctgagttctgttggcaagggcactgagtgtttcaagacgtgagttgtttttgcaggtacttctatttcggaagaggatcctagcttagttttttctttaggtttagggagtgactcttctttgctgctttttgtccacaatgatttaactgctccaaaaatttgctggcttgtagcatataccttttttgctgttaccttancaattattacggactg

SEQ ID NO: 134218 - DNA, 123 bp, Homo Sapiens
ggggcaaccccttcaaaataattttaatacaaaggatgcaaacatctataaatgaaaaatgtggttcttctgccccttctgtcgtcttctcgcagccgtatagtagtagtagtaggcggccgc

SEQ ID NO: 134219 - DNA, 868 bp, Homo Sapiens
  misc_feature (189)..(200): n is a, c, g, or t
ttttttttagtttcagaactgcttttatttggataactgactgaaggagtctcatttgtaaccaagatggaattcacagtatgttgttacattcacacttaaaaaatatatctctatgtacaggaatttgcaaagagatgtaaacatacattaatttccaagtacatttctccccttctccctggaggnnnnnnnnnnnngccatccaatgaggcaaccccttcaaaataattttaatacaaaggatgcaaacatctataaatgaaaaatgtggttcttctgccccttctgggtgtcatgggagagaatgtcaccgaatgaaaatgacaacagcttggcttcagatggaattggactatttaaaattgagtttccaggaaaaataggcactgatttctagaaggaaattaactccttaccgaagctatttattgagccaatatggctggttaacgtcctcactagtataaagtaacccagtgcaggactctcagacattagctgaaccaagtgtacacagtcagactgcaagggcactgatgaggctactctgaaagctggttgtccccgtcctctaggtgtgaggaccactctgattttatcccaggggcccggtccattcttcccatactgcaactgtcgtgcattatacaaggtaccctgctgcttacccacttcaactactctgcaagtcgattagaaaatcttgttaaaaaaacaaagagggaaaaaaggctcacgttatctcatccaggctgcccgccccagccccccaactggaggcatgccgggtgggggaatgggcgggggcacaggaggctgtcctccaggggggacggcaggaggtgggtagctggctggcggccgc

SEQ ID NO: 134220 - DNA, 484 bp, Homo Sapiens
catgagccaaggagagtgggtggcctctagaagatggaaaagacaaggaaatggattcttccccagagcctccagaaggaatagagtcttgacacctttatgttagcccagtgagacccacatctgactccctgatctaccgagctgtaaaataaggagtttgtattatttcaactgactaaacttttggtaaattattaaacaaccataagaaactactacaagggataattgatatcttcacaatattgaatctttcaatctgtgaaaatggtatggctctccatttatttagattttctttctctcaccaatgttttatagtcgtcagtctagcaaacatgtgtatctgtcattaaatttattcctaggtattttatgtttcttgattgctactatccatcatttaaaaaatgttatcttccagttgtttgttgctgacttcgcttgtgagacctagaagagttttgtagattcttttgca

SEQ ID NO: 134221 - DNA, 732 bp, Homo Sapiens
tttttggtgagagaaagcaacttttattgaactggtgctacttcttgcagagcagggctaacctataggcagtgtgcccagagtttgtgcctgtgggctactagctagttgtatttagagccacttttaattgcatgccaattaagaggtaggttattcagaactttctgggaaaggggcagggagtttccagaaccatataaagtaacttccaggccattgccaaggtgtgttgccatgacatttgtaaactggccatggtcccagtggtagtgtctttatgctcataagcagtgagggcaactagaggtcactttcatcatcatctgctggtttcagcaggcttctccactgcaccctgttttgaccagatcctgctctgttcaatggggttgggaatggaaaataagtccttctggtctcctacctcatttccccatcagagattatatactcctccttaatcttaaggggcttgcagaagggcggaggttcatcttctgtaactgcttcctgctgatgttatgggcatagaccctgcctagcactggagaggtaaaatccctggatacctgttctaaaaggctcaaaggtaggatgtctttatcttctgggtcagaagaggggatgggttgaaagccttgtgccagcatcatctttacatggaattattgtaatctggaagacacaaactttacaaggaggttaaacaagcaaagagcaaagattagt

SEQ ID NO: 134222 - DNA, 1247 bp, Homo Sapiens
  misc_feature (771)..(787): n is a, c, g, or t
tttggtatttaaagaaaaataggagatccattatagttttgtttttacatctctataaagtttttttgcatctttattaattgatccaacaatacaggatttaaaaaatcctgtaaagtcttgaagtgtatagagttactttgtttcttaaaacaaatatagcacaggattattgtggaaatattaaagaccatttcataaaagttgcagtttaacctttatagactgatggggtcaagggggaaaatccaggtctactaataatatttaactgaattaagatacaccccaattatagtgttctggaaacacaaaggtaattacttttctttttaaaattatccaaatgtgaacttactggaaagagaaaaaacaagtttaaagaagaaatttttcataggcttcttgtttagtagcacaggccaaaggcctttgtcgtcgtcttgcagggtccttataaatgtgtaagacagacagcatttactattgagtcctacagggaaacacacagaagcaattcattgcttgggagtgaaactatcaactaatcttacgactactggttctccaagtcccctaatgaagaaaattttaacctcatgatcatttcaagggaatttctttttcaactgtcacatataaacttggtaacacaggaccaatatacatgttctgagttttaaaaatatactccacctaaactatctgtctagtttaatctttctagttatcatttaacctaaaatgagagaccaaatcttatttccattnnnnnnnnnnnnnnnnngtgccaattgatctttttgaaagtggagtaaaacactgtgggcttaaaacaatacagtattatcaatctcctatgtacaaaaagacggttagtccttattgatatatagatatgtccacctaccactcccagcaaatcttagtgcaacataatagttaatttccgtaaaccccaagacatttacgtatcaacaaagttatataaatcacatctatgttggaaaattttaggacacagagtgactgttgtgaaaggtctgctttactgtggagagtacttatgtcattgtgtccatggtaatgagtactaatataaatcctattattaagaagcaatagaatggtttacacaatctgtacagatgaagaagtccatttcagggagcagcttggcacaggagacttaggggtcccggccgtaatggccgaattcccgggcatatgtccggtaccgtcgactg

SEQ ID NO: 134223 - DNA, 299 bp, Homo Sapiens
  misc_feature (122)..(187): n is a, c, g, or t
tttgaattttaaacagatttattaattgattcagatttattaatttactaattgatcaccctacatttacaggtgttagagtagatatccttaagaataaacataccttatagaaactttannnnnnnnnnnnnnnnnnnnnnnnnnnnnnnnnnnnnnnnnnnnnnnnnnnnnnnnnnnnnnnnnntgataggaatatttttgaaagaccttttcatggtactttacaacctgaaaggaatggctttttcttctctcaggagaacatgtaagattaacaagttttttagactaagggc

SEQ ID NO: 134224 - DNA, 1061 bp, Homo Sapiens
  misc_feature (231)..(368): n is a, c, g, or t
  misc_feature (801)..(809): n is a, c, g, or t
  misc_feature (986)..(1000): n is a, c, g, or t
cgcgcttaggtattgcattggtgccttgaagatgtgttctgcgttcctgcctttggaacgtatacccttgatgactgaacctcccgcaccgaagacggggcaggatcatggggggagcgaagggaccatagcaacccctctcccgcggttgcgattataatcagtggcagacagttcccgatggaaagcggcagtgagcgcaccaattaatgtgactcagccactcataannnnnnnnnnnnnnnnnnnnnnnnnnnnnnnnnnnnnnnnnnnnnnnnnnnnnnnnnnnnnnnnnnnnnnnnnnnnnnnnnnnnnnnnnnnnnnnnnnnnnnnnnnnnnnnnnnnnnnnnnnnnnnnnnnnnnnnnnnaccaagaattcggcacgaggctgatctgaagctcgggttacccactggtcctgtcctgtgtgcctgtcagcagttcccagaaatgaatgctatgatcatgcgacggttcagtttgcctggagatgtagacagagctcgacagtatgtactacagagtgatggtgtgcaacaaacaacctacctcgcccagcagtactgccatgaagcaataagagagatcagtaaacttcgaccatccccagaaagagatgccctcattcagctttcagaaattgtactcacaagagataaatgacaactctttctgttctttctggcagctatcttaccagactgtgcctaaagaattttgtggaatacactttgtttgcttcatgtgcagataaccaaaaatcattttaaaagatatcaaacttattgatgggcaatttannnnnnnnnattgcaaaagttttttcagaaaactttttaaatgtaattaataaaccacctgaatctgtcattctagtcctataaattataatcaaggtatcttgatggttatatgtggtattgtttacactgttaatatccacatgtaaggccattacacaaataaataaccaatgttaaaattcnnnnnnnnnnnnnnngcctacagccgcggccgcaagcttattccctttagttgagggttaattttggctatggcac

SEQ ID NO: 134225 - DNA, 520 bp, Homo Sapiens
ttttttggaaaaagagtcatttaataccttaagggagagtaggaactttcagttacctaagactacagccaacccccagcccagaacaaaaacaagacaccttaatgtttgttcaaagacaaacccacagcgaacggctctcgcacccctgctctaactcctctttctgggggaggaaggagggaagggccaggtccgcggggaccctcactccctgctttctatcacacgggtcacaaggcagctctcagagcagaaggcacacacactgcagtggaagttgagaaaggaagtcactccaaggtacacactggcccaaagaccaggaaaccgtgccacggagctggaaggcaaggccgatgggacggtgcaaggaccacgcccacgatagcgcctgccgccccgaagggcctcgtgacacatcaggtcacatctccagtcaccttatttgtacacagttctctcctggaaaacctttcatttcttaagagtaaatgtgactagttagaggctaaaaaaa

SEQ ID NO: 134226 - DNA, 1409 bp, Homo Sapiens
  misc_feature (45)..(53): n is a, c, g, or t
  misc_feature (349)..(360): n is a, c, g, or t
  misc_feature (646)..(706): n is a, c, g, or t
  misc_feature (1356)..(1356): n is a, c, g, or t
  misc_feature (1364)..(1364): n is a, c, g, or t
  misc_feature (1395)..(1395): n is a, c, g, or t
ggtttagaacgacaccggcaagtgtccccccccgcgtgtgatatnnnnnnnnngatttctctctgatcaatcacaagcataacaagaccctcacgcgctatggagcgcacccacacaaattgtgtcctctcacccacgccaccggcactcggcgcacacatacatgacgcgcccgtcgcgtttgtgtggcacacaccccccacgtatagagtaccctcctgttagaaagttatctgtgaattagtatgtcccgcctccagtaagagagtctccctgaaatatatatctctcgcgctaagagtaggagatgtttttttcgcgacacaccactattggtgttctctctcgnnnnnnnnnnnnaacatattgatatggagggccgtctctcttcttctcacaaagagattgttccctcccatgtttacactgcgctgtgtgtttcccgcttcctctaccgccgctttgtgtatataaaccgcgcgggccgccctcgctgccctacgttttatataaaaaacagcccctccactatatttagtggggcacccccctttgttgatacacacaaaaacgcggtggtggcggcggcataatgtgtgtgggcgccccccgggggaaaatttctgggggcgcgcgcgcccccccnnnnnnnnnnnnnnnnnnnnnnnnnnnnnnnnnnnnnnnnnnnnnnnnnnnnnnnnnnnnnaacatttattctgtgtttattctgacattttgaacacaaactagacagcacagacatggggcccgatcccagcctgcacagaagcctctctgcgtcgcgacagtgcagcgtgcggcctctggctgcagcgccggctttcagaaggctggggccaatgccaggggaaccccaggctcagcagggagggagcaggatctgggacagaagatccgaaaagtgaggcctcagggcctctgcgggacccacctgctggaatttccaccaccacctgcttctacaaagactgatagaaacaaagacgcagtagtgttgggggtctggtcccagagccccttccccacccacgccccgtctgctttgatcctgatgatggtcgcacctcgccctggcggtttctccaggggctttggtgccttgctgtgctcagtggctccctccactcagcatccagaggctgcttcccaggatccacctgagcgctgcaccctgcacagcccccacatccctccaggcgggctctgcactgctgctgctgggaggaagggaaagtctgtcttctttagcatcagctcgggaagctgcctttgcctcaaatggccaagctgtgaggtatccctgtttcatcatccggttccctggtgggggctcancaatttcncatgaagatgaactgctgaacttcgaggcanattacagccaatcc

SEQ ID NO: 134227 - DNA, 1027 bp, Homo Sapiens
  misc_feature (24)..(24): n is a, c, g, or t
  misc_feature (36)..(36): n is a, c, g, or t
  misc_feature (127)..(127): n is a, c, g, or t
  misc_feature (186)..(186): n is a, c, g, or t
  misc_feature (257)..(257): n is a, c, g, or t
atatacgactcatataggaattgnccttcgagccangaatcgcacgagggttcacatatttcagtgtattttttttatagatttaaaatatacctgaaaacttttctaggaagaataattattcatnggaaagagcattgtaatggcatgttttggggagaaaagacatgccaagtcttgtttacntacatttaagatgtttacaactatactgggctgctttattaacaatactgtacttgcgtaatatggcatantaagtacatgtccttccttagacttttaaaaagttttaatgagagaaagtaaattactcaacaaaataacatgagaaatcctttacgtaatatctttactggggaattcttatttaagcaaggtacactattttttcctcagacttaaatgaatgaagtgttcatttattttttatttgatgataatcaagaagtgagtagtagtagctaacttaatgtacactttgcttaggtttttaaacatgttactattaagactacgtattgtaaaccttctgtaattttcacatatgaatgacaggagaaagttaaacctaatcgaaggagttttggaataaaaaagtggtgctggggaaattcaccatggttcacaaagtatgcctttgtaaaactgaatcaacttttagcaagaattaatttatgtagttttaaatgttaaattgtgtatatttaacagaaaatacttatctggcacctcagcagttttaatgttaccttatacttttaacagtatgatttatattgaatacttagatgttttcataagattttatcaaatttgataatgtaatgataaaatgtttttttaaatgtgaactatttaacatataaatggggacacaaaacctgaattgtgatttctacataatgtgataattagggttcaaattatgactcatcatttaattgattataaatgagtatatttctgaactctttattgcctccatttttacaatcataatatagcaataatttctatttttaaa

SEQ ID NO: 134228 - DNA, 1009 bp, Homo Sapiens
  misc_feature (606)..(606): n is a, c, g, or t
tttttttattaattaaatgaaggttttatttcaaaattagtcttaagagtataagctgtttttgagggctgtagccagactacataatgagcggtgaaagcggctgccttcccctctcctgacaccagcaagggggaggcaccatcaccggccctgccccatcatgcatccaatgattactagcactagaagccaacggcaaaggaccccgcgcgcttgctcgtgtttaatccaggttaagctatacacgtttaaatacatgtcggaggttacatggtctcatgcagtccctgtgatggaatgactcttgctcagtgacctcctgcagcgaggctgctccaaagggcaaggttaggtagggcagagcacttttaaaatgtagtccgttagcaaagtaggcaccttctcattatcctccttcatggcaaagagaatgtttgtcagcatctgcaggtcttccactgagggaggagaggctttcttctcgtaaggaatgactgtgttcagatactgtttgtcagttcctgaggagccaaaggtctggcggatgccactctgcagaatgttggagatgccttccatgctgaagcgcttgagaggcatctnggtttcccttctctatccggctgctctgcaggctcagccctttctctttccgcctctttttcatcagttctcgctgctccttctgcttgttctgaacctcaataagcaccgtgataaaggagtttttcacttgcttctcaaactccagctcgtcccgggggggcagctgctgcaccagctcctccgagaagtcacggatggtaccctccacctggtccacagccggtcgctcagaccaacatgtgctcagccttcaaggacagtgttgtgaagtcgtttatgctgatccctgaggaggacaatcgctgggagagtttcctcatctctcttcaactcccttctccatgctgggatttgatattccctctctcaatacgatcgtggaaaagccccgtgttcggac

SEQ ID NO: 134229 - DNA, 778 bp, Homo Sapiens
  misc_feature (667)..(668): n is a, c, g, or t
gaaattattaaaaaaagatttttcattttattttggaaataaaagggaatacaaatacaaatggcctagttacatctttagcctatatatgaacttttaatcttggaattaatagtccttcatattgaagatttaaagacaagcaagcgtaccttaagctttcttaagtctcttcatttagcaggcttcaaaacttgccttattttctaactaaatgagcttctctgggaagcatatgaataatgcaaaaacgtacttctaaacaaattttacagaaataaataatcgtcacaatgggaaccaagaacattcatatgatgaatttttttaaaataacttaaaattagaaatgatacgtacaccttaaaatacagaacactaaaccagaacaaatattgccagtgatagaataactatgtagaaagaccaatgtacatgagtaacacagaaataagaattaaattgaatagaggcagatgctgttagaacatatttccatccatcatgacttgcaacattttgtggcctctgtggagccctggtcccaccaggccaagcatctggctaagtagatacagacatatgtgacctataaaacaccaaactcacttgctaatgaagtatacaacaccatgtgctgctttgattgctcttgactggtttttannatcaagttcacttttgaatcagaaaaaaatcatccttaaattagctctcataaataatccatgaaagtaacttacttctggctcctctgaatagtatcatgttattcccg

SEQ ID NO: 134230 - DNA, 1127 bp, Homo Sapiens
  misc_feature (907)..(1076): n is a, c, g, or t
attttgtacccctatagtgtgaattctttttattgaaatttaatacacttacagaaaaaaatgtacatattataattgttcatagagctcagtgaattttcacaaactgaacaaatctgtaaaccacacccagattgagaaagggaacatgacaaacaccctgcaagtctcccttgtgccctgtgctggggggtgccaacaccaccacctcctagtctgatgatgtactaggagattcacagactcagcctgtagtcatactcatggctatgttttactacagcgaaaggctaggaagcaaaatcagcaaaggaaaaaagcgcatggacaaagtccagggaaaccaggtgtaagcctcccacagtcctctcccagcagagtcacataggacacaattcctccagcaatcagttgtgacaacccatgtgcaatgttgtatacaagggaagctcattacagactcagtgttcagggttctcattgggagctgctcacctcatcctctgcctaacacatatgaaaatctgactcccagaaggaaagcagatgttgggcataacccacattgtttgtacgaacagtttaggcacagtgagccactcttatcatttagggagtaatgagaaccctcctgaaatccaagctttcagatgccagccaagggccagccttgcaaacaggcctgctttctcatctcttttcacacagtccatctccttattgaggcttctttacagcaaaattattattagtaggaccacatgcaaaagggtgagaccaacctcaaatatggacctcagttcttcctggtaggggtcctggacttaaccagctaaaataaatcccattaaccataaagtctatcttaggaagccaggtggcttcctccttaattcctttttgttgnnnnnnnnnnnnnnnnnnnnnnnnnnnnnnnnnnnnnnnnnnnnnnnnnnnnnnnnnnnnnnnnnnnnnnnnnnnnnnnnnnnnnnnnnnnnnnnnnnnnnnnnnnnnnnnnnnnnnnnnnnnnnnnnnnnnnnnnnnnnnnnnnnnnnnnnnnnnnnnnnnnnnnnnnngtagggactacagcctcgttccgaattcaccacccagcctcgtacctagct

SEQ ID NO: 134231 - DNA, 765 bp, Homo Sapiens
  misc_feature (621)..(621): n is a, c, g, or t
  misc_feature (644)..(644): n is a, c, g, or t
  misc_feature (662)..(662): n is a, c, g, or t
  misc_feature (669)..(669): n is a, c, g, or t
  misc_feature (722)..(722): n is a, c, g, or t
tattttcccttttttcaaagtacataaaacttttaatgaattaactttacaaaagacaaatggcatcaaaacatcagacgagtttgatacaaaactggtcctaggctgtgaggactaattctggtgacggatggcgacgtgctgctggcatgagacacacggagcagagggacgagagccgtgggtcccaacgggggcccttggacaccactggcaatgagacaatgggtgagcacagagtccacgtgggggacagaatcaacttattcacgaatactgtgtgtttgaatatcagatgagcagatgcggttggcgagctaccatattttccagaaaagaacatgcaccagaagataatatacaccccctagttttattgccttaagaatgtgtgtgtgtttcacctttctcctctgttagttctcccagtgcttttcttctatcacgcgcgctccttttcccttttgcttaggagcaagcacagtgcaagtggcagaacgatctgggcacacatcagacaccaaacggtatgccactgggtcacgagaacgaagtctgcagaggctccataggacagacagcacgcccatcaaaaacaaagggacagaagttgcagtcagnaagtgtgtgatacctttctgaanatacagtcttcttgccanaatgaangtgactcttcaggaatgcacgttgctctgggaaagggacccttgacattctgnggtttacaagtacgtctcaggtccccttttcctttaccgtgat

SEQ ID NO: 134232 - DNA, 504 bp, Homo Sapiens
catgcctctaggcaagctttattctttggctccttcatccaggaaggggctgttagttgcatctcacccaaatggaatgcgatgggaattgggggcttgagttgtttggagaaggagctgttgatcttggcaaatgaatatagctggtgtgtggtgtccatcaatccttgagtgcttggccatggagactagggaatggtcagaacagacccagaggtccccagatctttacaataccaaggttcaggaggtatagacagtaaggaaaaagtccatttcctatttctgtccattttcagtaaagtttttgttttgactggcttttaaaaaattacctaggaaatggaaagcttataaacattcgtaagtgaattgttgaactgctaccccaagtggtttccttacccagtcaccacttaaccagaaatattagaatacacggttcaaccagaattcaaccaggcagataacctgcctgttgctcaagcaatcatcagagtttta

SEQ ID NO: 134233 - DNA, 626 bp, Homo Sapiens
ttttgaataaaataaaacttatacagttgattgaaaacaattacaatgttgaaaacacaccaggagaaaacataagcaagaaactgggaggccaactggcaagatatgaagggaaattccagatccagtcttccatgcttgatgatggtgtccagaaaagaaaaaacctgtttggagttgcacttgtatttcagtttatgtaagtagccgaacttatggacagaatatgaactgtcccatacctctggcaaaactagatgatatcaaaaagatttatgcttcagttgtaccacatgccacacaagaaaaatgaaccacaaaatgcccatatatatttcctcggatctctgttgcctgagtcctatctcctgcctctcagattgtttcagcatcatatttaagatagttctatttcttgaaatcaaaatgtttaaaatcccatttcctgcttgctctatttcttgatttttatattttaaaacattttgagggtaacacttaggttcaaaatatttaaaagcatatgaattatcacaaaagcttggtaatttataatttaattatatgtttccacatttcatccttactttatcagtaaaggatacaccttagtcacttttgcaggc

SEQ ID NO: 134234 - DNA, 1034 bp, Homo Sapiens
  misc_feature (41)..(41): n is a, c, g, or t
  misc_feature (48)..(48): n is a, c, g, or t
  misc_feature (62)..(62): n is a, c, g, or t
gaaacccaaattataatcaagagatttcttggtactgtttntcaaccntactctcttgaccnaagaatgaaactatttacaaattaagatgccaacagatcacgaagagccctgtggtcccagtcacaagtcgttttgcctgaatggggggctttgttatgtgatacctactattcccagcccattttgtaggaagtgaactgatgctggcttctctttgtcttattccaagttgggcatgagattttccctgcattagaaggttgttgagacctgaagcctgggaaggtgcgttgaaaactatacaggagctcgttgtgaagaggtttttctcccaggctccagcatccaaactaaaagtaacctgtttgaagcttttgtggcattggcggtcctagtaacacttatcattggagccttctacttcctttgcaggaaaggccactttcagagagccagttcagtccagtatgatatcaacctggtagagacgagcagtaccagtgcccaccacagtcatgaacaacactgaagaaacgtcaaagtgaaccaaatcattgtttttattttacaaaggcagaaaatgaaacaccactaggtaaaagaattaaaaatctaatcctttatttcttaaataaaacgcttgtgtaactcgtatcatgaaccataatccattctgctgcaaggtgtgtgtgcttctgtaatgtccatcagtccatcggcaactgctaagtagggggtgataccagtataattcgaagtcacattggttcaacatgactctccccagaaagctgatgtgctgaagcaaccagaggcaaatgttcacacacctagagagaaaccctaagggatatatgaagatcttatgaaaaaggatgaaaaccctttaaatgcaaggagtagctggcttagtggcttcaaaaccacctcattcctgctgttatctgagaagctgcaagtactgatgaaaaaactgagaagacatttcacctggcaattagaaaaaagcgctgactgatagatactctgta

SEQ ID NO: 134235 - DNA, 607 bp, Homo Sapiens
agctgaaactgcagagaaacagatatttttatttttaaattatcaagtgcattcacaagacagaaaaaaacaagcttgtacaagagtgactcaagctggctgggcccagctgtacctgacacacagacttatacatccagaacaatgaaaactcagtgccatcagaacagacttttgggcggatggctgtaggcttcaccagttatcagtgccactcaacactttcaaaaatgccttttttttaaagttctacacagcgggacatgtttaccaatttttatgcctctacatgtgcagggataagagccaaatatatttttattagaagatatttcacactgggtatacatctgggcaaaatttacacctcaatgcccaacattgtttttctcacttcttattttaatggaattgactgtctaatttggataggtctttctaattttatattagttttcactttcttggggttaaatattttatcagcagaccttatcacacacttgagaaaggagtcaagaaaagaacaaaaaatgaatatcccattataatatcaaacttcaaaacatatagtctataataatgacactattattctggaacttag

SEQ ID NO: 134236 - DNA, 593 bp, Homo Sapiens
cctcacaatcgctcttcacacttttattgttaattcttttcacatggcagatacagagctgtcgttttgaagaccaccactgaccaggaaatgccacttttacaaaatcatccccccttttcatgattggaacagttttcctgaccgtctgggagcgttgaagggtgaccagcacatttgcacatgcaaaaaaggagtgaccccaaggcctcaaccacacttcccagagctcaccatgggctgcaggtgacttgccaggtttggggttcgtgagctttccttgctgctgcggtggggaggccctcaagaactgagaggccggggtatgcttcatgagtgttaacatttacgggacaaaagcgcatcattaggataaggaacagccacagcacttcatgcttgtgagggttagctgtaggagcgggtgaaaggattccagtttatgaaaatttaaagcaaacaacggtttttagctgggtgggaaacaggaaaactgtgatgtcggccaatgaccaccatttttctgcccatgtgagggtccgcatgagacccttctcctagatccttatcagatcccgtactgccctcttgcc

SEQ ID NO: 134237 - DNA, 1647 bp, Homo Sapiens
  misc_feature (361)..(410): n is a, c, g, or t
  misc_feature (522)..(534): n is a, c, g, or t
  misc_feature (587)..(596): n is a, c, g, or t
  misc_feature (624)..(652): n is a, c, g, or t
  misc_feature (665)..(680): n is a, c, g, or t
  misc_feature (716)..(739): n is a, c, g, or t
  misc_feature (768)..(898): n is a, c, g, or t
ctcgcccgctgcagatcggttgcacgcataatcacagagaatctgttgttattgatgtcaagttgggtggattcgtttctttttttgggcggcagggctaatgtgcgccggcgcgggcagcgaggcaggtcgggaccacgacccgtgctctggctagtctttctgcgctcgcttgaccggcgagggcagcggtgttgggtgtgtgttcttgaggcaggaaggagaacacactccgcctcaaaaggttggaggcggcgtcttgttcgttctatcatctcaacaacacagacgggagtgggtgtggggcgggcgcgcggaaaaaaagaagcgccgcggcgccttccgctcttctattaagaannnnnnnnnnnnnnnnnnnnnnnnnnnnnnnnnnnnnnnnnnnnnnnnnntatttttgcgcacagaatagtccgcgcggaggaggggaaagtttttctccacacacaaaacaaaacaccgacggggtttgtcgcgcccccccctccagccgccgaaaaagannnnnnnnnnnnncccccgggcgcgggatatcactcgcgggcggggggggtgccccccaactcctnnnnnnnnnngagaagagggtttcctctccaaaaaggnnnnnnnnnnnnnnnnnnnnnnnnnnnnnggtgtgaaaaaannnnnnnnnnnnnnnnaattaaaaagccccccccaaggggccccctttttcnnnnnnnnnnnnnnnnnnnnnnnntgggccccccccggggaattttttagagnnnnnnnnnnnnnnnnnnnnnnnnnnnnnnnnnnnnnnnnnnnnnnnnnnnnnnnnnnnnnnnnnnnnnnnnnnnnnnnnnnnnnnnnnnnnnnnnnnnnnnnnnnnnnnnnnnnnnnnnnnnnnnnnnnnccggggaagtcaaacatactttattcaacataggaatgtctgaacaggaggaccttgggcagggttccctgaactctgcttcaaaccccactggaaacagagcaaagatcatcacgaaaacccaggacaccagggcaggggggctgcacaaggtcgggtcaggtcacagtgggccagcacacagtggccccgcccagggccagcccagcctgggagaggggatgagggctccaggcagctcactcagaaaagccagggtaggaggagggcaccagcctggcccactcagggaattctttctaccactgaaagcggtggggattaacttagccagggctgccacgccagcacacgattacaaggttcggggtgacaaggaggaagccccttggcaggactgtgcagccctcacagccacatgcacgggagccctgccaatggcttccaaacagcaaaccatcagtgacactgaccttccctgcccaggacacccctcctgagacctggggccagtgtggtgaggagggggcactaggggcggagccaggcaggctgcaggcagaaccaagaggaccccagtcccacactgaagacatcatgattgggggtggggaagatctcagggtctccatcagggaagagcatcagtctgcaccctcggcctgagggtgtgcttgtgggcagggcccatgcaaggcctgggaagaagccaaccccgagagagggaagccctgtgcactgcggagcag

SEQ ID NO: 134238 - DNA, 442 bp, Homo Sapiens
caatgttcagtttccttttgttcctcttgcttgcgttttcgatctgctgcttctttctcatgttggcctttcagcatattccttctgtgagcagtctgaaagttcctcccaccttttctcttcttttcaccttcttgatcatctccttcttcttcagaatcggaggttgaagtaacccctgttttagctaaatttttcctttttgattcaacttctttcttcccctcttttttatccggctcttttcttggcttatcttcttccttctggccctcttcatccttcttaggctgctttttaggttgtttttcctcttgcccctttttcttacttttgtcctcttcagtaatgatgtcactctctgaaggacagggctgttttaccattttgggtctgcctcttggttttggaatcttgacttctgtagctaatatacacatgg

SEQ ID NO: 134239 - DNA, 1422 bp, Homo Sapiens
  misc_feature (23)..(24): n is a, c, g, or t
  misc_feature (48)..(48): n is a, c, g, or t
  misc_feature (63)..(63): n is a, c, g, or t
  misc_feature (77)..(77): n is a, c, g, or t
  misc_feature (80)..(80): n is a, c, g, or t
  misc_feature (156)..(156): n is a, c, g, or t
  misc_feature (208)..(225): n is a, c, g, or t
gcaagcgctgccgcttccgcgcnnccccccctgagggccccccgtttnacgccactcgccgcnacacccctgcggcngcnccgcccgctcctgaccacgggccaatctctccgacgtccggcccctggtggcccccgtgggttcatttgaacgtcnccgtcgtacgctaagcacccttatcaggcgccgacgcaccccccccattccnnnnnnnnnnnnnnnnnnttggaggaaccccttccggaccagtccccagttattaagttccagtgtcaataattcccatcctgcaaccaaagtgtatggaccatgatctctttgccaaaactttcagtgtcaaaaaggaaattaaggccatcagattggcagcttaaaaattcccataaaggaaatataagaatattctgtgcttctgagaaggctctgcactgtatccaggtaaggattcccatacttctttattttgaggaagccagtggaaaattttccataattgcacagcttctattggatgctcttggggttccctgctggtggaaaagttcttcctcaacaaccactccagctgcttcttcgtcctcctcctcttcttcaggtatggttgttttaaagactgtaccttcctttgagcgacctcctctgcctgagaatttttcaatataaccttcacatgttcgccagtgccccacgagttctggttcttccagatgaggtcagttggggggctggctgtgacaccagcgtttgcagcccaaattgtaacagtctggcctgccttcagcacatatcttgaggtatatttataactgactgatgtgtctccaatttttctgatcatctcccagcctcccattggttgatcctgttcagaagtgttcttcaagcggataaatttcccatcaacatcaatttcttcgatgcaaacatttccagtggctgaggcggaatgagagatgctaacactactactcgcctctgattcttccacatcaaccctcttccgctttcctctagttgtacgtacactacgacttgaggatgctcgggatactgtcacacgggaagaagggcttggagacagcttcaacctctcttcttcgccttctaagagtttcctgtaagcactgatttccatgtccagggctaactttacatcaagaagctgttcatagtcattcagctgttgctgcatttgatcccttatttccgccatctctctctctttgtctgtcagcatgcgacgagagttgtctttttctttagcaagcaagtcctctaattcttgaatcctttccaacatgctctagactctttctgtagattagaaagctgggatgaaaggctctcaattctcatgcggctttccatcagttcttcctggcactgttgacagtagaagtattcatctctgatgacagtctg

SEQ ID NO: 134240 - DNA, 1328 bp, Homo Sapiens
aggtttaactgtacattttataaaagatgggattacaactttggcaattaaaatgttatatatgaaaaaagacatttttaatggtaacacaccaaaaactttttaagagaaaatggagtgatcaaaggtattatacagcttttgtgcaatttctcaagaaataaattgtttaatgatacgatgtagtgagccaagaatgtttaaacatggtgggtagcaatgatgctcattatgtgtacaatccacctgtgggataagaaaagacagtagacactggagactgtatatacttgtccccagagaatcaccggtcaagggtcactcacttatccttcaggttgccctaaggtacagcggcttttgagtcagtgaggaaagacggagacaccatacaattggatgaactaacttcatttactctataacacttactttctatgtgtccatcagcagatgtaattttatgcttagcttctttttgtgacacttgttgaatattgttccctttgctgtttagtttgttgcatagtatggtttttccaaagtttgcgtagctcttcgtgcctctgtctgtgagtcctgattttgctcgtttcccttgttttcctttgttaacactgttgctttttgtttaaattctgctgtttccccacaaggcatattttctttttgactctcttcttggtgtaacgaattctcatgaagaaaagaatcctggtctgaattaccttttatacttgtgctgtcttctttaggacctgatattccttgaaagttatctgcaatctgatcttccttaatggccatttcaagattatttaaatcagttttatgacataaagtcccaacttcatttgtagaatgttcagtatcagatcttaagtgaccaggagtaccagtagattctgatttgactgtcagactttctacttcagcctgattgacagtttgcacagattctgatgacgcaccagaagatttatcttgtcgcagttcatctgaagatacaagctcctctcgtataggggaaagttctgattctgtgaacacatcttcagaaagagactcctcagtgctcctaggagcagtgctggcactatcattacctgcatctcggattcttgagtctatttcctcagtgttacttcctgtcattttctttgaatggcagaagtcccttcctgatagctgatctatatctctgtcattaaacaaaattaaaaataattagacttttaaaattgtggtattttacttttcacacactgaacacagaattagtatcactaaaaagacttttaacaaaggatgtagcacgtatctccaag

SEQ ID NO: 134241 - DNA, 1010 bp, Homo Sapiens
  misc_feature (538)..(562): n is a, c, g, or t
  misc_feature (819)..(836): n is a, c, g, or t
ctctgcgagaggctgggaaccggcggcctcacctcctccgaccgcctcccactccgcagcggaatcggacatgtccaaaccaccgtgttacgaagaggcggtgctgatggcagagccgccgccgccctatagcgaggtgctcacggacacgcgcggcctctaccgcaagatcgtcacgcccttcctgagtcgccgcgacagcgcggagaagcaggagcagccgcctcccagctacaagccgctcttcctggaccggggctacacctcggcgctgcacctgcccagcgcccctcggcccgcgccgccctgcccagccctctgcctgcaggccgaccgtggccgccgggtcttccccagctggaccgactcagagctcagcagccgcgagcccctggagcacggagcttggcgtctgccggtctccatccccttgttcgggaggactacagccgtatagaggggggcccggcgccccggggcccaccggcgggactcctggcctgactgcggggctttttaaatgcttccctggactgcnnnnnnnnnnnnnnnnnnnnnnnnntttcttatcccgtttgttacattttgaggataataaaggtgtgtgatctggtttggtacaagcggagggtgcaccggctgctttcgcccagggttctgtgtgaccagacaagccggggccttggcgggaaggaccctcaacgtgcgtttccgccacaacagaacctaagggtacagcactaagtctaagaccaacccttctccggtggttgtaggtgccaagcggcttcccctgggagccttagcccctagcaccgnnnnnnnnnnnnnnnnnngcctggcgggccttggaattagggtgaggacgccccctggtggcaaggaggtgctgcggcctcggaggtgggaggagttgggaacctgggtcagggcaggcggcagcccgaagggatctggatttctttattaacagacatgagcacgacccgttacagaagtttgtgctttcc

SEQ ID NO: 134242 - DNA, 227 bp, Homo Sapiens
  misc_feature (92)..(100): n is a, c, g, or t
atttaggtattcattctgtttattggattgaaagaaagggaatacaaacgactggttaagtgctgcgcactgacatggaaaaagtgtctttnnnnnnnnntcccagtaaagcaaatcaaagttaatgtagtttcagttgaacaaaaatttaaagacgtttaatacattacacatttataaaataaaagtcaacaaagggtgttttgtaaataattagtaaacaagtg

SEQ ID NO: 134243 - DNA, 2703 bp, Homo Sapiens
gaaaaaggacatgaggatgatttatttggcagtcagatcttaagagggcagcagaactagcaaatggccaaccctgagcccaaatgtgggcagtaggtttgtgtgtgctgaatgctggctatgctatgaggcacctttgcgcccacgggcctggaccccggcctctgtcctcagaggtgagggctgcctttctaaccttcccatctccatccctggatctttttaccagttagaagctgcagcaaggatggcagcttcattcagcacctaactgcctgtaccccacccacccaggagtcaggcaactcctcaatccctttttcattcctcagggaaagcatactgagtcttctttgacttaaaaacaaaaaacctcaccaaaataggctctgctatttcttctcttcccacctggcccgccccccattcctgacagtgccttacattcacaaactaagtcctcttaacacagcaggcagcccacctgccactctcctttccaaggtttccctacaggggtgaggagcagggggagttaattacttagttccaatcccattgagacgaaaaataatactgctatttttaacatgatcccctgtatctttcaggctgggtcatgttcccagccatggccaatgtgcccttgtgctgtgtcctcctcctcaggcagggcagaacccttctccatgcaggccctacattcctctgccctggctccagggccaaactgcaggggcatctagcttctcaccctgcccagctgtggttttaaagctacaggacaatgtaaactttgtttccctggcccagcaaggctcctcctcctcctccactcttaggaatgtcagtagctccttggagtctcctgtgccactggctgaggcagcctctctctccaaggggcttcggccatggtcctggccccacaagatggaaggatccatctccagaagtcagggccagatgtgtgtgcttaatgcgaaacacagtacagtttttgccttcatccagagctggggcatggaggcccaaaacagtaataacatctcattaatggcttggtttctgtctagcattcactgctggaatccaggcttcaggctgcgagacccggaaggccgccacagggggctgcttccaaagaacccagttcgcggcattctacaaggcgcacagcacctgctgctctccaacgaggctggggtacaactagaggcggttgtctccattgacccgagtccttcttggggcccttctttctcgactgtcaaaatggtctgcgagatgctcctgggagatgcggaagtcctcaaacggctgctggtagcgggattcaaaggagccttcccgggctcggccatgaaacagctggcctgaggcatctgagccccgctcccgcagggacgtaccactgaagggactgaggtcaccattctcctgcttggcagggaaaatgtcaatcttgatcagcagggaggccaactccaggtcctcactgtagttgttcttcaaaggcactgctctgtatcctgtcttcaggccttttactgggaaagtagcctgagccaggaaattctggtcactaaacatgtcttcctcatacaccacgaagcgcagaaaggcaaattcagggttactgatctggaagtggaagggcttggctggccatacagggttgagtccattgtccaccacaaactctgtcttctgcttggtgctgtcatactcagctccagccacctcaatctccacaaaaggacacacaatgcctcggccattctttggcagatgtcgggcccccagcacctcaatagagatggcacatggctccagcccgcggaggctgctcttgtcaaaggggtcgaaggcctcatcccgcatggtgcttggctgcagcacgtagccacagtgcctgcccgtcatgaagagggcctggttcatctgcataggcttgtcaggggtctggaagttgagggccacaagctgactgccacagatccacatgggcaaaggatcgtagttggaggaatccagtcgctggcccttggggtagatgcgggagagctgcagtcgattgtactgaaggaacttcttgcctttggccttgttcacgtatttctcagccttggtttccgggaaggatgacatgtcccggtagcaagcacgttctgtgccaatcttctcttcatcaaagggaacaggccggcagtagacgacaagttcagagagctccagggcaatcttcttcctccgttccattatcttcccttcagtgagcctggcgtctgctgtgtgggccacttcacggatctttttcacccagtcctgcagctcctcctgtgagtcggcagcaacatccagggaccagtgggccaccgacgccatgctgatggagaagacgaagagccggttgttcttgccctcaggacggatggcaatctgacaagccggcacatccaagaccccccgcagcaagtcccctagggggctgttctcgtccaaatgctccctctccggctccagggccacggggttgaccatctcttccacgtagtttgatgggaaccacagctcttcttccctccgtagtcccctcgccaccagcctccctcttgctttccacattttggatgatggcgctcttgatgaaggtcagctcgtcctccctctgggccttgtagtcaaagagggctttgactg

SEQ ID NO: 134244 - DNA, 1343 bp, Homo Sapiens
  misc_feature (367)..(377): n is a, c, g, or t
  misc_feature (1049)..(1049): n is a, c, g, or t
  misc_feature (1090)..(1090): n is a, c, g, or t
  misc_feature (1162)..(1162): n is a, c, g, or t
  misc_feature (1170)..(1170): n is a, c, g, or t
  misc_feature (1172)..(1173): n is a, c, g, or t
  misc_feature (1196)..(1196): n is a, c, g, or t
  misc_feature (1213)..(1213): n is a, c, g, or t
  misc_feature (1218)..(1219): n is a, c, g, or t
  misc_feature (1227)..(1227): n is a, c, g, or t
  misc_feature (1249)..(1250): n is a, c, g, or t
  misc_feature (1255)..(1255): n is a, c, g, or t
ttttaagccattgttcccaaacaaaatgcttatcatctcaaatataataatactgagtccttcccacttataaaaactgtccccaatgcacatggagagtagtaacttaaccccatgtgtcaacttcaaattaagccaaggtataaaaggtacaaaacggctccaaaaggacttatgctttgaaaggaaggccttaaagcattttgcaaacttcacgtgcacttgttttatatgaatatctatagtcacatacagcataaaaagaaagctttgaaaagggaaggaactcactgtacagaagacaaaacaataccctttttatttttaaaactctggtgaaataggtttccataggacatcccattcnnnnnnnnnnnttaatgtaaaccaacctgcctgtgggttagtcacactatacagacttcatcagagtgtttacagatacctagagtatttacaaatgctatccgttaggtagtaaagtgttgttgcaatttttccagcacatattccacagtaaaataaagggggtatattggtgttcttgtataaaaattcttaacaaatagagaaaggcaattttcctgagagaagatttgttcttgaaatatttttctttaacaattggaaatataaaatgggatgtagttgtaaaagaagcataagaatgtctaagttaacatttttcttttaaattattttaagtaccattaagttaaaatgtttacattcattataaaaaatgctgttaaatcttatgcaaatgatttaacactgattgctgcaacgcaaattgcactttttacaaaaattattgtatacatggaagaaaaatatcttgtttgctaccctgtttacaaattccgactgacttcagatcagccacacaatatgaactttgagaaacgtcagtcacagtgtatgttaaagttacaatgcagtcttgcaaactgagtaatatttttgataagagacctcatgaaccgactcagcctccagagatgtgtaccaaatggcctcaagtgatcttctccatgaacgcacatganatctggatgtggaaaaggtatgaagaatttctggacaacanatttgatcagagagacatgattttggacaaatgcaaatcttttttaaaaatctctctcaatattcatagcangcaagccnanngtctagtcctggcttctgggaantgagcaggtccgtcccngagcnngctgctgnatgcccagcgccatttgatggnnctccntcatctctctaatctttcagaagctcttggaaacatccttcaaataaagacgaaacacgtctgtacgcatcgcatgtctgacgtgaac

SEQ ID NO: 134245 - DNA, 372 bp, Homo Sapiens
catcaatgccttatttttaacccctaccttttcttaatataaaataaagtatctgttgcctgcccatatccaccttgtaaacaattgaaggtagtgatcttatctagaaaacagttcccagctacaagggttcttgagaattcttgaagctatgtgcattatttactatgagcctacaaccttaggaatagtcctttgggagagtaataaacttaaatctgaggggattccttgctcaccagaatcagattggatgaagagagaatgagaatgtgtttgtgtggaagggagaaggtagaatcagaacttgcatcttcggacacctacggcactgcttcattctagagcagtgctggcccacagaactttctg

SEQ ID NO: 134246 - DNA, 1267 bp, Homo Sapiens
  misc_feature (267)..(267): n is a, c, g, or t
aactggccatattggaaaaggccctaacaaaaggccactttttttccgtccccccatattttgattgacttttcacccccaattttaccccaggccctgtcccattaacactctattttcaacggcagttaggtaaccaagttcagagaagcaccttgagaattaacatgaaaccatctttcacctcaaaaatcagaatctgctatttaagtaagctcaagaacctaagaaaaacacccaaagtgtaagtattactccagtcaccanatctaaagacagaactttgactcaaggtagaaatgaaaccgtaattatataaatatatttataaatatttatacaattatatacttatacataagcacttacacagacttagaaaaaaatttaagaacattaattcaaaaggactcactgaagaataaacagatttttccatgatttccttgaggagatataaaactcattctttagggagagttcctcaaaattcaaccattagaaaccatatcctataactgtgtactagcaacacatggcatctttttttcttcttttcccaaatcccctaattgccaagagagcaatcttaaagtagatgaaaacctaaaggtctctacgcaacatctgaggaacatacgctcctcagataaaagaatcaatctaaatcctcaactgacaaaaaggtccatttaatatttttcattttacaagttaaaagttctagttttgccaccagaatcacgactacccccccttcagaggactccatttaagctcaaaatacgaaatgagcatagggtgaagttgatgtgtaaatggtattctacagattcaagatggcctcttctaaaaacactgaagaaagctttcaccaactctaatttgattttgggttttgttggcagaaaaagcccaagacatctgaaaattactagtaacctccgccatcctccttactaaatgttgtcttctgaatggagttgaaaggtcttccccttagagaggctttccgttttgataccttttgaaagaaaacagcatgcggactcatgttcaattcagtcaccagagccttttagagactattccaaccaggggcaaaaaatgaaccattatttctaaccaaaagaacatggttagcaactctcagctgaatggttttctttttccccagggacatacctaagtatgcctgaaacaacacaggacaatcaataaccatagtggttacaattccaagccattgtactacatgattattgac

SEQ ID NO: 134247 - DNA, 1009 bp, Homo Sapiens
  misc_feature (361)..(400): n is a, c, g, or t
  misc_feature (985)..(985): n is a, c, g, or t
tatcacttataatctttccttctaattcctccccttctgtcctttcagtataatccccttcgatttcccctgctgccatactgtgaaaatggcctcacaaagaccacctttttcctgcccctatttgattcggctgttatccacaatgttaacccagcacttgccagtaccactttatttcaacgccagtatgtatccagtcaggagagcacctgagaattaacatggaaaccatcttcactcataaatcagaactgctataaagtaactcagaacctaagaaaaaacaccaaagtttaagtattactcagtcaccaatctaaagacagaactttgactcaaggtagaaatgaaaccgtannnnnnnnnnnnnnnnnnnnnnnnnnnnnnnnnnnnnnnncttatacataagcacttacacagacttagaaaaaaatttaagaacattaattcaaaaggactcactgaagaataaacagatttttccatgatttccttgaggagatataaaactcattctttagggagagttcctcaaattcaaccattagaaaccatatcctataactgtgtactagcaacacatggcatctttttttcttcttttcccaaatcccctaattgccaagagagcaatcttaaagtagatgaaaacctaaaggtctctacgcaacatctgaggaacatacgctcctcagataaaagaatcaatctaaatcctcaactgacaaaaaggtccatttaatatttttcattttacaagttaaaagttctagttttgccaccagaatcacgactacccccccttcagaggactccatttaagctcaaaatacgaaatgagcatagggtgaagttgatgtgtaaatggtattctacagattcaagatggcctcttctaaaaacactgaagaaagctttcaccaactctaatttgattttgggttttgttggcagaaaaagcccagacatcctgaaaattaanctagtagctccgcctcgtgccaga

SEQ ID NO: 134248 - DNA, 464 bp, Homo Sapiens
ctaatttttgtatttttagtagagactgggtttcaccatgttgcctaggctggggtttaagttaaatttttttaaaaactaaagtgactggcactaagtgaacttgagattatcctcagcttcaagttcctaagataagggctttcttaagctttcagatacatgtatcctctagatgtagacaataatgtcccatttctaagtcttttcctttgcttctccttaagttgattgtacttccaaatttgctgttattttttttcctaatactgtgatttatttgatctacagacaggaaccttgtctctgttgaagagcatcaagggaagattacatacgccttgaaaccgaagtgtgttgttaccgacttaatgtgcagtaactcctcagatatctgttaaggcacttcccagatgtgatgccagtcttcttacctgtactgaaagatgtttagccctcgtgcc

SEQ ID NO: 134249 - DNA, 1701 bp, Homo Sapiens
  misc_feature (190)..(221): n is a, c, g, or t
  misc_feature (279)..(296): n is a, c, g, or t
  misc_feature (434)..(442): n is a, c, g, or t
  misc_feature (701)..(711): n is a, c, g, or t
ggcagttatataaccagggtgggccccaatatttggcgcgaacagtgagttttttccgcccccgtattatatctcacccacggggcgccccaaataaatatcccccgcaagggggggctatctccggctcggtgatattgccctgctagaggggttttcccgggatttactcgcacaccgcttttttgtnnnnnnnnnnnnnnnnnnnnnnnnnnnnnnnnagaaagtgtttatataagaattaacgcccccacactggtgtgggaagaaggctccccnnnnnnnnnnnnnnnnnnatttcatttcaatttccgggcttgggcggtggggtcttcccatgttggacaagaaccccgcctaaggggcccctacgcaacccctttctttggaatttttttaggaaaagccttgggggtttacacccggcggggggnnnnnnnnnctgggggagtacaccgccggccttatttccaatagacgcggggtttttttaggcgagaaggggattggtccccaggtgcgcttgcgttgcacggggcgcgggtggcgccaaggggaggggtttgaaaactttcgttgagggcccagggttggcctaaaaaatcaatcattatccatgtttattttccttaggggcgcccgcgctctaaaattaatttttgagaaaagcttatttgagggccgaggcggcccgacaagannnnnnnnnnncgtttgttgggcggacgtaggacatagttgtgattcatgaaagaccaaaaacatgctttaatgccaggcaagagctacacagtcaactgatttacgggccactccataggctatgatttataaattatatattattaaatccaccgtgggcatacagatgggatgggacagcacccccagctccctcccactctgaatgatgtatgaacagttgagcactctgtagaatccttcaggtcgtaagccactttattccagtcccttgaacatcacaggctggttttatttgggacagaacaggttttatttccaaaggtccctgaacacagcaatgacaatgaacagcccagcagaggagtgacataaaccttgaggcatgcagtcttctgggtgctgtggagtcccttggccaaacttgagtgcactggattcgacatacaaagaccttcctgggaaggagaaggagaaaaacaacctccgagaaaatacagacagggtcagtggcaggccaggacagggactatttctatacattctggaagtgtcggcattcatcagcctgcatgtggctcacttttctttctggaatagccggagacctctactcctcactccagctctaggttccaaggaacagagtgggtctggctcagcgagatgtcatgactaagggcagagcccaggcaggtttctcaaaacattaactgattccacctaccaaaggagaatcaaaggaaggaactaggacttcgattcagagcagggaaaagtgggatgcagctcctgagcactgccaatagggcatgctaggtctcctcacccagtctgccttctgtgtcttaggttaattcgctattttccacacacagattttaacacttggccatggaggaatttggcaagttttggtacagaccactgtgaggaactgacccctggaggaagactaggattatttttacagagtctaggtctcaaaatttcacccta

SEQ ID NO: 134250 - DNA, 916 bp, Homo Sapiens
  misc_feature (90)..(131): n is a, c, g, or t
acaaactatggtattttatttcagagcctttgcttacatttgtacaatatattacataattcttcattgtttgcagatcctaatatatannnnnnnnnnnnnnnnnnnnnnnnnnnnnnnnnnnnnnnnnngctgtcaacaaatctttacagtcctgtacaaatttgaataacttgaaaccattttcaacaaaattagttactgtaagcacacactacaagactgaaaatgcttttcttagaaaagttgaatgtaaaggattctgacacgttagcatctacaacaaaacgcattgaaattcccacgtcgtattgccaggaaacaaagaaaacatgccagccccatccaaaaaaagtacacagaactacaattaaaacagtaaaacagtctgtacaataaagtactgtgtattaacagtgccagatattaaatagcttgaatgaacacatccacaatatacaaatgtcttacaaaggtgaagaattaaatacaagtgccaaacagaacagagattggaatcatacaacataaagtcaatacaagtgaaaacaattttgcattcattttggattttatacaaggcatttaattttataggcctaccacccccattagctatttatatttaaaataaccaccatccttttgagacagttcctatcaacaatcttgaaccatactaatacattacttgttcctgaagtccttttgttgtagctcataataaaataagcaatacaaatgaattatctgtatttaagggaaaagaaacatttacaagaaaacacaaaaatataactgttataattcattatgaataaatatacactttgaactggctaagtacaatctttatacattgtttaagatttaatacagtttattagccattttcttttttcacacaatgtatatc

SEQ ID NO: 134251 - DNA, 284 bp, Homo Sapiens
  misc_feature (226)..(226): n is a, c, g, or t
  misc_feature (244)..(244): n is a, c, g, or t
tgtgtgcttacagtaactaattttgttgaaaatggtttcaagttattcaaatttgtacaggactgtaaagatttgttgacagcaaaatgttgaagaaaaaagcttatagaataaaagctataaagtatatattaggatctgcaaacaatgaagaattatgtaatatattgtacaaatgtaaggcaaaggctctgaaataaaatgccatagtttgtgcaatccttgnatttttgtttctaaaagntttaggtaattttaggtttcatttctgtatgtggatggac

SEQ ID NO: 134252 - DNA, 719 bp, Homo Sapiens
  misc_feature (691)..(691): n is a, c, g, or t
ataaaagcttgtttttctttattagaatacttttttcaattctgatttgtcacaatttagattctttttctaagaataagcagaaatttacaaaatttaatttttatttatacattcatccgttcaatacacatttcaagaaagctgtattgcaccctttcagtggtagttacaggacaaagaaacaaaataatccaagagagagaccaacaaatgtatatttataacacagagtaataaacacaaataaatgtggagttatttaagcatgtaagatggtacatgctctaccaggtatgggggcttctctaagacacaagatcagattaaagtcttgaaagataatctggggttagtcaagcaggtagaagtgtgaagagcactttctgagcggaatctccatgtgccaagtctagttcaagagactggatagagattagcaatttggagaatgcaatattaagaaatggcaaaggtgagcctacagagattccaaagttgcatagtgaggtttgtgtttgagaaagtggactcaggcagccacgcaaaagagggattaatagaaaaggagactgaggtaggaaaatcaaggcattagtgttgcagcaggtgtgggcagagttggggaggcaatgggatggattcatgagctattaaaaaggtcaaaggagcagggattcatgacccatangtattaattaatacagaagaagaaatat

SEQ ID NO: 134253 - DNA, 700 bp, Homo Sapiens
  misc_feature (493)..(493): n is a, c, g, or t
  misc_feature (584)..(584): n is a, c, g, or t
  misc_feature (607)..(607): n is a, c, g, or t
tttttcattaattcaaacaaatatttattaagcacctattatatgtcagatactgattatatgacagatgccaaggatacagaagtgaaacagacatgatccctgcccttgagaagcttcaaccaggagagacagacaataagtaagcaattacagtaataattatttaaattcaatttggcaaatggtacgaaaaggacaggaagctaagaagtccacaccttcgtggggaagaaaggagaagttactgctgactctggcctctcataccacccccaagtcacctccaaaaggccagggctatccctaagcttttctggatatcctttcaaaccttgtttcccatgtcctatgcatttgtattggggaggcctctatgatttttcttttttggaaatgagatgggggcatggatttggaaaggatgctaagtctgaggaactgtgggacatccagaggggttgtcaggaggcagtgggatctgctggtctanagctgccgagggaggtctgggctggattgatgtgacagctgtcagcacagaggcaggagctgcagccgggggtgaatgagagtaccatganagatggagagggtcgagggcganatccctcaggcatttgacgctgctgagagaaattccttccaatccgcctgtgtgccttcctgctttggcacagatgcccccttcacccaggct

SEQ ID NO: 134254 - DNA, 705 bp, Homo Sapiens
  misc_feature (584)..(584): n is a, c, g, or t
tttttgggaaatagaactctttatttaaatatcagtacagaacaataaattactaaaggaaacaatcattaatataaattttttcttattaaataatttaaaaattctctttcaggacacggaaagaatccccagaggtctgaagtctaacgtgattattttactgacaatatcatttgcaagaaagagatcatcattcaaagaagtacttgattttccaaacaaaaagagaagaaagaaaatgatatatcttgtttagtcagccagaactttaagtgcaggaattccatcaggtagcaccaagagaaaattgcataatatgttaggtataactgctggtaaaattgttggcaaaaggaatcaaggcagtgaatgagctattgggtccatgatgtcatcatgatctgctggaggccactggacatacaccgtaggtcgtgggcagctggccagacagaagggcgagtttgatcaagaccgtgctcacaggagccttttggtatcagctttaacctgtcactctaaaggactctcctcagatgccagggaggatgaagcaggggaggatgatgaggaggcaacanaggatgagggtggtggctgtggccctgagttgggttgtgcctgaggacatggcgagtggtgctcctgcacttggctccagggtgctgtccatgcccatcaagaagtcctcaagccatccta

SEQ ID NO: 134255 - DNA, 499 bp, Homo Sapiens
aaccaagaaatagtgttatttattctttaccatacaaatttgcattgaaaagttcacaatatttgatttttgagctttctgagctcaggattggtcagagcttgaagtttaaaatagttgacagatttagggaatagctttcatgttagttaccgcatgttcattagctttgagttgcatgggaaccatgtaaagtaacccacgcattttgcgtctatgtaagggaatgattagaaggataacaacaacatagttctttcttaactctctatcagttccagatctctatacacttcaccaacatctatcattattcttagtttataatgatgaaacagactaggtataaaaaatggaaaattagattaggtcgcgaagcaaatataaaccaagcaagataaaatccaactcatgttgactatcatagtattgagatccaggaatccatgctgtctgtagttaaagcagattatcttcactgccctcgtgccgaattctt

SEQ ID NO: 134256 - DNA, 1157 bp, Homo Sapiens
cagtcgacggtaccggacatatgcccgggaattcggccattacggccgggggttcgtgacaataaaaaattaagagtaaatgctgttattgctcccaagagttcatatgcagacaaagcaccttcaagatctttgaatgaacttaaacaatacggatttttctcttatttgagagaattatttgatgcacctgatcctgtaatgagttaccttagctgtcagtatcatattcatgaagttcctgtaggaactgaaaagaccagagaaagaattgaacgggtaatacaagaaacccgattaaaacagatttatacagcagaagaaaagtatgtggtgaaaacttctttttattcaaacaaagttatttctagtaacacatctctaaaagtagcgcagtttctcactgtcactgtggacctagagcagagaagacacttagaagaacagctaaaggaaattcatagaaaattgcaagcagtggattcagggttgattgccttacgtgaaacaagcaaacatctggagcacaaagacaatgaacttagacaaaagaagaaggagcttcttgagagaaaaaccaagaaaagacaactggaacaaaaaatcagttccaaactaggaagtttaaagctgatggaacaggatacttgcaatcttgaagaggaagagcgaaaagcaagtaccaaaatcaaagaaataaatgttcaaaaagcgaaacttgttcccgaattaacaaacctaataaagatttgtacttctttgcatatacaaaaagtagatttaattctccaaaatactacagtgatctctgagaagaacaaattagaatcagattatatggccgcatcttcacaactccgtcttacagagcaacatttcattgaattggatgaaaatagacagagattattgcagaaatgcaaggaacttatgaaaagagctaggcaagtatgtaacctgggtgcagagcagactcttcctcaagaataccagacacaagtacccaccattccaaatggacacaactcctcactccccatggttttccaagaccttccaaacacattggatgaaattgatgctttattaactgaagaaagatcaagagcttcctgcttcacgggactgaatcctacaattgttcaggaatatacaaa

SEQ ID NO: 134257 - DNA, 690 bp, Homo Sapiens
  misc_feature (251)..(267): n is a, c, g, or t
ttggcatatgttagccttaaatattcagctctcattgaaccctaattaaacaccccaatttccagggaaacattttcattttccctttatttttaaaatattctatttattatttctgatataccaattactggtacaatgtttccatgaaaaactatatatgttccaactgtacccattaaaaggcatttgtattggaagaataaatgttatagtaccaataccattgatctcttaagcaacattatttnnnnnnnnnnnnnnnnntcagtttaaaaatgtggaaaaactccctattttttacgacacatcatgtttttcacggcctgttacaatggctaagattccataatcttaaaaatgttaaatatggcaattgtagcattatatactttttatacttactgtctggtattcttgaggaagagtctgctctgcacccaggttacatacttgcctagctcttttcataagttccttgcatttctgcaataatctctgtctattttcatccaattcaatgaaatgttgctctgtaagacggagttgtgaagatgcggccatataattctgtttctaatttgttcttctcagagatcactgtagtattttggagaattaagtttactttttgttttgcaaggaagtccaaatctttattaggttgttaatcgggaccaaatttccttt

SEQ ID NO: 134258 - DNA, 464 bp, Homo Sapiens
tttagaactttgcaacaggtttttatttttgctttatatctattacagtgtttgaaacctaaagaaatacattttctcttcaaatttggatgtgtatataaataacatttgtctggactcagcacactcaatgccatgttttcttcgcctatgtctgctctgaaatcaagctgtgtctgtctacccaggggccctgagaacatggaaaatagagtttattgttattagaaaaataaaagcaaatgaatttgcaaagaaaaaccagtgagaaggattagattcatcttccaagggtccatagctggtaacccaagccattctcgggggatatccagtctcttgagtggctgggactccattacccactttccttctttaataggtcaaaggcaattcccacaaaagctggctaaaaaagccgacacccaactccagagtctgagggttcatgaagatgtggactt

SEQ ID NO: 134259 - DNA, 508 bp, Homo Sapiens
  misc_feature (379)..(379): n is a, c, g, or t
ggctatcagaacattctttattatgaggaagtccaactactccctggatagtcacagggcagacacaaagaatgaatgtggttcctgctctcaagaagctaatcccagtgttacggctctttttgaatttgtctgaacagttccttggaggcgtccctgtggctgaggctgggtgtgggccctccactctcacaggcggccggcagcaggagggagtcacccagggggatggcccgccgaggtcaggatcatcaaatagcttcagggggtccatggatgacacgtcctccgaggggtcctgtggagacagcttcctgcccgggccaaagagcccctcatcagggtccacctcctcgtcaaagatggtgagccgggggangggcttggctttcacggccactttgggatgtttcttgggcttcttggagcgcataatgcccagagggtccagcgcctcctcctcctccaaggattcctcagcatcctcgcccttcaggctctggacggg

SEQ ID NO: 134260 - DNA, 1555 bp, Homo Sapiens
  misc_feature (45)..(45): n is a, c, g, or t
  misc_feature (54)..(54): n is a, c, g, or t
  misc_feature (148)..(149): n is a, c, g, or t
  misc_feature (167)..(167): n is a, c, g, or t
  misc_feature (253)..(253): n is a, c, g, or t
agggttggggcccattctgggttgggcaaagggtattcccccaancaccctttnccctttcccttttaaatgttcccccggggggattaaggacccccattggggtttttgcttccctaggggtgaggagccggttccccgcaagccnngcaaaggctttttacttntggcccccaccagcccccggagaaaaatgggaacccatgcagtttctgggtgctgtgaccccaggcttctgccctggcctcccctngggggtggggagggttttgaccctgcaggggcccagtcccttccccttcacaccgatgtccccacagacaggcctgctgggccagggcccagcatggaagggtcagaagaggctgggggcggcctgggctggtgtatcgtggtcctggatgtactgcaagatgtccatctcgtccatggcttggatctgctcctgcggcttctgctgcccagccacagcttcagccgggcccgctttggggggaacagctggttttctgggtatcaccggcttagctgccactggtggcttgggcttaagctggggcttgggtttgggctcagctcccaggttcagaatctggtccaagtcctcttcaactctgaacagttccttggaggcgtccctgtggctgaggctgggtgtgggccctccactctcacaggcggccggcagcaggagggagtcacccagggggatggccccgccgaggtcaggatcatcaaatagcttcagggggtccacggatgacacgtcctccgaggggtcctgtggagacagcttcctgcccgggccaaagagcccctcatcagggtccacctcctcgtcaaagatggtgagccggggcgagggcttggctttcacggccactttgggatgtttcttgggcttcttggagcgcataatgcccagagggtccagcgcctcctcctcctccaaggattcctcagcatcctcgcccttcaggctctggacgggcggaccctcttctgccacttggtcttgctcctcaaaaaagtcgaaagcctcttcatcattccctgtctgactgtctgtgccatccaggacagaggaatctctgctggtgagccctgcagccctggggatctggtacctaagaactctagcagctctgggctgcctgccaactcggcatccttggagacacagcgcaggatctcattgaacacggctctcctctcccggatgtcagactccccaacaaacaggaccttcctgggtagtggggggaggctggctgctgcataacgactgctcagtttctggtaaaactcctcaatctcgctgtactttttggagaccaagaactggacgacatcctcgggcctgtgcttggccgacttgaacgcagccagacgggtcaccaccaggatctggtactccacgtgtccagacatcatcttgccccgtacctcctggtgctggggcacagtcaggtcgaggccagtgtgggcattctgaagtcgcctggaggtgacgagcaccgccggggactgcatgacgcggcggggactccgggcg

SEQ ID NO: 134261 - DNA, 701 bp, Homo Sapiens
  misc_feature (689)..(689): n is a, c, g, or t
tttactgttctctggacctgattttgcacttgaaaatttccaagctctcagagtacttcagtgttaatagaaaacagctaaaatgttgccacatttgcagatgtggcagatgtgagcagaagaacaaggtcagcacacataggaccaggtcttggtacagcaggagcatgtggagtttccagaactgctttcaggtgtttctactctgtacggttttcattccctatttccaatacatcatcccctgtgtttcacctcatttcctcccagtttccgtttctactttgtcatatattaatttggacctttgtaatctttggtttccttctagtggaatctggtgattttattaaaaccagaccaacgagaaaatgtttccaggtaagtcttcaggctggcagcctctcttccaatatcatcccggtccatcagctgagcctggtaggtaatcccactgttgcagactggaggcttacaaatgctgctcagggatagcactatgcttgaaacatacgccttgtgctttagaagccatgagttccataagcgcacgctgaatatgtttattaaaggacacgtggtcccatggaatgtggcgctcagcactgcacagcactagcagtcaccctgaacactcactgttgtcagtagcaccatccagactctagtgcagacacctctccatatcncctgctttgtgt

SEQ ID NO: 134262 - DNA, 742 bp, Homo Sapiens
  misc_feature (252)..(261): n is a, c, g, or t
ttcggcacgaggatacctgctgtattgaacaacccctggaagaagaaagaatgcatgttggaaagaatacagtcacatatgagtctaggcagttaaaagctttgatttatgagattataggatggaatatatagtaatagctgatagtggcatttatcaaatggctttgttatgtaaatttgcatcgctttatttaccctttggcatctttatatttgttacatgttgaactttgtacacttatgcattatnnnnnnnnnngtagctaaaacttttgctgttaaatttcccagaaagtgacatattctaagaacttttaccccaggagttatgaaaaattccaaacttatgaggaatgtttatatcagaagttgtaatacgtttgtttcctttcctctgttatcttttgtgctttgacgtatcttgaggggtctttgcacaaggattacatcattcagggaccaagcactatctcagtaatagttaagagtagtctttaaataatcatttcagggattgtgtgagagtagtctcacaatttacactcattaatttgtaatgcatactttttatatagactttaggatattttggcagtgtttattcatatggatataattctttacctaaccaaaattccttaggttataagtggttttaacgtgcaaaagtcagtaaaaaattttgttgccttaacaaaattatggtgctataatgtagagacaatgaacgattatcaaag

SEQ ID NO: 134263 - DNA, 766 bp, Homo Sapiens
  misc_feature (711)..(711): n is a, c, g, or t
  misc_feature (750)..(750): n is a, c, g, or t
aaaccttccatttttacttccaaccttaccatgtgctcacaaaaaaaggtgttaaatacatgtaagttttgacgaggttatttaaaagtgtaggatataaaccaagaatttttcacaccccaaaaccccgcacaaattaagggattacatatctgagtgacaagtacatacaaacgcattacttctagagatacttagatgtagataaaagaccacatttcaatagaaggatcacacagaccagtgggatgtttcttctgagataacccactttatgcaggaaacagtgtggactctggggacggcctctgctctggctgaggatttctgtcccagagcggtacaggaatctgcgtagtgttttagtttggagaaaacaggaagttacactcatcacatcttttgcccagatgatagaattcgaaatccccccggggttgttcatggaatgagccgctctgttatgttgtgagccgtggtattaatcagccacccctcactaggtgttggggttccaccacgcttcctccaccccccgtcaccacagcagcgggtagtatttaggttgaatattccaaatagtcaattatgacagttaatttcaaatgagatgacttcgaagtacacgtgaaaacaatactattttatatcacgactcatgccatccgtatgtgtaatcaaagccttctaagtcttgatatgtccttacanagacgaaggatagagtgaatgtcaaaatttgccacacangagttactgaaagtct

SEQ ID NO: 134264 - DNA, 575 bp, Homo Sapiens
aaaaatttagtagtgtttattatacacagtcttctaataaataaaagaggacacgtaataaagattcagttttcagtaattttcaatcttcaagactaacagccttaatctttgattgagtttctaaattctccacaatatctttcagataatcttcatcttttaaaaaatatacatagaattctctttccatttgatgtaatttattatttgccaaagtttttctttttgtcttcacatcagcaagaatatcagtgaggagatgatttagcttattcagttgagattcaactttatgaaactgctctgttaactcctgatcactaagcaaaagctgatttcctccttgatacaaagtatcacaaagcatgtccacatccttattccgtttggacagaaagaaagaatgttcttgagcagatactgccaactgatcttgtactaaagaaatattcggtttcaatttctcagccacttcctcaaggtttccatgagttagaaacaattcttttttcttattctctccctccaaaacttggtaaagcctatgagtagaataatccttagtatcaatg

SEQ ID NO: 134265 - DNA, 762 bp, Homo Sapiens
  misc_feature (726)..(726): n is a, c, g, or t
gcccgacaagcgtattctatgttttggggcgcggttttttgaccccatcaaataactttattcacacaaacgtcccttaatttacaaagcctcagtcattcatacacattaggggatccacagtgttcaaggaacttaaatataatgtatcataccaacccaagtaaaccaagtacaaaaaatattcatataaagttgttcacacgtaggtcctagattaccagcttctgtgcaaaaaaaggaaatgaagaaaaatagatttattaactagtattggaaactaactttgtgcctggcttaaaacctccctcacgctcgtctgtcccacacaaatgtttaagaagtcactgcaatgtactccccggctctgatgaaaagaagcccctggcacaaaagattccagtgcccctgaagaggctcccttcctcctgtgggctctcctagaaaaccagcgggacggcctccctgctgataccgtctataaccttagggggccctcgggcaggcaacggcagtggactcatctcggtgatggctgtagatgctaacactggccaattcaatgccacacctactggttaccctttgagggcatttctccagacagaagccccttgaagcctaggtagggcaggatcagagatacacccgtgttgtctcgaaggctgtgccacagcccagtacgacagcttggcagagccagtatctctggacttctgcctccanaaccagtggcctgaagagctaacaatgtcagcttgg

SEQ ID NO: 134266 - DNA, 701 bp, Homo Sapiens
ctaaactttgagtttattggttttcgagacaaacagtcatgccaaagctgacaaacttgtatagatacacacacatacacgcacacacggtacataaagcacctttccccagggccacgtcacttgccattattaagaagtctatcctatagccatatacacgattctgggtcacccagataattagctgaaaattatcttcatattcgttttccctccacaggaatgtttcctgaaaagaaaccccaaatatgagggtttctgatatagctttaaaaaatgttgcctgccagtagcacatggattctcttttcagggtttgtatctacccagctgacacacccattgcctctttttggtctggcagagcaagtgatttcttgttccaccctgcagcttactattggcaaggcatggcaggagtgaatctaggttccgtgtaccaccagggtaaattgccctctctattgcagtccttatggaaaggcactttttttcgggttcagcacgtccccatgcattcacaggtaccgaaagtgacatacacatacattgtaaacattgtgcccactgctctgcaaacgttcatttggcccttagcagttcacacatcacagccgattcatgtattcatgatgatgttcattctgttgttttctggaaataattatgttgtctgcttgcccggtggcactgccaca

SEQ ID NO: 134267 - DNA, 724 bp, Homo Sapiens
  misc_feature (574)..(574): n is a, c, g, or t
  misc_feature (636)..(636): n is a, c, g, or t
tttttgactctaatcaacattccttttgttggtgacatttgtgattttcagtaatctgagtttttgatggccttttaaacaagactccagtatgtgaaggttaattgctgtgctccacagatcttgtctattggcccctgtagaaagttaacctttgttgttttccttttataatttgcttattgcacaattgctttagggtaagtgaattatattaagatgccttgaaattatagcactccttgattaagaagctaaaatgtttctctcatttactccttaaacaaaagacttaaattagtttgggtcattattacttttattttgcagcatttggtttgttattagcgtaagagcaagtataggatatggagaggcccctggcttcatgagaacaaaggcaggcccaggttataattacagctttctcctgccccttctttactttctctaccacagttttctccactgtttgttttcctcttgccacaatttgctaacatttaaaaaattttcctgcacccagtagtttcatatcctgtagacatcctcttaggacattctcaaatttcanaataaaaaatattcatctatgtagttaattaaagttaaagtttttgcagatcaactactcanactactaaatacatttacctgagaaaaagtctctgagagcattcattcctgttttagttcgtgtaaattctctgagaatgttctggag

SEQ ID NO: 134268 - DNA, 867 bp, Homo Sapiens
  misc_feature (380)..(410): n is a, c, g, or t
  misc_feature (805)..(805): n is a, c, g, or t
cggctatggactttttatgttttttgtataggacatttctcttaagatagtgaattgtcaatgaaatatgagcattttaaatgtaaaaatagtactcatactctttttctcaaagaaaatttcagaactgttaacttttggctgaatttaggtagtgtctttggcttaacaatgcagttttatcaaataaatagatttgcatagaattgtgttcagtaatactcagacaacacttttgttcttatgtccacattatgataagcttttgattttatagaaaaatatttgtggttcactaaggaatctataaatgtccttaaattatcctaaatacctaaaataatgtaggtttcttttttatggatagtgactgatgtgcnnnnnnnnnnnnnnnnnnnnnnnnnnnnnnnccaaacaccaacttgaacccgaatgccttttagtttttccatgttggcatttagtgaattctttcccacttaggtgtatctcatatttttattaggtctaggcaaggactgggcaaagcataccaatgatggttgaggatacatactcttttagttctggggtaatgttaaatatcattgagtcaggcttaaacatatgtaatttcagaaaatgattctagaatgttaaatgtggaatttttgattcagtaatgtaaaagtcaagtattgttcccagttggctcagtatgaaatagggccactagctgacagcattatgtaaaataaaaatatttcctaaaggcatcaattattattttaggcatgaataactgtcttagccttctctaacattnttcccatcaacttgttcccatacccgtgttgttgttgcatgaacaacggaaatatgcatatc

SEQ ID NO: 134269 - DNA, 653 bp, Homo Sapiens
tggtatgggaagaagttctttattttatcatgtgacaccacataacagatgcctaaccacacaatgtagatatgaataaagaagatggctcagaagagtgtactagtatttgtgactcagctagtgaccattatgataaaaagaataaagttttgacttatttacagttttaaaatgcattttatattgagtagttatttcatgttttcttaaaacaattattgtattgaactaaaaataaactaggtagtttgttcacataacaaatctacattcaaagtcatgcttacaaattttccacttagtccatttttctgttctcagcattactacaaatgcctcattccgtcatcacattgaattcttcaacatcctctatatcatttccaggggcatctctgggaagtagtgatgcctatcttccctcggaagcactaataaccctaatatacccacaattcacaccttttcccttctttgaggtgtgctgctttttggcaagacagaaaaaacacactactaggatttgaaaaactaaattctgggcctgtttaagtcataaactacagaatcttcggtcatatattctccccaggcacttgtttctccaccgcaaaaaataattcctatttgcttggtctcctcgtgccgaa

SEQ ID NO: 134270 - DNA, 685 bp, Homo Sapiens
  misc_feature (590)..(609): n is a, c, g, or t
gagctgggaaatatattgcttgaaacttttttattttacatctcagtcttgctagcaagcactacttggcttagaatctgtcatatccataaaggaggagctcatgtctctagtcctggcccttcaactcagaaggttcttctatactttccttctctcaggactcttatagcccagactttaaacatgaagctgcataattttcatcacttcttactctgccgcatcctctttgcccatgttattaaagtattatctaatactttgaagtttacctgaagaacctctttgtgtgtacttagtaatacaactttttttcctgtcccaacaccttttaatacagttgaatggataaaaacatggatacaaacacatggatatagttatcattgaagcagtgtgacataaaataatatctatgtatacaacactcctctgtaaatagcaaatgtaaagtaaaagatacccaacaaatcattttgtttatcttgctatcatttcttaatctataacgtctccctcccatgtatccatgcaaggaagcagtatcagctgcccgactagagggtagctccctcccttgggttacnnnnnnnnnnnnnnnnnnnngtagagacagagtctcactctgtcgcccaggctggagtgctggagtacagtgggcgaaagagcaagactctgcctc

SEQ ID NO: 134271 - DNA, 565 bp, Homo Sapiens
  misc_feature (15)..(15): n is a, c, g, or t
tagtagaagtcatanaaatacctgagacatattagaaaataagattttccctcctatttaaaaaaaactctgcagacttttatttgaagcccatcttttgaaaatcactaacatttcataatcatttcctagtgttttgtttcactttctcgatgaataatatttccccatttaagtttctcaaggcattgattgctggaaaatttcccacgtgccctctaaacgtcccccgtggacatgagtaaattaaacttcgtgcatgtcagctacacgttcatcgtctcctttctcagctgaggccatgagtggacccatcagtggctccaaagtcgtagaagtactaacatgttaagaaaaatacatttttaagggtcaaaacaaagttacacagaagcaaatatcagggaaggacttcaaaaggcctcctcagcattgagtgtccgtgtcttcctgagattcttcagtttatcaatggcagaagttactaaaatctctccatgaattttgttgtctcttgttcgcacgtttacagcattatctatcttttccttttctccagggcacc

SEQ ID NO: 134272 - DNA, 788 bp, Homo Sapiens
ttaatggaattaagtaacatttattttacataaaacaatttccagagaatacatttaaaaaccatctagatactgattttttagcattacaaaaaattgagaggcacaattgaagtattcaaataaattgtgaggggtggaggtggggactatgctcactatctatgttgttccttagtcacttaaaggctctgcgtgcaagagtctttacatgaggcagtagtgcactttcatttagtaggaataaatcacataaaatatatacttttatacagaaagtgttattgtgttgtcattttcaattacttataaaaacttcatttgaattgcacaaaagttctctttaaaattgataactcccagaagacagggcttagaactgtctaaataattcattacaaataattaggtttccatttatccatagattaaaaaaactatgaagaattacgttattcaagtgggacatttaaaatttttttcataggaaaataggtttacatgtttgtccctagtcagctaaatttcccaccccccaactttaaaacagatcacaggatgtccaaagttttaaatcagagtacctatatcacagtacagtgtggatatgtttccattaattcattttatgtctcattctattatagtatcaaattagcaaaaaaggcacctgggtacattcttcagaacagttttggtcgttttaaaaaaatcacacatttataagcagtgatttcacccggccgtaatggccgaattcccgggcatatgtccggtaccgtcgactg

SEQ ID NO: 134273 - DNA, 1008 bp, Homo Sapiens
  misc_feature (354)..(394): n is a, c, g, or t
  misc_feature (425)..(904): n is a, c, g, or t
  misc_feature (906)..(906): n is a, c, g, or t
  misc_feature (944)..(944): n is a, c, g, or t
  misc_feature (966)..(966): n is a, c, g, or t
aaatttaaatgggaatataacacagttttcccttccatattcctctcttgagtttatgcacatctctataaatcattagttttctattttattacataaaattcttttagaaaatgcaaatagtgaactttgtgaatggatttttccatactcatctacaattcctccattttaaatgactacttttattttttaatttaaaaaatctacttcagtatcatgagtaggtcttacatcagtgatgggttctttttgtagtgagacatacaaatctgatgttaatgtttgctcttagaagtcatactccatggtcttcaaagaccaaaaaatgaggttttgcttttgtaatcaggnnnnnnnnnnnnnnnnnnnnnnnnnnnnnnnnnnnnnnnnngcctacagccgcgcctcgtgccgaattcttnnnnnnnnnnnnnnnnnnnnnnnnnnnnnnnnnnnnnnnnnnnnnnnnnnnnnnnnnnnnnnnnnnnnnnnnnnnnnnnnnnnnnnnnnnnnnnnnnnnnnnnnnnnnnnnnnnnnnnnnnnnnnnnnnnnnnnnnnnnnnnnnnnnnnnnnnnnnnnnnnnnnnnnnnnnnnnnnnnnnnnnnnnnnnnnnnnnnnnnnnnnnnnnnnnnnnnnnnnnnnnnnnnnnnnnnnnnnnnnnnnnnnnnnnnnnnnnnnnnnnnnnnnnnnnnnnnnnnnnnnnnnnnnnnnnnnnnnnnnnnnnnnnnnnnnnnnnnnnnnnnnnnnnnnnnnnnnnnnnnnnnnnnnnnnnnnnnnnnnnnnnnnnnnnnnnnnnnnnnnnnnnnnnnnnnnnnnnnnnnnnnnnnnnnnnnnnnnnnnnnnnnnnnnnnnnnnnnnnnnnnnnnnnnnnnnnnnnnnnnnnnnnnnnnnnnnnnnnnnnanatcgacgctcagtcagaggtgggaaaccgacagactanaagatacaggcgtccccctggnagctcctctgcgctctctgttcgacctgcgttacggaactgt

SEQ ID NO: 134274 - DNA, 1303 bp, Homo Sapiens
  misc_feature (556)..(564): n is a, c, g, or t
  misc_feature (730)..(1148): n is a, c, g, or t
  misc_feature (1150)..(1151): n is a, c, g, or t
  misc_feature (1161)..(1161): n is a, c, g, or t
  misc_feature (1181)..(1181): n is a, c, g, or t
  misc_feature (1224)..(1224): n is a, c, g, or t
  misc_feature (1266)..(1266): n is a, c, g, or t
  misc_feature (1275)..(1275): n is a, c, g, or t
  misc_feature (1277)..(1277): n is a, c, g, or t
ttatcctgttcacattatgcagaatttcagtatcatccacaatgttagtacagtaactgaaacacaatgaagaaaaacggggagtgaggggaggttcctagtgtgacctgacatagtctaagggttctctccttttgtatgcatctcccaaaggcaagtatcagttaattgtttgaaggagagtagactatccaggattcatttattgttcaggtgtcttttccaaagtgtgagaaaataggagtcaattcaataatgaatatctgtaatccaaaccaatttaactacaatcaaggatgtctttctcatctattatcacaaacatcccagttgcctccatctaaaaatttctttgaaaagttaagacacaattaattataccttattaattccctcaaaagcaaaaaaatatatgtaccattcagcatacaaaagttacacagtaaaagtgcatatgtatctttcttaattggcccactcattaaatttgcatttggtcatccttacttttaacatgtacagaattcttcgtataaatgtaggtcagtataaattnnnnnnnnnttacttccacacaatacatgctttcttcatgaaatcttaacctcaatcagttctcaataattgtaaacttagaataaacccacagtttgttggacagttaacatacaagacaaacatcataaatgtcactaaaagcctacagccgcggcctcgtgccgaattcttnnnnnnnnnnnnnnnnnnnnnnnnnnnnnnnnnnnnnnnnnnnnnnnnnnnnnnnnnnnnnnnnnnnnnnnnnnnnnnnnnnnnnnnnnnnnnnnnnnnnnnnnnnnnnnnnnnnnnnnnnnnnnnnnnnnnnnnnnnnnnnnnnnnnnnnnnnnnnnnnnnnnnnnnnnnnnnnnnnnnnnnnnnnnnnnnnnnnnnnnnnnnnnnnnnnnnnnnnnnnnnnnnnnnnnnnnnnnnnnnnnnnnnnnnnnnnnnnnnnnnnnnnnnnnnnnnnnnnnnnnnnnnnnnnnnnnnnnnnnnnnnnnnnnnnnnnnnnnnnnnnnnnnnnnnnnnnnnnnnnnnnnnnnnnnnnnnnnnnnnnnnnnnnnnnnnnnnnnnnnnnnnnnnnnnnnnnnnnnnnnnnnnnnnnnnnnnnnnnnanngacgtaaaanggcgcgtgctggcgtttttncatagtccgccccctgacgagatcacaaatcgagctcagtcanaggtgcgaaccgacaggacataagatacaagcgttcccctgnagtccttcngngtctcctgttcgacctgcgctacgga

SEQ ID NO: 134275 - DNA, 484 bp, Homo Sapiens
  misc_feature (429)..(441): n is a, c, g, or t
gcttttgagggaattaataagatataattaattgtgtcttaacttttgaaagaaatttttagatggaggcaactgggatgtttgtgataatagataagaaagacaccactgacctgtagttaaattggtttgaattgcagatattcattattgaatttattcctgttttctcatactttagaaaagacacctgaacaataaatgaatcctggatagtgtactgtccttcaaacaatgaagtgatattaatacttgcctgcaggagatgcatactacaggagagaacccttagactatgtcaggccacactatgaacctccccccacctgccttttttctcctttatgtttctgttaccgtactaacattgtggattaacgacactgaaattctgcataatgtgaacaggataaactatttataaatcgnnnnnnnnnnnnncaacacagggcttctgcagggaatattctttcctcaatattct

SEQ ID NO: 134276 - DNA, 1035 bp, Homo Sapiens
tagaatataatgataaactaattttatttgcattttatacatcaaatattatatctttgagtctaacaaatttctgattatctatttttaaaaaatgattaaacaaacacttaatatcaaaggcagagtcacatttgttcaggttcatgttgataataactggtcttgaattcatgtaagtatctggaattggccagcataagccaagatgatggcgatggacctttattaaacagccatcactgcaatgccacactattccttcaattttaccctctttgcaatcttcaaaccaggacaggagatcattgtgcttcaatgaaggtagatttcttatttgaaatgctccatgtggtataagaagatgtaatggatgtttcttgctccctaacccatatgggtttccattgatatttgttcctatgagttccagtgtttgttctaagagatctgaaagtggcactgcactaatttccaaaagtccagaatcatcaggatgatgttttagtaccagggcaatttcaaattcataattaactacagaggaatgccagcaatactgtttgttgtttttctctactggtacccaaccaggaatgtgtccattttcatcaggcactggggttcccatttatttgttctgtctcctttgctggtatccagcactccggagctggtttgaagtcctcctcaacgttccaaaaaaattcttttgggttttcttttgaatgtagaaaatttttaaatcttttttcagcttgtttgttgggttttctatctagtcgagcccagaggtatggctgatctgatgctcccttttggaggaaggctcctctttcacctccgtcacaaacacacacggcattttccgctgcacggagcccaagcgcttcatgatgagcccaacaagcagtgcgaatggagggcgtgctttcgagcggcgcccggtccagtcgcggagaagccctgaagcagtcacccgcacggctcaggccacgcacactccgcgcccagccaccgcggctgcgccccccc

SEQ ID NO: 134277 - DNA, 707 bp, Homo Sapiens
  misc_feature (368)..(431): n is a, c, g, or t
gttgggctgtcgtgcggagtgtgcgtggcctgagccgtgcgggtgactgcttcagggcttctccgcgactggaccgggcgccgctcgaaagcacgccctccattcgcactgcttgttgggctcatcatgaagcgcttgggctccgtgcagcggaaaatgccgtgtgtgtttgtgacggaggtgaaagaggagccttcctccaaaagggagcatcagccatttaaagttttggcaactgaaactgtaagtcacaaggccacttagatgcagactatatacagtgcaattccaacagaaaaagtggatggaacatgttgttatgttactacctataaagatcagccatacctttgggctcgactagatannnnnnnnnnnnnnnnnnnnnnnnnnnnnnnnnnnnnnnnnnnnnnnnnnnnnnnnnnnnnnnnagaatttttttggaacgttgaggaggacttcaaaccagctccggagtgctggataccagcaaaggagacagaacaaataaatgggaacccagtgcctgatgaaaatggacacattcctggttgggtaccagtagagaaaaacaacaaacagtattgctggcattcctctgtagttaattatgaatttgaaattgccctggtactaaaacatcatcctgatgattctgggacttttggaatatgcaggcctcatctaaaccgcaaattgctggatct

SEQ ID NO: 134278 - DNA, 1221 bp, Homo Sapiens
  misc_feature (52)..(127): n is a, c, g, or t
  misc_feature (172)..(193): n is a, c, g, or t
  misc_feature (530)..(556): n is a, c, g, or t
  misc_feature (567)..(567): n is a, c, g, or t
  misc_feature (736)..(736): n is a, c, g, or t
  misc_feature (906)..(906): n is a, c, g, or t
  misc_feature (993)..(993): n is a, c, g, or t
  misc_feature (1015)..(1015): n is a, c, g, or t
  misc_feature (1020)..(1030): n is a, c, g, or t
  misc_feature (1118)..(1118): n is a, c, g, or t
ctcctgcttcttcccgcaccagagtgctgtgaagtatgggaccggagggggnnnnnnnnnnnnnnnnnnnnnnnnnnnnnnnnnnnnnnnnnnnnnnnnnnnnnnnnnnnnnnnnnnnnnnnnnnnngaaataaaacctggcacggaaaatgaattaagactggaacccagnnnnnnnnnnnnnnnnnnnnnnaaaaaaatgagggcatagtgggggggtaataaagtctacctagcaaagtataaaacgacaaaagcatggtttccattgaataagattaaatatatataaaacaagtacactgactgtggggtaggtttggaggtgccggaggagggaagtatttgtgctaaaccaacagaaaaaagggctggggggagagggggaccccaaataaaccatcaacgggctgttctgtacagtgagggcttattaagaaaaagccgactgtttataaaagaaacggaggttggtttgtcttcggagcaggtggggacagaaggagtgtcttcgttgcagtggtcacatnnnnnnnnnnnnnnnnnnnnnnnnnnnaaggccattcngactggcggaggcgacacatctctcttttcccaagagaccatgcagagaggcgggcatgcatggggccacgtgaagcacacgatggcagggggagcccaggggtgacagagtctccgttggggacaggggacagcaaaggctgacagggacaggagctccctgggggtnggggaacagctcttttaccggggtggactggagagggcgggttagcagcctcccattcaagtctaaaaggtgccgagagaaagagcttgggccttagtggagcaaggggatcttaatccctcctcctccagcctgagccccacctcgtgagggagttggagacatttggnaatcagaaacgcacaatggtgggtggggggaaattgggcaaacagacagacagacgagagagcattagcatagagaatcattacganaaagcattaatttttcacgganggtcnnnnnnnnnnncttccttttgttgtcggtttgtttccctttaaaaaatacattatactacactcctcctgccgattcttggctcgagggcaaatcctanaggagtcgtataattcgtatcatgtcaactgttctgtgtgaatgtatccgtcaaaatcaaacatacagccgagcaaagtgtaaacggggtgccatgatgacag

SEQ ID NO: 134279 - DNA, 545 bp, Homo Sapiens
  misc_feature (131)..(192): n is a, c, g, or t
  misc_feature (246)..(320): n is a, c, g, or t
  misc_feature (365)..(386): n is a, c, g, or t
gatgagtcacttacagtttatttttgcctgaaagtatttcacatctctttgtacacagctacgtgacagtagtattaaccatcaggaaaagcaacagtgcgaggggaaaggtggcatgtcttgtttcttcnnnnnnnnnnnnnnnnnnnnnnnnnnnnnnnnnnnnnnnnnnnnnnnnnnnnnnnnnnnnnngcttctgcttcttcccgcaccagagtgctgtgaagtatgggaccggaggggggnnnnnnnnnnnnnnnnnnnnnnnnnnnnnnnnnnnnnnnnnnnnnnnnnnnnnnnnnnnnnnnnnnnnnnnnnnngaaataaaacctggcacggaaaatgaattaagactggaacccagnnnnnnnnnnnnnnnnnnnnnnaaaaaaatgagggcatagtgggggggtaataaagtctacctagcaaagtataaaacgacaaaagcatggtttccattgaataagattaaatatatataaaacaagtacactgactgtggggtacgtttggaggtgccggaggagggaagaagcagaagc

SEQ ID NO: 134280 - DNA, 524 bp, Homo Sapiens
  misc_feature (132)..(193): n is a, c, g, or t
  misc_feature (246)..(321): n is a, c, g, or t
  misc_feature (366)..(387): n is a, c, g, or t
gatgagtcacttacagtttatttttgcctgaaagtatttcacatctctttgtacacagctacgtgacagtagtattaaccatcagggaaaagcaacagtgcgaggggaaaggtggcatgtcttgtttcttcnnnnnnnnnnnnnnnnnnnnnnnnnnnnnnnnnnnnnnnnnnnnnnnnnnnnnnnnnnnnnngcttctgcttcttcccgcaccagagtgctgtgaagtatgggaccggagggggnnnnnnnnnnnnnnnnnnnnnnnnnnnnnnnnnnnnnnnnnnnnnnnnnnnnnnnnnnnnnnnnnnnnnnnnnnnngaaataaaacctggcacggaaaatgaattaagactggaacccagnnnnnnnnnnnnnnnnnnnnnnaaaaaaatgagggcatagtgggggggtaataaagtctacctagcaaagtataaaacgacaaaagcatggtttccattgaataagattaaatatatataaaacaagtacactgactgtggggtaggtttggaggtgcc

SEQ ID NO: 134281 - DNA, 462 bp, Homo Sapiens
  misc_feature (101)..(135): n is a, c, g, or t
tttcttctttttgttgtctgtttgtttcctttaaaaaaataacaataatactaccactaacccgacagctgactggtttatacagtactacacgccaggtnnnnnnnnnnnnnnnnnnnnnnnnnnnnnnnnnnncgttgtctgtttgtttcctttaaaaaaataacaataatactaccactaacccgacagctgactggtttatacagtactacacgccaggtgcattatttaaatcttatgtacaacaagaatcactttgcatagcaatggtgaggacacaggacgggtgcagtgatgtgactgggtcttcttgtcccaagggcggggggcgagttcgcagctcagctcggagcctctaggaagaaagcatccttcgtccggcccgcaatggtggcatcggagttgacttttcccacacgacggcatcaaacacaaaggcaaagaaaatccacaaagggt

SEQ ID NO: 134282 - DNA, 369 bp, Homo Sapiens
  misc_feature (287)..(320): n is a, c, g, or t
cctttgtgtttgatgccgtcgtgtgggaaaagtcaactccgatgccaccattgcgggccggacgaaggatgctttcttcctagaggctccgagctgagctgcgaactcgccccccgcccttgggacaagaagacccagtcacatcactgcacccgtcctgtgtcctcaccattgctatgcaaagtgattcttgttgtacataagatttaaataatgcacctatttaagacatgttgacaaattgcgggtctgggacccgcctcttatttatgaagtctttgaccgtnnnnnnnnnnnnnnnnnnnnnnnnnnnnnnnnnnacctggcgtgtagtactgtataaaccagtcagctgtcgggttagtggtc

SEQ ID NO: 134283 - DNA, 382 bp, Homo Sapiens
  misc_feature (370)..(370): n is a, c, g, or t
cctttgtgtttgatgccgtcgtgtgggaaaagtcaactccgatgccaccattgcgggccggacgaaggatgctttcttcctagaggctccgagctgagctgcgaactcgccccccgcccttgggacaagaagacccagtcacatcactgcacccgtcctgtgtcctcaccattgctatgcaaagtgattcttgttgtacataagatttaaataatgcacctatttaagacatgttgacaaattgcgggtctgggacccgcctcttatttatgaagtctttgagccgtcccccccgcccgaccccaccgccctcccgcccccacctggcgtgtagtactgtataaaccagtcagctgtcgggttagtggtnggattattggta

SEQ ID NO: 134284 - DNA, 501 bp, Homo Sapiens
  misc_feature (132)..(192): n is a, c, g, or t
  misc_feature (246)..(320): n is a, c, g, or t
  misc_feature (365)..(386): n is a, c, g, or t
ttttgagtcacttacagtttatttttgcctgaaagtatttcacatctctttgtacacagctacgtgacagtagtattaaccatcaggaaaagcaacagtgcgaggggaaaggtggcatgtcttgtttcttcnnnnnnnnnnnnnnnnnnnnnnnnnnnnnnnnnnnnnnnnnnnnnnnnnnnnnnnnnnnnngcttctgcttcttcccgcaccagagtgctgtgaagtatgggaccggaggggggnnnnnnnnnnnnnnnnnnnnnnnnnnnnnnnnnnnnnnnnnnnnnnnnnnnnnnnnnnnnnnnnnnnnnnnnnnngaaataaaacctggcacggaaaatgaattaagactggaacccagnnnnnnnnnnnnnnnnnnnnnnaaaaaaatgagggcatagtgggggggtaataaagtctacctagcaaagtataaaacgacaaaagcatggtttccattgaataagattaaatatatataaaaaaagtcctcgtgcc

SEQ ID NO: 134285 - DNA, 388 bp, Homo Sapiens
  misc_feature (294)..(328): n is a, c, g, or t
tttttttgcctttgtgtttgatgccgtcgtgtgggaaaagtcaactccgatgccaccattgcgggccggacgaaggatgctttcttcctagaggctccgagctgagctgcgaactcgccccccgcccttgggacaagaagacccagtcacatcactgcacccgtcctgtgtcctcaccattgctatgcaaagtgattcttgttgtacataagatttaaataatgcacctatttaagacatgttgacaaattgcgggtctgggacccgcctcttatttatgaagtctttgaccgnnnnnnnnnnnnnnnnnnnnnnnnnnnnnnnnnnnacctggcgtgtagtactgtataaaccagtcagctgtcgggttagtggtagtattattgtt

SEQ ID NO: 134286 - DNA, 546 bp, Homo Sapiens
  misc_feature (131)..(192): n is a, c, g, or t
  misc_feature (245)..(330): n is a, c, g, or t
gatgagtcacttacagtttatttttgcctgaaagtatttcacatctctttgtacacagctacgtgacagtagtattaaccatcaggaaaagcaacagtgcgaggggaaaggtggcatgtcttgtttcttcnnnnnnnnnnnnnnnnnnnnnnnnnnnnnnnnnnnnnnnnnnnnnnnnnnnnnnnnnnnnnngcttctgcttcttcccgcaccagagtgctgtgaagtatgggaccggaggaggnnnnnnnnnnnnnnnnnnnnnnnnnnnnnnnnnnnnnnnnnnnnnnnnnnnnnnnnnnnnnnnnnnnnnnnnnnnnnnnnnnnnnnctggcacggaaaatgaattaagactggaacccagtttctatttttattacttttttaaaaaaatgagggcatagtgggggggtaataaagtctacctagcaaagtataaaacgacaaaagcatggtttccattgaataagattaaatatatataaaacaagtacactgactgtggggtaggtttggaggtgccggaggagggaagtatttgtgcta

SEQ ID NO: 134287 - DNA, 527 bp, Homo Sapiens
  misc_feature (127)..(188): n is a, c, g, or t
  misc_feature (244)..(325): n is a, c, g, or t
  misc_feature (361)..(382): n is a, c, g, or t
agtcacttacagtttatttttgcctgaaagtatttcacatctctttgtacacagctacgtgacagtagtattaaccatcaggaaaagcaacagtgcgaggggaaaggtggcatgtcttgtttcttcnnnnnnnnnnnnnnnnnnnnnnnnnnnnnnnnnnnnnnnnnnnnnnnnnnnnnnnnnnnnnngcttctgcttcttcccgcaccagagtgctgtgaagtatgggaccggaggggagaannnnnnnnnnnnnnnnnnnnnnnnnnnnnnnnnnnnnnnnnnnnnnnnnnnnnnnnnnnnnnnnnnnnnnnnnnnnnnnnnncctggcacggaaaatgaattaagactggaacccagnnnnnnnnnnnnnnnnnnnnnnaaaaaaatgagggcatagtgggggggtaataaagtctacctagcaaagtataaaacgacaaaagcatggtttccattgaataagattaaatatatataagacaagtacactgactgtggggtaggtttggaggtgccggagaagg

SEQ ID NO: 134288 - DNA, 761 bp, Homo Sapiens
gatactagtcccatgctctgttcaattttgcaaagtatcaccctcaatactttgaacttttacacagccagagcctgatgacttgatatcgaaacctccacggacgcctgggggtggatagtatcagacacaatggccatctcctccagatcctcgtcgtacttcacctgcaggccgtccaggccccgcacgccgccctccacgccgcacaccgcgaccagcacgcggtcgccatccgggtaggtgagggggtccaggggcctcacggccaggtggcacgggagccgcgcccgcagccgaccaaacgggctcacctgcagtgtccactccttcagagttcggcgcgccgggccaggcggagggacctcagtctccgatccgggccagcgctcgctcccacctgagctgtacggcctggcttggcaagcccagcaagcccagcgcccagcgccagcccacagtcggacctgacggagacagagacggaagcagccaagctcccaacctgagcagggggcaagcatggcgcgcctctctcgccagtcctcagaacacttcagccacagggagggtcacttgccacggccaatcgacttggccactgtgccgcctcaagtcaaataggagacgtaagtcagggtttgctgaaacaagagcgagccggttggcttgactaggcgttctaaacatcagccgcgcaatccccaggggcaagttgggatttgaaagctctaaactctgacctggaccccttgcctaag

SEQ ID NO: 134289 - DNA, 1911 bp, Homo Sapiens
  misc_feature (44)..(58): n is a, c, g, or t
  misc_feature (180)..(180): n is a, c, g, or t
tgccttaggaaacgagtatgtgacccgattgtccccttacctannnnnnnnnnnnnnncgccaaacaaaaggggtttagggaaagttttctcgaaggcccggaggcgcgccaaacaggtcggggtgccacaacacgcgggaagggattccaagggtgaggacaaggggtggcttggtttnagaaggccggagaaaaccagtccctttcaagggcctcatttatttacatcaagtttaacactgttagcagttcacagtcagacaacagacggagagaattaaattagaaaaacaactgaaaatatattacaataacaattaagaacaaatacctgacaacactggtaatgtgacacacaattgatgtgtttttagttaaatcccacattgtctcactatgtccccttagcaatgcacacagtgcccgatgctccaaacctcaccctctgtgcaccacatacacacctgcggggcgggacctttggtataaacgttcaacgagttttaaggaattgaatccgcatgtttggggacaaagttctgtcaaccaccatgaaatgtttaaacttatttttactaagcgagcataaaactggggtttgtccagtgacagtcattagagaatcagactgcagagaaggaaaagtgcagggtctgggaggagatggaggttctgagtatacatcaacagctaagtcagcctgttcacagtcaacacaccaaccacgccactgctgttcatccaaggaaagatctgagcgattcctcttttacttactccccctttcttaatgggcacgacagcaatgcacgtgtatttatggacacaaacacacaccagctatacagatctgagatgagagggttttcaaacatatgccctaaagaaccataaacaagtatctcattgttcctttctagtttctggatactgattgacaattggcctaatcatggtgatttctcaagatctcacgaaattcctctcaaaccataatggaggccaaatggtcacagtgagaaattgctgtcaaaatggaggagagctggtttctctggccctcatctaccagaagcatctctgtctcctggcgttcttgccactcacaatacctggtatggtacttctgaactgtgcagaacagtatctgaggtttactgttgatgacactaaagcgttcccagtcctgcaaaaccttctgaaacaacaataaatttgcatattctttttattgtgtcataattgctgaaaattaagtatacatatatgtgaaaatttaagtcccattctccaactaaagtttatggtgcctaattccgaagcaaatttaagcaagttctgactacacaaactccttatgtttcctttcataaagcctgctagcattcgacagtttgcctccagcttttctaaaaggttacttagcatgctcggagacctcagcttctgagggttcagctcagtagcctggagtgacaggtaggaccctgaaaatttgctgatgcgagtacagtgatgaacaaagaaccttccagaatagacacagatgacatgtatcacaattctgctccaaatatggtgtggtctgaggacagtgctgtgcctggcctttccccttcaacacgccagctgctccctcagagtgaacagggctttgctactctgctcaggtcaaaaggtaagatttttgtaggagaggtaaacaatttcaaagttagagatgtacatggggatgaagaagtaagtgcacttggagggaagggtccggcgagaccttgccaggtgggcttgagaaacgcagcaactgccaagtgaacactctcaggaaaccacttcaagtggcggattctcacagatggaggatctggccactgccatctgagaagctcgtgtctaccagctctagttcc

SEQ ID NO: 134290 - DNA, 1123 bp, Homo Sapiens
  misc_feature (147)..(147): n is a, c, g, or t
  misc_feature (313)..(313): n is a, c, g, or t
  misc_feature (480)..(492): n is a, c, g, or t
  misc_feature (682)..(698): n is a, c, g, or t
  misc_feature (1027)..(1047): n is a, c, g, or t
acgcgtggccaagcatattgatgtcatcatggcacccgcttcactatgttcgctgtattgttgatgtgacgatacattcacacagaacagttgactgatacgatttatagactcatttaggaattgccctcgagccagaaattcgcnacgagtgattcagtgatgtacagagactcacaaaatcttgaaaatttataccagtgaaatgctcaccttgggtctaaagggaccttgaaagtatgaagttaaagggtgtaggcatgtaaagtgtgaagttaaaggttgtaatattctatacatgggactggctgcnggaaacaggtgcaagcccttgctacctttcatgagaaaggaaggatgactcagagcagaggagagtccagtgggcagagtcctgaaccatgtgatattcccatgtcttgactcccagtggcatttgccaaactagatttcagattttcttgggattggtggttccannnnnnnnnnnnnccccccttccatttcctccccttttgaaacaatgcatatacatataactattatcctaggtctttcccaaccttttgtttgggagcagataactagttttctagttttacagatccaaatgagacaggaatagcactgggtggtcacaggaggatggaaaatctcaacaccctggttttggtgcagctgnnnnnnnnnnnnnnnnncccaaacaacagctaaaacgggaactaggcaaagaaaccgtgggataacagaaaacccaaaacaaaagagaaaactgccagaaccccagtcagggtgacatgtctgtaactcttccaggcaaacccaaataagggaggaggggtggtaatcaggggtccctgaaatcccctcttttcccagaatacctaatgattacccctattaaaggaacacccatacaattagaaacccaaactttgttttgcatgacttgctctcaggggcactcccacacttctctcttgtgtgtacttttgcttcacaataaaagctgcttgcctttgcttcnnnnnnnnnnnnnnnnnnnnncctgagcggcggccgcaagctttttccctttagtgagggttaattttggctatggcacgtggcccgtcgtttaacc

SEQ ID NO: 134291 - DNA, 1768 bp, Homo Sapiens
  misc_feature (1475)..(1475): n is a, c, g, or t
  misc_feature (1753)..(1753): n is a, c, g, or t
gtttagatttaagatgtcctaaaaaatgtatatattaagatacacttaaaaacatactctgaatataataaaaaagatgttggttcaaaaaagggtcaacaagaagaggaagccaagcttcttagcatctgtttttgtggccacgcttttccccattaatggtgtgaaagtctgaatcaacagcaaatacagccatacagacctatgtatctgtgtgcatgagtgtgcatgggtgtgcacacagagaagtacatcttggtcgacttaagaaaaaattatctgtgttgtgtcccacaaacacttgctgttggcctttcaagagtattcacctccctgccgaagagacagcttgagtatggaggtttaaaaacaatccagacaggtgctccctgttgccctcgttacctaggattgaggcagtttggtgcatgtattacagtaccgaaagcaaatgtcactttctgatctccacaggaaccactccctaaaacatgaaactactgaccaacacttgctttcctccgcatagcactttgtctgtgttcatatgtgtcaacacaactggactaagaaagaaaagtcccaataagaaagtttccttttttgactacagagtgccatacagtctgtgggatgttttctgttggttgtttttaaatcataagtaactgggtattagcaattgacaaaagtgactggtttgaagttttgtaggcagaggtctctcactttttttctcagatttttgctccttaaaaaaaaggcatggtttgcatggagtttcaaagctaagaactattgttaccatggttgacctgtgtacataatgcactgtgcattaagtagcccttaatcaagagagggttaaccatagtgttcctcccttttgctcttctgtacattataatgtagcagaacttcattcttaacatccagattagaggtgtcttcttcatattagatataaattaaccagaggtctagaactctaaatttccagagatgtgaaaaatgtttaatttacttcaaaaatatcttgcataagtatctcatccctaagctcaaacaaacaagaaaattaaaggcagaaagaatacataaaattgagagctcctcctataatacatatacacacactctcgatataggttctacgcagtaaaaggagttgtttcagctaatatagcttctaatatcgatttcatctgaaaatagcctttctgggtgtcttgccagcatcatacgaaacagcagtacttcttccaccaggacttggagaggtttttcattttatctggagtcctgcttttagacttctttggctgttgctgagtgtccgagtattgaatgccagcgacgatggctgcatcaaagacctctttgaggtttttttgagtcaaggctgaacactcgatgtaggaggcggctttgatttcctcggcgcacagcttagccgcctcttcaggcactggctnttctttgcatttgtccaactcaatgaggactttgacatcttctctgagatccgactgcgttccaactaggatgatgggggctttgggacagtggcatcgaatctccggcacccatttctcactgacgttctggaaggatgaggggctcacgacactgaagcagagcaggaagatgtctgtgttggtgtagcagagaagcctcagcttgtcaattcatcctgtcccgcagtgtcacagagtttgagtctcacgggcccgccatccacagacaccaccgngggaaaagtgcgaaa

SEQ ID NO: 134292 - DNA, 974 bp, Homo Sapiens
  misc_feature (579)..(592): n is a, c, g, or t
  misc_feature (726)..(726): n is a, c, g, or t
  misc_feature (796)..(796): n is a, c, g, or t
  misc_feature (813)..(814): n is a, c, g, or t
  misc_feature (838)..(838): n is a, c, g, or t
  misc_feature (845)..(845): n is a, c, g, or t
  misc_feature (848)..(848): n is a, c, g, or t
  misc_feature (866)..(866): n is a, c, g, or t
  misc_feature (870)..(871): n is a, c, g, or t
  misc_feature (880)..(880): n is a, c, g, or t
  misc_feature (893)..(893): n is a, c, g, or t
  misc_feature (920)..(920): n is a, c, g, or t
  misc_feature (931)..(931): n is a, c, g, or t
  misc_feature (958)..(958): n is a, c, g, or t
tttctggaggctggtatcaagatttattggcccaagcggtgacgacagatcagagcccaggcaaatacagcaggagaccttgaaggggaggaaacttggattaccatcttgcccggtcaatatatctgaatgccaaagccctccgctctgtatatgtcctgttgggagattaaatgcgtttacacctctgctgaagcggctttttctccggtgctcagagtaacctgacggctccggccccctccagggccgctgtccttggaagccctggcccgggttttccttcgttcctcacgaccagcccccttcaagggcaccctaccacctgccagcgacgcgaggcacctgctgggctcccagggaaagtcacgctggttccagctgtgactgcagccgccaccgcattgcgccgcacgtcagcaccaaccacgtggcagcgagcctgggagccatcagattcgctgcaaatctgcggggcttcagtggtggagatttatcgtcatgccagatgcgtgtgtgtgagatacataattcctctcacacggcctcataaatccaaaagggtcagcaataaatggnnnnnnnnnnnnnntcacagactaatttgttcagaagactagaaggggatcaatgagaaagctgtagctcagctcacagtttgttctgaaattgggagcatggagcaggaacacattccccactggattcacacatctgcattctcangtgggctgggcaggagctggtgcaaatcagatgcatggcccgagctgggcttcctgtgcacatggtgaantggggaccctgacacanngcggtcattgtttacggcacctgnggctacncantcgcctggggctggaaangganngctggtcanctgctccggggcngggggtctggaaagggctctgcctcangcacggtccangaggtctaggggctgggtcctcacaanctatgggtaaggcctg

SEQ ID NO: 134293 - DNA, 1077 bp, Homo Sapiens
  misc_feature (508)..(991): n is a, c, g, or t
tttttttgagttctttaaataaattttattgtgaaagccatccacctccaacttttctttggtaatgttgacatttgctggccaaatatcaccaagacaagttgtgttggaagtgcccaagacaaccacaaggttgttcactagaaggactcacagggctcagatatagtcatattcacatctatgacttactatggtgaaagaatacaaagaaaagcagcaaagggaaaaggcacatgaagctaagtccagggaaaccaggagtcttctcccatttgagtcacacaggacactcttagttccccacctacaatttgtaacaacacatgtgaaatgttgtctaccaaggatgttcatcacggactcagtacccagggtttttattgcggatggtaacgtagacacactttacctagcaggtaccaaaattccaggcctccagaagcaaggcaagtgtttagcataaaccataaggtctgcacagtttaggcctcgtgccgaattcttnnnnnnnnnnnnnnnnnnnnnnnnnnnnnnnnnnnnnnnnnnnnnnnnnnnnnnnnnnnnnnnnnnnnnnnnnnnnnnnnnnnnnnnnnnnnnnnnnnnnnnnnnnnnnnnnnnnnnnnnnnnnnnnnnnnnnnnnnnnnnnnnnnnnnnnnnnnnnnnnnnnnnnnnnnnnnnnnnnnnnnnnnnnnnnnnnnnnnnnnnnnnnnnnnnnnnnnnnnnnnnnnnnnnnnnnnnnnnnnnnnnnnnnnnnnnnnnnnnnnnnnnnnnnnnnnnnnnnnnnnnnnnnnnnnnnnnnnnnnnnnnnnnnnnnnnnnnnnnnnnnnnnnnnnnnnnnnnnnnnnnnnnnnnnnnnnnnnnnnnnnnnnnnnnnnnnnnnnnnnnnnnnnnnnnnnnnnnnnnnnnnnnnnnnnnnnnnnnnnnnnnnnnnnnnnnnnnnnnnnnnnnnnnnnnnnnnnnnnnnnnnnnnnnnnnnnnnnnnnnnnnntcacgctccgtcagaggtgcgaacccgacagactatagatacaagcgttcccctggaactcttcggggctctctgttcgacctgcg

SEQ ID NO: 134294 - DNA, 1431 bp, Homo Sapiens
  misc_feature (1145)..(1207): n is a, c, g, or t
tttttaaaaattcacctatattttaatgctttcatagttttattttttaaaatactgattcatttggaactttgtaacatttaatacaaggcaaaattatataaatcgcaaacatcagttaagtaaactgtaatgcacacccaacagaaagaactttaaagcctccaagagctttgaagcttcttccaagtttttaatttcacagaaatacagcagaataaacattcctgcgtataagactttgaagaatttgaatcatgaaatattgtgtggtaagatggattgaagaggcagaaaggaaagttctaagggtttgttttctaacactgagaaatcatgtcagctgggaaaaaataccaattaattactgagtaccttactgcatacatttcaacctcattctcatttggtacactgtaaaatggcacagtccacagattattatatatagaaagcaatccttttctaatcctattcccatggatatcaatgttcaaagtttactgccatgagctcaatcaaggtatggtgtgatttgaaagtgaagcctttattgtgccagaaggtcatagcataactgacttcatgcaaacagggagctctcccttctttcctagttggtctgctccttctcctccaggatgagtacagtgtccacagttattcctatgtcctccagcgactggcctccctccactgccagaggccgtctgggaaaggaagtagaaaggctgtatagagatatgtggtacccaattctcgtcatccagtcaaataagacctgtgagctgtaggacttcaaaaaccttctcctcaggacattcccactgggacatcggagagcaacagtaactacttcttctgctgtttgagaaggttcttcaggtaaatcaggaatctccttgcatgtgggctgttcagcaggagacggaaattcagttaaaggtttaggcaagttctggctctttgctgcttctctgtttgatgtttcaaaagatgtctgacttgtaccttcatcacccccaagtttgtgaccactgcttaatttccaggcttcacccgtcatttgataaaagcgctcctccagttttctcaatttcatttcctggtgaggttttaaaacattctctatgtatctgctggcnnnnnnnnnnnnnnnnnnnnnnnnnnnnnnnnnnnnnnnnnnnnnnnnnnnnnnnnnnnnnnnttcttcttccttcagataaacttggggagatttaaatgagttaagccatgaggtagtcacagaaataattaaagtaagaagagcaagcagtagcaaaatccggccacaaagcaaaagaaaatccttgattcctatatccgggatcccacgccggagctccagacacacaagggggacagcagagaggaagaaacacctaaattgtaagcgttaatatttgttaa

SEQ ID NO: 134295 - DNA, 672 bp, Homo Sapiens
agttatgacaaattttattgtatatattgcaccacattgaaaaaaaatcaacatcatgaatgagattaaaacaaaggtcattttaagagaatatttctcaggccaggaaagacctggttatagcctaattagtagtgatattaacagtaggggactagtcagcatggaaacacacacaaaaaacagagtcacgttgccaggggagatgatcaatctggggactagataattccagtcactttaaaataattttgttacaaagcaggggtggtttatcaacttcaccacggcctaaaagaaatatgctcatgcataaacctctgaacaggtgatttggtgtgcagagtgctttggctttgctgtttagagagaagaacactggaaaacaggtgggtgtaggtgttgtcaatgaaaagaaagattatcctttgtaaattaatgagatggtatcctgatttatgcatatgtcccttctgttctgagtctgtttattaggagtaagtttccatgctgactagtcccctactgttaatatcactactaattaggctataaccaggtctttcctggcctgagaaatattctcttaaaatgacctttgttttaatctcattcatgatgttgattttttttcaatgtggtgcaatatatacaataaaatttgtcataact

SEQ ID NO: 134296 - DNA, 1027 bp, Homo Sapiens
  misc_feature (712)..(712): n is a, c, g, or t
  misc_feature (753)..(753): n is a, c, g, or t
  misc_feature (757)..(758): n is a, c, g, or t
  misc_feature (810)..(810): n is a, c, g, or t
  misc_feature (845)..(846): n is a, c, g, or t
  misc_feature (932)..(932): n is a, c, g, or t
  misc_feature (940)..(940): n is a, c, g, or t
tttttgattatgaagacttttattaaattacagtgtattacagattatatcataataataagcctttcatctttaggctaatatgatacaaaaacctacttggccacattacttcttgagtttcttttgggcagctttcttcttgaccatctgtaatcgcttcatagcattgagctgtgattcttgtgaagttgggcctttaagggatgctgagggagagctgctggattctgaagtagttttgctggtagtacttccactaggtcctgatgttccactatttccattcccacttagttggctgctgcttcctggaactaaactacttggactaggaagacctactttgctgacattgtcacaactaactgagcgactaaggccagttttacccaaggttagaggtggaggtggttttaaaggtacagtgggcgtagtgctgttattggaacctattttggaacctattccacctttggatgatgttgccagaccagtcaaacccacaggtttctggttagctgacgaagtagcaggtttcccagtattgttttgtgttgttgaactcaattttgctgttgaaggaccagcagaggaagttttggctgcaaaagctgcccatccagttaagccactagttactgacgaggaaacgctggcactagaagaattcctgaaataactgtggatgtcttgacttctgttctcttanacgctagaaaagttgtctcttgtttcagtttagtttctggnttcnntaacaatggattcttgacagctggagttacagaaacaactgcaggggctggnttctgcggtggtttctgagttttttgagcctgcannatcagtggattaatcagatacaaatcttaacttgatatacagaagatataatcctcacaggatcatcactgaatgaatacagtgancatttacnaatatgtgatgatatgatataatgctcttgaacaatatatcatataatggtctacagatgtatatttctaacagtaagatatatagc

SEQ ID NO: 134297 - DNA, 934 bp, Homo Sapiens
  misc_feature (33)..(33): n is a, c, g, or t
ggccattagtttctgagaggaaaacgctggcantagagaattttcctgaaataactgtggatgtcttgacttctgttctcttaaacgctagaaaaggtgtctcttgtttcagtttagtttctgttttctaacccaatggatctttgacagctggagttacagaaacaactgcagggggctgtttctgcggtggtttctgagttttttgagccattcttttcatttgtctggtacatcgggcacaataccacaccaggcgagggtccattcgcttccttcgtctgtcacctggggtttatgacaatctcggtggtagagattatggcactcctgacattctactaattgattgccagatgccaccatcatttgcctacaaacaacgcaggccaatcccatctccatggcaaaatcatcagcactggtctcctcaaaactggaaaggtcagccataggtaaatccttgctactttggacagtaatgggagatgactgtgtttctggtttctccaatctaggtttctttggaatatcaactccttcagtgatgtctgatttcattttatcagcaggtctcttttcagcttccttctttaccttttcagttgtgaggaccttgccattattattaccagaaggaagactggatgatattttgggctcttgcttaatggaaatgttttttgtgcttgaaattttgggtggctccacatccttttgagatggacggtaactggaatcaatgccccgagccaaagattcatcaagcagtgcttttagcttttcagcagaatctttactctttgaatgcaagaaacctagtgctttcaaaaaaatgggatcaagttccaagttcacagtagcagccattgcaaacgccgttccgccccgccctgccgatccgtctgttcccggtggtcccttcggaaacccc

SEQ ID NO: 134298 - DNA, 982 bp, Homo Sapiens
  misc_feature (754)..(754): n is a, c, g, or t
  misc_feature (828)..(828): n is a, c, g, or t
  misc_feature (857)..(857): n is a, c, g, or t
  misc_feature (887)..(887): n is a, c, g, or t
  misc_feature (938)..(938): n is a, c, g, or t
  misc_feature (968)..(968): n is a, c, g, or t
ttttcaatcagaaaaggttttattataagaaacaatgacatcaggtaaaaatgcaaaaaattgtgcaattatggcaaaatgtttaaaaatatctacacatttgcccccacaggactacagtacttactacatacctgagcactgaacattgaattccattttaaactgctttacatagggaatctgattccttcatgatcacatccatttgttctcatgaccaataaaatcagcttgatgcttaagcatcaactttgtagaacagaaaacaaagatggaaaataaagaatacaatttctactttcctataacatagttatacccagtccagttttcaatgtgtgacaaatatataggaaagtgctacatacattcttcaaatgcaaaaacaaagttaaagtggaactggcattatgttagacctacattttaattctgtagtacccattgtgccttttacttaaggtcttaccacactatgaaaatgcaccttaaatatctaaatataaacccacacatgtcactaatcttacttttctaggacctcttctgaatccattttaacagtggcaaaatatcccagctatataatttaaacaaatagttcttcatacaaaattcaatatatattctactcccataacaaatcctaagccttgcttttgacacacttaacttagatcgtaccctccatacaaattgtcatagccaaaagatcaactgttgtgcaggctaaaagaataatctactgttngattagcacagtatgtcattctcttatatacatacagccatgtaattgctactcatgttcatgtcatgtttcangtatacattttctaataacaagatgtcanaagcggcagaaaatctatcacaagcttcanaataatacatgacatctctgcaaaaattgttttctctctctcagcatgcanactgtagatgattctctcgtgcgatctggnctcaggcaaatcta

SEQ ID NO: 134299 - DNA, 1559 bp, Homo Sapiens
  misc_feature (94)..(94): n is a, c, g, or t
  misc_feature (1152)..(1152): n is a, c, g, or t
  misc_feature (1218)..(1218): n is a, c, g, or t
  misc_feature (1226)..(1226): n is a, c, g, or t
  misc_feature (1293)..(1293): n is a, c, g, or t
  misc_feature (1304)..(1304): n is a, c, g, or t
  misc_feature (1314)..(1314): n is a, c, g, or t
  misc_feature (1350)..(1350): n is a, c, g, or t
  misc_feature (1362)..(1362): n is a, c, g, or t
  misc_feature (1382)..(1382): n is a, c, g, or t
  misc_feature (1394)..(1394): n is a, c, g, or t
  misc_feature (1422)..(1422): n is a, c, g, or t
  misc_feature (1429)..(1429): n is a, c, g, or t
  misc_feature (1432)..(1432): n is a, c, g, or t
  misc_feature (1447)..(1447): n is a, c, g, or t
  misc_feature (1454)..(1454): n is a, c, g, or t
  misc_feature (1524)..(1524): n is a, c, g, or t
cgagtgcaaagtgagtagaatacgctcagctaccgttttgtatggactaagcatgcagagacagtgttccaatcctacccacttgctctacttnggccagtcagtgagcagtaggtccaggataaaatggcaggccagaccgccaggcctctccttttgtctggagactcgttccatagactggacccacgctcggtggcaggattcatgcttgggggtaaggctgggtgccttgcggtgccctctcatccctgagcctcaaggatgcaagcttctacttggaccttaaatgtccactttctcatctcattcccccacctgccagacttctgagtgctggcactgaaggattagctaattttgcaacctgagtggcaaaacactgggccctgagccagcagacagtccccacctagctgtgggccgtgaccccacctagctgtgggccgtgaccccatgctgtgctgatgaaaatgagaagctacacagaaagtcagaaaactcagaggtcctgataaggcagtgagccagaccccagggagatgtctgtgagtgctgcgggggcagtgaaggcaggaagcaggttccccgcctggaaggggctggggcttccctggagctgcgctcaggcaccaagtctgtgggtctcatggctctagctctgctgctctgtgcagagccccaggatgaccgggaagaacccagggcactggacacatccctggaaagcagcaacctgctgccacaggtaaagcaaacccatgagaggaaacggtcagagccagcaggcatgggacagggaggactgctggcccctcccactgtggcccacaccggcgggttcaggccagtcttggaatgtgaagatggtggagggccagctgctggctggcagggtggcccgccagggtatcctgcttccccttcctcaaggagagcctccatcccgcagccaggccacaggatgcagagctccagagcttcacccggctgctgtagttgccggtacccaggagggctggctctggagggctgggcttggcaggctggggagagcaaggaggtggggaacccccagtctgccggcccggcccctggtcagcacccgcagccccagccttctccgatgtccttgctgttcagctggatgtnggtcgggtcttctcgctgaacaaggggccccgtgccgcatgatgagctcgtggccacctcaggaangctcctcnacgttgctcgagtccttggagacgtctcaatggacacaagatgtcatagtgctaagcaagctctgtngctcaagcaanggagactccngagctcgctgaggtctgacttgtccccgatcagcanctgcacatgttnggagccgcatactcctcacnatctcaatccantgagggacgaaggaaggactcctcctgntgagtcntangcaggatggcccatnggatgcngtatactcttggtgatgtgcggacgtccctgcggcgtgtccaatttgcactgaccgctgcctggattcangtctcaagggaaatcacccatgtgtccctgggccc

SEQ ID NO: 134300 - DNA, 1217 bp, Homo Sapiens
  misc_feature (81)..(81): n is a, c, g, or t
  misc_feature (996)..(997): n is a, c, g, or t
  misc_feature (1001)..(1001): n is a, c, g, or t
  misc_feature (1030)..(1030): n is a, c, g, or t
  misc_feature (1076)..(1076): n is a, c, g, or t
  misc_feature (1079)..(1079): n is a, c, g, or t
  misc_feature (1123)..(1123): n is a, c, g, or t
  misc_feature (1132)..(1133): n is a, c, g, or t
  misc_feature (1159)..(1159): n is a, c, g, or t
  misc_feature (1166)..(1166): n is a, c, g, or t
ctctaacttgtacatccttaggagtagattaaaaagagattctgaaacaggagaatttaaaagaacaagcacatttgtctnatacatttgtgtttctataaaaagattttcacaggaaatttgtacttgcaatgtatatttcagtgcttttacattttgttttggcaaagaaagtaaaaggaaaattttgtttgtatgtttaattaaggattgcacctgagacgagtcaagcctcttgaaaaagtcaaatgcctccatgtaaatataatcaagtttcctttcccaagtgtccatgtgtgataaataaaaagttttagattactaatattcacaggtaacacagagaagaaaaaaagagaaattcataaagagactttaagtgtttaagttaggggttgatcaccagtttgtgcagtatataaatttttggaatggtttcacacacatgtatcttgatttgtggattgagctgcaagttctctttctgggcatcttttgcttgacagattcccagcatagcacaagttcctggagagtttaacaatcatcttctgccagcatgtcaatctataagggtttagtgcttggatgtcagagtgagtgttgatgatactcggaagatctggggaagcatgttactaagttgataaaacatttcttcagaaatactctgtggtactagaaattgcactgtcctagaaattcctccatcccatgaagccatttccatcatgaaacctttgacacacttgaacacaagttccgctctccttaagcaccagggtatagtcatttcctctgacatatcatgtaccagcaagagaggaatgcttattgttgtgatgtcatgggtacagcaaactttgagtatatttcggagtcccataatggcaggatcacgagcagtgatgtttcccgatttcacatggtcatccacacagagatggaaagcaacatggatttctgagagattagaactgcgtgtatataaattcnncaangtaaacatttaatagtcctctcagcatcntagtctatcatcatttctccattttggtttcagatcagtgatcttncanttactctgcgctgggtctagataagtacactgttgacactctantgctctcanntcgggaatggatcatgcatctggcancgtgganatctctgcgattctggctcaggcaatcctaaggagcgataatcgtacagtc

SEQ ID NO: 134301 - DNA, 2007 bp, Homo Sapiens
  misc_feature (198)..(777): n is a, c, g, or t
  misc_feature (819)..(855): n is a, c, g, or t
  misc_feature (1635)..(1635): n is a, c, g, or t
  misc_feature (1812)..(1812): n is a, c, g, or t
  misc_feature (1894)..(1894): n is a, c, g, or t
ctacatataactaaaccatgatgttccatgagtaatattgtaccggtgactccgacatatacccgtaaagcccgcgtcggtgacgggggtctcaacacacccagttggcgacgaccaccccgactgagtactacagctgagttgagaagcgccacgctcccgaaggagaagcgacaagtatccgtaagcgacaggtcnnnnnnnnnnnnnnnnnnnnnnnnnnnnnnnnnnnnnnnnnnnnnnnnnnnnnnnnnnnnnnnnnnnnnnnnnnnnnnnnnnnnnnnnnnnnnnnnnnnnnnnnnnnnnnnnnnnnnnnnnnnnnnnnnnnnnnnnnnnnnnnnnnnnnnnnnnnnnnnnnnnnnnnnnnnnnnnnnnnnnnnnnnnnnnnnnnnnnnnnnnnnnnnnnnnnnnnnnnnnnnnnnnnnnnnnnnnnnnnnnnnnnnnnnnnnnnnnnnnnnnnnnnnnnnnnnnnnnnnnnnnnnnnnnnnnnnnnnnnnnnnnnnnnnnnnnnnnnnnnnnnnnnnnnnnnnnnnnnnnnnnnnnnnnnnnnnnnnnnnnnnnnnnnnnnnnnnnnnnnnnnnnnnnnnnnnnnnnnnnnnnnnnnnnnnnnnnnnnnnnnnnnnnnnnnnnnnnnnnnnnnnnnnnnnnnnnnnnnnnnnnnnnnnnnnnnnnnnnnnnnnnnnnnnnnnnnnnnnnnnnnnnnnnnnnnnnnnnnnnnnnnnnnnnnnnnnnnnnnnnnnnnnnnnnnnnnnnnnnnnnnnnnnnnnnnnnnnnnnnaagaattcggcacgagggttggagcggccgctgctgtaggcnnnnnnnnnnnnnnnnnnnnnnnnnnnnnnnnnnnnnatacttgtttaatccatcttagacctagcacatcctagggttttatatactgatcaaattgctctgctagagatgcttaagttcaatagcagtttcctttcaaacttatccgtttttaagaaatgggagtctgtttttttaaattttatacatgtttattttcattataaatttatgtaaatcactttggacccagcatgtccttaggttttacccattcgtcaaactgctctgctgtgagatagccaagttcgatagcagtttcctttaaggttgatccatttttgtgtgctgtcttagcaatctttgctgccttgtcataccctatatgaggattgagagctgtcaccaacattagagactcattcatcagcttgttgatcctttctgtattggcctggattcccaccacgcagttttctgtaaaggaaactgaagcatcccccagcagcctggctgagtgtaacacatttttaatcatcattggcttgaaaacattcaactcaaaatgtccattgctgcctccgacagtgacagcaacatggttccccatgacttgggctgcaaccatggtcattgcttcacactgagtagggttcaccttgcctggcatgatactgcttcctggttcattttcaggcaagatcaattctcccagacctgaccgaggaccagaacccaaaaatcgaatatcatttgctatcttcatcagactgcaggcagtagtgttcatggctccactgagctcaaccagagcgtcatgagcagccagagcttcanatttattcggagcagtgacaaaaggcaagcctgttagtgcagccacttttgcagcaacttttctgcaaagcaattctagtatttaccctgtacaacagcagtgcctccagctgcgagctcatagatcttgggatggagcttttattctgtcattgcatatttactttgtggacatancactaaatcctgcccaagagtagtggacagatctgagtagatacgtcaatctgatgatcgtgcaactctttgatttgcatcngagcacagtactctgtatctgtacagtctcatgacttcatgcgcacatgtgatgctgtggaagtacttgagctcggcttatacagatgtggatgacagactgtgcaacagaag

SEQ ID NO: 134302 - DNA, 1704 bp, Homo Sapiens
tttgttaattttgaatctagagagctcccgaggtttatatttgtcccgacccgtaacctctgagagtgccgctctccactcttaaagggcttttatataaatttttctgaattagtacctgcccggtccggttaaccgtggcaagttcgcttagtaccattcgaacgtcctttagtgaccattttgtgcgtcttacatctttgcgcctgttcataccctatagagatgggactgtcaccacattagagactcatcatcagctgttgatcctgtctgtatgcctggattcccaacaccagttttctgtaaaggaaactgaagcatcccccagcagcctggctgagtgtaacacattttaatcatcattggcttgaaaacattcaactcaaaatgtccattgctgcctccgacagtgacagcaacatggttccccatgacttgggctgcaaccatggtcattgcttcacactgagtagggttcaccttgcctggcatgatactgctttcttgttcattttcaggcaagatcaatttctcccagacctgaccgaggaccagaacccaaaaatcgaatatcatttgctatcttcatcagactgcaggcagtagtgttcatggctccactgagctcaaccagagcgtcatgagcagccagagcttcaaatttattcggagcagtgacaaaaggcaagcctgtaagtgcagccacttttgcagcaaccttttctgcaaagccaattctagtatttaaacctgtaccaacagcagtgcctccagctgcgagctcatagattcttggcatggcagcttttattcttgtcattgcatattttacttgttgaacataaccactaaattcctgcccaagagtaagtggaacagcatcctgagtatgagtacgtccaatcttgatgatctgtgcaaactctttggattttgcatcaagagcatcatgtaacttctgtagtcctggtaacagtacttcatgaacttctattgcagcagcaatgtgcattgctgtgggaaaagtatcatttgagctctggcttttattaacatgatcgttgggatgcacaggtatcttgctgccaagttcacctcctaacatttcaattgctctattgctaatgacttcatttacattcatatttgtctgagttcctgatccagtctgccataccacgagaggaaaatgatcatttaatttaccttcagctacctcatctgctgccttcattattgcattagcaatctttggatcaagaccataatcctggtttacttcagcggccgctcgcttcaagatgccaaaagctttaataactggggttggcatgcgttctgtcacacctccaatcttaaagttcatcgtagatctcacggtctgggcgccataatacttatcatttggcacctttagttcaccaaaggtatcatattctatccggaaggaattttggcttgccattcgagccgcgttcggaggccaaaacgagggcacggccgcgccacccaagccgggagccgaagctaaggctgcggctggagcccgcacgaggggacgcgagcgcgcgaggagccgaagtgctcggtacatggtgctgagggagcttgggtagaattcctcgtgccggaatcgccacccaggcctcgctacgggtgggtggttcggtgtagggggtaagaaaaagatgaagacaacga

SEQ ID NO: 134303 - DNA, 511 bp, Homo Sapiens
aaatgtaatctgagcacttttttgtattctaaaagatagatgatatcagataaatatgttgtacatttgattaaaattatttagataaatattactatgttgacttttaaatagctttatcctatttttcattcattttgcaaatatttgttgtgtgtagtttcttaacgtgtcagaatctattatgtaaaagaacctttccagatttctgaacagtatatgctttgattttataggctttatattatttcagtatgaataaagataaggaatatgaaacagttaactaaaatgtatctgtcgttgctaacttgaaaaatgaagtagaaacagttggaaaatgtttgaattagaagttattcaagtgcacactcttttctaaaagaatgccaatgactataaggcaaaagaagtttgactgcatgtggtattttttgctcttgtatatgctttttgaacaaagctatttgataaaagcctgaatggaaaaaataaagctgtttctatctgc

SEQ ID NO: 134304 - DNA, 812 bp, Homo Sapiens
  misc_feature (473)..(473): n is a, c, g, or t
  misc_feature (539)..(539): n is a, c, g, or t
  misc_feature (568)..(568): n is a, c, g, or t
  misc_feature (572)..(572): n is a, c, g, or t
  misc_feature (589)..(589): n is a, c, g, or t
  misc_feature (613)..(613): n is a, c, g, or t
  misc_feature (616)..(616): n is a, c, g, or t
  misc_feature (623)..(623): n is a, c, g, or t
  misc_feature (629)..(630): n is a, c, g, or t
  misc_feature (665)..(665): n is a, c, g, or t
  misc_feature (692)..(692): n is a, c, g, or t
  misc_feature (702)..(702): n is a, c, g, or t
cagggataatgtatatttaataaaacttaaacagttgtgaggatcaaataaaattagattatgtatgcatgagaaccaactaatatatgaaaatgttattatttatagtattttcattgaagtaatacaatttttcagtcatctaacaatgtattcctggaaccagatcatgactctccttatggttaatctttattgagtgtttattatgtattggcttttggctatttatttaaatctcaacaaaaatccaatgggataagtactattagtatcattttacagatgaaattgagacctaaaacagagcagcaatttgggttaacagaaatagagctccactgagaattaggagacctgaatttcttgtcttgacctgcaagctgtgggaaagtctttaactcctctattgctattattaaataccagtaacaacttctcggcttacttcacaaagctcttgtgatgatcanatgaaataatgtgaaaccggtttatcaacctagagtattaatgttattccgtggaaaattacatanacacacatatctttggaaagggtatttanacanagtttgtagacagatanataacattatgctaagtctttcangtnttttcantgtccnntacttaatagtttagatactttattcaaaatttanagtcctcgtgcgattctggctcgaggncaattcctanaggagtctataaatcgtatcagtcaagtgtttctgtgtgatgtatcgctcaatcaacacaacagcggacaaatgtagctgggtgcagatgacatcaatatgctgcgtcgc

SEQ ID NO: 134305 - DNA, 1783 bp, Homo Sapiens
gatatgaaacaaagttttaatttttattttacatatttatacataaaactttcaaggaaccctctgaatccaacagaatgttaatagcacatctaaaaaggaacttcaggtagtcaacattcacaaaatgttgaaaactgagtaaaatatacatattacggagagctacaacttcactacgaggcaggcatgtattttttgacttgtatagcaccgtcatttacagttcttctttaaaactacagtgaagaatgaaaagtagtcaatgggaaaatactgttccaacttaaaatctctaaacaaataaaaataaagttaaaactactctcttttattaaccatgatttgtggtggtgtcagtactgtacattttttgtaacaatattttattaaaatgcctgatattaagtggcacaagtaaaaaattaaaataaattaagaagcaaaggccaatcactggacattaagcttcagacattatcaatgactaacactgatatttgtttctgcgccacctttagcaacagcatttttacaaccacagaagcaaaataaattctagcttgttctctggttgaatggcttcttttcactttgcaggcattttctctgccatgtgcttctgctgactttcagcatgtctggtcaagtcttcaatgtccaccagcatggcatcctgctctgtgtgcagctcatctcggatgagaagcagctggaccaactcttcattcaagctttctatctgggaatggagatcattgactatcacttgtagctgcccaatagtcatgtctctcaggtcggtggtttttaaacttcttttcatcaagcattcacttatatgaggcatgtgtggcagaagatcagcgacgggagactttttcctgttctgtttctccacttctacttgcattttggccattggtttggccatggcaagggccattttggcttcagcttgcaatttcttttgcccttgtaaggaagtccatgtcatccaaggattcagactcctcttcagtagtgtctctatcagaataggaagaactctgtttgctcatgggagacaagggggtgtccaagctggtttcagtcttactgtcatcagcatcactgtccttatcactgccactgtcgttgacaaagcatatctgcaagttcatcccactctgcagtcgggaggaaaggcttggcttcccacttttgctacagctggtataaattcctgggccatcatcaaagaagcttccaagtgccaacttctgtctgatagactctctctcatttttctgtgcctttttataattcccctccatatccaatgaggattcttgactgatgatgtcatccattccatcactgtccaaattcatcctttaactctttagaatttcacttaagaaataacctcccatgaattctgataggctgatgtgccaattgcccagttccctggttactgctcatactgacatggagagctggctaagaggctgtgcccggccgtgtgtgttcttgccccactctgtcccacagacactgccccgcccagcctccctggcctttccttgctctggcaccgggcagctgctgttttctgaggctcactctgcccctgacacttggcttgctgactccggccttcccaccatctgctgtcaccttcccctgaatgatcccgccccaattcctctccacagcacctttcctgttcccaagaaaggaaaagagaggcactcagcttcagccagctgattcaactccgcgttcagggccgagtgtg

SEQ ID NO: 134306 - DNA, 1019 bp, Homo Sapiens
  misc_feature (165)..(182): n is a, c, g, or t
  misc_feature (213)..(848): n is a, c, g, or t
  misc_feature (873)..(873): n is a, c, g, or t
  misc_feature (942)..(942): n is a, c, g, or t
  misc_feature (962)..(962): n is a, c, g, or t
atcaaagctaaaatttatttggtgcatactcctcttgatatcaggtatgttcgcatatacctttttctttcatgtgtaaaaacaaccatgtgaggtattttacaggtcaaaagaaaacaaaaactacttccttattcagtgtaaaggaggcttataagcattccnnnnnnnnnnnnnnnnnngcctacagccgcgcctcgtgccgaattcttnnnnnnnnnnnnnnnnnnnnnnnnnnnnnnnnnnnnnnnnnnnnnnnnnnnnnnnnnnnnnnnnnnnnnnnnnnnnnnnnnnnnnnnnnnnnnnnnnnnnnnnnnnnnnnnnnnnnnnnnnnnnnnnnnnnnnnnnnnnnnnnnnnnnnnnnnnnnnnnnnnnnnnnnnnnnnnnnnnnnnnnnnnnnnnnnnnnnnnnnnnnnnnnnnnnnnnnnnnnnnnnnnnnnnnnnnnnnnnnnnnnnnnnnnnnnnnnnnnnnnnnnnnnnnnnnnnnnnnnnnnnnnnnnnnnnnnnnnnnnnnnnnnnnnnnnnnnnnnnnnnnnnnnnnnnnnnnnnnnnnnnnnnnnnnnnnnnnnnnnnnnnnnnnnnnnnnnnnnnnnnnnnnnnnnnnnnnnnnnnnnnnnnnnnnnnnnnnnnnnnnnnnnnnnnnnnnnnnnnnnnnnnnnnnnnnnnnnnnnnnnnnnnnnnnnnnnnnnnnnnnnnnnnnnnnnnnnnnnnnnnnnnnnnnnnnnnnnnnnnnnnnnnnnnnnnnnnnnnnnnnnnnnnnnnnnnnnnnnnnnnnnnnnnnnnnnnnnnnnnnnnnnnnnnnnnnnnnnnnnnnnnnnnnnnnnnnnnnnnnnnnnnnnnnnnnnnnnctcagcgtagtatccagtcggtgtngtcgtcgctcagctggctgtgtgagaccccgttagccgacgctggctatcggtactacgctgatcaccngtagaacactacgcatgcanagcatgtacagatacaagcagagtagcggctcaatctgaatgggcacacgtaacaag

SEQ ID NO: 134307 - DNA, 314 bp, Homo Sapiens
gaagggtggtgaatatggaggattttactgagcagtggaagtggctctcagcaggatggggagctggaacagggatggagtggaaaggcagtcttctcccagagttcagctgtccctggcggaactcttctctgaagtctcgctgtcaagccatccctctgaagtcaaactgcttctctccgacacctggctgctgcttctcttttctccttctctgctgctccactctgccactgtgccacccctctgccaacagagcctggggtttttataggtaaaagatgggggctgggggcaggccagaaagcaacatt

SEQ ID NO: 134308 - DNA, 943 bp, Homo Sapiens
  misc_feature (251)..(259): n is a, c, g, or t
  misc_feature (819)..(853): n is a, c, g, or t
  misc_feature (857)..(899): n is a, c, g, or t
tttgtttgcaaggttgtttattgacttccataatttatcaatttccataatagatataggcctattcagatcatctcttttccctgtgtgagttttggttgtttgtgtctttcaagaaattgatctgtttcacctaagctgtcaaatctgtgggtacagagttgctcataatattcttttgttatctttttaatgtccttgggatcagtagtgatgacccctttctcatttctgttatcagcaatctgtgnnnnnnnnncttagttagcttagctagaggtttatacattttactgacctgtgaaagtactgtttttatttcttttttctattgctgctgcacaaattagcacatttttacttcactgaatttttctattggtttcttgttttctattttattgatttctactataatttttatttctatccttttgcttgctttaggcttacactgatctttcttctctagtttcctaagatggaaacttagattatgaattttaaatctttttaatctcgttctaatataggcattcaatagttataatttatctccaaccactactttcactgcttcctataaattttgatacattgtattttcatttttatttagttcaaaacattggttagaaagtttctgttcagacttcttcgtttgacccatctggtatctagaagtgttttgtttaatctccagttattttgagatttcccatctacgtttctgtttttgattttgtttaatttcctctgagagcacaccccggccgtaatggccgaattcccgggcatatgtccggtaccgtcgactgnnnnnnnnnnnnnnnnnnnnnnnnnnnnnnnnnnncggnnnnnnnnnnnnnnnnnnnnnnnnnnnnnnnnnnnnnnnnnnncgaaacggaagtctaaggcggctcgcttatttaggtgatgtcga

SEQ ID NO: 134309 - DNA, 1041 bp, Homo Sapiens
  misc_feature (451)..(957): n is a, c, g, or t
  misc_feature (986)..(986): n is a, c, g, or t
  misc_feature (1006)..(1006): n is a, c, g, or t
ttcattgtttacagaagacattttaatacacataggcacatttatattatatatgctacagctcaacagaagcacttgtttcccattcgagggctgccagatcagctgcctgttcacaacagcacagataagtgaagtttgaaattttaatatcagtgtttaatatcagtcagacacactgaatttgtaataaacaggaatcacagacagatagcaggaaacaggattttatgtagacaatacagggacaactgggtacagaaacaagcttgaagtgctttttgtgccttttcattctgcttttgaagagctaaagccttagcattactgcctcagccacaagcagcaacactggtccctactagctacattaatactctttcttcctacttattcttccatccaatctacaaaagctatgataatagaacatctagtggtttctggcctnnnnnnnnnnnnnnnnnnnnnnnnnnnnnnnnnnnnnnnnnnnnnnnnnnnnnnnnnnnnnnnnnnnnnnnnnnnnnnnnnnnnnnnnnnnnnnnnnnnnnnnnnnnnnnnnnnnnnnnnnnnnnnnnnnnnnnnnnnnnnnnnnnnnnnnnnnnnnnnnnnnnnnnnnnnnnnnnnnnnnnnnnnnnnnnnnnnnnnnnnnnnnnnnnnnnnnnnnnnnnnnnnnnnnnnnnnnnnnnnnnnnnnnnnnnnnnnnnnnnnnnnnnnnnnnnnnnnnnnnnnnnnnnnnnnnnnnnnnnnnnnnnnnnnnnnnnnnnnnnnnnnnnnnnnnnnnnnnnnnnnnnnnnnnnnnnnnnnnnnnnnnnnnnnnnnnnnnnnnnnnnnnnnnnnnnnnnnnnnnnnnnnnnnnnnnnnnnnnnnnnnnnnnnnnnnnnnnnnnnnnnnnnnnnnnnnnnnnnnnnnnnnnnnnnnnnnnnnnnnnnnnnnnnnnnnnnnnnnnnnnnnnnngtcagaggtgcgaaccggaaggactatangataccagcgtttcccctgnagctctcgtgcgtctctgttcgacctgcgctacgg

SEQ ID NO: 134310 - DNA, 1049 bp, Homo Sapiens
tttttactggttcaatggtccattctgtttattcagaacggtaacataaatacaccttaaatattaacattttttatatacagaaatgaccccactccccaaaaagtttgaaaaaatattgtctcctcctcctttataaaaccctagatgacctatgaaggcacagccaagcccttgatgcatcttcctcagcacaatttggccaacgctggagggaaggtcaaagaggtggaaggaaaatgttatgctgaaaatccctttccaacaagggtgccaagcgccggtcttgaacgaagtaccctgcctaagcatcatttcctaaagcgcttgaagagcgggtgtacatgtttgctgggcgccttgctccgcgatgagtggtactccatgtacacagtgtcgtcggccccagacatagaactcatggtgccaaagcgccgagatgcctggctggatctggagccaaattccccagccaccacctcctcctcggcatccaggtcagtggctgccaggactttctgtaagagctgctgttgctcttcttttgtcgaaaacgccaagtcttcctcctccatgccagcgagtttcgtgatcaccttgaagctataaccttgatctaccaagaatctctgccgcttggttgagtaagcatttcctgtgtgtcctgggataccagtgagtagaaaaagggcattgtactcttctgcaaccatcccttttttagctcgaagcacccgccctagcctttgggcttcctgacgcctggagccaccatgggatgagatctgaatgaggacatttgcttccggcagatcaaacgaagtgtcacctaccttggatatgaagatggtgttaattttggggttgtgcttgaaattctggagaatttgcatcctttccccctgagacgtaggtccgtagatatagggtttgttcagtcgaatggcatattcctttagggcaaacacattgtcagcaaagacaataatcttgtcattcctcctttcatgaaacttgatcagaaacttggcaagctctaaatttgtcct

SEQ ID NO: 134311 - DNA, 796 bp, Homo Sapiens
  misc_feature (182)..(257): n is a, c, g, or t
cgcgactggagtaagtgtatgccagatggatggaattagggtcaaagcagagaaaatgagatgtggatcgatacatggtacatggtagacagcgaagtgctgaaaatggcgactgagtctggaggaacttacggggggcttaggaccagaatggggaaatgggataaagaaatggaaatatnnnnnnnnnnnnnnnnnnnnnnnnnnnnnnnnnnnnnnnnnnnnnnnnnnnnnnnnnnnnnnnnnnnnnnnnnnnnagttaatatttagtctgtgctattgctgctctggtggtgtggttgatgttgctgcgtctatgtttgagggtgagaggggagcgtgcttgctttgaaatgaggatgtaaatttggcaatcatattttcagaaccccaaattgtaatacactattctagcctccttagatttcaactattctggtgccagaagcagatgggagctgaaggaatgatgaaggttgaagaaggggggcttttcttggtgtggggcagtactgcatttggcctgctctaccaagcatacgggagtagtaaagccacggctggcagaccatttggcatgcatgctcaggggccagtggataaagaattacttacagttcaaacactgtttgaactcagtgtcgggagtagttaaaggtatcgtgagaagttgcacacagctttggggactcttggaaaagaaagaggaagaaatgaggaagaggaagggtgtctacaaagggccagagaacaggatctcagatcagctgctgtaaccaggtttccccttgtggga

SEQ ID NO: 134312 - DNA, 1104 bp, Homo Sapiens
  misc_feature (453)..(1006): n is a, c, g, or t
  misc_feature (1029)..(1030): n is a, c, g, or t
  misc_feature (1043)..(1043): n is a, c, g, or t
  misc_feature (1065)..(1065): n is a, c, g, or t
  misc_feature (1074)..(1074): n is a, c, g, or t
ggagaaaaagctaaaagctgagcaggaagcccgaagttttgtagagaaacagttaatggaagagaaaaagaggaagaagttagaagaagccactgctgcccgggctgttgcgtttgctgctgcatctaggggagaatgcaccgaaaccttacggaatcggatcagagaactagaagcagagggcaagaagctcacgatggacatgaaggtgaaagaagaccaaatcagagaactagaactaaaagtccaggagcttcggaaatataaggaaaatgagaaggacactgaggtgttaatgtcagccctctcagccatgcaagacaaaacacagcacctggagaacagcttaagtgcagagatgagaatcaagctggacctgttctccgcactgggcgatgcaaagcggcagctcgagattgcccaaggacaaatcctcctcgtgccgaattcttnnnnnnnnnnnnnnnnnnnnnnnnnnnnnnnnnnnnnnnnnnnnnnnnnnnnnnnnnnnnnnnnnnnnnnnnnnnnnnnnnnnnnnnnnnnnnnnnnnnnnnnnnnnnnnnnnnnnnnnnnnnnnnnnnnnnnnnnnnnnnnnnnnnnnnnnnnnnnnnnnnnnnnnnnnnnnnnnnnnnnnnnnnnnnnnnnnnnnnnnnnnnnnnnnnnnnnnnnnnnnnnnnnnnnnnnnnnnnnnnnnnnnnnnnnnnnnnnnnnnnnnnnnnnnnnnnnnnnnnnnnnnnnnnnnnnnnnnnnnnnnnnnnnnnnnnnnnnnnnnnnnnnnnnnnnnnnnnnnnnnnnnnnnnnnnnnnnnnnnnnnnnnnnnnnnnnnnnnnnnnnnnnnnnnnnnnnnnnnnnnnnnnnnnnnnnnnnnnnnnnnnnnnnnnnnnnnnnnnnnnnnnnnnnnnnnnnnnnnnnnnnnnnnnnnnnnnnnnnnnnnnnnnnnnnnnnnnnnnnnnnnnnnnnnnnnnnnnnnnnnnnnnnnnnnnnnnnnnnnnnnnnnnnnnnnnnntcgtgcgctctctggtccgaccnntgcgctacggatnactgtccgcctttctccttcgngaagcgtgngcttctcatagtcacgctgtagtactcagt

SEQ ID NO: 134313 - DNA, 536 bp, Homo Sapiens
ttttacttgaaatccaagaatggttttaatgtgttggccgagaaaaataaactgtaaagttctgtgaggtcttctaaaaatttacaagaaaaactgatgggcagttctaatcagacttggatgttatcttttcccccctttttaaaaatgacaacagatacagttccacaaaatacaatagaaactgtttttttatcttgactgccagagacgctcctttgcaatgccttccggtaaccaaatttttgggcacaacacacagctggccttcatttcttcaggggctggtaaacagaggcattggggtcaagtccagaggggctggtctccacaaatttggaagagtagtggggggaaacagggctcagggggctggtggcggcactgtatgttatgctgggcatgacggccatgacttcggctatcttctgttttaggtccttgatttcctgatctttctgaaggatttgtccttgggcaatctcgagctgccgctttgcatcgcccagtgcggagaacaggtccagccctcgtgc

SEQ ID NO: 134314 - DNA, 826 bp, Homo Sapiens
  misc_feature (746)..(766): n is a, c, g, or t
aattctactgggcgaggaagaggaataattagactggtgtcccaatttgctctccccggtaatacacaacatccccccacaccatccagtacatacataccccgttatgcccctacgttaccttaaaaccaggaatcaaaaccttacaccgtcaaactgcaccaatacttcatattttgaccaaaaaaatatcctggagaggaagtgcagaatgcaaaatcaaatgaccgaaaaatgctgaacaaacagcattattaatatacgagatatttatattactgaactagtaacaggtgatgttctccatgtctgtaaaactttggaaccacatagctgatttgttaaatctagtccatgccagcttccgaaaaccaaacttttagttagcttcattctttgatgcctcatcaaaattttctacaagatctggaacatcatcatcttcctcatcaatgtcttctggttttggtgctttactgtccaagactcttcaataccagctatattattcacagccagtttttttagagaactctgaagctttttgtcatcagctgtggctgttctatgtaccaccttcttctttctgcgagctgtacccttgccccctatccggacctgagcctgaagtttggctaacttttcttgattcatgctgttggtaaatctgaagcagggagggtcctccaacaccagcacgcggcaagagaaagatggctgcctcagccgagacagagaaagacgannnnnnnnnnnnnnnnnnnnngagcagatcccccggccgtaatggccgaattcccgggcatatgtccggtaccgtcgactg

SEQ ID NO: 134315 - DNA, 865 bp, Homo Sapiens
gagtcgatctagatgatcccgacaggcatccctaaccagaaatcataaaacaaaacaccctcaaactgcaccaatacttcatattttgaccaaaaaaatatcctgggaggaagtgcaaaatgcaaaatcaaatgaccgaaaaatgctgaacaaacagcattattaatatacaaaatatttatattactgaactagtaacaggtgatgttctccatgtctgtaaaactttggaaccacatagctgatttgttaaatctagtccatgccagcttccaaaaaccaaacttttagttagcttcattctttgatgcctcatcaaaattttctacaagatctggaacatcatcatcttcctcatcaatgtcttctggttttggtgctttactgtccaagacttgccgtgggaactgttcagctaacttcctaaggcttgttaaactgtcagcaccaagctgacttaatattccaggaagcatttctgtgattggtttggcttctgcatgaccagtaattgcaaaggtattagcagaaagggaagcttggactttgggattgttgaaatgaataactgtcccatcatctttaatcatgttcacctcttcaataccagctatattattcacagccagtttttttagagaactctgaagctttttgtcatcagctgtggctgttctatgtaccaccttcttctttctgcgagctgtacccttgccccctatccggacctgagcctgaagtttggctaacttttcttgattcatgctgttggtaaatctgaagcagggagggtcctccaacaccagcacgcggcaagagaaagatggctgcctcagccgagacagagaaagacgacggcggcccc

SEQ ID NO: 134316 - DNA, 422 bp, Homo Sapiens
  misc_feature (213)..(225): n is a, c, g, or t
  misc_feature (298)..(311): n is a, c, g, or t
tcgcgaacgtgttatcctgattgcaatcaaaatagttacctgaagtttgctgttatgtgtgtatgtgtttacttttatgtatatttatttttctaaactctttggcacaattttctgggggcgttcagactgccacaatacaagtcaggagagggcgttttctttgtgctgccaattctgatcatttaaatttcggttagtttgggttgtgannnnnnnnnnnnngaagtctgcgttatttgtaacaattgtacttatatttttctatatcctctaacgccagagttttctttttctnnnnnnnnnnnnnnacttctacattcacagttgaaccatattattaggaaaggcgccttgatgaaaagatcaggataggagctctgaccattcgtcagtgttttccctagagtaaaaaaaacaaa

SEQ ID NO: 134317 - DNA, 445 bp, Homo Sapiens
  misc_feature (226)..(261): n is a, c, g, or t
tttgtttccaaatggttattttatcagattgtttgaacatttaattatcctgtttgcaatccaaaatagttacctgaagtttgctgttttgtgtgtatgtgtttacttttattgtatatttatttttctaaactctttggcacaattttctgggggcgttcagactgccacaatacaagtcaggagagggcgttttctttgtgctgccaattctgatcatttaaannnnnnnnnnnnnnnnnnnnnnnnnnnnnnnnnnnnaagtctgcgttatttgtaacaattgtacttatatttttctatatcctctaacgccagagttttctttttctcccccctcttcttcacttctacattcacagttgaaccatattattaggaaaggcgccttgatgaaaagatcaggataggagctctgaccattcgtcagtgttttccctagagt

SEQ ID NO: 134318 - DNA, 390 bp, Homo Sapiens
  misc_feature (307)..(342): n is a, c, g, or t
gttggttgcttttgaagtgcagccacagagctcccattccccacttgtagtccaatccaatataagcaccagaaggcccaccagtttccaaatggttattttatcagattgtttgaacatttaatttatcctgtttgcaatccaaaatagttacctgaagtttgctgttttgtgtgtatgtgtttacttttattgtatatttatttttctaaactctttggcacaattttctgggggcgttcagactgccacaatacaagtcaggagagggcgttttctttgtgctgccaattctgatcatttaaannnnnnnnnnnnnnnnnnnnnnnnnnnnnnnnnnnnaagtctgcgttatttgtaacaattgtacttatatttttctatatcctc

SEQ ID NO: 134319 - DNA, 1022 bp, Homo Sapiens
  misc_feature (812)..(812): n is a, c, g, or t
  misc_feature (831)..(831): n is a, c, g, or t
  misc_feature (848)..(848): n is a, c, g, or t
  misc_feature (875)..(875): n is a, c, g, or t
  misc_feature (901)..(902): n is a, c, g, or t
  misc_feature (915)..(915): n is a, c, g, or t
  misc_feature (927)..(927): n is a, c, g, or t
  misc_feature (956)..(956): n is a, c, g, or t
  misc_feature (970)..(970): n is a, c, g, or t
  misc_feature (974)..(975): n is a, c, g, or t
  misc_feature (980)..(980): n is a, c, g, or t
ttttttccttaaagaaagcactttattttccatttaaacaacttggtcacaggacgttattttacataaatggaagtaatttgtaaaatttccatgtaaaaggccttgtgtctgagtctgaggtgataagaggatatgaatacaagtatataaaaacagtgcaaaatgtgcagcccacagcctccggagttggcttcagaaatcccccttaatgttgctagaccagttacattaaatattaaatgtaacaccaggtaaatattcctgggtttcctttagtctaacatccaacccagatatgcaataaaatgaaaaactcaaaatccctaacaactcaaaccatccaatcacccagaccattaggatcacaatgagttgagactgcaggctctatactgtgacatctcgtcagtggctccatcttaagaaatacagaattttagttgcatcagtaactagaatagactagctctgcttttaaagctttgccttttaaatgtagatttctagaagttcactttcaaggtgccatcaagaaggctaggccactaagaagtcacaagcccaacctagacatcgcagcctcttaagacatttgtcttcactaaccgttcagtctttaacctgctgctgatcctacaatgaaaacacttagtgccagctgaagcgtggatgcttgtctatcagcaacataattaagtgtagctgattctgcaagaacttatattagtcacagcagacatccacaggaacatactgaatcgtactcagtagtgagtttaagatggctttcctgctcccctgcatcaccnttgcagtgtttaatacaanagggtgcacatgtcaangctgcgctgagaaaacagatccaacangtgctcaagaaaagtctctatatccnnttgctgctagcanctctactttcanatggaggtacagatatggtacataagtangtcaatactactangtannaaccntatccacaactgtatttaaatctgctaacctcggcgatctgg

SEQ ID NO: 134320 - DNA, 1042 bp, Homo Sapiens
  misc_feature (384)..(801): n is a, c, g, or t
  misc_feature (811)..(811): n is a, c, g, or t
  misc_feature (836)..(836): n is a, c, g, or t
  misc_feature (859)..(859): n is a, c, g, or t
  misc_feature (861)..(861): n is a, c, g, or t
  misc_feature (967)..(967): n is a, c, g, or t
tttaacgggaagccaaggtaacaagacctagcgtttattgagcacttactatgtgccaggcaaggttctaatgccttacagtacatatttactaacctatttcgtcccaacagtcactctattcagacaggtattgccccagataagagaaacggaacagaagcagcttgtccaagatcacacagcagagctgattccagtgcctgcgctatatactattacatcctcttagtcactgaattcttctgattaatttgggaacatttcctgccacaaacgagtgagtcaagaggtagctaaagcatggcactgattattcaaattgaggtgctcaccatgcttctagaaccatggatatgagatggccctcgtgccgaattcttnnnnnnnnnnnnnnnnnnnnnnnnnnnnnnnnnnnnnnnnnnnnnnnnnnnnnnnnnnnnnnnnnnnnnnnnnnnnnnnnnnnnnnnnnnnnnnnnnnnnnnnnnnnnnnnnnnnnnnnnnnnnnnnnnnnnnnnnnnnnnnnnnnnnnnnnnnnnnnnnnnnnnnnnnnnnnnnnnnnnnnnnnnnnnnnnnnnnnnnnnnnnnnnnnnnnnnnnnnnnnnnnnnnnnnnnnnnnnnnnnnnnnnnnnnnnnnnnnnnnnnnnnnnnnnnnnnnnnnnnnnnnnnnnnnnnnnnnnnnnnnnnnnnnnnnnnnnnnnnnnnnnnnnnnnnnnnnnnnnnnnnnnnnnnnnnnnnnnnnnnnnnnnnnnnnnnnnnnnnnnnnnnnnnnnnnnnnnnnnnnnnnnnnnnnnnnnnnnnaggaacgtanaaggcgcgtgctggcgttttcatangtccgccccctgacgagcatcananatcgacgctcagtcagaggggcgaaccgacagacataagaacaggcttccccctggactcctcgtggtctctgttcgacctgcgctacggtactgtcgcttccccntcggacgtggctcccaagtcagcgagtaccatcgggtagtctcgccactggtgttgacacccgtaacgacgggcg

SEQ ID NO: 134321 - DNA, 383 bp, Homo Sapiens
caaggggaaactggggcagttttattgacgatggcaatgtacaagactccacacctaggtatgtgcacgaggtaaggcctgagctcaggctttatgatcctcctcaggacccttgggggcaaacttctcctgcagtttcttccacatgcctttatctatttccttaagctcttccaaggtgtctgcaaaaggggaagacaaaaagagagagggactgaagtctaaaacttgatgacatagattggacccactgggctttcccgacacaagcatggcttgcttttcacacagtgtgttcctgaaaaaggtggagacccagctcctgaagagcagatcaaacaggtaacagaagtgaccgcttgcggggactgagcactgtgtgc

SEQ ID NO: 134322 - DNA, 994 bp, Homo Sapiens
  misc_feature (89)..(136): n is a, c, g, or t
  misc_feature (421)..(474): n is a, c, g, or t
  misc_feature (477)..(482): n is a, c, g, or t
ggggataataaatttttccacgaaaccccatcctctccggaaaggcaaaatttttctcaagcccgccaaagccatttggccgtgtttgnnnnnnnnnnnnnnnnnnnnnnnnnnnnnnnnnnnnnnnnnnnnnnnncagggactttaaaattctccggaagggaagtgtttgtcccaattatggtccacccccccaaggaagttaaagggttcctttcccacaaagattccccaaaggtagccaggtttttcccaagttcccgggcggttgttaaaaaggcccgggcccagggcccctagagtttattaatacgcgactccccctatagggggcccacctttgtaccaaagaaaaggctggggttacggcgtaagccttggggcccccttgaaggggatactttaggagcggccgcccccnnnnnnnnnnnnnnnnnnnnnnnnnnnnnnnnnnnnnnnnnnnnnnnnnnnnnnttnnnnnntttcaaggggaaactggggcagttttattgacgatggcaatgtacaagactccacacctaggtatgtgcacgaggtaaggcctgagctcaggccttatgatcctcctcaggacccttgggggcaaacttctcctgcagtttcttccacatgcctttatctatttccttaagctcttccaaggtgtctgtggacaggatcagcttgtactcttccaacgacaggccactgaagctggtgtctctggggcgagggtacttgtgtttgtagtagtttgaatggagtcgcgctaagctctcgtacatctgatcacaggcctcaggctctgcaacctgggtattctctccctcccgaaaggcctgtgctacccgctgtcgcaggtaagcgcccaagtcccggccccgtttggtctcgtccactggccattcctcacagagcttaagaaaacgccggtaccggctggccgccatcttgggccccgcgtgttcccgccttagcgggaggagtcggcccc

SEQ ID NO: 134323 - DNA, 1159 bp, Homo Sapiens
  misc_feature (1050)..(1084): n is a, c, g, or t
ttttttttctctgtaattctttattaaaaatactgctgtacacatagagactgaaaacaggattaaagatgaataacacaaattgggtcatgacattagaacctaacacactggtgctttttagggaagttgttgacatccaaatcacagaaccaaggtcaaaagcaaaatacaaaggtaccctcaaaaatatttacaatgaagtaaatacactaacagaatttaaaacaggtacaaaatattgaaatgaccaacgttacatgatttcaagggttgtcctttctgtgcttttatctgtcacgacaggaaggtgtggaaagtttatatccttaatttgactactcttggatattaaaatctttctattaattaaaaagacttttagacaacctcttaaatggaattacactatggaaaacagggctcccccaaaaacacctaggcagaactgagagttctttgaaaaccattcccaataaaaactaaatgaaaaataaatataagacaaagcttaaaaatatatgcattacctgacaccaaccttttctggctgacaatatttattcatgaaaacatatcagctgtctaccttttatatgcaaaccaagtcctgaggttaactaggggctgaagcaaactagcatttaggatgcaaacattcttggatttgtgatgtaaacttgccttgcacagggaagtttgctggtctatacagaatgagaaattcaagccctattttaacccctgccctctttagctttcacaaaacattggtccacaaattaaattttcaaaaagttcccagaccccaaaactaaaatagatgatcccctttcattttcaaagaaaacaatattggaaaaaatctccagcccgcttataaattaagcatttcatatttcttctagaatacaagtagttcttttttgtacaaaagaatacaatatgatttgtcaaaaaaacatataaaaagacagctgctcttcctcaaatacatgacccggccgtaatggccgaattcccgggcatatgtccggtaccgtcgactgnnnnnnnnnnnnnnnnnnnnnnnnnnnnnnnnnnncggccgcttcctcgctcaaataactcgctgcgctcgtcgttcgatatacgcggagcgcccataggagtcagtgat

SEQ ID NO: 134324 - DNA, 560 bp, Homo Sapiens
  misc_feature (257)..(301): n is a, c, g, or t
tggaccaatgttttgtgaaagctaaagagggcaggggttaaaatagggcttgaatttctcattctgtatagaccagcaaacttccctgtgcaaggcaagtttacatcacaaatccaagaatgtttgcatcctaaatgctagtttgcttcagcccctagttaacctcaggacttggtttgcatataaaaggtagacagctgatatgttttcatgaataaatattgtcagccagaaaaggttggtgtcaggtaatgcannnnnnnnnnnnnnnnnnnnnnnnnnnnnnnnnnnnnnnnnnnnnattgggaatggttttcaaagaactctcagttctgcctaggtgtttttgggggagccctgttttccatagtgtaattccatttaagaggttgtctaaaagtctttttaattaatagaaagattttaatatccaagagtagtcagattaaggatataaacgatataaactttccacaccttcctgtcgtgacagataaaagcacagaaaggacaacccttgaaatcatgtaacgttggtcatttcaatattttgtacctgt

SEQ ID NO: 134325 - DNA, 805 bp, Homo Sapiens
ggcatacatagaaatgattttttatttactttgatgattagggaaagataccaacatagctttcatcaaagctaacaaataactttactggcagttaactaattttattagactaaagacatgtctgtttaaactgaaacaactggccctttgctttggctgggaccttgggaatcacggccaaggtgctgatcagaaaagagtcaccattacatcaacctcctccccagcacacagcacagagatgccacgaaggccccataggtccctagaagagcagctggggctccacctaccgagtcccagtggcttattttgaaaagatttgctttccacaggtaaggtgtcgcccgagtacatttcttgagactgccattggctcatcctgcatatgaggtagttctctttgcattttgcagatgctctcacttgcccagggggtggatgtcacgaatccgaaacctctggcttcacattcctactgggaatgcccccccagcccgcagtcacaagtcagtctccaatcctgctgcagactctttagctcttcaaatccaaacagatgttttcttcacccacaggtttaggttttaactggctgctcagtgttaaaaaggaatatctcaagccccctgccatgcaaatatttaaccctacaaagtttaacaaagagaaaatgtagtctccaccgattaatatcccaatgtaggcaacggatacattcttgatggctccaaccactgctgtcgtcagggctgaattgtaatagctgcacagaaccgtggagtacatcagcagaaacccc

SEQ ID NO: 134326 - DNA, 1194 bp, Homo Sapiens
  misc_feature (305)..(305): n is a, c, g, or t
  misc_feature (1045)..(1096): n is a, c, g, or t
gcagaagtccgatgaagcgcatgggcaccattattggtgtcatcatggcccccggtttaattatgtccgctgtatgtggtggattgagcgatacatttacacaggaccagcttgactgatccggattaatagactcacttagggatttgccttcgagcccaagaatcggcacgagtgagtcagaaagtcatttccccttgagggagtctgacttgaatggagaattgtctttcctctcttgaatcagctcattagctccatgatggtctgggttcaaggaaatggttaatgaggtagaggccacntatacaagtccttgggattgtaccattgctgtccacaaacttagtatcaacaacacatgctgtgccctgtgaacactctcctctcacctatttccagggttggtcttcctgagaaggggatggatgaggtaacacacagtttgggatacgtatctgttgaatgaatgaataagtgaaaggataatagtcctctgaggtaaaaatggccttgtcagaattttgaaaatccaacagattcctattaaagcactctgtgtaccaataacatgcatgcattgtaccaagtaatcacaatgtgaattggtcaatttatgagccttgcctactttagaaaataaagaaacctgcagtagcctctaccacacagcatgtacaaagaccagtatggacttgctatcttccctatgtattggacactgtatgcaaacaccagaagtacttaacaagtagtggtttcttgatttttagatatgtctgtagcctcttagcccttttgccgggaatcaactcattctgatgcctctgcacctcagttcctcttacaaaagcctccagatgatctaaatctagttagcaatgtcagcctgtggactgcagctgtttgggacattgtattcctttgtttgtctcttgttgttctgaaggattgtattgatcacaaagctatatgcataaagattctcattgttgtaactgttctgccattttctgagtgcaagcatggaacactgttgtgacannnnnnnnnnnnnnnnnnnnnnnnnnnnnnnnnnnnnnnnnnnnnnnnnnnnggtcacatgaaccagggaaacagcccaataagctctatctcccccagtctaatcgctgggttgcagggtggcctgtgacctgcccagcatttgcagac

SEQ ID NO: 134327 - DNA, 670 bp, Homo Sapiens
ttttttaccttgggagagcaggctttatttgcatcccccaggacagatctggggagggagtcgggggatttggggttgaggacatggccaggctcaggtcctgggaccccgaccccctccccaaccccaggactcagctggagttggaggctgggcataggcagctctgggtgaaggtcagcatctactccacacccttcatgaactccaggaactcatcatagtcgatgcggccgtcgttgttcttgtctccgtccttcatgagctcctcgatgtcgtcctccgtgatggtctcgcctgtagcctgcagcattatcttcagctcatccaggtcgatgtagccatcagcatttttgtcaaacatgcggaagaggtcagacagctcctcctcagatttccctttgctgtcgtccttcatgcaccgaaccatcatgaccaggaactcatcaaagtccaccgtgccgctgccgtcctcgtccacctcatcgatcatctcctgcagctcctcaggggtggggttctggcccagcatcctcatcaccttgcccagctccttggtgctgatgcagccatcctcagcgcccagcacgaagatgtcgaaggctgccttgaactcatttttctgctcttctgtcgaggctctaccgcagccttgtagatgtcatccaat

SEQ ID NO: 134328 - DNA, 1028 bp, Homo Sapiens
  misc_feature (478)..(525): n is a, c, g, or t
  misc_feature (596)..(604): n is a, c, g, or t
  misc_feature (630)..(630): n is a, c, g, or t
  misc_feature (644)..(644): n is a, c, g, or t
  misc_feature (646)..(646): n is a, c, g, or t
  misc_feature (689)..(689): n is a, c, g, or t
  misc_feature (810)..(810): n is a, c, g, or t
  misc_feature (814)..(814): n is a, c, g, or t
  misc_feature (826)..(826): n is a, c, g, or t
  misc_feature (843)..(843): n is a, c, g, or t
  misc_feature (907)..(907): n is a, c, g, or t
  misc_feature (958)..(958): n is a, c, g, or t
tttttgagatggagtctcactctgtcaccttagaaactattctaagcatgcctggtttctgtaacttaaatatggcataaaaacctgtttcctttgaattcacttgatagcagtagtcaaacactaataatgcttgctaatttcctctcactttcttaagaaagcccctatatttagcctctgcctccatgtcgcatgtggtggttaggtgacagcataagtacactagtggctttagcactaaactcgaggcctgggtcacttctcccctgaagaagaaaggtttaaaaattcctaaatcacaatgtagaactaagttacaccctacctcagaactgcagatattaaaataccatctctttattaagtgtctctacaataaggatatttgctaagatcaagatgtacaattttttgggttctgttttgttttggtaaatattgcccacgtctttttagtttgcttcaaacatttacnnnnnnnnnnnnnnnnnnnnnnnnnnnnnnnnnnnnnnnnnnnnnnnntactcaaaacaaatttaagctgaagatatatactgtataaagtgcttcatctacctaattctctgaagtcnnnnnnnnnctgtgttttaagactttatcattganaaaagaagaattananaagggaggtgggggggacaggagggtgaaaggaatctctccanaatgtcagattcggggcgacctccttccctgactgcccagccacctgtcccttctctggtctggcggcgaggcctagctgcatcttctggggaccagggccaggagccatctcgggtccangcanaggtgatggcanagcgggctcagggctgnaggggctgcgtgttttgagagccttgggtggcatcaggccccagtcccacaggcctaggaggtngcgttagggagagcttggagtgggtctcctgcgatctggcccaggcaatcntaatgatcgatattcgacagtcaacgttctgtggatgtacgccaattcacaaaacagcggagaaggagcg

SEQ ID NO: 134329 - DNA, 2159 bp, Homo Sapiens
ttttgagatggaaaataggatttattgggggaaccgtacaagcagaggagaagcaggggtgcccaggctgtcacagccttgcagtgcatggtgggttccgtggccaacttgccaggggacaggcctgttgctggcactccccccacaattacagggtgggagtgaaggacctcgcggctgcggacaggtccttgttagtaaggaggaggctctgcagtcccggtggggtcatcttgcctctccggactgctccctctgactggtgaagccacactctgtgaagctgtctgacagaaggggacacgcctttgctgcccaggatggacctgggccacccaggatgccgctggcctcagccagggcacgtgtgcccagcgctggctcctgctgacccctggactggctcccatctcgggaatgacgcctgccgtgggaatcgtggagagggggtttaatttaacttggaaggagcacagaaaggaaagtgtggagtgcggagcgaggcctctggtttggccggctccggttgctggggatggccacaccctggcagcaggcggccagagaccaggaaggcctacccagcacctgtccagaaaagattggtgtgggttgacctggcctatgcggggcagctcagtttgaagcaggaacttccccaaacgtgcccaggctccaagacagcagcattcactttgcaccgtgctgagcagagcggggcctcgccaggtggaaagccctaggaaggctgcgtgctctgcaaacccaggggtgctgtggccgtacagcaggggcgtccgtgtccaggcagctttgtcatgtcttccaaaggtcaggaaggcgccaccgccctgccccacgacagctgcgtctgcaagtgccagctctgagcactgttctccgccgacatgaggacaccatccaagaattcctcctgggagacctcctgaggagacgcgaagaccatcgatgctttggaagaatgaaaagaagtttctgctaagccaaacctaggtggatgggaagtgcctgtgtggatgtgaagccaccttgggtgggcggctcggagctcctctgcccacatcgcctcactgggactcgccatccagtctgacgtctttgatgtccccataaatctgctggctttcaggagaacacgtcttgaagcacagctgaacttgaatcttttctgggtcctcctgctgggccgtggtggggagccgctcccgttgcctcaaggcctccaggcctgccaggtcaggctgatggcagtggctgcgcatgaccatgatgcggtggccctgggttatggcgcggctgcggcagcccagccgagcctggtcccggcacatccagtacaccttctccccagccgccttctccttcctgtagaggaaggactcgtgcaccaggaacctgccccccagggaagtcctcaggaactccaggggccggagaggatctgggctgtcccactgcgccaggttggggaagtgctcccgctgccgcagggcctccaggccgcccaggtccggtgggtggcagtgcctgcgcatgaccatgacccgccggccctgggtgatggcgcggctgcggcagcccatgcgggcctggtcccggcaggtccaatacaccttctccccggccgccttctcccgccggtagaggaaggactcgtacaccaggaagctgccccccaggggcgtcttcaggaactcggggcctcctgggctcccccgctgcgccgtgttggggcgtttctcccgctgcctcagggcctccaggcctcccaggtcgggcgggtggcagtgaccacgcatgacagtcacccgtcggcctgggtgatggcgcggctgcggcagcccatgcgggcctggtcccggcaggtccaatacaccttctccccagccgccttctcccgccggtagaggaaggactcgtacaccaggaagctgccccccaggggcgtcttcaggaactcagggcctcccgggtctgcgtccatgtcctggtgctcgtctggggcctcgggctgggttggcagctcctggtcttcgacctttgctcgctttctgggccgaggcctggtgagagtcaggggacccgacccctgcggtagacaactatcctcgtgccgattacacacccgcctctactga

SEQ ID NO: 134330 - DNA, 1691 bp, Homo Sapiens
  misc_feature (1086)..(1517): n is a, c, g, or t
  misc_feature (1540)..(1540): n is a, c, g, or t
tttttaaataaaagcatttactcaattattataaaacaacatatttaaaaagatgaaccacaccaaaggtcatcaaaacacctttttataaattagataattctacctgttttacaatatgggtttaagccttcaatggtgttcagttcaggtgtgagtcagctcctggtggtgtcagaagtttacatgattgcggatatcattgatttgcttcaccatttcccttatatgttcaccctcctctttcaggatggactgaatgcactttcgctggtaggcactgagaataatggtgggttttggaagactcaacaccttctccatcttttgctgttgataatcctttttcatagtaacctgtttgatggcattgcccaaatgtcgaagttgatcaggtatcagctgtaattctttcttcatgtctcgctcactatcagagagaactgggagctcagagtgaaaactgtgaagtagttttttcatcctgttcatgatatcctcttgtttttctttagcttcctcatatttgtcagctaaacgctcagccatttcccgcagacttttcctctcttctcgacaataactgagatcttctagttgtttctttttttggtcacataataatttgaccctccgctgaatctcctcctttgccaagtcctgtttgagaatgtactgctctctgaacacctgggtggctctgctgaggagctgaaggcattcttcaggaggaggggctatgtccttttcagaagctttcaaaaatgctggattggcaacactacgttgcaaaatgcttctaatatgcttttcaaaggaatctggggtttcagccagaacacggaggggagactctgccacttcaacatcttctcgagtacaaagcaggggaggagacgctggatggactgtacttaataacggccatatgaggcattcataggtactggtgatgcagatcatcgtgggtcccagaatgtcaggtacaatccaaaatcctcgaattggagcaggctgcctgcagggcaatggcttcgtacaaaggatgtgttcaacaaagcatttctgcctcgtgccgaattcttnnnnnnnnnnnnnnnnnnnnnnnnnnnnnnnnnnnnnnnnnnnnnnnnnnnnnnnnnnnnnnnnnnnnnnnnnnnnnnnnnnnnnnnnnnnnnnnnnnnnnnnnnnnnnnnnnnnnnnnnnnnnnnnnnnnnnnnnnnnnnnnnnnnnnnnnnnnnnnnnnnnnnnnnnnnnnnnnnnnnnnnnnnnnnnnnnnnnnnnnnnnnnnnnnnnnnnnnnnnnnnnnnnnnnnnnnnnnnnnnnnnnnnnnnnnnnnnnnnnnnnnnnnnnnnnnnnnnnnnnnnnnnnnnnnnnnnnnnnnnnnnnnnnnnnnnnnnnnnnnnnnnnnnnnnnnnnnnnnnnnnnnnnnnnnnnnnnnnnnnnnnnnnnnnnnnnnnnnnnnnnnnnnnnnnnnnnnnnnnnnnnnnnnnnnnnnnnnnnnnnnnnnnnnnnnnggcgcgtgctggcgttttcatangtcgccccctgagagcataaaaatcgagtcagtcaaagtgggaaccgacagacaaagatacaggttccctggagtcctctggtccctgtcgactgcgctacggactgtcgctttcctcggaagggggcttccaatcaccgtggaccattgg

SEQ ID NO: 134331 - DNA, 430 bp, Homo Sapiens
agatgtttcaacattaccagtttaaattcttaagaatccatataaatggtttattataattccaaaagtgagtgactttacaattttacaggggtgaacatataagggaaatggtgaagcaaatcaatgatatccgcaatcatgtaaacttctgacaccaccaggagctgactcacacctgaactgaacaccattgaaggcttaaacccatattgtaaaacaggtagaattatctaatttataaaaaggtgttttgatgacctttggtgtggttcatctttttaaatatgttgttttataataattgagtaaatgcttttatttaaaatttggaatgtgctttataactcaagcctacagttgtgttcagcaaggactcaggattatttcacactgcacactgccagaacctccctgaaccctattgagt

SEQ ID NO: 134332 - DNA, 977 bp, Homo Sapiens
  misc_feature (642)..(642): n is a, c, g, or t
  misc_feature (719)..(719): n is a, c, g, or t
  misc_feature (750)..(750): n is a, c, g, or t
  misc_feature (782)..(782): n is a, c, g, or t
  misc_feature (787)..(787): n is a, c, g, or t
  misc_feature (792)..(792): n is a, c, g, or t
  misc_feature (808)..(808): n is a, c, g, or t
  misc_feature (818)..(818): n is a, c, g, or t
gttttgcaaccacccatcaataaactttcttttttattattaagtgggggcagggtttctgttcttgcaactgagtcctaacagaaaacaatggtttcgctgaccacacggagagctgaggacaggacaaaaaggcatgagacagctggacacctggagagaggtgacacaggacagagtcctcacccggctgccctgggcctcggggagctcaggctgcagtccctgggcctggtggcacccacagcacggcagtctctggctgggcttcggggagcccacatgtctgatcggcagggcttggctggccaggcggtgggcaccagcgtggtgggtgggcagtcctgggcttccaggaggcctcctgggactcaggctcttcagtggggtgtgcctgtcagggtgcaggtgggttctgtggctacactcccatcctgtcttccctctgtgttcccaaacctgctctggtccctagatgtctggagacctggggtcgtccagctcaggaggccatctggagctgccgctgcagcctgcagagtgtaaggtggcgtttgttaccaagacctgtgggtgttctggggcttcctgaagggaaaggcattacctgcagtgaagccataaggacacagtgtccagcanaaaggcactgggagtccagaaagagccactccccaccgctgcacctgccaccatgggatgggggtccggagccctgngcagcttctggagctgcctcttgggggctgngcagtggagctggcttgggaagatgtctgcangcggnggtcnctgtggagggcaacangcaccccganggtaaactcacgcgctgggcatcgcgtcctgtgcctcctgtctcgtcgagtcacgtcactcactgacctcgcaatgggcgggcagtggctggtgctgggaccgcgctgtctcgctctctgcgtgtggcgcattccgtacaagtgaacccacgctgggaa

SEQ ID NO: 134333 - DNA, 1123 bp, Homo Sapiens
  misc_feature (66)..(91): n is a, c, g, or t
  misc_feature (842)..(842): n is a, c, g, or t
  misc_feature (856)..(856): n is a, c, g, or t
  misc_feature (872)..(872): n is a, c, g, or t
  misc_feature (878)..(878): n is a, c, g, or t
  misc_feature (882)..(882): n is a, c, g, or t
  misc_feature (893)..(893): n is a, c, g, or t
  misc_feature (1091)..(1091): n is a, c, g, or t
  misc_feature (1113)..(1113): n is a, c, g, or t
cgggcagtgccaagctaaaattaaccctcaactaaagggaataagcttgcggccgcctgctcaggnnnnnnnnnnnnnnnnnnnnnnnnnnggattcagacaaacacttttatattaaaagctaggggttagcaggactggagtacgcaggctgcccacaagttcctagcttgcaggctctggctctcgaggtcccacacgcctgatgtcaatcacctgaagccgctccagggcagtctggaggatttccaccacggcttcttccttctcgtcaccctcctctggcatttccgactcagggagctggaaggcctggctcatgtaggtgttcactgtctgcttgtccaggctggggtcgatggtcatcaggccccctcgcagcttgggcagagtcacttcctcatggagttctatgccaagctcctgctttagctgctgtaagtactcgtccttctcatccatgtattgttcccagagtttttgcacaaagggctcactctggccctcctcatcctccataaacagtgagcggtagttgagcaagtctgcattgctgctgctgggatgccagccccctgcctccatcagctcctggatttgctcttctgtcttgagagggaaggtactcttgaggacagtgttgaactgctccatggttagtagcccctcgttctgactgtcagcatttgtcatctccttcagcagctgggctactgtctccttctgggtgacatacacattctcactccgctttcccatcaagactgcatagaactgactcataacctcgttggagtggaagatcttgatattttcaaaaatagtataagccaaggcatggnatcactggggctanagcgatgctccagganattgangaangaatctggaancgtctccttctgctcctcagcaagacgttccttcaggcatcttgaggagggtgacacgtccttctgcgtggttcttgttctccacaggcatcaaccgataaagcatgatgggtccccatagctaggaggaggaacagtcactctggacatctgtggccaccccaactctggcggatcttggctcgaggtcaattcctnagtgagtcgataattctatcangtaaacgttc

SEQ ID NO: 134334 - DNA, 1180 bp, Homo Sapiens
  misc_feature (66)..(96): n is a, c, g, or t
cgggcagtgccaagctaaaattaaccctcaactaaagggaataagcttgcggccgcctgctcaggnnnnnnnnnnnnnnnnnnnnnnnnnnnnnnnagggtctgcaaagtttttaatgttcaaggggctgtccgttttgaaaggtgaaaaggaattaacatatttaggtccactcatagggaagaggaaaaagaaattctggcatagcacaggggtcaggaaactatggcccaccacctgtcgttgtcagtagtttccctggagcccagccatgcaaatggttgacatgctgccgatggccgctctgcagaatcgctgggactaagaccacaggtccagaaagcttcaaatggttactatcgggccctccacagaagtctgcccactctccatacagcatatgatgaaatacactgcattatactgaatattgaaaaaaaatatactgcagctactgaaaaataaacacaaagtgtatatacaaacagggaaagatgttcaagaaatcatgagaaagttttattttaaactctgcctgcctcctgaggccagcaggtcccgttcatttggtttcactaggctccaatgagaaaggaatttgagttcttgggaagaatgaaccctgggagggtaaacaggactctgggcaacattgtctaagcggcgtccccagcacgggcctgaacaggaccagcagcccctccgttacttacgcaggcagttccaaggccacaggccgcttagagctgtgcaggaagctctccccacccaaggtctgcgtggtatcaaaactcaagaataagaacagaagccaaaccaccaccatggttcgccatcagctgacctacactgaaccccagaatcaagcagacaggcccaccacggcccagctgtgcaggatgagccagctccccaggtggaaaggcctgcccaggaaagtcgccagaacaaagcagaaagagccgctggctgagctagtcattcttcccaagtgaataattagacaagcgccaccttgagaggccaggagcatgcttagaggacattccctcctcctggaagctgtgtgtcccctagggggctcttcaacacccacctcagtgcagccacacagggaagggctggcgtctgggccaccctggcggggatccagcctcgtgccgaattcgccacccaggcc

SEQ ID NO: 134335 - DNA, 963 bp, Homo Sapiens
  misc_feature (726)..(726): n is a, c, g, or t
  misc_feature (732)..(732): n is a, c, g, or t
  misc_feature (785)..(785): n is a, c, g, or t
  misc_feature (836)..(836): n is a, c, g, or t
aacaggcctttcgtgtcttttctgtacaccttagggagaacccatccctccatggcccgctgggtcactggaaggctcagggctcctgggggagggggttatgggccctgggctggctgggccatcagctccactggaattgctgagcactcatactagggatgaagttagggtcccggactgggtggggtcagacctccagctgctggatctgcctctgcgcctctgccagctccagctcagcccccgtgagggtgcggtccaagcggcccttctctgcgctcagccgcactgtgtcctcatggctacgaagcttctcccgctccaccttgtccagcgtcctcctgagggctacacggtccttctccagccgcagggctgagcgctccacctcccgcttctcagcttccagctgagccagggcgcgctgcaggcttcccaggcgctcctgcagcagccgccgctcgtcttgcagcttctggacggtgttcagggctgcagcctcaccctcctgccgctgccgcagcacctcccgtagctgttgtagctggccctcggcctccacccgctgcagttccaggtcagccacctcgcctcgcaacgtctgcacctgctcgcccagggagctgctctgcttccgtgcctcagataatgcctgccgggcggcatccagccgttcctggagtacttggcggtcatgttcacaggcggtcagagcttctgcanatgcangttctgtccgggtgctgttgaggctggactgctctgggccagggctctgtcangcccgcacttgtccgcaggcccctcgcttctccacttggcagggccatcancgctcacgtcagtgcaggtcctgctcactcgcttcggcacctctgcgattctggccgaggcaatcctaatgatctataatcgtacagtcaacgtcggttgatgtacgccacatcaaacatcagcgag

SEQ ID NO: 134336 - DNA, 988 bp, Homo Sapiens
  misc_feature (568)..(589): n is a, c, g, or t
  misc_feature (626)..(734): n is a, c, g, or t
  misc_feature (740)..(740): n is a, c, g, or t
  misc_feature (761)..(891): n is a, c, g, or t
tttagagagatagagatatatttcttctgttgcatatttcagacttcacgctgagcttcaggcacaattactccaggttcttctgagagtcttgacagagtcttcttcccacgctgctcatgtgacctcacttccagtgcacacctggaaactctgcatgggtctcagtgggccctgaccctgcctttcccatccaggggcagggtatgctggaaagccctggagccgccccaccccacttctagggtcccctggctacaaaagaactgtcctgctagagcccagctctgcagcgcccccgatatcacctgttcttcgggccttagagcctggcagggcacttgcagccctgtggagcctcagccacgagcaccacaggcccagaatggggcatgaggccctggagagtgaggcaggcccagcctcgtgcagaacaatagcaggtgggctcagcaagccactgctccccacagacatggcccacttcctggggctgctctgagccctattgcacatcttctgttctagtttctctcccaaccacccattttcctttttaaattaaaannnnnnnnnnnnnnnnnnnnnnagcctacagccgcggccgccctcgtgccgaattcttnnnnnnnnnnnnnnnnnnnnnnnnnnnnnnnnnnnnnnnnnnnnnnnnnnnnnnnnnnnnnnnnnnnnnnnnnnnnnnnnnnnnnnnnnnnnnnnnnnnnnnnnnnnnngcgggnagcgataagttgtaaggctgnnnnnnnnnnnnnnnnnnnnnnnnnnnnnnnnnnnnnnnnnnnnnnnnnnnnnnnnnnnnnnnnnnnnnnnnnnnnnnnnnnnnnnnnnnnnnnnnnnnnnnnnnnnnnnnnnnnnnnnnnnnnnnnnnnntcttccgtttcccgccatgacccctggctcggtgttcggtgggggagggtatcactcatcaaggggggatacggtatccaaatcaagggatagcagg

SEQ ID NO: 134337 - DNA, 1128 bp, Homo Sapiens
  misc_feature (42)..(68): n is a, c, g, or t
  misc_feature (324)..(324): n is a, c, g, or t
ccctcactaagagggaataagcttgcggccgcctgctcaggnnnnnnnnnnnnnnnnnnnnnnnnnnngacattaaatgtttttattgaacaaaaaaagataaaacatggaagttgaatttactgagcaaaagcagctctccaggtgaagctgctatactttgtgctaaataaccttatgaactgagtatacagaatacatataatatgcaagttacctcaacagcaaaggagaaggagtagaatacagtttttgaagataaaatctggtcaagtgacaaattttgttgctcaaaatttctaagcccttatccacctaaattcntgtatggttctacctaatatgcattccggtatggtgcatactgaattcccattttaatggaagctggctttttggaagaattctttttaatttcacatttctttgatgtgccactcaatttttaaaaaaattatatttgacatatgtgcatgtgtgtatgtgtatgtatgtatacacactttaaaaacaccaaacccttgtttataagtagagggttcatgctgctttttaaattaatattagtgaatttaagctacttctcctgtgtgtctaggaaactttgtgttctcaatgcacccacacagtcaagtgggttgacagatatgtcaaaaatactttatgaaaagagggaggtagctcatgcgagttggaaccttttgtgtattgtttcctgttcaagcaggctgcctcgctttgacatcttacagtcaaagatgagaggaaactttttacttgaagcctagtgaggcaagttgtacatttactataatccaccttcaacttggcttattggggttactaatgtgggatgacaaataccttacacccagtacacagcatttagaaagtactgaagaacatgttatagacagtactctttttcatatgttaacatcagcctttatgggataattccaagatggttgggttccactttataacatccaggccaacaagagaaaatacatcatggtgtcttttcaatattgtacaatactaaggtgacctacaattacattcaggggagagacagagtcagacattgcaaatagatcacatctagtgtaagagactacgtgcaag

SEQ ID NO: 134338 - DNA, 723 bp, Homo Sapiens
  misc_feature (36)..(36): n is a, c, g, or t
  misc_feature (690)..(690): n is a, c, g, or t
ccatggatctattttggcaacatggaggtatatctntcaaactgttccaggtcctacatgtgaaagagaagaagacatgaaaggatttcttaaatggaagtgctcattctaacctgacggtgacagaatcaattgatacaccatttcttcaagacaaaaaagcacatattcaaggaatagctcaaaaaatgctccagttttcacattatttcaaaactttatcggtagaatgactctgcacactaatttcactaagagtacataaacataggaaaatagtcctcaaaagatgcatttatgggcctatatttttcaacataaagtgctagcagatgtgtaagaagagctgggaatgtcttgagctgtaagtcctgagacctccacaccatggctggtcctggaggagttcagcattctgattttttcttaggttcaggatgatcatccaaggtggctggatgctcatttggaccacctggtgtctcacctgtgacagctaaaaggatgactttcagccacttctgcttcagttcctcactgtctgcagcaaagctgtgcacggacttagactgggtcagtttgaaactgtgtggcaggtctgcgctccttggcatttcatccaccacatagcccagaagtggaatggtggcctgggctctgacgtcctaaagaaaagacatcagacattanaagcaggtgatgtattcgcttgttaagtgtgtc

SEQ ID NO: 134339 - DNA, 1065 bp, Homo Sapiens
  misc_feature (61)..(83): n is a, c, g, or t
  misc_feature (737)..(797): n is a, c, g, or t
agtgccaagctaaaattaaccctcaactaaagggaataagcttgcggccgcctgctcaggnnnnnnnnnnnnnnnnnnnnnnnctgtgtagagagataaaagttttatttcataagtacaaactcatactctttccaatctgattcctcgtttcttttcttttgctttttcatctcctctgtcttttggatacacaggaaacacacacacacagctaacaaaaacagtgtgatgttggaatcttgctccttcagttctaaggtcctctttttcctgaagctgaagaaaaaagatacttaaagaaaacttacttgagagtcaggcaggaaggggagatgggatacacactttccctatctttcaggtttctgcaatctcagcgcatgctgcttaagaggaaaagagcagcaaagcagatgaaaagcactgcatccttaagtgatttacctgttcccaagcaggcctgcctcacacctgcctccccccagttccctgtcattgaccctcccgccaccatatctgtggcatctggtgtgctgcacacacagtatatgtgtgcaagtgcatggtatatacacatagcacacatgcatacatgctataaacacatgcccatatataggctcagtgcacaggtacgcacagtgctcaggtacacagagtacacacacctgctagccacatacactctcagtgtacacacatgctgctcatggtgaatcacatagcatccatgnnnnnnnnnnnnnnnnnnnnnnnnnnnnnnnnnnnnnnnnnnnnnnnnnnnnnnnnnnnnngtagacatgcgtaacccagatagtggttcttgctctctctgcaacttaagacttggcatttttgtaaccccaacttggacgataatttcttgtggctcatgacgtgaagggagattattggcttaacaaaagaagaggagaagcgaaacgacagaactcgcgggagcaccgacctggtttattcatataggcaaaagaattgacaggggggcctgcgatctgctcgagcaatcccaagaccataatctatcggcaaggttccggtgag

SEQ ID NO: 134340 - DNA, 1607 bp, Homo Sapiens
  misc_feature (1500)..(1513): n is a, c, g, or t
  misc_feature (1541)..(1551): n is a, c, g, or t
atggacatgctggacccgggtctggatcccgctgcctcggccaccgctgctgccgccgccagccacgacaagggacccgaggcggaggagggcgtcgagctgcaggaaggcggggacggcccaggagcggaggagcagacagcggtggccatcaccagcgtccagcaggcggcgttcggcgaccacaacatccagtaccagttccgcacagagacaaatggaggacaggtgacataccgcgtagtccaggtgactgatggtcagctggacggccagggcgacacagctggcgccgtcagcgtcgtgtccaccgctgccttcgcgggggggcagcaggctgtgacccaggtgggtgtggacggggcagcccagcgcccgggccccgccgctgcctctgtgcccccaggtcctgcagcgcccttcccgctggctgtgatccaaaatcccttcagcaatggtggcagtccggcggccgaggctgtcagcggggaggcacgatttgcctatttcccagcgtccagtgtgggagatactacggctgtgtccgtacagaccacagaccagagcttgcaggctggaggccagttctacgtcatgatgacgccccaggatgtgcttcagacaggaacacagaggacgatcgccccccggacacacccttactctccaaaaattgatggaaccagaacaccccgagatgagaggagaagagcccagcacaacgaagtggagcggaggcggagggacaagatcaacaactggatcgtccagctttcgaaaatcattccagactgtaacgcagacaacagcaagacgggagcgagtaaaggagggatcctgtccaaggcctgcgattacatccgggagttgcgccagaccaaccagcgcatgcaggagaccttcaaagaggccgagcggctgcagatggacaacgagctcctgaggcagcagatcgaggagctgaagaatgagaacgccctgcttcgagcccagctgcagcagcacaacctggagatggtgggcgagggcacccggcagtgacgcccgccaccaccacgcagccgccgccgcccacgccggcctctgctgcccccttccccagcccttagcacagagagggacacatgcccctcccccagctgcgtttttttatagtagatttttaacaaaaaacggggagaaataatgcatttctgtggatacagtgcccaccgccctcctccacttggaaacggtatcctccctgcccatccgtctgtctgtcgcccttctcccggccctcactaagccccggcacttctagtggtctcacctggaggcaagagggaggggacagaggccctgccacgtcccgctgcctcctgctctctggaggtactgagacagggtgctgatgggaaggaggggagcctttggggggccacccggggcctggacctatgcagggaggccacgtcccaccccacctcttgtttctgggtccctgctcccctttggggnnnnnnnnnnnnnntttaattttctttatggaaaaattgacnnnnnnnnnnntagagagagaggtatttaactgcaataaactggccccatgtggcccccgccttgaa

SEQ ID NO: 134341 - DNA, 768 bp, Homo Sapiens
gtagcttactttttcccccaccatcagaagatttattttatttctaattaaaaaacatacagttggcaaactcaggtttaaaactaagcatgccaataataaatcaatcatttctccaagtacacagtgtttcccttgggaaggactgttatttcacaacatttttttccctctgatttagaaaaaaagataacatttaaagtattacaatgcctaaacagtgataccagtaatccagtttttatactgatacttgtatttcaacatttattatcaccaagactaacttaaagccaactcctttagtgaagagatttctttccccatttcagtactagacgcaatagttctgaatgtcactgagcaagtaacggatatgagttattgataaattaattactaatgaagagtttttatactacctcctttataattagctagttcatagacttaaaacaaaacaatgaacaaaaacaaaaccctatttcttaccctctaaatggtcgcatttccctttcacttacctgaaaatatgagaataaaaatgaccatgtattgagttacaccactgaatctgtttgaatggttctgtttttgtattttttacttatttaatttgaaaaaaattagaaaagtattagtttgaaattagagcagctaacacactgggggcaataaattaaaaacttcaaatggctaaaaatgaaaacacaaagtatctttccttctagataaaaaagattgttttcttcctagaaacactaaatc

SEQ ID NO: 134342 - DNA, 573 bp, Homo Sapiens
  misc_feature (459)..(484): n is a, c, g, or t
tttttttgttttcttaaaaaatgtttatttggaaaagtcagcctcttacacaaggttttgtatctatacttttactctgtcaattacagtggtattttaaatgcattgaatataattcattgaatgtctatatctttctgcctcgatttaagtgatattaggttaaaaaaatatttacagttttcattctggtccaccttccctccttatccttatactgaatccatttctctacttttcaggtaagtgaaaggggtcacaaaatttttaggtttgtgtggagggtaaaaatgcatccagcaattctaagcacaacaattttctgtaaggccttctctgaaaaaagagaaggaattacttattaaaactaagcacacttagcaacttctttcccaatcctatctttattcgtttgcctggtgccaaatttttctggccctttttaatttgcaaaccttnnnnnnnnnnnnnnnnnnnnnnnnnncaccaaacacacacatatctcacacatagcactaagctagaagcagatataaatgggaccactgtgaatcaaaggggaaaaattccagg

SEQ ID NO: 134343 - DNA, 916 bp, Homo Sapiens
  misc_feature (211)..(222): n is a, c, g, or t
cttaaaggcacaaaagcatgaatattaaatgagagttgtattttacaaggccaacttttcaatggaatgcggttaccaactgagctgtgacaaagagtacactgtacctttataagtgatataaaacaaaaaagtactaacatgaaatacaaataaaatatctattgctgtaacttaacatttcacatgccctatttattgttgttgttgnnnnnnnnnnnnacatgtcctgggccagctacattttactaaatggtggatgatggcatagtacatttaacagctaaaaagaaaatgcacatgtgaataattattactcaattaaattttcatgtaggaaaataaaatcttggtaaatgaaaaaaactggtcataaggtcataaatcctagaaaccctcatgaggctctcagacaactgggaaccgtttacggtccatgtgtgaaggaagattaatttcaggtaaataacattcaaagtcaattacatatatggctacaaagttagtaattatgtgttataaagattcatataactaagcctagtacaagcactgatctaaaattaagccaccaattcctgagttttgtgttcagttcatagaaagagactcatacaactaaaagcataataagaggactattagattagatgcatgcttttagtgtataaagaacagtcatgaataactctgctctttcttaagaaatagtttttgactctttgggtaagaacccataacatttgctctaaaaagaaattttaaaaataaagaacacaactacctatttagtcttagaagatacccatacaaataaaatattatttggaccaaatgaaaacaacatacacgtggataagaccaaagtcctaagaggtgggtcaccagtacaaaatgttaacaaggtttactgatg

SEQ ID NO: 134344 - DNA, 932 bp, Homo Sapiens
ttgtcttaggtaatttgcataagaacaataaaagcattttaaaagtccactgccgccttagaaactcatcttcttccacacaggcaaatttaggtcttccttgtgatgttctcgaaaaaggaaccttgattctctgagtgaatatatatttaaccacatacggatccaaagcaaaaataagggctttaatttcttctcatcttgatttctgggatatctttcaatctcagaataagctgaagaaaactgcactgtaaacaatttctggggcagactatctagtcctcctcctaggagatccactgctcccatctgcatggaggacacctgtggcacattgactgggggaccgaggtcaaggtttaaaagatcccctagaagatcaccttgagaggggataacctgaggctgttccaggttcgttgcagtggtagtgccaacagggctgtcacctgcatcagtgctcccatgatgaattggcaagtgtttacgatgaattccatgacttccttccacaaaagcattgggaggcttatgatacacagaggccaaagaaccaatgtggcagattagctcatccagcagagttggctcaataaggtccgtctcctcagagatcagtggcttctcagacaagactacttctttagctgtaacagggtcagttgagagaaggcgccaatcaatatagccccggtctcgaaggtcaggattatcagaatcctgtgttgccaaactcaagacctgctggactagctcctgtgtttctgatggtttcttgagaaacagcttcactatggcagtaagcagagtgagctgcacctgggtgctttcatcgtgaaaaccctccaggaagctttctagtaactcatctgcattgtcaattcggacgcgtgggtcgacgatatcccgggaattccggaccggtccac

SEQ ID NO: 134345 - DNA, 1081 bp, Homo Sapiens
  misc_feature (328)..(328): n is a, c, g, or t
  misc_feature (918)..(926): n is a, c, g, or t
  misc_feature (1003)..(1020): n is a, c, g, or t
gtgtatcatcgccccaggtccatttctccgctatttgttgaattggcgatccattccacggacagttgactgatcgatttatagatcccttaggattgcctcgggccagaatcgcccgagtttttaccaaattcaatccctagacactgaaggacaatgttggtcactaccaagatataaaatcatccgctcaaagtagatttttagccaagctcaagaactaacctggggctgagtcagcgtctctacccacttaaataacagcgtaaggatctttcactaaattcgttatgtgtcctgtctggatgtaaacctatatatttccttntgaaacagaatcatattctgcagactcttggcactcctgcatagctttgaccgaatgttcactctcatcgtaatggaagatttctatctatgcagataatacatgtttttaaatactgttttctgtttagtcctcaatcttcctaactcaaattggggactgaggagagagaaaggtggttacccctgttaccgtgccatattcttcttgctgcttttcaaccccacgtgattgttgattgacggttctgctataatgtgcgtgcccttcaagtttcagaaaactttcccaatcatttcacttcaatcttaattgaacccaagagtcaaagttattattttctccgaacgtgtttgtgatcttctgttatattttggggcatgttacctttatggtatataagctgtagtgcatactctttgtattgcaaaaaactggtcagtaatttatgtacatgtattccacattttagtgtgcttgaagtgacaatccatagtttgtagtagtttgttatttgtcaactttaccctgtgttttaaggacatctaaacattccttgtcctatcaagatgacaaaagcagaatgtaannnnnnnnnggaagcttcgtgattacctgtaacaagttctgtttttaaaacgaatacaaataaagttagtaactatttttaaatcnnnnnnnnnnnnnnnnnngcctacagccgcggccgcaagcttattcccttatagtgagggttaattttagctatggcac

SEQ ID NO: 134346 - DNA, 990 bp, Homo Sapiens
  misc_feature (347)..(750): n is a, c, g, or t
  misc_feature (759)..(759): n is a, c, g, or t
  misc_feature (766)..(766): n is a, c, g, or t
  misc_feature (800)..(800): n is a, c, g, or t
aaagactgaaggtttttaattttggataaaaaacatggtatcatccaaacatttgcaaattgtaacacaactgcagtagagggccaatgatctctgtggcaattggccttttctctgggatatattatcaggcagctttaaaagtaagattcaagtatatgaccagtgttatctgtaatatgttaatgtcagccacatacctgcatgaagatcatgcaactgatgtataattcagaattgaaccatataggttctttgagaacctgactttttattagctccaggtttacagactgacactgtcacagcagctcaagtctgaacttgcccctcgtgccgaattcttnnnnnnnnnnnnnnnnnnnnnnnnnnnnnnnnnnnnnnnnnnnnnnnnnnnnnnnnnnnnnnnnnnnnnnnnnnnnnnnnnnnnnnnnnnnnnnnnnnnnnnnnnnnnnnnnnnnnnnnnnnnnnnnnnnnnnnnnnnnnnnnnnnnnnnnnnnnnnnnnnnnnnnnnnnnnnnnnnnnnnnnnnnnnnnnnnnnnnnnnnnnnnnnnnnnnnnnnnnnnnnnnnnnnnnnnnnnnnnnnnnnnnnnnnnnnnnnnnnnnnnnnnnnnnnnnnnnnnnnnnnnnnnnnnnnnnnnnnnnnnnnnnnnnnnnnnnnnnnnnnnnnnnnnnnnnnnnnnnnnnnnnnnnnnnnnnnnnnnnnnnnnnnnnnnnnnnnnnnnnnnnnnnnnnnnnnnnnnnnnnnnntggcagcanatggcangaaccgtaaagggcgcgtgctgggtttttcatangctcgcccctgacagcacacaaatcacgccagtcaatgtgcgaaccgaagacataagaacagcgttccctggactcccgtggtctctgtcgactgcgttacgaactgcgcttctcctcgacgtggctccaaccaccgagaccatcgttagctcccagtgcgttgacaccgttacacgcgtctacgacact

SEQ ID NO: 134347 - DNA, 656 bp, Homo Sapiens
  misc_feature (578)..(612): n is a, c, g, or t
gttttgttttctgttctgttttaatgtttcacttacagcttagtgggaagataacttggagaatcatctttgctacgaataagatcattacatttatcgattgcttcatgaacggagaatgtgtctccaatactataaagtatggctagattcttagcaagcagtttgcgggtaggaggccctggggagctgttcaacaaagacaggagctgttcaacaagagtcttctgtttctcccttacatcattcctgctggttgcctacaagagcttctccaagtatctcaaccactcaaaaataaactctgccttctgaacttcacctagttgattgtatgcttcttcattcagcagtaagctatgagctaattccattccttgcagcaatcctcccagctgatcacagttcttctcgttaaactttggtcgatatacctaacaataaaaatctttgggggtcctcctcagctgagcgtgcgtcccggtccagcaacgttaccggctgctctgctaaccctagcagagtcccccggccgtaatggccgaattcccgggcatatgtccggtaccgtcgactgnnnnnnnnnnnnnnnnnnnnnnnnnnnnnnnnnnncggccgcttcctcgctcacaagactctgctgcgctcggtcgttt

SEQ ID NO: 134348 - DNA, 1038 bp, Homo Sapiens
  misc_feature (24)..(24): n is a, c, g, or t
  misc_feature (68)..(68): n is a, c, g, or t
  misc_feature (252)..(252): n is a, c, g, or t
  misc_feature (339)..(388): n is a, c, g, or t
cctcccactaagttgatgaccacngaatgagccctcacctcagtttgacagcagtggtgaagagaccncaatgacgatggagacatcttcccaggagtcatgactcagaagaaacactaaaatggttagtaaaggacaccttctcttccaggtgcggcaatgacagcagtgagatctccctccatcctcgtctgtcatggactctcctccatgtccccgacccgaccctggcatctgacactgacagcagcntggaagcctcgccaggacccttggatgttccaggtgactagccgcctgcctgcgaaacccagcgtcttcaggagatgatgtgatgannnnnnnnnnnnnnnnnnnnnnnnnnnnnnnnnnnnnnnnnnnnnnnnnntcaagaaaacagcaagggagagaatccaagcctaaaattaaataaatctttcagcctgcttcttccccagggttctgtattgcagctaagctcaaatgtatatttaacttctagttgctcttgctttggtcttcttccaatgatgcttactacagaaagcaaatcagacacaattagagaagccttttccataaagtgtaattttaatggctgcaaaaccggcaacctgtaactgcccttttaaatggcatgacaaggtgtgcagtggccccatccagcatgtgtgtgtctctatcttgcatctacctgctccttggcctagtcagatggatgtagatacagatccgcatgtgtctgtattcatacagcactacttacttagagatgctactgtcagtgtcctcagggctctaccaagacataatgcactggggtaccacatggtccatttcatgtgatctattactctgacataaacccatctgtaatatattgccagtatataagctgtttagtttgttaattgattaaactgtatgtcttataagaaaacatgtaaagggggaatatatggggggagtgagctctctcagacccttgaagatgtagcttccaaatttgaatggattaaatggcacctgtataccaaa

SEQ ID NO: 134349 - DNA, 868 bp, Homo Sapiens
  misc_feature (592)..(641): n is a, c, g, or t
ccccccaaatatgtcccccggttacaaggttttcttatgagacatacccgtgtaagtcaattaccaaactaaacgcgttaaatactgccatattattacagatgggtttattgtcagagtatagatcacatgaaatggaccaatggtggtaccccagtgcattatggtcttggttagagccctgaggaccctgacagtagcatctctaagtaagtagtgctgtatgaatacagacacatgcggatctgtatctacatccatctgactaggccaaggagcaggtagatgcacagatagagacacacacatgctggatggggccaactgcacaccttgtcatgccatttaaaagggcagttacagattgccggttttgcagccacttaaaattacactttatggaaaaggcttctctaattgtgtctgatttgctttctgtagtaagcaatcactggaagaagaccacagcacgagcacctagaagttaaatatacatttgagcttagctgccatacagaaccctggggaagaagcaggctgaaagatttatttaattttaggcttggattctctcccttgctgttttcttgannnnnnnnnnnnnnnnnnnnnnnnnnnnnnnnnnnnnnnnnnnnnnnnnntccatcacatcatctcctgaagaacgctgggtttcgcaggcaggcggctagtcacctgcaacaacccaggggtcctgccgaggcttccaggctgctgtcagtgtcagatgccagggtctggtcggtggacatggaggagatgtcattgacagacgaggatggagggagactctcactgctgttcactgctgcacctgtgctaagaaaatgaagaccaacatgactca

SEQ ID NO: 134350 - DNA, 1275 bp, Homo Sapiens
  misc_feature (484)..(492): n is a, c, g, or t
ttgagatatattaaaagactttattcacaatagagaaattttacaaatataatttttaaaaattatgtgtcaatctattgtttcccataacattggagatttatatataaagttgaaaatgacagaatggatttatgtaaaaataaaaaacaatcaatgtacacaatgtgtagctcatatgaaaacctcatgacaagtcattgagttctgtaaactgccatacaacttacatgtgtaatattaattgcacaaagtatatcaagacatattgaagaaacacaaaattaagtgctattttaacggttcatctttcagtatgtgaatacgtatacaaatttaactgcacagttttgttgaaaataagtttcaacaataagacttcagttgttaaaattaacccaaaatataactttaattaaattacatcactacaatattaatctcttatcttgtttacatttttggtgttttgggacttttgttnnnnnnnnntccaagttctagaattgcaaaaacttcattgttgccactgagagagcaacaatatagtacaggcttcttgtctattcacaccaggacaccaaggtacctcatagtgcagtgtgtacacacaacctgattttaatattctatctgctgcagagatacttatcagctttcaaatcaaagtgaaaagaaaatgagttaatttaaatggcaaattcaaggacatttatacaaacattatattcttaattttggcaataatttttaatattttgccttaaagtcctgggaacaaagggctcttgctatccattcatttcattaggtgaactgaagatatgagtgggagaagttattctggatcacagacacacattagcatggaaataatgatgtacggaagagtctttttcatttactaattttactaatttattctttgacatacaccaatgtatgatattgaaaaacagaaagcaggtcataaagatggtcctgtccgataaaggaaatcttttaaaacactttcaaaagctaaaataactaaaactattaagcctattgatagctaagaaaataattgtcttcaataatattaggtggaaccatatgaaactgctgacagtttttaaactacaaatgcagcaatttcatatgtttcagcctaatccatggggttgtactgatctttctgaccattctcggctgaaaattcacatggtcaaagtccttgcccttccccggccgtaatggccgaattcccgggcatatgtccggtaccgtcgactg

SEQ ID NO: 134351 - DNA, 1067 bp, Homo Sapiens
  misc_feature (59)..(86): n is a, c, g, or t
  misc_feature (727)..(727): n is a, c, g, or t
  misc_feature (778)..(778): n is a, c, g, or t
  misc_feature (793)..(793): n is a, c, g, or t
  misc_feature (798)..(798): n is a, c, g, or t
  misc_feature (852)..(852): n is a, c, g, or t
  misc_feature (894)..(894): n is a, c, g, or t
gtgccaagctaaaattaaccctcactacaagggaataagcttgcggccgctgctcaggnnnnnnnnnnnnnnnnnnnnnnnnnnnncgttcaacagcgtttatttagactctgcactgtgtcagcactgtcctatgcactggagatacaaggggacaagacaaaggccctgctctcatggagcttccattctgatgagacaggtggtaactgactggaaaacataccaccgctggggcaggtgctaggaagaaaaaggcagcttgctgaggggacagagtggcatcatggatggtcacggaggcctctggaccaggaggcgtgtgcacagagccctgctctccagagctcagtcaggctgcggagctccttcgtaataactccggatgaggcaagagtaggtcactttattctatttcatttttagtaacattcggttcaaattaatttggggttttgagaacagttaattcactaatagaactgtcttaaagccagacatggggctggcaggatgggaaagctctccctacgaattctgccagctttcattccaatgtgtcagccctcatggctccagctctgtggatccctcttctttgctgcgcccatgaacaagtgtgtggtgagagcattttttttaacataaaatacgagttcctctggaatcagacagcagcttctgacttgttttccattgctctttgcacatttgctttctgctaccnaattttaagaccaggatcctttagtgggtactattatcatccccaatttanagagggggaactcangcaanagaggttgggtgattgctgtggtcagacacttgcaagagtcgaggtggattcgnacaggcagctggctcagagccatgtcctggccttcacacggngtcactacactgctctcagcacacgttatgctgccacggacagcatagataggtcatttcacagactttctcggagtccatgttctgtaacattcatttactccacaccctaaagcatggaacccattctaattccagagaaaagagtcatctaatgctaatccaatttatcc

SEQ ID NO: 134352 - DNA, 489 bp, Homo Sapiens
tgcggccgccaactttttaataatgtgtgacccttcacctttgatcccctgacctgcattaccttggctctcaccacacacttgttcatgggcgcagcaaagaagagggatccacagagctggagccatgagggctgacacattggaatgaaagctggcagaattcgtagggagagctttcccatcctgccagccccatgtctggctttaagacagttctattagtgaattaactgttctcaaaaccccaaattaatttgaaccgaatgttactaaaaatgaaatagaataaagtgacctactcttgcctcatccggagttattacgaaggagctccgcagcctgactgagctctggagagcagggctctgtgcacacgcctcctggtccagaggcctccgtgaccatccatgatgccactctgtcccctcagcaagctgcctttttcttcctagcacctgccccagcggtggtatgttttccagtcag

SEQ ID NO: 134353 - DNA, 586 bp, Homo Sapiens
  misc_feature (482)..(482): n is a, c, g, or t
  misc_feature (525)..(525): n is a, c, g, or t
aaaaattttttgtggcctcttaaagataaaacctacaacccaataaaagtcatgctgtaacgattgcaaaaagaccattgtatgagacccagttttggattatcataggcgaagaagtcagacatatatggttgtatgtacatgtgtatagtatgtgggtgggggtagatacatacctgttcatctgtatacgtatgtgtgtgtttaatatatactttagtttgcctttacccagatgtctcctcctctctctgcctctggaaatggggcaaatttttcttcagttaaaaacagaaatagaagcgacggttttgacccattttacacctatttatttcaggctctcaccacacacttgttcatgggcgcagcaaagaagagggatccacagagctggagccatgagggctgacacattggaatgaaagctggcagaattcgtagggagagctttcccatcctgccagccccatgtctggctntaagacagttctattagtgaattaactgttctcaaaaccccanattaatttgaaccgaatgtactaaaaatgaaatagaataaagtgacctactcttgcctcat

SEQ ID NO: 134354 - DNA, 799 bp, Homo Sapiens
ttttccacggaaaccagatacatttattaaatctactcttagccaagcaataaagatgtctacagagttcacaacctgcaacacttcaccagggaatgctaggtaaaggcaacttcagtttaactgagtactccatttcaagtgggtaatgtctgctggttggcagctatccagtttggaaaactgtggaagatgctgttgctacccagattgttctgttcaacaagtgggcctgaagcctgagcagtgtagccagctgtgtggggagcagaggttcactccattgcttctgcagcctcctcacctgactcctcctcctcctctagtaagcagcttcttgtcacagacttctggatagcttcccgctctccttcatcagtgcagttctgcaacaagatcaacagctgtctcctgttgtactgaattaggaacttctgacatgttcttattgtacctcccacatgtaatgtgttgaaaaagcatgggtaacggtgtcctttgttctccaagtatgtgatgaagggaagagctgaccacacaagctgatagaattcttttctgcatcgaagtagcactattccagtataggcattgagatatcgaaccgcgaagccgatggagcaggcggctgcgccgaaagttccgtgcaccctggcgatcgtgtcccgtacgaggctgctcagaactcggtcatcgaggcttaggcggcagcgggggtcgtcagacaccagttcgcagagcaggtacctgtgcttgaaccgcaccatggctgcctccgcgctctccggtccggcgtccc

SEQ ID NO: 134355 - DNA, 643 bp, Homo Sapiens
ccagaagtcaatctcaaacaaggttaaagtgggaactaatttaagtggtgtgaaagaaggggccctctgtcctagtctcatcctgtatttacatatattgacgatcatgtgttctgtcctttaccaactatttaagggctttcccggagtacttttgacaatttttgttccatatgatgttcatgtaatcggtcatatgatagctcttactaggaagtatacacagcttccctcatttaattctctaccctatcaaattcaatcacaaccaattacagaaattacctgtcaagcaggtaaaaagaggcttctagctcaaagccccactgccttcgggcccctccttttagcgctctgctaatttcggactctcgcttggggtcccaggcgcttaaagagataccttacaaaaaagggtgcacgggcttggccactcgtgccccttctttcttcctccggcgcctgccccctccacatcccgccatcctcccgggttcccctcttcccccagcgcccttgcacccgcgaagccgatggagcaggcggctgcgccgaaagttccgtgcacctggcgatcgtgtcccgtacgaggctgctcagaactcggtcatcgaggcttaggcggcagcgggggtcgtcagac

SEQ ID NO: 134356 - DNA, 1009 bp, Homo Sapiens
  misc_feature (774)..(774): n is a, c, g, or t
  misc_feature (880)..(880): n is a, c, g, or t
ggccgcggctgtaggcttttttatttttgtattgtcctttatcaaatatacttgatcatttttgttggtcttgtctggtcattaaaaaatccaattgtttctttaaacatgtatgattattttatttataaccaggtagagtatttataataatatagatgttaagaaagaatgtggccttaggtctagactgcttgtgttcaaatcgctctcataaaattattttttattgataaatgtacatatttttggtgtacatgtgataatttgatacattcatttgtatcaaatttgataatgtataaagatcaaatcaaggtaattggggtagccatcccttaaatatttcttttatactaggaacatttgaattatttttttctagttatttttaaatacacaatagattatggttaactataatcaccctactgatctgtcaaacactagatcttatttcttctactcaattgtatatttatatccattaatcaacttctgttcttgctctctccgtgctacccttctggcctttggtaatcgccaatcaatctactctctatcttcatgagaccagcgtattttagctcccacatatgaatgaaaacatataatatttgtctttctgtgcttgacttattttacttaacataatgacctccaattccatccatcttgtggcactgacagtatttcattcatttttgtgtgaattatatttcgttgtgaatataattacattttctttatcattcatcactgatgtgcacttangttgattcatattttggctattgtgacctcgtgcgaattctgggctcgaggggcaattcctatagtgagtctataattcgtatcatgtatagctgtttctgtgtgnaatgttatcgtcacaatccaacacatagagccggagcataatgtaagctgggtgctatgatgactatcaattatgctgcgcatgcgcttcatcggaacgtctgagtgatatgatcgcacccgggaagcg

SEQ ID NO: 134357 - DNA, 1403 bp, Homo Sapiens
  misc_feature (51)..(51): n is a, c, g, or t
  misc_feature (92)..(440): n is a, c, g, or t
  misc_feature (460)..(495): n is a, c, g, or t
tgaaaaacccagcacgcgctttttacgtccttgcttttgctgcctttgctnacatgtcttcctgcgtatcccctgatctgtggtaaccgtannnnnnnnnnnnnnnnnnnnnnnnnnnnnnnnnnnnnnnnnnnnnnnnnnnnnnnnnnnnnnnnnnnnnnnnnnnnnnnnnnnnnnnnnnnnnnnnnnnnnnnnnnnnnnnnnnnnnnnnnnnnnnnnnnnnnnnnnnnnnnnnnnnnnnnnnnnnnnnnnnnnnnnnnnnnnnnnnnnnnnnnnnnnnnnnnnnnnnnnnnnnnnnnnnnnnnnnnnnnnnnnnnnnnnnnnnnnnnnnnnnnnnnnnnnnnnnnnnnnnnnnnnnnnnnnnnnnnnnnnnnnnnnnnnnnnnnnnnnnnnnnnnnnnnnnnnnnnnnnnnnnnnnnnnnnnnnnnnnnnnnnnnnnnaagaattcgggcacgagggnnnnnnnnnnnnnnnnnnnnnnnnnnnnnnnnnnnntcagtttcaaattttatttcattaacttaaaaggtggacataatgtttattttaaatctaattgaaatttatctgaaacaacttatttcaagtaacttattgtacagtccattgtccatttaaaaatattttcttccaaaaaactgcattgaaagacaaaaaaattcttttatacggcatatacgcgagatgcaaacttctgatgtaaatttgtttcactgtcaactccgatgataaagatgagaggcacaagggttcacagttcagttaaatgatgcaaacaaaaagcttctgtttccctccgatacaaattagaagtctccattcatgtctcttacagtagtaccacatacttgatgctgatactaggttacttctttttctttcctttcccttttttacttccctctccttgttgaagactttggtcagcacctcctgttttttgtgtccttgtttttagtttaggtatcatttctgctgcatacaacattactgacttacgtgatgggaactgtacaaggcagagggaagtatcttcctgtttgagctggacccggactctgcctctgtattggacatcacgattccattctctagagtacattttatttttctcaagaaatacgttaagtccaactgctgaacatacatcttgaatctctgtagctgtaggattttcaacagccttacttatggggattcgccttccctctgcgatggtcttcttattatttaaataagcaggatagatacaaataaacctgtcctggtcggccggggaccgcgcggcagcgcaagccatcttcacaagagtctcaacaacccaggagccgcagggagaaacccggcagaaacccgggaggaacccggctctgagtttccgagacagcccgcttttccgcccc

SEQ ID NO: 134358 - DNA, 734 bp, Homo Sapiens
ccaactgtccaacctcccgatggataaaagaaggagagggcaacaaggggttccacagttcaggttaaatgatgcaaaccaaaaaactttcggtttccctccaatacaaaattagaagtctccattcatgtctcttacagtagtaccacatacttgatgctgatactaggttacttctttttctttcctttcccttttttacttccctctccttgttgaagactttggtcagcacctcctgttttttgtgtccttgtttttagtttaggtatcatttctgctgcatacaacattactgacttacctaggaaccagaagttaggcttagtgtataatgtgatgggacctgtgcaagggcggaggctcccatcttccctgtttgagctggaccccgggactctgcctctgtattgggcatcacgattccattctctagagtacattttatttttctcaagaaatacgttaagtccaagtgctgaacatacatcttgaatctctgtagctgtaggattttcaacagccttacttatggggattcgccttccctctgcgatggtcttcttattatttaaataagcaggatagatacaaataaacctgtcctggtcggccggggaccgcgcggcagcgcaagccatcttcacaagagtctcaacaacccaggagccgcagggagaaacccggcagaaacccgggaggaacccggctctgagtttccgagacagcccccc

SEQ ID NO: 134359 - DNA, 1054 bp, Homo Sapiens
  misc_feature (514)..(914): n is a, c, g, or t
  misc_feature (974)..(975): n is a, c, g, or t
  misc_feature (991)..(991): n is a, c, g, or t
ctttttaacaaaatgctttatttctatttttaaatgagaggcattcccatgaaatatcaaaaggcatttacatgtgttgttttaactcttcttttttgatcacacaaagtaggtagaaaagatctgctgaaatagagcaaatcagaaaccaagtagtgtaaggcattaggagatacatgaagagaatcgctatttgcttcttgtacagcgtgtggcaagtcatggttagtagtcatcgtagttgacgctggctccatgcctaaagccgtaggggctccggggaccaattgcagagtcttcatcatagtgacgttggtagtaatcgccatagtattcatgtccatttcgatctctgttaagccaataggtgatgtcatcttcaaatttcgcttcatcaaagcccatgtagagaaactgctggtaccactgctgcacctcgggccgagtccggtcccacagctgccgcttctggcgcttcaggctgccaaggaattctcctcttgccgaattcttnnnnnnnnnnnnnnnnnnnnnnnnnnnnnnnnnnnnnnnnnnnnnnnnnnnnnnnnnnnnnnnnnnnnnnnnnnnnnnnnnnnnnnnnnnnnnnnnnnnnnnnnnnnnnnnnnnnnnnnnnnnnnnnnnnnnnnnnnnnnnnnnnnnnnnnnnnnnnnnnnnnnnnnnnnnnnnnnnnnnnnnnnnnnnnnnnnnnnnnnnnnnnnnnnnnnnnnnnnnnnnnnnnnnnnnnnnnnnnnnnnnnnnnnnnnnnnnnnnnnnnnnnnnnnnnnnnnnnnnnnnnnnnnnnnnnnnnnnnnnnnnnnnnnnnnnnnnnnnnnnnnnnnnnnnnnnnnnnnnnnnnnnnnnnnnnnnnnnnnnnnnnnnnnnnnnnnnnnnnnnnnnnnnnnnnnnnnnnnnnncaaagtcagcataggccaggaccgtaaaaaggcggttgctggcgttttccataggctcgnnccctgacgagatcaanaatcgacgtcagtcagagtgggaaaccgacagacataagatacagtgttccctgtgagtcgcg

SEQ ID NO: 134360 - DNA, 623 bp, Homo Sapiens
caagtagtgtaaggcattaggagatacatgaagagaatcgctatttgcttcttgtacagcgtgtggcaagtcatggttagtagtcatcgtagttgacgctggctccatgcctaaagccgtaggggctccggggaccaattgcagagtcttcatcatagtgacgttggtagtaatcgccatagtattcatgtccatttcgatctctgttaagccaataggtgatgtcatcttcaaatttcgcttcgtcaaagcccatgtagagaaactgctggtaccacttctgcacctcgggccgagtccggtcccacagctgccgcttctggcgcttcaggctgccaaggaattctttggctttattctcatcaacggccactttagtcttagttggaacaggtgcttctcgtttttgaagcatcagcttgagtttatttccacttatgccacctgggccccagcacaggagcaggagcagcgccagcccggtcagggccaggacagcaggccgcgcgggggaggcagccatggcggcggggcgcgagcaggagggcgaggggcgcacttcgaggtgctgcgagggagaaccgggcgcgggagaggggtgcgagcgggcaggcgcggccgca

SEQ ID NO: 134361 - DNA, 955 bp, Homo Sapiens
ttttacaagtttatctgacgataaattctaaggtcaatttttatttctacaaaaaaaggcagtcaaaacaatataaaacacattgaaaggatattactgagtgagcttcaagtggagcttgactctgcaaaggctgtgagtccgaagggagaggaagtccgtcttgttcccgggctgggctggctgctctggaggagggggtcagcaggggcccaggcgaccccagactggtgctttaaatagccgagtcctgctaattccaatcctacaaagggtcaaagtgtgccgagggagggctgtggcagggccactgcacggaggaagtggagagcaagctccgtggcacattcggatgaagctcggtgacagatgagctaggagtttcaaacggacattctggctgtagctttgcctgcaaggaccagcagatcttctacaatggctgcagggagaagtgccaacctgggacctcaggagcctttctggcgagattcatcacacacagtgtgcacagcatcctcctgactagcaggccccccatttcggggccaccacagacctgtgattatagggcttctctgtgcaggccaggccagaggtcagttacacacactgacatcagggcttgcccaattaactgatgttactgtggtaacatcagctggagtttcacacaagaactgaggagaaggactggaggaggggtgtggctgtttgtttttaaattttttaaaaggatgttataaactggagtcaggagaatttaaaccaactcccacactgggcaacagtgccacacatgctaagaaaagccaccaggaccgccagggcagtctcttctcctttgtggaggcgagcccggggtctggggaagtaagtaagtgaaaaataaactcggtgccagaaagtgggagtggcaagggtagggaagaaagggaaccacaaccgttttttt

SEQ ID NO: 134362 - DNA, 393 bp, Homo Sapiens
tttaggctcagatttaggaatttattttccatttaggttttattaagtctaatccaacaatgcaaaaatgaaactgtgagttatatgtgatgaaaaagtatagctttcttgaattcaaataagcaatggcaaagatcacatttagaatttgacagaaagaacacagcatccctgcctcgtcttttttatagatagtaagaaaagggaaagtagtcttatttcaaatatcaaaattctgacttaaatgaataaaatttagtcacgagtaaatacaaaaaacaagcaaacaataaaaccttcctggatcagcacaggcccaattcttccctgccttttatcaccctgtcagctgggagtatcttttctacctgtggctctctaccaattgttact

SEQ ID NO: 134363 - DNA, 201 bp, Homo Sapiens
gcttttagaatgtcagcttcatacttaccagcactgtttattttaatattttttcctgttatatgtaatatacataacttcaaagcacatccgtacaaacctcctacaagctgcaccttcataatgagaaaccataagcatacaatgtctacttcccttctgtcgtcttctcgcagccgtatagtagtagtaggcggccgc

SEQ ID NO: 134364 - DNA, 1171 bp, Homo Sapiens
  misc_feature (275)..(314): n is a, c, g, or t
  misc_feature (849)..(885): n is a, c, g, or t
tatagtcagataattataattttagaatgtcagcttcatacttaccagcactgtttattttaatattttttcctgttatatgtaatatacataacttcaaagcacatccgtacaaacctcctacaagctgcaccttcataatgagaaaccataagcatacaatgtctacttcccttcctgtggcttcgttttctgttcttgctttcttttctttttctcatttcaaaggagagtcatctgcagtggccctcagaaggaccaggacacagagggtnnnnnnnnnnnnnnnnnnnnnnnnnnnnnnnnnnnnnnnnagccgagacagaaaatgacagcaagacattgagagttgatggttaggtgaggcgggatagaggaaggtaggttttgcagcccagtgtcaagatccagaaagtaagaatccagtgttcctcctctttctttccaagtggggaattttctttttttctcggaaaatggttgactgtgcgtgtcttgctgctgtgacttctcttgctttgctgtgcaagtgttttcctttgcattcaagtgggccttagagatgctggagaagaacaaatggaattgctcgtctgctaactgtaacgtgcagaaccagggcgggagggacttctacaatcatcgtggtctggcttgcgtttcttatttggcgggggaaaggggtgagcaagggattatagttattatataattttttttcttgaaaaaaatcccaccagttcttcaatttgtctgcaaaggaaatgtaggtgttcagatgtcggttgttgctgtcagccaactgctctgccagccccagcagcagtgcaaggatgcggtgtttcctgnnnnnnnnnnnnnnnnnnnnnnnnnnnnnnnnnnnnngcttttcccttcccagtctctcatcagtgacagtacgtcgcagctgggacgtcagtgttgcgtcggagaatccagaatgaaggccccttcttaatggttctctggcttgggttggaccagaaatgccaggatctcttcacagaggtcaggattcctgtggcttcttgtccctctcctctggggatgggtctgtttctctgaatacgacagctttggataccagcatatcaagatgctgcaggttggccttcttgatgggcacatccagtgcctggtcttgatcgac

SEQ ID NO: 134365 - DNA, 1085 bp, Homo Sapiens
  misc_feature (57)..(57): n is a, c, g, or t
  misc_feature (117)..(117): n is a, c, g, or t
  misc_feature (146)..(146): n is a, c, g, or t
  misc_feature (170)..(170): n is a, c, g, or t
  misc_feature (445)..(514): n is a, c, g, or t
  misc_feature (1006)..(1027): n is a, c, g, or t
aattttgcttcctattgatgcagccaacgatttctgttttgaataacatgctgtacntgagctgtgatccgtagtatcatattattctgctctgctctattacatgatcaagtgtcntgtcatcaggaaacaccatttggccctcntagatgagcatctgatagtacgtntctgatgtctcaggaccattgaagcagacaaacaaacacttaaaactctggctgggaatatgtaaaatggatacatacttcttgctttattaagctgaatatctggaatataatttaatcgtgatgactcagtattgtcattttagatgaacgtgttcatatggtgtattaagcatagctgtgttttcaaaacctgttgaaatatagatgtgttgtatatttgcccctacttgaaatgactccaccgattctaaatgaccccagactaataagcnnnnnnnnnnnnnnnnnnnnnnnnnnnnnnnnnnnnnnnnnnnnnnnnnnnnnnnnnnnnnnnnnnnnnngctgtcacatctttgtttggtgtttctgtactagctggctccttggtctctgttcttatttgcagcttttatcttctatgatttggataccagataactaagcttgtatataaaataaatagtaagtagcgtgagtaaagcttcgcagcgtataaaatatatggaatttgtaatatcttttttggctgccctgatttcttctgctattccctgtctcctccttctctgttggttttctcctttttttgaattgggtgtcagcttggagagatgaaatctggaaagactgggtcttgtccttgacctaagcccatatctctggcccaggtatcagcggctgcctcatggaatcaacttagaaattataaaatggcacaggtagggggtcctgaaggtcatctgtttaaccccttattttatagcagtgaaggaatctgaggcactgagtggggacataagaggccaggttcatgacagtatttgtgtaaggtnnnnnnnnnnnnnnnnnnnnnncctgacaggcggccgcaagcttattccctttagttgagggttaattttagcttggcac

SEQ ID NO: 134366 - DNA, 1826 bp, Homo Sapiens
  misc_feature (1712)..(1746): n is a, c, g, or t
agttaggccacttctattaacacctgtttctcgttaacattcataccatcaattagacctctgaccaatgtttccatcggtacccatatccctaatataattttcaccctatcctgtgtaaaaatattaaccattcgtaaacttgttctaataaatgccgtgccacttgttttccataaccgagctattctaatggtttaccactctttcagtgccatatttccaattcattaacagaatgaaatcaatgctaattaactggctatatcataatattcaagcatattatggaatctataccacatgggattcaccgtcaatactataattcactctagaaaacatcacaggcacacaccaaataaagaaccaaatttgattttctttttataaatgtaaagtatactatctactttaaagcacactaaaagatatattttaacaaaacagccaatttccaacccccttttctaattctggcacaggtaacattcaatccattcgaatcttctggtttgtcatcctataaatgatgctatcatatccaggatccatgttccaaatattgtaagaggtgataatcacagccaaggccaaggcgatcattatccaaagtaccatgttgaaaaccacggaatattcaaaattatacttatatgcaaggttatagggacttgctgggttcttcgcttgttttgcctcaaggatagtccttgtcttcctaatgagggaggtgtcaaatgacttgacagtgactaactctaccactgcattcccaccataaagactgtacatgtcatctgcaaacttttgcagagcgtcaacaaggatcttagaagcatctctgaattgttcagagtcttccccataacgcttcccaatttcatccaaacctgccagctccagtgaatataaatcaggagaatgatccttggctagatgcttatgacgagacagcaagcttgaaatatcatgtagcacttgcagttcagaaagaaagagcaggtcaacttcattgttcctactcagagaattgagggggagtgaactgagaacagagttttcttgaaacaggcgattacggagctggcgcaaggtgactgaaaggtcttcaaacactgagtttgccttccctaccatatacactctttcctcactgggagccaactgcaaaacaacaggagtttcctcagaaaataaggagtgaatggaatttgcaacactgtcaagactaaaaggaactgcattctccaaagggtacgaaatgacactgcctgggggtagagccagtttgttcactcccttcaccatcaccatgacggtagcccgaggacgatgaaacaggttacccactgcgagtcctggccaagaaaggtcttctttcacagagaagcccatggacaatgcagccacgtctgggatccgctctcctggtataggccaatttccatttcggaaaacaacagaccctggtgattttaatatactaaactcgttccccaaaacacccgccaccaacgccaggagcacgacaaacacagccatggtgccgcggcggccgcagcactgcggggcgacacggaacgggccggcgggacacgggcgacagccgcagcgtgaggaggtgacgcgctcggactcgtccaggctcccgggtcccccccggccgtaatggccgaattcccgggcatatgtccggtaccgtcgactgnnnnnnnnnnnnnnnnnnnnnnnnnnnnnnnnnnncggccgcttcctcgctcactaccttcgctgcgctcgttcgttcggctagaccgagtagcgccctatatgatcttaattct

SEQ ID NO: 134367 - DNA, 1100 bp, Homo Sapiens
  misc_feature (43)..(43): n is a, c, g, or t
  misc_feature (49)..(49): n is a, c, g, or t
  misc_feature (57)..(57): n is a, c, g, or t
  misc_feature (85)..(85): n is a, c, g, or t
  misc_feature (107)..(107): n is a, c, g, or t
  misc_feature (133)..(133): n is a, c, g, or t
  misc_feature (155)..(156): n is a, c, g, or t
  misc_feature (174)..(174): n is a, c, g, or t
  misc_feature (192)..(192): n is a, c, g, or t
  misc_feature (608)..(619): n is a, c, g, or t
  misc_feature (675)..(685): n is a, c, g, or t
  misc_feature (1039)..(1059): n is a, c, g, or t
tggtggcaccgcaagatttcccaagacctggcatgactgctcntacgcntcacgcanggaagatgagtttacacagtctctgatntcagagtgaacctggcccaccncattcaccgtacttccccagatgttntacagtgcatgtccatcagagnnaaagtgccagctcagagnaaagacaggagatgactntgcaggcttgctccattgtagagatgagatacaccaagatagtgacttcccagcttttctccccaaagcacccctaatagctgagaggaatctggaggcatagctaccatcacagctacactaaccaccatactttactgtatccttcaggtgtctgtcctagctagttttgtggtctggctccttcagtccctgcaacaagcctgtttattttcattatattgatgaggttatagagcttggacaagttacatgacttttcgaagatcacatagctaataagtgtcaagagtcttattctcaaaaccctggtctgtccaactacaagcctgtgctcctgactccactattctgcttaccctaagcctaaagctgcccacttcaagctcaaatcctcttggaggcttcatgctttnnnnnnnnnnnntccatgcaattttttgcatcctaattaataatatatctgtgtgttttagtgtaaannnnnnnnnnnaaattaccaattcagttatttagctttttattccccaaatctttggtaccctaggcagatgtgtcatatttatcctgggctttatgtacctctggtttgagggactcttgaacttcattttaagaaacatggcccaatgagtacacagtcaagtcttcatgtccctgaacactgcattataaaatcagcactccttgttctttgtatatttgtgttatcaaataactatgtgattataatctggcttctcatataccataagtgcagaagagaatcaaaagattgagtacctgattccctaaactgtcaaatttcccgttgtatattaataaaatttgtatcgtttcacaaatnnnnnnnnnnnnnnnnnnnnncctgagcaggcggccgcaagcttattccctttagttgaggg

SEQ ID NO: 134368 - DNA, 926 bp, Homo Sapiens
ttttgctgcttaaaagcattttattaagcatttttggatgttgcttcctaccacttaagaataaaaaatgcattttaataaaaacaaatctatactgaagtcattttcctttgtgagaggaaatatgaatgaaatacattcatacttaaaaacagagtattttactgccaaaactttaaatatctcaagagcataccacattttaaacacattatggtcatgtagctatttcaatattcctgggagtggtgggcaattagcctgtctatggcttaggatctgtttccatgcttgcttcctgagcttcttctacctctgagagtttttcatcattttccaatgtttgctgaagttcatggatggtactaagaagaacatgaaactgtttccgtctcaattccagcttatcttcaacactttctttaatgtgtgaaagatgctctaattcttttcccagagcctctagttcctttaatgtctcatgcctgtctggatggtgctgaatcacttttgccaaagcatcatattcttggcgattttttcgtattcgttttgcttgaagaatttgctttttgcactcagcaattttttcatgtgctccagctatgctacattctatttccttgtaaattttttcataattttccatttctctgagattcatatcatatactagtaaagttttgcccattgaaaattcacattgagacagcgtgctcagcatacgttggtactggctatatccctcttcctgggacccagagttgcaccatttaatgaaactcttcactagcagattaattctccgatcatctccagcaccatctccatcaatgaggagacgcttccgtataacttcgtcgtcagtcacggctcccatggcgtgcgcggcgtcggcgggacccgcgctccccgcgctcccggta

SEQ ID NO: 134369 - DNA, 942 bp, Homo Sapiens
  misc_feature (839)..(882): n is a, c, g, or t
tttttttgatttctcaaagctattatttattctgtacaaggttccactgtacattagacattcttctactcttgcttacacagtaaacaagtgtacacttgcccttgggctcaggttcacaggtcttctctggagaagggtgtcaggccagtaaaactcagggtgtctttctctgatgcctcctcctaggagcctggaatgtgccaggctccacggggcacaagccgggcccagctgtgtgggtgaacagctttactctccaggacagcacagagttttatccaactatgtagggcaaaattgagcccacaggaaagaaccatacaactgaggcaagatgtccccaaatacccaggctccagctcccagggcaggactggagaccagcgctaagaagagctgaggggtggcctgggcatccctgagaaactcggtccaaagggcctattgtctaggaggctctgagaagggggcgggggcaggaaggccagggggaaagggatgttaagagaataaataaaagggagagaagctctagggacgaggggcttgtgctatccttcaaacagctggggagcagaccaggggtgggctagaggacgtgggcgggaagaacttgatgccctgtcggaaggaatctacctgctttcttctttgcctcactgcaatgcacaacgagccagggctaagggcaggatccctttcccaggcgggtttgaacagagcactggggaaaagggaagaggctgagggatattcaggaggggcagttaccccctggtccccaaatgctataaggcacaattcttggaggcaactaaattccattcaaaacattnnnnnnnnnnnnnnnnnnnnnnnnnnnnnnnnnnnnnnnnnnnngcctacagccgcggccgcaagcttattccctttagttgagggttaattttagcttggcac

SEQ ID NO: 134370 - DNA, 1656 bp, Homo Sapiens
gatccgctgggttatgagcaaaccgcacccaaggggttagagggattctgggtgagatgggatgagctcccaaggcctctgaggcttccacccacacccaccctcactcccagggtccaagagaggcccagaagttgtacagcagcatccagcaaggccccctcgcacaggcttggacttacaggccactcacctccaacaggggagatagtcacccatgtactgcaaaaacagggactaccggaagcatgcctagggcccagaagtgtggaagcctggagtagagctgggtcgaggggccaggcttgctgcactgtgccgactgctcccagggtgacggcctgtgcccagtgcggaatatggcccatagagaggatgctgtcaggcagaggctctagcatctggcttttattggttgcctttcttaaacccagcattttttaaaaagtcacctgaggtggtagtttagtcagggctggagaaaggggtaggccagtggtcagtcgggaggagggtaccggtgtggcatgatgggtgcttcacatgtagtaccaggccaagagtccagcagctagggccacaccagcggccaggatgaactggaggctgggcttcctcagcacagccatagctgttcggaagggacagctgctgccctccagggcacctttgtcttgttcagcagcgtagaaagggcatttacgcatgtctcctttcccatcgtgtacagggaacccatcctccaaggtctctctggccagtgtggagccggcctggtccagttcattgaatatctgcatgttatactcaaaagccttgttggcctcctccacgatcctctctttggtcttcatgttcaggtccagggcgttcatcctggcccggtagagctgcttgaactgctgggcattgtccacattctcaaacaggtagaactgggtcccttcccctgtgctggggagtttcagtgctcgctgggccaccttcttcagcacctggccccccgagagatcccccatgtagcgggtgtatgcatgggccaccagtagctccggctcgttctgccctatgtagtggatccgctccacgtacttctgggcagccttggggcactgcacctgctcctcccagttttcaccaaagaaatactccatgtccttggtcagcgcctccttccggtgcagctccatggggaagtacaaaggggcaaaggctggatggtccttgttgcgctccatttcctcctcgagggctgagtatgtgaagtaaagtgccgtggtggccagcttaaacagctccttcttaatgttgcctttcaagaagtccttgacaaactgggtgttttctgcccggtcgtgtgcttccttggtcccttccttcaggagctccgagaggtcagccattctcatttggttctccttttctagggccccagagttctttttttctgactcgtctaccccctctgaggtttccacttccgctgacattgctgctgggtgtggttcttgctgctctcgctcctctggtcctgccgcaggtcgctgtcgcctgtccgccagcctccagtcagcgtgcccgtcagcgactccctcaggcgccgcagtccctgcctcgtgccgaattcaacacccagctcgtactagcctatagtta

SEQ ID NO: 134371 - DNA, 1033 bp, Homo Sapiens
tttgtaaataacaaacaccactttgttatgaagaccttacaaacctcttcttaagacattcttactctgatccaggcaaaaacacttcaaggtttgtaaatgactctttcctgacataaatccttttttattaaaatgcaaaatgttcttcagaataaaactgtgtaataatttttatacttgggagtgctccttgcacagagctgtcatttgccagtgagagcctccgacggggcaggtactgtgccagggcagctctgaaattatggatattcttatcctcctggttccttcggtgccaatggtaacctaataccagccgcagggagcgccatttctcctaaagggctacaccactgtcaacattatcctggactctgtgtctctctctgttgggtcttgtggcatcacatcaggccaaaattgccagaccaggaccctaagtgtctgatagaggcgatgatcttttccaaagtcagtacttacaaactggcattcttacaggctgcaccatttcctagtatgtctgctttaagcctggttcaacctctcatcgaatattaaatttttctttgtaagaaaaatttgaagttgtagagcatggttttttgttttcctttgtcttaggaaagttttaagatgaaatgtttttcctttttggtcgcctccccatctgaaaaacacacatttttgtgtccacaggaatagcacatttagtttctttagtcttatgtttttcataatctcacaaaatgtaaatggcagctatgatttcaccgtcaactggcagcgagaacctcactaagaaccatctctgctcagcctatggagctccgacatccacccagacagctggatctcgcttcaccatgtgccactttccagctctatcctacgaagtttcagaattgggcgaaggccaggcgtggtgggctgtgagggccacgttacctctcggtgcagtgtcacctgtgtgagatgggagccaggggcatcacttgctttcctgccgagcgtgctatgggaaagccag

SEQ ID NO: 134372 - DNA, 643 bp, Homo Sapiens
  misc_feature (566)..(566): n is a, c, g, or t
ttttttaaacaattgatttaaatccatgtcattttactttatatgtactggtctctcatctgactttaggcgttttctgcggggctgtataaagtcttcatcagagcctcagttacctcaccatcatcctcttcctgctcaaactctggcaaaggtgcgaaggtcctgtctgagtagatctctgtgagtttatcttcaaagtacaatgcaactgcttccctgcctgagctacttctgaatcagccttcaaattaatctcttgtgtgtctgcataaacttgaacaactttcatcatttcattaaacctttccacagttcttgaagatcaaacggacatcggccacaaagtcatccgggatttggtagtgttgggaatgttttttctgaagcttctttttcacggtgggataaatccattggtttctttataattttatagtagtttggtatcgaagcaggaacaggctcctggaattcaatacttaattcatggcaatagaggtaaagcagaagacgttcacatttcctttggtccacggggcttaacccctgcgcagttttccccntcttactatgttgcaaattatcacaatcatattcaacttctggctttccaatatctctacaaaatgtgcattatcca

SEQ ID NO: 134373 - DNA, 633 bp, Homo Sapiens
aaacaattgatttaaatccatgtcattttactttatatgtactggtctctcatctgactttaggcgttttctgcggggctgtataaagtcttcatcagagtcctcagttacctcaccatcatcctcttcctgctcaaactctggcaaaggtgcgaaggtcctgtctgagtagatctctgtgagtttatcttcaaagtacaatgcaactgctttccctgcctgagctacttctgaatcagcttcattaaacctttcacagttcttgaagatcaaacggacatcggccacaaagtcatccgggatttggtagtgttgggaatgttttttctgaagcttctttttcacggtggataaatccattggtttctttataattttatagtagtttggtgtcgaagcaggaacaggctgctgggattcaatacttaattcatggcaatagaggtaaagcagaagacgttcacatttcctttggtccacggggcttaacccctgcgcagttttccccttcttactatgttgcaaattatcacaatcatattcaacttctggctttccaatatctctacgaaatgtgcatatccagtcctcacttggaaagctaagtagtgttggaacatgacaagttagcct

SEQ ID NO: 134374 - DNA, 1088 bp, Homo Sapiens
  misc_feature (62)..(80): n is a, c, g, or t
gtgccatgctcaaaattaaccctcaactaaagggaataagcttgcggccgcggctgtaggcnnnnnnnnnnnnnnnnnnnaaggaaaaaagtataccttttaagttcagcttccttaactactggcaacagagagaaactcataatttgttttaaaaagcccagttacagctgccctgcctacccatggaccattgacttcccagcacactcttaagaataatatacagagaggcaccattttgctctgggtcttatggaatcctagagctcttgaatacgttttggtggtcctacggagagctgtaactagcagtggagttgttgcttattccagctgtgtgcttttcactttccgatctttggacccagagaatcatttgccatggaatcatctggctagtaagacactcttatatggatgcaatacaaaaagtggtaaattaaagcaaagcaatcatgtggtccttactctaaaagagacaatatgtaaatgtactattataataaggtagctctgcagatgtaataagctactcataaattatttgggtttaagaaaacttaagactatgttaaactggacaacatctccatcttgagtgagagtaattagtaactaggatgaccacacattctcctaacacgggcaacagtctagtctaattgttattgcatttctgacctgattcttttagaggggcatatattcgcaatatataccatttagaatgtatgtatgtttcttgggatgacttaatctgaagccatataggtccaaagtagtgagactctcgtgccgaattcttgggctcgaggggcaaattccctatagtgagttcgattaaattcgtgatcatgtcatagctgttcctgtgtgaattgttatccgtcacagtcacacaacaacgagcggaagataagtgtaagcttgggtgcctatgatgagcactcacatattgcgtgcgccatgccgcttccatcggaactgcggcactgatatgatcgccacccgggaaggcgtggtatgggcctcgctccctcatgaccttgccgtctcgggcggaggtcatctcaggggaaggttca

SEQ ID NO: 134375 - DNA, 1052 bp, Homo Sapiens
  misc_feature (651)..(941): n is a, c, g, or t
  misc_feature (992)..(992): n is a, c, g, or t
catttttcaagagtagtttctgctttgttaatatttatacacaggctacttgttgaagtaattaattaaaaatataaccaagtgcctaagtctttcagctgatgtactagatattaaattctcctaagttatgcagaatcgtttttacaattttgataaattatgcactaatgtaatggcagttttttaaaatgcagatttaagcctgtacattattgaatctgatgacttggcaaaagaatcaggtgctttcagctttcttgagaaaaccctgtatgtagtgtttgcactgactaacaagatggtattgctgggtttttaatttaaactaattaatttggttgttcattgcattatcttggttaaatattgtttattgttacttcatgttggggtttagtttttcttgttttttgactgttaggttgataagactatgaactgtgtaatagtagaacagtggctaacatttattcatacttaagaacatgaataatttctgccttgctaaaatgtgactgaaatggttttgacttggcatctgaaagtatacaatgtgttcaacaagtcatgcatcagatttgtgggaggtattgtactgaaacctaaatttcagtcaacatttgaaaagaacctcgtgccgaattcttnnnnnnnnnnnnnnnnnnnnnnnnnnnnnnnnnnnnnnnnnnnnnnnnnnnnnnnnnnnnnnnnnnnnnnnnnnnnnnnnnnnnnnnnnnnnnnnnnnnnnnnnnnnnnnnnnnnnnnnnnnnnnnnnnnnnnnnnnnnnnnnnnnnnnnnnnnnnnnnnnnnnnnnnnnnnnnnnnnnnnnnnnnnnnnnnnnnnnnnnnnnnnnnnnnnnnnnnnnnnnnnnnnnnnnnnnnnnnnnnnnnnnnnnnnnnnnnnnnnnnnnnnnnnnnnnnnnnnnnnnnnnnnnnnnncgctgcgccggtcgttcgctgcgggagcgtacactcatcaaggcggtatanggtatcacaaatccgggatacgcagaagacagtagcaaagcatatacgcacgacgtaaag

SEQ ID NO: 134376 - DNA, 1164 bp, Homo Sapiens
  misc_feature (150)..(159): n is a, c, g, or t
acaaggatggcgtaacccggaaatatgggggaaggatatatacaacaaatttttaattatgtactgaaaataaattacaggaaataactttaaaatgcaacagaggacaaagtcacaataaacattcccattgaattcccttggtgggcnnnnnnnnnntgagattgcagtgctcaagataaatatcacaaatatatcaaaaacttcaaattgtctatgcattcacacactgacatgagccacaaacattcctttcacagggactgtacttatttagcctaccacaggaccagattttgccataaactacaaaacttttaatacaaaatcgtatttatatatttataagtcatatacatgccctatctgtgattttagaaaataaaagctacacactgtacagacactcttaactcatagctgtaggcaacatttttggatggaatttcttccccaataaaattaatggcatattttatatacatgaaggctaaactgcaaaaagacagttcagtttcccagatatgcatctccttttagggcaagtttataaatttaaaaaggcaagacaaatgtacacctcagaattactttcttagctacaagagttgccatgtaatttctgtgaagtttctgatacatgcattgatgtaatactggtattgaaggcagtaaagcaatatatacttttaatgtagtggctcaataaaggcttcattgtctttccaatctggttcttgaaacagtgattcataaattctctaaaaattaaaatttcaatgggacactgtgttaaagagactctaaatagatttctgaaaatatttccctgaaatatccttttacataagacaaattcactaacattagattaagtaaaaagaaataaaagagttaaacatggcacaaaggtgcatgattaaccaatgctcctcagtccatctgcatgtcttaggagccattaaaagaatgcttaaaactaacaaacatcttcacactctgtggcagccatctgtgaagccagttacactaaactacttctacagttgattgtaaactttggtttatttttatttgagttctcattgtacagcaagcatgaaaaaaaagagagcccggccgtaatggccgaattcccgggcatatgtccggtaccgtcgactg

SEQ ID NO: 134377 - DNA, 1843 bp, Homo Sapiens
aaagagcctgttcctttcataatctttcctccaggctttctggagaaaatggttactggcgtgcaaggggtggacaaatcgagggtataagcacacgtctcggatgtgatacctattcagaatccacgttaagaatcgttccaagcccaagccatatcctccatggggacatgtaccgtattttctctgatccgtataccagtaatagggagtggggtcaatcccttcccttttataacctgccagtatttcttcactatcaaagatacgcattgagcctcccacaatctcaccaaccattgggcatcaacacgtcgacagattcagtaagacgggaatcctcaggacatcgctgcatgtagaaggacttgatctccacaggaaatcgacacagcaagattggttcattaatggtgtctgtcatcagtctctcaggagcttctgggatatcttctccaaattcatagaaagttccatcttctttctttacatcatgttcttttagccaaacgatagcatctgaatagttcatccgtttgaaaggccgtttggggggctgaaagttcgggttgagctcatgcactatgctccctgcaggtgacttcaatattcgatctaccacatcacaaaccaagtcctccaaccggttcaggaggtcgtcaaaagtcaggaaaggacactcagcttccacgtgagtgtactcagccaggtgccttcgtgttctggactgctctgcccggtatgactgagcaatacaaaaaacatctcccagggctgggaggcaggtctccaagtacaactgagaggattgagtcaaaaatgcctcttccccaaaatagtcaagcttgaagagtgtggcaccaccttctacttgtgtttgcactaatgttggaggagtaacttcatagtaccccctatcaaagaagtgatctctaaagcacctggtgaccatggatcgtgcttttaggattttggacatgttttctcctcggatcatcatgtgtctgttgttgagctggacatcaacgtcagactcctcattgatcaggttgtcagctcctccagcaggggccaaccccaattagttcccagaagtcacaactcagctcatggccacctggagcctgcttgccctttggggtaagatttagcattccatacactgcaacactgctctccgtggacaagagaactccattgtagcactgacacaactcatccgccaagacacactgaagataacctgtaccatctcgcaacaccagaaacattaaattctttccttgcctgcgcagcctgtggacccagccaaacacctttactctttggcctctatatccttctaacgcaccaatcttcacacattttggctctgggagacttggatcatttttaatggtaatcttctttgcttcttccaggttcttttctcttcgtaaactatcttctgcctctttcttttcccgggattcactcttcatttgttccctatgccacatctttttaatgttcttcaactgtgatttagaaataacattccacctctcattttctttttgtgaatctacgtaaatggtaggaaatggttctttccctactgtcatcaaagcctttagacctgttttaaatggtttctccttggttccatctcccgtggcatcgcttccctctcggtcagagacgtacagctctgctagcaccatgcctgcagtggccctggtcacctccaaggacacagactgcaacaccgacgccgtcttatgactccaacgtgcaccggcggtttccgcgattccggcggacgcgtgggtcgacgatatcccgggaattccggaccggtcca

SEQ ID NO: 134378 - DNA, 891 bp, Homo Sapiens
  misc_feature (785)..(819): n is a, c, g, or t
aaaggagcctggtgccgtgcaagtatgctgtgcctccacgcttctggagaaatgggttatggcgtgcaacgctggacaaaatcgagggtataagcacacgtctcggaatgtgatacctattcagaatccacgttaagaatcgttccaagcccaagccatatcctccatggggacatgtaccgtattttctctgtttaaaaaaagaaagaaagaaagaggagtaaatacttaagttaaaactttcatctaagacagttaaaattttccaccatgaaaggagttagctccctgtggttaaggaattcacctatggccagattcagtggctcgtgcctgtaatcccagcacttaatctctatgccttcatgaaccatgcataaagaaataatttggtatgaaaaaatcaaccagggaataagtactaccctggaaagaagagatttttaaaaacttttaaaataagtcaatgtctatttataagaggaaaatgaagaagggtactagatactggtaggatcaattttttaaaactcagttgcaatcaacaagccggccgttaaacaggttttcaaatgaaattaacatataacttggccaaaacaagctggcaatattcacacaccacattataacctgcaaactgaatatagctcattcaaataccaagtactaccctgaattctccccttttaaaaatttcaatatatacagaacgattacagtggaaaaaaatgcccggccgtaatggccgaattcccgggcatatgtccggtaccgtcgactgnnnnnnnnnnnnnnnnnnnnnnnnnnnnnnnnnnncgccgcttcctcgctcacagactcgctgcgctcgtcgttcgttcaacgagtagccctatatgattatcattt

SEQ ID NO: 134379 - DNA, 1507 bp, Homo Sapiens
  misc_feature (684)..(696): n is a, c, g, or t
  misc_feature (1091)..(1113): n is a, c, g, or t
  misc_feature (1119)..(1119): n is a, c, g, or t
  misc_feature (1132)..(1345): n is a, c, g, or t
  misc_feature (1460)..(1460): n is a, c, g, or t
ggaacattcctacatctgttttgctgaatctcctagtaaaagtcatttttttaaagtaatattgtatgcttacaaaagctgtaaaaatgaacttttaaaactcccaccagcttttaacagtataatgttaaaaatatactgtaatttttgttaatctcaagtttgggtttttaaagacagcaagtctggtcattcagtttaaatgaatggttatactgtttttaatgaaataagccattttcttgttgttttcagtactacatagttggatttgtttgttctagtttctccagtttttgtcaacttattgtatggtaaaacatagattttttccccccaaacttctgttttataatatgtaatttttcatgaaaagaaagggctcagaaaaattaggatgtgattttggttggttttaaattactgtaagttttagattctaaggttcaagatttttaaaatttgatttaaatgaagaaatggatttttctctctgcccctccctgccattcatattttctgcataacactattaataatatcaacctccacagccccttattttattatttccaataattccaagttcatatagaactgataatgtagcaagccccaagtatgataataggcagactattcccaactttctgtctagtttccagccattgaagtgaactgctnnnnnnnnnnnnntaattgaaatgttgagagagatggttatgtaagttagtcctctgctgtttacttctgcaggagctgatccatttataaatgcagttttaataaaccatggaataccaaggcacaacatatcaaacacattggatcccacgatgttagacatagccatatctcctttccctacaaaagaaaagcatactgttaaaatgtgcttaccaatactgtgttttattaataatcttcataagaaaagaaacactggatacttttttgttgttgattcgttttgaaaaattgttgttagagcaaaagtcttactgaatttgtatttttaaatttttcttgggttagtatttaaagtcttaacatttatttaataattatatttattaaaccatttttcaatnnnnnnnnnnnnnnnnnnnnnnncctcgntgccgaattcttnnnnnnnnnnnnnnnnnnnnnnnnnnnnnnnnnnnnnnnnnnnnnnnnnnnnnnnnnnnnnnnnnnnnnnnnnnnnnnnnnnnnnnnnnnnnnnnnnnnnnnnnnnnnnnnnnnnnnnnnnnnnnnnnnnnnnnnnnnnnnnnnnnnnnnnnnnnnnnnnnnnnnnnnnnnnnnnnnnnnnnnnnnnnnnnnnnnnnnnnnnnnnnnnnnnnnncattatgaatcgcaccgccggggaaggcgttgcgtatgggcgtctccgctctcgccatgatcgctggctcgtcttcggtgcgggacgtacactcatcaagcgtatacgtatcaanatcggggataccagagaaagtagcaagcacaaagcagacgtaaagcg

SEQ ID NO: 134380 - DNA, 1063 bp, Homo Sapiens
  misc_feature (33)..(33): n is a, c, g, or t
  misc_feature (37)..(37): n is a, c, g, or t
  misc_feature (67)..(67): n is a, c, g, or t
  misc_feature (71)..(71): n is a, c, g, or t
  misc_feature (74)..(74): n is a, c, g, or t
  misc_feature (80)..(80): n is a, c, g, or t
  misc_feature (91)..(497): n is a, c, g, or t
ctgagctcgattttttgatctcgtcaaggggcngganctatgaaaaacgccagcaacgcgccttttnacgntcnttgccntttgttgcccnnnnnnnnnnnnnnnnnnnnnnnnnnnnnnnnnnnnnnnnnnnnnnnnnnnnnnnnnnnnnnnnnnnnnnnnnnnnnnnnnnnnnnnnnnnnnnnnnnnnnnnnnnnnnnnnnnnnnnnnnnnnnnnnnnnnnnnnnnnnnnnnnnnnnnnnnnnnnnnnnnnnnnnnnnnnnnnnnnnnnnnnnnnnnnnnnnnnnnnnnnnnnnnnnnnnnnnnnnnnnnnnnnnnnnnnnnnnnnnnnnnnnnnnnnnnnnnnnnnnnnnnnnnnnnnnnnnnnnnnnnnnnnnnnnnnnnnnnnnnnnnnnnnnnnnnnnnnnnnnnnnnnnnnnnnnnnnnnnnnnnnnnnnnnnnnnnnnnnnnnnnnnnnnnnnnnnnnnnnnnnnnnnnnnnnnnnnnnnnnnnnnnnnaagaattcggaacgaggattaatcattatttcttcagtataaagttattcttcctgaaaaagtaagatatacctgggaaatattcttggatccttcacacatccacttaatttcttgaaggaagaaaacagacaaaagacatgtaacaacagaaacaaataaaccacttactgtaaaatttcagaaattgtgggctcattccctccctctagtttatttatttgctcatctttatcacctaatggtagtttgttttctttggtagagtatatggcagtcccacatcgatgataattggtgctcccttcatccaactggatcactttgagattcagttttacatcattttagcattttgtttgtatatcagttgtgatgagccactgataaaattttgttctaaaatgaaacatattactttgttagtacattttttagtgtcacactgacttttaaaatttgaatgatatatagactttgtttttttaatgcaatatgaatatttgctcatgttttctaaattccttataaaataaaattaattcgaattcaatctgcactttctt

SEQ ID NO: 134381 - DNA, 1044 bp, Homo Sapiens
  misc_feature (831)..(831): n is a, c, g, or t
  misc_feature (854)..(854): n is a, c, g, or t
  misc_feature (881)..(881): n is a, c, g, or t
  misc_feature (894)..(894): n is a, c, g, or t
atacacatccaattttattaacattcacttataaattatctgcccttgtcatatattggaatcgtgttttttaggcaaatataacaatcctctactgcaggagagaaagtcttcttggtgatatgagaaatactggtgtgataatttcataaattattcaagtctgtggaaacactccagttcagagaagggtacctggatttgttttcagctttctcaattttcacatgcacgttaggctatctggttttgatagtgcgtgttttcttctattaagtgagatagctttctcaataattatatcagaaacagcagcagtgagtgactagagggcctctactggcctcaggcattttctaaaaaccggaattagctgtcaaattttgagaatacagagcttcccacggcctcccccatccctgcatttggtgtgcacctcacaatttcatgcaatttagtgacttgccaagctcctgcaggcatctgtgtttgtgctgaagatgtctgtctcctctgcggtgcaccgtgtcgtgtatcacagcatattggaatgggtctgtaggtaggaatagctgatttgttattcaggatggctttaacagccgctggaaggaaacaccatcttatggtagttgctcttccacacagctttgttctctgcatgggtgaggggtatctctggggtccatcaactattacatcatgatgcctgtgcaatatttacttgcttacgtccaatctactggggtcctgaagaatagcttttttcttcttcttagctaatattacccctccttttctctactgatagagtactgggaagcagaatcnctatctcaacttctctcacaacntcccagctcccaatcatctcagtctgnggactggggctantgctgatgtggctaactgcttgctgttgcatgaacattgtaaataagaagatcaaaaggagttagagtgagataggaatagacaatagtctgagaagatatctctgagtatacatcacaaatggtctctacacaaaaaatagtgcagaaa

SEQ ID NO: 134382 - DNA, 1089 bp, Homo Sapiens
  misc_feature (73)..(99): n is a, c, g, or t
aacgaccggccaagtgccatagccgaaattaaccctcactaaagggaaaaagcttgcggccgcctgctcaggnnnnnnnnnnnnnnnnnnnnnnnnnnngggttgcaagatgtttattaggaataagcacctgtgaaaagaagaggaagaagaggaagcaggcctgggcataggaagtcaaattgtgctgcaggcctgacgaagccctggctggcctgggcctgctgggagtactgtctgtcagtgtccgtcccatgttggattgaaatgaccaggtgtttataccatgcctcactcagacaccagatacaggctgccccaggaagggcgtggtctcaggtgaagtggctctctgcagctgcggccaccctgatggcacttcccatagctggggaagtcctcccttgaagggagttctgggggcagctgtccctatcttccacaccttctcaactctacctcctcttacttcgccagcttgctttcaaccatagaagctgataataatcagtcactgttatttccacactcacccctggctcccactgggaaaacagatgctttgtcccaccttatgaatacactggatctcgtcagatgagatttacggggaggggtgtcagtgggatatatgagggaaaatctttggtctcatttgttacacattagtcagaatctcatagacaagattcattacactctgttgtctcttggtcattcagtttatctactccgtatgctaatgttgccatgctctgttaccattccactacttcagggcttcatttgtgggcctatttcattctgctattcacctgctatggatttgatcacctgccctttgcttctcatctatagtccagccttgtccgacctgtttgctcatgctttctttagttgttctctccgttcctttttctccttatgtgcactcacgttcaccgttatgttctcccatttccatttcctttgttcagcatgacatgtcttgtttcccctttttatttttggcttcatgttcttactcttttttatccttttctattcgccctgtctgtccactcatttgtcactttgcttgtatgtttg

SEQ ID NO: 134383 - DNA, 1037 bp, Homo Sapiens
  misc_feature (24)..(24): n is a, c, g, or t
  misc_feature (28)..(28): n is a, c, g, or t
  misc_feature (38)..(38): n is a, c, g, or t
  misc_feature (62)..(62): n is a, c, g, or t
  misc_feature (64)..(64): n is a, c, g, or t
  misc_feature (148)..(148): n is a, c, g, or t
  misc_feature (156)..(156): n is a, c, g, or t
  misc_feature (181)..(181): n is a, c, g, or t
  misc_feature (183)..(183): n is a, c, g, or t
  misc_feature (239)..(240): n is a, c, g, or t
  misc_feature (248)..(248): n is a, c, g, or t
  misc_feature (259)..(259): n is a, c, g, or t
  misc_feature (261)..(261): n is a, c, g, or t
  misc_feature (284)..(284): n is a, c, g, or t
  misc_feature (320)..(320): n is a, c, g, or t
  misc_feature (344)..(344): n is a, c, g, or t
ctgctgaacgagtttatgtactgngctnacaccattcntgttgtatactgcttactaagctntngtcatgtcctcgtaaatgcttctctacgattatgttacgtttctgttgtactgacattgcctctttaacacgtatactgctccntataccgntccaaagtgagccattgcaggtcgntngttcccccctcccccgaaagtctgcgcgacccgggtggccggatagtgtgcagttnntgagcctnggctgggaccntncaggaagctgaagcgaaaatgcntagccccctgggcattggaggtcctaccgcagctcntagtaggtgtgggggcgcagcgcntgtccccactcagtcctggtgggtcgcacgtaacggtcctgagctatgcataagccgtttgaccacgcatggagaatttaccacccagagacacgcgagtggccctgtgcaagtttcaactgcgcggggggcggggaattccgcagacaggattctagaatttatgtcttgtgtggtaacatttcagccggtgggtggcggggattaggcgtgaagcggttcagcaggcagaggttctcggacgccctccggcgaagccacctgttgatgcttttgactttctgtccttgttcctcgtcccatctggagcatttccaattctggttttgcggagcagcaggtctgagcttgtccggcgagggtgggagttggtcccggcggagatccagtgggaagagccggcggctgcccgggcgtgagtagaccgagaatcctgcccgatccccgcccctgggctggtgtcgccctgggctcctgggacgtcggggcactgtcccccgatactggcagaaaaggattgagtcctcgcttttggccctaggtctccttgagcctccagaggactcacaacactccggggcatgttgctctttcaaataccaggaatggactctggggaatggggcacccttgaagtctgattatttcttccctgtagagccccaggggctaattaaactcgtgtttatggaa

SEQ ID NO: 134384 - DNA, 310 bp, Homo Sapiens
gccacctgttgatgcttttgactttctgtccttgttcctcgtcccatctggagcatttccaattctggttttgcggagcagcaggtctgagcttgtccggcgagggtgggagttggtcccggcggagatccagtgggaagagccggcggctgcccgggcgtctccttgagcctccagaggactcacaacactccggggcatgttgctctttcaaataccaggaatggactctggggaatggggcacccttgaagtctgattatttcttccctgtagacgccaggggctaattaaactcgtgtttatggaa

SEQ ID NO: 134385 - DNA, 567 bp, Homo Sapiens
ttttgagctctcttggcctttattgcccatagaaaacataaaaggtcagcaaagtcacacgagcatccacccgtcatcatatggacctctgtccttggctgtgttgaattccttcccggccagctgactggacctcggaacacagtggctgtatgtgctgagagtggcttccaggccccagggatccacagatcccagcaccccggtgcagccaacaacacagggtgtcctgtctactgttgggtagcatgggaagggcctggcctcagggtgaaggttcccattgcatgttttccaggtgcttctgccaggggactgctggaggtggttcagctcactacagtggccgtggcattgagtcagagattggcaaaggataaggctgtgggtgcctctgcccagcttctaactccagggcctgcctcaagagggacttccaggaaggcggtcagaccagcagcagtgggtggagaggtgctcctggcctggttggaaaagagatcttgctggctagacagtcttgtgagactccataagggaggaacctagacctcgtgccgaattctt

SEQ ID NO: 134386 - DNA, 1117 bp, Homo Sapiens
  misc_feature (314)..(573): n is a, c, g, or t
  misc_feature (1031)..(1048): n is a, c, g, or t
cgcggattgagaacgcgaaccaaaccgaaactatcacgagttaagaataaacagtgcaacagatccaatgaagcgcatagcccaccaatagtgagaaccagtcatacaacacagattacagctttatcagatcacatgttgtgaatatgaaaaaaccattcacccagaaccagtatgaatggctcgaaatcatagactcatttaggaaattggccttgcgccaagaattcaacacgagcccatgtactcgcgacactgggggaatgataaaataagtgtactgtataaattcagatgcgcaatctatgtatcgnnnnnnnnnnnnnnnnnnnnnnnnnnnnnnnnnnnnnnnnnnnnnnnnnnnnnnnnnnnnnnnnnnnnnnnnnnnnnnnnnnnnnnnnnnnnnnnnnnnnnnnnnnnnnnnnnnnnnnnnnnnnnnnnnnnnnnnnnnnnnnnnnnnnnnnnnnnnnnnnnnnnnnnnnnnnnnnnnnnnnnnnnnnnnnnnnnnnnnnnnnnnnnnnnnnnnnnnnnnnnnnnnnnnnnnnnnnnnnnnnnnnnnnnnnnnnnnnnnnngagtatcattttaactagggaggagagggaaggcttcccttaagaggtgatatttcaactcaaggatggtaaagagggaagccacaaagacactcgaaataaaggtttcagggaagggacagacagcaggggtggcggagaggtgggtgcggggcaggagggccatgaaggcgctcgtgtctcctgcgagggctcagggtgctcggcctgtcataaatggacttaggctttgacagagcagtttagctgccctaaagaaacctgggaaggttcccttggcacttgggattgtccgtttccttttctgtctatgtgcgctgtctatgctggacttgagataattctccggagtccgactcaccaggagactcgggtgtcacccagattgaccttcaaggctcatttcttgtcagtccagtacccgtcccctcggttcacacgaccatccagaaacctcnnnnnnnnnnnnnnnnnngcatacagccgcggccgcaagcgtattccctttagtgagggttaattcgagtatggcactggccgtcgt

SEQ ID NO: 134387 - DNA, 1046 bp, Homo Sapiens
  misc_feature (812)..(812): n is a, c, g, or t
  misc_feature (869)..(869): n is a, c, g, or t
  misc_feature (880)..(880): n is a, c, g, or t
  misc_feature (889)..(889): n is a, c, g, or t
  misc_feature (893)..(893): n is a, c, g, or t
  misc_feature (1031)..(1031): n is a, c, g, or t
gaagtttcaacctttttattcaaagcagcttctcacaatgtataaatactgcatattagcacacatgaaaaatacaacttctaaggcacccagaaatgtgttcatacacgttacaggaccattcacaaagagagtgtacaatttgctctagacagtcaggatttgataaatcagaagattattatccctcagtactgcacccagtctcagtaaatatttacaacatggtgagaaggggtcagctgtactttctttataattctatgaagtactcagacttacaaatattcagaactagttaaagactctcccatgataatctggcaaaataaaacaagtagcctaattttgcaaaggtctcggtggattttggtgtatgctacatccatgatcaaatccaaacactcctagggtgggctggataagtttttggtagcctgcttcattatcggaagtttggtaataagccttaccaatagaataccacttcttcagcatcaatcatttctcaactggtcaatggatcaatgattccatcatgaatgagaatggagagagaactgaagacaattcttctcacacctaacaggaattagaatgggtcaatgaagaacaaaaggaggcagacatttggaaagtgcaggatcctactgttcagtatagacatgtctgaaaattcttaccctggaggttcatattcagatggaggagtctacactggccagataactggaggagtacaggctccacttttatgatatggtacaggcttgggacacacagtagaacaccacctgagatagtgagctcanttagaactcatctttcagagccttttcatatgacacgaatcctctgtatggcaccanggggagatgangtggtggantcancagtctctgcacatcagcatgaatacgtcaaattgccacatctagaatcagcttgttaatatggatctttgtcccgtttataagatatgtccatctgtaatcaactggatgatcagctggacatgcaggacatatacntggaatcaactcacc

SEQ ID NO: 134388 - DNA, 459 bp, Homo Sapiens
acatagttttgctagtttattgtgaatggggcggggggatgttttggtaggaaaataaactggctctttaatgggaaatgggaggaagggctgtccgcacaggaatggggttaggctgtcagaagcgcagccccctgcgggctaagtcggctcgggcctcctgtatctggctctgcagctcgcgtgcggcgtcctcgcagtcatgaaaagtggccacacgatagcccacagtgcccagggcatagcagccggcggacaccagcaagtaggcgggcagtggccacaggacttcctggcaggacaagggcagctccaggcccaaggctcccgtggtcagggccacccaggtggagcccaggatcgctagtccccaaagccactgcgctaatttcgtcatggtcactctaccccacgtctccccttccccgcgcggcccggatgttggcgtccggaagtccc

SEQ ID NO: 134389 - DNA, 976 bp, Homo Sapiens
  misc_feature (394)..(411): n is a, c, g, or t
  misc_feature (432)..(859): n is a, c, g, or t
tttttagaaaataaactggctctttaatgggaaatgggaggaagggctgtccgcacaggaatggggttaggctgtcagaagcgcagccccctgcgggctaagtcggctcgggcctcctgtatctggctctgcagctcgcgtgcggcgtcctcgcagtcatgaaaagtggccacacgatagcccacagtgcccagggcatagcagccggcggacaccagcaagtaggcgggcagtggccacaggacttcctggcaggacaagggcagctccaggcccaaggctcccgtggtcagggccacccaggtggagcccaggatcgctagtccccaaagccactgcgctaatttcgtcatggtcactgcgagagaaggaagcaatgctcccctgaggagcnnnnnnnnnnnnnnnnnngaccctcgtgccgaattcttnnnnnnnnnnnnnnnnnnnnnnnnnnnnnnnnnnnnnnnnnnnnnnnnnnnnnnnnnnnnnnnnnnnnnnnnnnnnnnnnnnnnnnnnnnnnnnnnnnnnnnnnnnnnnnnnnnnnnnnnnnnnnnnnnnnnnnnnnnnnnnnnnnnnnnnnnnnnnnnnnnnnnnnnnnnnnnnnnnnnnnnnnnnnnnnnnnnnnnnnnnnnnnnnnnnnnnnnnnnnnnnnnnnnnnnnnnnnnnnnnnnnnnnnnnnnnnnnnnnnnnnnnnnnnnnnnnnnnnnnnnnnnnnnnnnnnnnnnnnnnnnnnnnnnnnnnnnnnnnnnnnnnnnnnnnnnnnnnnnnnnnnnnnnnnnnnnnnnnnnnnnnnnnnnnnnnnnnnnnnnnnnnnnnnnnnnnnnnnnnnnnnnnnnnnnnnnnnnnnnnnnnnnnnggcgcgtgctgcgttttcatagctcgcccctgacagcacaaaaatgacctcagtcagagtgcgaaccgacagacataaaacagcgttccctggagtcctctgctctctgtcgactcg

SEQ ID NO: 134390 - DNA, 1050 bp, Homo Sapiens
  misc_feature (682)..(682): n is a, c, g, or t
  misc_feature (750)..(750): n is a, c, g, or t
  misc_feature (875)..(875): n is a, c, g, or t
  misc_feature (885)..(885): n is a, c, g, or t
  misc_feature (933)..(933): n is a, c, g, or t
ccttatgtaagattcatatttattaaatcctgtagcatgtccttttcctgtgaaagtacagattcagttccattatgatttcttcagcagagatcctacacacagcagagagtctcaggtggtggaggagatacaaagatatgcaaaacaatcttcaaggatcttacacataagggggaatacaaagccataaaatacttgcaaaccacaagttatagagtttccaaagagaaagagatatcttccagccaaggtctaaaggaaaaccttcagagagaagctggcatttcagatgggccctgaagaactaaaatgaatttcacaagtaggggaacagtaaaatgagggggctgagatctcaacttcgcccatgctcctgtttccatctttgaaatctcttttagatatgacaacccatgcagtcaacttcccagctatgttgccagccccttaattctgcctctcttcctggtaaacacattctgactatcccaggaaccccctttcgtgagggctacccttctactccttccccacaaagatgcccccttcagctcttctgggtgtcacaaacaacactaatgaagcaagaaagagtagtagtgacagtctcatcagaatcctcaacccatacccctgcttcctccccattgagtcctgcgtggtgaaagatgccatccanagttagaacctggcgacgaacgtggcatgcgatctcactctcacttaaaatacttctgtgactcctcnaatatattctcaactgggcaatgatcttttctggtcatctcagactcccactcctggtcacatgactcttgtagacccgcaatgcacacaaatgtgaaacatcacaacaccgggtgattccctcngtcttgctgngctccccctggatagtcatcccacatgcataatactgaacaggtattnaaagaaagagttactactcgcatctttgtgcacaagagcatgagcgtactcttggtcgggggagctcagacttatcgggggatgtaggaagcaattcatgcaagggggaaaaaaagg

SEQ ID NO: 134391 - DNA, 876 bp, Homo Sapiens
  misc_feature (513)..(535): n is a, c, g, or t
gcacagggcctgtcctgtgttttcacacaggcctgtggctcctgctgtacaagtggagtggggaggagttgagatggagatgccttggccctggacacttacctgtccctctactggcccagctcatctcctcctgtgggcaatcacgcgtgcactggccaccctcccaccccacagcacacaccacgaggggatggcacagggggaagatgaggctggaccgtgatgttatcaataggctagaacgtccttcaaacactgaacctgcatctttcctcctcttactactgaacactttgtgagctctggtggtccagggtgcagcgtttgtccctgggcatgtgatggggagtcctgggcacatcgagatgctttacttctttctttcgacctcttaaaaaactaaaccaagccaaaccacaaaggaaatctgcacaacttaagagaaacttgaaagggatcgtgtaactactagtttgtactaagtttttttcaagaaagggaaacaaattnnnnnnnnnnnnnnnnnnnnnnngtgcaatatatttttacactgtgtgattaacattagggagtactgagtgcatcactttatcagtgtgacgggtgatgtccacgtcatggctgttctgactctgaaagccacttctgctgatgtctaaaccgcactcaccgcggacgtccgcggggtggggtggccctgctgttcctcctgcaggtgagaggtgtggtgttgcctgttggacttgctgttgagcctggcttgcaaacctgtagtgaaacagctcgtgtctgtgtgcacactgctcctgtgtctgctgtcgttaacattgtgtgtcaagttggtaaagtgacaaataaaggtgtaaaacatgg

SEQ ID NO: 134392 - DNA, 1097 bp, Homo Sapiens
  misc_feature (620)..(670): n is a, c, g, or t
  misc_feature (729)..(1052): n is a, c, g, or t
  misc_feature (1054)..(1054): n is a, c, g, or t
aatgacaataatatatatttattcgtgtcattaccatttctggtgctcttttattcctttgtgtagagagatttccatctggcattttccttctgtctgaaggacttcctttaagacttcctttcttgaagtttcagtctgctgtaaactctttcttttaagctttagtttacctccaaacttatttatttcacctttgtttttgaaggatattttttgccagttctagaactctaggttaacagtttttttctttcaggactttaaagagtttgcttactggcattgtttccaatgagaagtgtaatgtcaacttcgtctttgttccactgcaagtaactatcctctcccctggttgcatttaagattttctttttaacactggtttccagcaagttatgatgagccttggcatatttttcttcatatttctcatactcagggtttgttgagcatcttggatctgtggacttagtttttattatattcagaaaatctttggccattatgtcttcaagtatttttcctattccatctccctccccactcctctctttcagggacgccaatcaccatagataataaggctgcataaagttgtcccacaggtcactgatgcnnnnnnnnnnnnnnnnnnnnnnnnnnnnnnnnnnnnnnnnnnnnnnnnnnnagtttccattgctctgtcttcaagttcaccaattttttcctcgttccgaattctttggnnnnnnnnnnnnnnnnnnnnnnnnnnnnnnnnnnnnnnnnnnnnnnnnnnnnnnnnnnnnnnnnnnnnnnnnnnnnnnnnnnnnnnnnnnnnnnnnnnnnnnnnnnnnnnnnnnnnnnnnnnnnnnnnnnnnnnnnnnnnnnnnnnnnnnnnnnnnnnnnnnnnnnnnnnnnnnnnnnnnnnnnnnnnnnnnnnnnnnnnnnnnnnnnnnnnnnnnnnnnnnnnnnnnnnnnnnnnnnnnnnnnnnnnnnnnnnnnnnnnnnnnnnnnnnnnnnnnnnnnnnnnnnnnnnnnnnnnnnnnnnnnnnnnnnnnnnnnnnnnnnnnanttcatcaaaggcggtatacggtacccacgatcagggatacgcg

SEQ ID NO: 134393 - DNA, 1069 bp, Homo Sapiens
  misc_feature (558)..(694): n is a, c, g, or t
  misc_feature (725)..(922): n is a, c, g, or t
ccataaacaaaaaactaaataaatttattccataaagattttaaacttctacaattcattaaaaagacataaattcaaaagtcaaaatggtaaaaatattcacaacatatgacaatcaaatggttaatttccttttataaagagtttataggaataaatgagaaagaagtaaacccaaataaaagtagacaaaggtcatgagcagttcatttaaaaagaaatacaaatatctataaacatacgaaaagataatcaccttaatatcattaataattaatattttctcccacatcagcaaaaatctgcatgtttgttaaagctgagtgttttaagggtgtgatgaaatggacaccattacacaggactgcctttcaggaaggttctctgccactggaaaagggtacagcttttctagagggcaataggtgatttctattaaaatatcaaagacacactccttgcccttgtacttcaactatttatctgggcttagtacaagttctcctagctacatgtacaaggatgctactgcaacatcatgccttagagaaaaaggcnnnnnnnnnnnnnnnnnnnnnnnnnnnnnnnnnnnnnnnnnnnnnnnnnnnnnnnnnnnnnnnnnnnnnnnnnnnnnnnnnnnnnnnnnnnnnnnnnnnnnnnnnnnnnnnnnnnnnnnnnnnnnnnnnnnnnnnnncctcgtgccgaattcttgggctcgaggggcnnnnnnnnnnnnnnnnnnnnnnnnnnnnnnnnnnnnnnnnnnnnnnnnnnnnnnnnnnnnnnnnnnnnnnnnnnnnnnnnnnnnnnnnnnnnnnnnnnnnnnnnnnnnnnnnnnnnnnnnnnnnnnnnnnnnnnnnnnnnnnnnnnnnnnnnnnnnnnnnnnnnnnnnnnnnnnnnnnnnnnnnnnnnnnnnnnnnnncataatgatcggcaaccgcgggaaagcggtttgcgtatggcgctctcgcttctcgtcactgatcctggctcgtcgttcgtgggggaacgtatactcatcaaggggtatacgtatccagatcgggaacgcagagaaagttgcaaagca

SEQ ID NO: 134394 - DNA, 501 bp, Homo Sapiens
gtgagcaacaaggctgtttattcacttgagtgcaagtgggctgagtctgaaaacagagtcagtgaagggagatggggaaggggttgctttataggagttgggtaggtaatggaaaattacagtaaaaggtggttatctattgttagcagaggagggggtcacaaggtacatggtggggagatgataagacccattgtccagaagaagactgtcacaaggtcgattgatcagttaaggtaggacagggacaggtcacaatggtggaatgttgtaatgttggttaatcagttaaggcaggaactggctgttttacttcttgtgtggtttttcagctgccccagacttcttggctcctgcaggccatctggacatatatgtgcaggtcacaggggttacaatggctgagcttcggctcagaggcctgacacctcttacttctgagggattgctcaaggtagaaggttaataaattcttaaactaccccccactttcactacaga

SEQ ID NO: 134395 - DNA, 1298 bp, Homo Sapiens
  misc_feature (695)..(866): n is a, c, g, or t
  misc_feature (993)..(1161): n is a, c, g, or t
ataaatgagaaagaagtaaacccaaataaaagtagacaaaggtcatgagcagttcatttaaaaagaaatacaaatatctataaacatacgaaaagataatcaccttaatatcattaataattaatattttctcccacatcagcaaaaatctgcatgtttgttaaagctgagtgttttaagggtgtgatgaaatggacaccattacacaggactgcctttcaggaaggttctctgccactggaaaagggtacagcttttctagagggcaataggtgatttctattaaaatatcaaagacacactccttgcccttgtacttcaactatttatctgggcttagtacaagttctcctagctacatgtacaaggatgctactgcaacatcatgccttagagaaaaaggcatagtatatttggtattgtaccaatgtcaatttcccagaattgatattatactacagttgtcaccactgggggaagagtactcagggactctatgtactacttttgcaacttcctatgagactataattacttcaaaataaaaagtgtttctttaaaaaaatcatggtgcataagtatttatggtttcttacaaagtatgaaaaggtaagggcaatccttgtttaattaaattcaaaatgagtgagcagaacatatgtaaccagaaggacaaatccacccttcccttttgnnnnnnnnnnnnnnnnnnnnnnnnnnnnnnnnnnnnnnnnnnnnnnnnnnnnnnnnnnnnnnnnnnnnnnnnnnnnnnnnnnnnnnnnnnnnnnnnnnnnnnnnnnnnnnnnnnnnnnnnnnnnnnnnnnnnnnnnnnnnnnnnnnnnnnnnnnnnnnnnnnnnnnnnnnnnttatctattgttagcagaggagggggtcacaaggtacatggtggggagatgataagacccattgtccagaagaagactgtcacaaggtcgattgatcagttaaggtaggacagggacaggtcacaannnnnnnnnnnnnnnnnnnnnnnnnnnnnnnnnnnnnnnnnnnnnnnnnnnnnnnnnnnnnnnnnnnnnnnnnnnnnnnnnnnnnnnnnnnnnnnnnnnnnnnnnnnnnnnnnnnnnnnnnnnnnnnnnnnnnnnnnnnnnnnnnnnnnnnnnnnnnnnnnnnnnnnnncctcttacttctgagggattgctcaaggtagaaggttaataaattcttaaactaccccccactttcactacagagattaagagtacagttccggacgcgtgggtcgacgatatcccgggaattccggaccggtccag

SEQ ID NO: 134396 - DNA, 1038 bp, Homo Sapiens
  misc_feature (643)..(856): n is a, c, g, or t
  misc_feature (885)..(885): n is a, c, g, or t
  misc_feature (897)..(897): n is a, c, g, or t
tttggcttttaaaatttgaaatataattttactttttatttttacaatacagtgtacagtatgacatctcaaaataacagtgcagatacaggaaaagagtacaaagggggattaacaacagatgtcagaaggttacctttattaaggctaaatccctgctttatattttccacacattcacaaaattacattcaaatcattccttattgatccttatttcttaggccatgagaaaaggaagataatccagacattagattttcatagaaagcaaatctggattagtctaaataatattctccttccatttgttctgacaacgaaaatttgagaaacaaagttatgcaccaacctaaaacttccttatttggattttccaagtacatagcattagttattgatatcatttctatattaaatggtaagacctcccccacactggggtctccagtcagaaccacagagggacaggaaatggaattggccagagtggctgtacaactaggtgtacagcaaggcttttttccatattcttttgtggaggtcagcaacaactcagttttcactttaaggactatgttggatatcagcacatcctcatcactaggatttagaaaagtttaggcctcgtgccgaattcttnnnnnnnnnnnnnnnnnnnnnnnnnnnnnnnnnnnnnnnnnnnnnnnnnnnnnnnnnnnnnnnnnnnnnnnnnnnnnnnnnnnnnnnnnnnnnnnnnnnnnnnnnnnnnnnnnnnnnnnnnnnnnnnnnnnnnnnnnnnnnnnnnnnnnnnnnnnnnnnnnnnnnnnnnnnnnnnnnnnnnnnnnnnnnnnnnnnnnnnnnnnnnnnnnnnnnncataatgatcggcaaccgcggggaaggcngttgcgtatggncgctctcccgctctcgctcatgacccctgcgccggtcgtcgggtgcggagcgtacactcatcaagcggtaacggtaccaagatcgggatacgcggaaacatgtacaaagcacaaagcagacgtaaggccgtgcgggtttcg

SEQ ID NO: 134397 - DNA, 393 bp, Homo Sapiens
ttgggatttcccaagtacatagcattagttattgatatcatttctatattaaatggtaagacctcccccacactggggtctccagtcagaaccacagagggacaggaaatggaattggccagagtggctgtacaactaggtgtacagcaaggcttttttccatattcttttgtggaggtcagcaacaactcagttttcactttaaggactatgttgaatatcagcacatcctcatcactaggatttagaaaagtttaggacatttctatctaccattgctgatgaggaaggggagaatgattgatagacttcactgaccttgaaatatttatcatctcagacttcctaaaagtatggcatggcatcacctctgccttgatacaagatctgccc

SEQ ID NO: 134398 - DNA, 700 bp, Homo Sapiens
ttttcatcgtttccatacagttttatttgcaatttgttggaaccatggagaacaatcggcagatacacatgttgcttctgggaacagcattcaactccagatgctttttctgctaaggagcagggccacaggtggccctcacacccagtgctgtgctgcgcggagggctgtactgaaggttctgaaggcctggtgagtccccctcacggccagaaggagagacccggcttcggcttcatggccggcctcccgcaggtgtctgcccagctcctctgcatcccagcgcccttgctggaggctagccaagaggtggtcaacaatacgtggatagaagggagtggagacacacttcaccagcagcttggcatccaggagcagggaaagaagttcttggtcacaattggaatcattcaccgtagtgactgccgtgatttgctccagtgccatctcgtgcagatgctcatctcggctctcgaggagaagtttcagagatggaagcaggagggactggttaagcagcagcagacacagctccttcacaccctctgcaggcagcatctgcttggtgttatacaaagagcgacacattttcaaaacttcattccccaatccttccttgttctccatcgtacatctggttagcatcactgtagctagtctcacccatggattattggttatgaccctcgtgccgaattct

SEQ ID NO: 134399 - DNA, 1653 bp, Homo Sapiens
gggtctgccccaggtccttttggatcccaagcggcccttggttggaggctagcccaagaggtggtccaacaattacgtgggatagaaagggaggggagacacattccaccagccaggttggcatccagggagccagggaaaagaagtttttggtcaccaaattggaaatcattcacctctgcaggcagcatctgcttggtgttatacaaagagcgacacattttcaaaacttcattcccccaatccttccttgttctccatggtacatctggttagcatcactgtagctagtctcacccatggattattggttatgacatattcacttttcataggtggccaagcttgcaaaagtaaaaccaagtgctgaaattcagcctcgtggtgactagattccaggagttccatgaatagacagtagcggttctcttcattctcaatgtcagctatgtctacctgtctctggggccaggaggctttgagaatggcttcagttctaaagaacacgaggagcttgctgtcctcctcagtcaggtgaaatgattgccccaaaatctgcagcacgtgaatgcggggccgcaccggccaggcgtcatcagcacagaaaggccgcagccactccagcaggtcctcaggtgaaaccagctcctcacccttgtccacactggcgtggactgctgcaacaacaccttccaggaccttcagtgggtcccttggcccaccaaggtcagcactgccaccactcaatgcagaaattattttcatgattgcactctgcactatatccttgggtgagatgtcaagagggccaactgccacctctagcagctgctgaatcattgctagaggctgaccatctaaacaaatagccacagcttcatcatgaagtttctctttttctgatcgggacagatcatagaggtgactggtatttttgcagtgtttcctgctcactattcttcagagaaaggatgaagctgtggctcagggtttccaggtgggcaagtgatttctccagatgattcaaagtatctgcataggtaactttagaatccttagcttcttgagcttcgtcttctgagtttcttttccttggcttctcaataaaatgtttgactgtcttaatagcctttctagtcatctctttacgggcttccacagacagcttggtcacagcttttggagaaaatgtaactgcatctaccacagtgatgaggtcacctgggtggagacgatcaaagtacttcatgcagacatcataggcatgaagccactccggtgaagagcctgggacttgtttaatgagatgagggtctccagtccagaacaacttctgtaaccagatggtgtacagagagcttggggaaagcatctgtccatccttttcagggattttgggaacaagtttggaaatagacagatattttgacttgaaagaactggctccaatgcttccaagaggactcatgttttcatctgtcagctttttgtaattaagacctgatgcacaaccttaaacttcttcagcagtcgaatgtgggtttctggtttaatggcacagttccccaatctgcacggacgcgtgggtcgacgatatcccgggatatccgaccgtaccagcctgcttttttaacgctgttatatgtccatgct

SEQ ID NO: 134400 - DNA, 1054 bp, Homo Sapiens
  misc_feature (668)..(668): n is a, c, g, or t
  misc_feature (792)..(794): n is a, c, g, or t
  misc_feature (838)..(838): n is a, c, g, or t
  misc_feature (872)..(872): n is a, c, g, or t
  misc_feature (888)..(888): n is a, c, g, or t
  misc_feature (902)..(902): n is a, c, g, or t
  misc_feature (911)..(911): n is a, c, g, or t
  misc_feature (976)..(976): n is a, c, g, or t
tttttcaccaccaccacagccatttattaagtgcttgccaggcactgtgctaaagctttacaaacattgtttcagttattccaacaaccctgaggtagatattttcaacatgcctccctccacccatgttattatagttgaggaaactgaggctcagagaggttaagtaaatcaaccaaggtcaaacccagctggtaagtagtgaagctagaaattcaaaccaactatatgtgactccaaaatccatgcctttaaacactatcctagattgtttaccattgaaagttaaaggacatatgctccttcccaaaatatgagaatagattttcagtgggaaagcaggggggagcccatatgtaaattctttcatcagctatgggactcaaactcttggaggagtggagagatagtctgggtataagctgaccactaggtcctctcatctctccagctgccagggcctttctcattaagatctctactcctgacatctgactacgcaatatactgtttccctttcagcaaccactgggatgcagaggtcaggcacatttggtgacacagagccaaagacacctcagagaaattaggagacactcaaaaaagtccaccacccctgaactactgatccctaaggcacacagatgcatttagatggaaaccctccnatgaaggggacatgttccacgtcatgtttgatgcccatcaccaccctgcaaaggggatattggtatctccttctgacagctcagttcttccacaccagcttcccgggcctgacatcattctcannnagtctcctcagcaatcctgcactctcccctcactggccttgtangtgccacccctacccactctggaggctcatgacnaacgccccaggctcanacttccgtttctgnggtgtgccnacagatgcctcaatgtcagcaggctcatcatcatgactatgagataaccagatgctgagaagcanagggtacacatgaacagtgacagattaagactgcatggaggagaaccacagccaacagagctgctggcaatacaatgc

SEQ ID NO: 134401 - DNA, 1096 bp, Homo Sapiens
  misc_feature (302)..(350): n is a, c, g, or t
  misc_feature (357)..(357): n is a, c, g, or t
cctttaaagtaataagtttatttcatctttattaatgtcttcattacaattagccttctactaataacaatacagtttagtttaatatttatggagttctgatttattttttcctttgcttttaagtgtgctaatctttgtgcacgtgaattttctaccacattgcaacaagcaagctttggttcaattttcttgtcctacacaaaggaagattttgagtgcagaatcttagccactaggtcttgcgttgtcattttattttcctctccttgggtggatttactggaaggaaatgggtaaannnnnnnnnnnnnnnnnnnnnnnnnnnnnnnnnnnnnnnnnnnnnnnnngtctcanctatgttgaatcttgattcacaacttttgcctccattcatggttggtgttccagaacttttccttgaacgcccttgtttttctccaatttcatgtagcgatggttctctgtacatacacacttcaataggtttcggtacaaaatgtgatgagggcttggttttcttcactctgttccccttcataatttgaccttctttattgagtcccagaaaccaagctcggcctgattcttgctggcggtacagtgtggaagaatagatcacatagtagttttcaaacacagattccttgaatttgcattctggagtgaaaacatctgaactgtagagatagccttcaccattcatggccacatagaggctagccttcactccttggatggccactacacgcaggcccacgggaattagattgaagagagtgtagtcgctgttttcgtccttggtcccatcaatggtaccatctgggtgcatctgcaggaagtatccctgctggctgaataaccttgtcacaatccctttgagctggggttctttgctctccatttcggtccctttcgagtgctgggaagttcaatggaagttggccggaagatgtgggcccgcttcagattcccaaatctgggaagccaatctgatgatttcgcccgtacttccttccttcccctcaggcttcctgggtctggaagctgcaggcaggagctgtcctccgagcgtggtgctgcaggtgtagtgaca

SEQ ID NO: 134402 - DNA, 1085 bp, Homo Sapiens
  misc_feature (902)..(902): n is a, c, g, or t
  misc_feature (922)..(922): n is a, c, g, or t
  misc_feature (945)..(945): n is a, c, g, or t
  misc_feature (954)..(954): n is a, c, g, or t
  misc_feature (964)..(964): n is a, c, g, or t
  misc_feature (1006)..(1007): n is a, c, g, or t
  misc_feature (1029)..(1029): n is a, c, g, or t
  misc_feature (1035)..(1035): n is a, c, g, or t
tttttggatttaaaaacactttatagtgtgttgtttttattgagcgctcacacccgaaggggtggcggcggatgctgtgggtgagtggggccgcctgagcctgctcgggccacatccacacatccacagagtccacctggactcggaggaaggccgagaggacacggacggtggccacaccacgctgcagtgaaggcccaagtgtgatcgcagagaaagagggaaagttggagaaagagcggtatctgacaataacttttctcttggatgttaattttttggtctataaattggaaaggaaggctcggactgaaataaatacatttattctgagtaatgaccttttgggagcagtgtccgtcaactctgcttcgagagcgtctccacgtgagcagcagcgcctgtctcgcgcctcgccgaggcggaaccacaccgggcctccagcggaggcggctttctcctgtgtctgtgaagggaagtagcaggtgcgtcactgttcttaatggagcggacaatgatgccttttctctgacagaaaaatgtccggcttaactatgcaagacaagacttggtcgtcacgttcgcgtctctagttgattttgtcctggaatatgtacaagttattggtggcagccacggcaatgacattgtccacggggtgccaggctgtgtgcaggatcttcttgttgaagtccagactgtccacactgatctcgtctttcctccgcttaccccccgtacacaccttccggggtttgaggctggcgcgcggtttgctgctctctctcgagggctccagggtcacatccctccgcgtgtctctatcaacatcctgaagaagttgttataggaccggtcatgatggcgctatccgaccgttcccagcacactcaacttgtcanagatgcagtcgttctcatanagagagcaaagcttgctgcgcangtactcgtngacctggtgngtcttccaccggctgctctccatgttgaggtccaaacttcanncgacaggtatctcgggcatcangtacgncactatgactgattttaatcggtatggatgaattattctgggaagaggac

SEQ ID NO: 134403 - DNA, 1308 bp, Homo Sapiens
  misc_feature (752)..(752): n is a, c, g, or t
aataattattaataagttttattaaaacagaaggagattctaagtagctgggttcttgccacatcaaaagataaaactaggtttcctctgatcactttgaactgcttatgagtgagcatcatagccagaaactaagtccaaatcaaaagcatctacaatagctgcatcggcctccactctgacaatgcctccgccactacacttaggctggggagaaacatgtgtctgggtaaaaagggagataagggaaacatctgttctcacaatatgggcttgttatcatagctcctttaagtaccgcagtgctggctccaagagcatattttctcccgaacggaatctgcgcaaggcctggtcgattttctgagggctcagggacaggttgtaaatgagattgtagttgtgaatgaggcgtctggctcgttccttctccagaactcctgtgttactcagatcacacaggtagagggcattttccagcttcctgaacctgtctatccacgtctcacattcctcagccttgttcttcacagctggattcacgaagggctgggagactggcctgatctttaaaggtttcagaggatcttttgcaggctgaagtttcagcaggagagctttctggctgcagctcctcttctggagtttttcatatgttcagttttgctttgagacatctcggggacttcaggctccattggaggggcaggggctttctttgtcattcttccctgtaggcaaatcagatacanatcagaagaagctctggtcagcatctcaacaaattctgccattttatgttcattttggtaacccaaatcttgatggttaagcaatgtttccagcaggctcagggtcagatataatccatgcttcccacatatagccctgacattgccatccaggaatctgctactgtttgcccctgttagtagtttctggttgttttctgatttctggttgttctctgggtgctttttctctttcacatcatctggattatcagtggtttgctgatcagtgaagttaatgggaactggggtgtctctgctcatctgccttgcattatcagtcattggtttctggtgcattgtttgggtttctgttttcaagctgtcattctccttgatctttggcttctccacgaggtattgaaagtgtttacttccaatgattttcaccatgatctcaggcattgcatctgatccacggggagtcttccaggctgaagacatgattcctttcaaaatcccttcagatcccgctagggcagcgtccccacctggcagctcagaggtgcgcggtccg

SEQ ID NO: 134404 - DNA, 530 bp, Homo Sapiens
tttgtctaatatgaatcgggttttatttgtttttggatttaaaaacttctcctttgatgaatgcacatttatagggcaagttagaacaaccaatcacataaacaactgtcctcacataataggtagttgttacttaaaatgaaaatcccagagttagtaataaattcaggtacatatgattctgtatgtcaaacaaatagaagatagcatgtcctgaaaaagtttctggtgactaaaacaattgggccaaaaagacaaggacattgatgtccaaagatgcatgttaatggttcaaatgaaatgtgaaaaagcaaaaggtactaaaatatttaacatattaaattaatgtaaatttaattacccaaataaataataaaagtgaaagaatccttccttctacatcagtatatctgagtcagagccactaaagctatctatttctacttcaccaaacatctcattcccactcagtacttgaggagtttgatatacttggcttcatctccctatttctaaccttaggaatctga

SEQ ID NO: 134405 - DNA, 1288 bp, Homo Sapiens
  misc_feature (544)..(561): n is a, c, g, or t
  misc_feature (617)..(1167): n is a, c, g, or t
  misc_feature (1179)..(1179): n is a, c, g, or t
  misc_feature (1215)..(1215): n is a, c, g, or t
  misc_feature (1241)..(1241): n is a, c, g, or t
tcttagttatattaaccagcaaggtacatattacattattattactagaccatgcctccaagtgtgtcaaattataaaaatgtgttcagcatacataaaatatacattaaagatttctctcatcataggcacaatctaatacaaaaatatatttgacatttataagttagaagatccattgagagcctccaaaataggacaggggaaggaatgagtgatgacaacataaaaaaagaagcacacatagatgcaaatagttccacttatatgattattttcttcatcagcaaagggttaagagcagtttacaccaaaccaagttaccaagcagatcacaatcagttcacaggttggataagtcacggcacgcaggccagaaaatgtactcagacttcagtcaacctaatgggacagtgtactcacactgtggttttgttgttttggagtctagaagctccatctacccattctccatggtctaccaccatgttaacacagatttaccacaggcgccatctgtaccaagcctaggatagactctttnnnnnnnnnnnnnnnnnngcctacagccgcggccgctccaacatcagaatggtaaccctcgttccgaattcttnnnnnnnnnnnnnnnnnnnnnnnnnnnnnnnnnnnnnnnnnnnnnnnnnnnnnnnnnnnnnnnnnnnnnnnnnnnnnnnnnnnnnnnnnnnnnnnnnnnnnnnnnnnnnnnnnnnnnnnnnnnnnnnnnnnnnnnnnnnnnnnnnnnnnnnnnnnnnnnnnnnnnnnnnnnnnnnnnnnnnnnnnnnnnnnnnnnnnnnnnnnnnnnnnnnnnnnnnnnnnnnnnnnnnnnnnnnnnnnnnnnnnnnnnnnnnnnnnnnnnnnnnnnnnnnnnnnnnnnnnnnnnnnnnnnnnnnnnnnnnnnnnnnnnnnnnnnnnnnnnnnnnnnnnnnnnnnnnnnnnnnnnnnnnnnnnnnnnnnnnnnnnnnnnnnnnnnnnnnnnnnnnnnnnnnnnnnnnnnnnnnnnnnnnnnnnnnnnnnnnnnnnnnnnnnnnnnnnnnnnnnnnnnnnnnnnnnnnnnnnnnnnnnnnnnnnnnnnnnnnnnnnnnnnnnnnnnnnnnnnnnnnnnnnnnnnnnnnnnnnnnnnnnnnnnnnnnnnnnnnnnnnnnnnnntcgtgcgctctntggtcccgacctgcgcttacggatactggtcgcttnctccttcgggaacgtgggctttccanactcacgcgtagacccattcgtgtagtcgtcgtcacctggcgtgtga

SEQ ID NO: 134406 - DNA, 1007 bp, Homo Sapiens
  misc_feature (28)..(28): n is a, c, g, or t
  misc_feature (34)..(34): n is a, c, g, or t
  misc_feature (68)..(69): n is a, c, g, or t
  misc_feature (77)..(77): n is a, c, g, or t
  misc_feature (99)..(100): n is a, c, g, or t
  misc_feature (111)..(111): n is a, c, g, or t
  misc_feature (121)..(122): n is a, c, g, or t
  misc_feature (159)..(159): n is a, c, g, or t
  misc_feature (166)..(166): n is a, c, g, or t
cccatcttgagtcctatgatgtatattntgaacntagtgatgtctgtcactgtgtgaattatcgatannagataccntgtaaaaaggagcaaagctcanntgtgaaacatnttctctcttnntactaaacaactgaagatagatagttagaaaagatanggacctntgaaagaagacaactctgtcaagttcataaggaatataaaattcttcaggaaaagagattcaatctatatgtcctcccgtttaatatcaagaatagaagaaattaagaggaaaactccacagaagagcataggccacttttagccatgtaaaaataagattaagtcacaaatacaacttgtgaatttacctgtcaatatctctttaggacacaaaacaatgctgaagttaatataatttctaattttaaatgtcatttaagtgtagattatgccatctaggaaggtaagtaggaaaggtaaattaaatctatttttaaaattcaaaatattagagtatttttcccctctaaagccttttttggtgattattctgtatctgacataattgagaaactggtaagctgtaaagattccagtgtagcttctctgagaagttgtgagccagtccataactgcttcctcacatccatctgattgcaccatttctgcagcaaaccccaaagcagggtgccaatatgcagatggcatagggagtatcatccctcagccaaatcacttttccatctctaaagtttcatctattttggaagtcatctccaactaattgtgtctggatttagttgctaaaattgtcttatttatgaagcagcaatattcagcctgaaagcatttctgccatagttgttgtagttatatcgccaatggctgatttttttcattggaaagtaaatttaagtaattcgtgggatgtggtatattctgtgtcaacttcaagataatcactcattttctcgttatattcaggtctgaattaaagttaagttaatcacacagtgaaaa

SEQ ID NO: 134407 - DNA, 1033 bp, Homo Sapiens
  misc_feature (193)..(256): n is a, c, g, or t
  misc_feature (708)..(708): n is a, c, g, or t
  misc_feature (710)..(710): n is a, c, g, or t
  misc_feature (720)..(721): n is a, c, g, or t
  misc_feature (728)..(728): n is a, c, g, or t
  misc_feature (763)..(763): n is a, c, g, or t
agttaaacaagttgggtcttttactctacgtacaaacacaccaggttgagacgttgaggtgtctcagcaacagggtgttcggaggaaactattacaggatttcacctgtagttgggtgatttgggggatgatctaaggaaggaggatttggttctagattagacgcacgctggagcccaggaggtcgaggccnnnnnnnnnnnnnnnnnnnnnnnnnnnnnnnnnnnnnnnnnnnnnnnnnnnnnnnnnnnnnnnncataaaaaaagattagacgctgtgggaaggaagagggtaattctcagcttatgatcgctgcatgtgacagggtgagctgtgcgttccctgcttagaatcaagaagaggtcttagttcatctcactttgtcgtggtgtctgcgtggcgcttcatgcctcacagaacatgggctggctacgagggtcaaaccaggccacagcaacgcgtcaggggccgcttgctttcttaggagcaacaggtccagaggcttccgctccaagagggactggggcctgggccaggaccttgccgaaaatcaaacgaagcccagacaacctgctggggctccaacccttcctcccaccaccaccgccccgcagaatttgggccgctgagaccgctgcaggcgtgccgaccacggctgccccggcccggaaagcagatttgcccctttttgcggggtaagggtggananggcggcgtcnnggggaantcgagtctgcccgcccagccccgctcggagccgangctgggagggcggcgggcgcaacgaccccgggctcggtccgccggcgcggtctccacctgcagacaagagcgccggcatttctgctgtgcgtactccgccctcgtgccgattctggctcgagggcaatccctaaatgatcgtataatcgtatcagtcaacgttctgtgtgaatgtatcgccacatcaacacatcagcggacaaatgtaacggggtgcagatggcatccatatggtggtcagcgctcatcggacgtcgcatgatagacgcg

SEQ ID NO: 134408 - DNA, 1021 bp, Homo Sapiens
  misc_feature (657)..(657): n is a, c, g, or t
  misc_feature (669)..(669): n is a, c, g, or t
  misc_feature (678)..(678): n is a, c, g, or t
  misc_feature (689)..(689): n is a, c, g, or t
  misc_feature (735)..(735): n is a, c, g, or t
  misc_feature (851)..(851): n is a, c, g, or t
  misc_feature (915)..(915): n is a, c, g, or t
ttttcctttttgacaattctcattctttagagatgctttttatttttcttttgggcaccaagctttcacatgagcatggtcatcaagaggcaagccatggtcacctgcaggcctccaacagaagtgaatatgtcgcagtacagggcagcacatgagctagacaactgtaaattgttctacaagatgaaatagttcaactagtatcaatgctctcattacattcagaataatatgtaatttagagcaatggtccttatccttggcagggtgagcgaggaacctttgtgaggagctggggttccctcccaagaatgactcacccacaattttctgtacaatttcccagggtcgataaagactattcatgggcctccaaactacaagaagtacacaggccccaagttaagcatcaataaattagagtaacagttaaagatacacaaaaacctaagaacagccaagtgcattcctgcaaacctagaggctctcagtcttctctcatctaatacctggctctgtctcccagtgctgggtggaaagtaacctcccctcccggcgaagctttgctttggtcagagtcctctgtggtgggatgccactctgctccctggcactgccacgtcagaagccttggcaggtagcaggcacatggcctcnattttggtcttngaatggcanacagactcttnggctgtcatagaaagactctgcaaagaaaacttgcgccaacattcncattgtttcagatacaaggaaacactcatgtctatgccatgacatatcacgatgcgctctttctatcacaggcatttctctcactgggcctcggcatcctctcactgatcctgtgnggaactactcacaagcatatctacagtctgaggccaggatctcaacgatgttatttgctgtcanataaggagtctgtgagtgacggagacatttgctcccacgagtcaaaaacctgcgcaaccatgtggctccccgagtccttgcaggaacttggggctgacatgaggaa

SEQ ID NO: 134409 - DNA, 603 bp, Homo Sapiens
ttttgaagaataacaattgagttttattctttaaaggcattctctgatttacatgagaattgagaaactgagatgtatgatttgtctgttagtcaatttcacaccctttcattctcataagccccaaattttgctcagttaaggagcttgctttaggcccacctatgtaagtctgttatactagctaatgtgcccatttgaatagttcaagggtcagctaatgctctgagcttcatggctccagtataaagaacaaatttaacaaaattaagctgttactgtagccgagttacccttctgctccacacatatgtagtgggatcttgcaggatttccatagtgccaattatcaaaggccttgactacttagcattgctgtattacagatgtgcaaactgaggcactgaaaagtcaaatttaaagtcatattgagggccagaaaaggaggcttagtttggggctttggccattttagctacttatctgaaattgctgcagatacaacgtgtgagcatatcaaatatttttgactgtatataattgatttctaaggtaaaaacaaataaaaagaaaccaataatttttacaggaaagatgtagttc

SEQ ID NO: 134410 - DNA, 1126 bp, Homo Sapiens
  misc_feature (660)..(676): n is a, c, g, or t
  misc_feature (1115)..(1115): n is a, c, g, or t
aaactgtaagagaatggttttttaatggaggtagcaggccaagtgaaaaaaagattctgccccctgccttcctgggagattgggagttggcagccatcattcccaagctgatgagtggcatatgactcaccaaggtggtacaacatgggtgggatttttcaaggacaattgccagacctaaaccatcctcctcagaaaatggctttgaagtgggactgcagcactaggagagggcaaattcaagatcaatggccaataataagtacctgaactttaggtctataagcagaagggcatggatttcacctgagccagaaggagatgtgtagcaatagaagcaagaatggcattgtttcagaggaaggaaaagcagagcttggagcaggatgcctctgactaaccacagtggggaggtgggggtggggcagactgtgccttcagctccacagctggtctacaccaacttcctctactcccatccaaacaggtgggctttactatcatatgtaatccacccagaggcacaggcaagccactaaggcaatgcactaccgtaattcaaacagaaagaagaggcatctggattataattgtcacaaggaagggaaaacccaaaccaggtacaaggatcccaaacagggaagatacgcaatagctctnnnnnnnnnnnnnnnnngcaggctactaagtttcagtgataatagataataggagaggcagccatgggtgatcagttatgtggacaatggccattgagattgaatttgacaaggcaaactgcttctgagtttcctgatacaagcaggatgttcagcagtaaggacagagtagcagacttcaccaggccctgaggccatccttgctcccttcaggtcctgggacaatcaggccacgctgacctgctttatgaaggttccagagctgaaggttggtcccaggtggtggtccagaatccaagcagagaggaaaaggaccaagctcaggcctcctgagcgaggaagcatccatatctctttttggtcttcctcacagtatcctacttaccgaaatgacagacagttcttcctcttgagaccaattaaggatgaccctcgggccgatttaacaacaccccnccagggccctc

SEQ ID NO: 134411 - DNA, 554 bp, Homo Sapiens
  misc_feature (172)..(207): n is a, c, g, or t
ttttttttaaaaggatgaaaacacagattacactttattttaaaactgaaatgaattttaatacagaaaatgaagacagcattttgcaaatttatcactcaaaggggtatctctatttgaggaaatcagcgtgttacactttgaaagatgaaatgttacagcttgtacaccnnnnnnnnnnnnnnnnnnnnnnnnnnnnnnnnnnnnggttaccaaggtaatgcaggtcaggggatcaaaggtgaagggtcacacattattaaaaagaaatccaaaaggacggctgcatcatgatctctcattagtgttccagcggtgcctctcttttggtaaacttgaacatttcggcagacattcaagcagctttttcggtaaaaagatttttacatgactactattgctgttcccatgatcatcttctataggtggcacggtgttgagaacacagtaggtgctagttccgcagaatacactttgggaaacgctcttccggcttgttttcggcagccatttcccctccgcgcgccacatcctcctcctcctcgcgaccggga

SEQ ID NO: 134412 - DNA, 998 bp, Homo Sapiens
  misc_feature (741)..(741): n is a, c, g, or t
ggggaaagatatgtacattttggaagtattacattcaacagctgttccacaatctggccatttttaggactgtccaacaatactgttaatccaggtgaactatttaaccagatttaatagtcaattgattaataataatagattccaagttaaacaaggcatgtatacattaaagaaagcagtacagaaatgtactgtatatgaactgtttacaaaaacatacaaaatgttggatggcacaagggatacagtgctaatataaacggattgtttaagctaagtgcttaacataaactgtccatccctataactaacaaagaatatttaagggacatgaaatatttcctataaaaataatgctatatggtgtactttattcagtgtatttttaggtggtattcatatgttcattatttttctcattgattcagtgactatatcttcatcatgtttccattttcatttcttccgaagctccaggaaaatctaacttgctaacaatcatttaaagcgagaagagaggaaagcaggagcagcagcaggaacagcagcattatgggtaccagctgggacagtgtgtgcttgcaggtgtctctcagatacgtgctacctgtcgccagaacttgtgctatcagcttacaccatggtaccaaatatctcactgaggtcacttcacagggctgttgaggtgattttttatacctctccgctgagcaagagtagagcggctactggttccanactggtgactgatacggttcaagcagatatgtagctgcatggcacctttacagatgtggtgatctgtctgttagtagtatgtggagtggtccagtggcatcaggatgttgagacagacacatcatctcgagaggtcaatgagcacttgcacagtcttgctgtgtcgacagatccatacacacgatgaaattcgcactatctgcatatctcgggtacacagcatgcatggtgtacgtactgtaatagacaatcaatcc

SEQ ID NO: 134413 - DNA, 1356 bp, Homo Sapiens
  misc_feature (310)..(332): n is a, c, g, or t
  misc_feature (1120)..(1120): n is a, c, g, or t
  misc_feature (1186)..(1186): n is a, c, g, or t
  misc_feature (1216)..(1216): n is a, c, g, or t
  misc_feature (1286)..(1286): n is a, c, g, or t
cataaggtgacaacagatgcctagcactccccctttagagacctctatggttttgttgaatttatttttatttattgttcttcccttcagagcataagagctaatatttactcatttcttattttgttgtagacactgaaaagcatgtctcatttcagtccttccagtgatgtataggatatttcctgtaattatccccattttaaaataagaaagcaaaggcttggagataacatcatttattcaatatcacacatctataaagtaacaaggccaggatgcaattccaagttggtctgattccagagannnnnnnnnnnnnnnnnnnnnnncccactcagctctgcagctttgagtacagagattgactttaacgcatcttcattccctcagggtccagcataggttcaagtatataagggatcctcactgaaatgtttgttgaataaatcaatggctaaacaaatttttaacaaggtgtttaaaatccatatcaagaatattagctatattcttaacacttgccatgtcttggtataagctgtgactttgccagcttctttacttaacaatttgttggaactagatattcagacatccagtgaaaaaggaaaattggagagtaaataccaggggacaaatgaatgtaagttacttaggagaacaaatcagaaaataatcctaaaacttgctatctctgaacgagtttactttagctaatttttaatgtcattccttcatggttaagaccttttcattgtatattgttgggccactgattcctagacatttgcccacatttaagtcttcttacatcactcattcgtattggagctgctcctttatggaaacaaaataactgaagatgcaagtagcttttgggggaagcactgttcctatgaagctttttgagtgaattctcccagtctcctcttaataggattctgatagaattagaagtgtcagttatagtctcagtaccatgacttcagtttacattgaatgaatatatattcaattaataggatggattgattattttctaccttttaatgttagttataaacactgtttgaaatgtattatctatattacttccatggaccttattttaacttcntcagcatttcagtttttatctatatattctaaactactgatatattttggacagcttctcctcgtngcgatttctggctcgagggcaattcctaantgagtcgataaatcgtatctgtcaaactgttctgtgtgaatgtatccgtcacattcaacaaatacgaccngaacaaaaggtaagctgggggccatgagtgacactcactattggtggccacgccgcttcatcggacctgc

SEQ ID NO: 134414 - DNA, 1885 bp, Homo Sapiens
  misc_feature (919)..(927): n is a, c, g, or t
  misc_feature (1544)..(1544): n is a, c, g, or t
  misc_feature (1550)..(1550): n is a, c, g, or t
  misc_feature (1560)..(1560): n is a, c, g, or t
  misc_feature (1610)..(1610): n is a, c, g, or t
  misc_feature (1618)..(1618): n is a, c, g, or t
  misc_feature (1657)..(1657): n is a, c, g, or t
  misc_feature (1677)..(1677): n is a, c, g, or t
  misc_feature (1700)..(1700): n is a, c, g, or t
  misc_feature (1743)..(1744): n is a, c, g, or t
  misc_feature (1773)..(1773): n is a, c, g, or t
  misc_feature (1775)..(1775): n is a, c, g, or t
  misc_feature (1808)..(1808): n is a, c, g, or t
  misc_feature (1858)..(1859): n is a, c, g, or t
ttttatctgtaatagtttattttaaagactttacatttacaagtagaaacaacatgtgttatctgtgggtaaggtagagcaggaactctaatccaagggtgggggagatcagttggttccttcacagaaaataagcctgttgtgtgggcatcttgcttgcctgtagatctttgttcccagttcaggaggtttttattcagtgcttgcttcatttactggaaaagttcactgggcccacctgtcaactccttcccccacagcttccagctcagcagcaaactgtagggaacagatttactccccagttcctactgtaaataatgctttaagaacagcattccttttggacaatatgtcatagacccaatttttaatactcccaagtcagatatctaactagagagtttaggaaatgtttggtatgatcaaacttttcccttcagtacacaatttaatttacgcagaagagcatcggagacatttgtctcatagatatgattgacatgagtgataggctaaaactaaaattttagtggtttgtggagtggctagaaaacatgaattgtaagcagtttttcagaatttaaaaatctcttagtttgaacagtagaagatgtaaataagcatagagactgttggcaagttatgtttatcacgatacaaagaagaaggcacagagggtccctttgacccttgaacttgtggttactaatagtattaaggttggaaatcatgaggaaggacacagaacataaactgggatcttgaagacaggcatgttgataaaagtagccctgaagccttaatattagcaacatcgaagatgggaaagacaggattgatttatttgggaactaagtttacacattatatgtctcaatataaaacaaaagctatggctttagagtttaacaggttnnnnnnnnntaggaggaaaggcaaaacaaatgtaagaatagtttttaatccattttctcacaagcagtgcacagtgggccggcaggtacttaagtaccttatcctaatcctggatgtgctcatacaggctgtcaatttgggtccgaaagtatttggaaagctctcctcgctttgctttcaatgttggtgtcaagagcccattttcaatggaaaatggctctggatgaagaaaaatggctttgacctgttcaaaagttttaaggccactttctttcccaattttctgcaagtcttctaaaatggcttcccttacaacttggttttggcacagttcctcaaaggagcccttcaccccaagcttggctgcaaatgagggaagtacatctgtgtcaggaaccaccactcctactaaggatgaccgtaagctctccccgtgtacaaaaatttgtaacactggttgactcctgttgtagatattttctatcttctctggtgcaatgtattctccttgggccagcttgaaaatgttctttttacggtcgatgatcttcagagttccattcgggagccagcgaccaatgtctcctgtgtgaagcagccatcactgtccagggcttcctgtgtcntctcanggtccttcangtatcctttgaacacgtttgtacccttgatgcagacctctccttcattantcactgtnaagtagttcatgtccagcacatcttccagcttcacgtanttgcatgcatgggcacccancgtgacctgatgtcagtctccangtaaatgtaatgtacagcacctgtgcattctgtttgaccatannttctacacctgacatccattgctgcccgnanaattcatgactgacgtggcatgggggagctccntgacattaacgaacctctgccacgtgtctgctcttgcaaaatactgccannacatcagctgagacactttgactctg

SEQ ID NO: 134415 - DNA, 501 bp, Homo Sapiens
tttttttccagagttcctttcagtctttatttgcagcaaactaccactttatatggcaggtttgtgtgtctgtacacgcacatacacacacatatccttaagctcgagacagggtgcggctttacagaccaaaaagtatggaagcttggttttaactggtgttagagatcagatggagaggaagtgcagcggtgctcacctggccgctcggttcttcagggagacagcgctgctggtgccgctgtcggcacccacagcctcaccatcccccagggtgcatgctgtcgtggccaggcgcaaactacggcgggacatccgtggagaatcaaatacagggtccaatttgtgctccgtctcaaaatccagagcatctgaagaatagctggaactgagcgcatacgtgtagcccgtgttctccggcacacactggggaggactgtacatgtgaagccgagaaaaatccatgttcaccacttcaaaccatactgcctcgcgccgccg

SEQ ID NO: 134416 - DNA, 1009 bp, Homo Sapiens
gcatctgaaagtgactgtagttttattagtttcgcttacgtagaaattttcttttgctcacgtcaagtccaaatttatagaatttcaaatacttttaggtacaaaattactaaccacataaaatgtaaactagaagaggacaggaaggacaaagctggtttggggtgtacttcttatgctttcaagggataattttaagtctccaagacaaatagtgcagacactgagacttacagaaaggaaatattaaatttggaaaacacacctttttctgagttttaaaggactgagacttacatttttgattcctgtccctagaataaactctcgacacgggcccgtgggccgcggggtgcgccgtgagcacgtccttgcgctcggacagcatgctgcagttgctgcaggagaagccgttgtgcgcggtggcggcggcggctcccacatccccgtttccctgaatggcagctttatttccacctttaagatcaccatcatcatcaagaccccagaagtggtccactgtggtctgttcacgaatccaagactcgtccaatacaggaggccgtcgagtcacagcatcctgcaggctgacagtgccgccgtggctgacgccagaggacgtgacctgccttgacacgtggttgatactaaaagctgatttgtttgtgcttctgcgctgttttgttgttctggccgctcggttcttcagggagacagcgctgctggtggcgctgtcggcacccacagcctcaccatcccccagggtgcatgctgtcgtggccaggcgcaaactacggcgggacatccgtggagaatcaaatacagggtccaatttgtgctccgtctcaaaatccagagcatctgaagaatagctggaactgagcgcatacgtgtagcccgtgttctccggcacacactggggaggactgtacatgtgaagccgagaaaaatccatgttcaccacttcaaaccatactgcctcgcgccgccgcctcaggcctcgtctgcg

SEQ ID NO: 134417 - DNA, 1019 bp, Homo Sapiens
  misc_feature (388)..(412): n is a, c, g, or t
  misc_feature (600)..(600): n is a, c, g, or t
  misc_feature (738)..(917): n is a, c, g, or t
  misc_feature (929)..(929): n is a, c, g, or t
  misc_feature (944)..(944): n is a, c, g, or t
tttcactattactatttataattgtcaagttccagtttcttttgcatttattgcaagaaagttaggtatgtttgacaatacacatttttgaagtacatactggttataaacaatgtattccttacatattataactacatatacaagtatggtttttaaatgatgaaatccaattgtaattaatctatagggaaagcaattcaagaaaattcgggatacttaaatgttcagcctttttagatgtgcaagaggactcctatgagacacttttcagtatatgaaatattactataacccttgaatgatttacatgcaaggatttattttatttgggacagactaaattgcctgaagataatgccatggcttctcccagtgatccctgagnnnnnnnnnnnnnnnnnnnnnnnnnccccatagtttactgctgtgcttaggttctgattgatgacacactcacgtaaggcacttatttacaaggtatggacttaaaacagaatcacagcatttctgcgaaagccctcaaactctccatctatgtttgctgctccaggacttctaaatagtcaggttcagcatgtaaattagctttaagttcanaatactcattttttgtctgttccactaataccttccttggacgtgagtacattaatgtttccattaacttcagctcttcgtgggctccaggataatgtgcctccatatcaggctggagctcctcgtgccgaattcttnnnnnnnnnnnnnnnnnnnnnnnnnnnnnnnnnnnnnnnnnnnnnnnnnnnnnnnnnnnnnnnnnnnnnnnnnnnnnnnnnnnnnnnnnnnnnnnnnnnnnnnnnnnnnnnnnnnnnnnnnnnnnnnnnnnnnnnnnnnnnnnnnnnnnnnnnnnnnnnnnnnnnnnnnnnnnnnnnnnngcttccagtcgngaaactgtcgtgcanctgcataatgatcggcaacgccgggaaaggcgtttgctatggcgtctccgctctcggtcatgatccctggccgtc

SEQ ID NO: 134418 - DNA, 760 bp, Homo Sapiens
ggattgattcagatgaaaaatggctctgtcggcagtgtgtttttgcaacaacaacaaagaggggtggtgcacttaagaaaggaccaaatgccaaagcattgcaagtcatgaagcagacattaccctatagtgtggcagaccttgaatgggatgcaggtcataaaaccaatgtccagcagtgttactgctattgtggaggccctgggagactggtatttgaagatgctacagtgctgcaaatgtaagcagtggtttcatgaggcttgtgtgcaatgccttcaaaagccaatgctatttgggagacagattttattacgtttatatgctctgtcttgcagttctggaccagaatacctcaaacgtctaccattacagtgggtagatatagcacacctatgcctttacaacctaagtgttattccataagaagaaatacctttgattcctgaaccttgagccttatgaccatacattaatgaaaactgggatagattgcacccctggagagctggcagacacacccaaaatctgaaagatatgagcatgttctggaggcattacatgattacaagaccatgtttatgtctgggaaagaaataaagaagaagaagcatttgtttgggttgcgaattcgtgttcctcctgtcgaccaaatgtggctttcaaagcagagaaagaacctgaaggaacatctcatgaatttaaaattaaaggcagaaaggcatccaaacctatatctgattcaagggaagtaaagcaa

SEQ ID NO: 134419 - DNA, 919 bp, Homo Sapiens
  misc_feature (838)..(838): n is a, c, g, or t
tatcttgtttagcccttctagttccacaccatcttctgaggcttccttcagtattctcattctaatgttcttggtattttcttttctgcctctgctttcatttctatggttattcgtggaatgactctttgaccacgcggagaaggcaaaacttcagccatttgtgtttttttccccttggccttcccccctttcccaggaagtccgacttgttcatcttgtttttccttggcttcaacagcctccaattcttcaataaatgtagccaagtcttctttccacaaatctgatggactctttctttttaatgtgtccagctcttgttctttttcatttcttagcctgcagagttcatctttcttttccttggttaaataccaaaggggcatatcaagaagatagttgaaggttggtccagaatctgttacggagtcactcttttcagtttccttttcgttgtcactctcttcattttcttcttcatctggaaccttttgctgggcttctttccaggccttcacaggatccgaatcatatcccctctgaatcagaactttaattaattctttcttaggcttattttcaatgattattttgccatctattttctctaagataaagcgagcctgattattcagtttagcagattcagcaccaagcattcctaggagccattcttttcttaatccataatatttaagtctgagttcagaaaagtctcttagaatatccaacaccgtgtcatatttctttaaacagcctacgtgggtcaaaaagcaccatagagttgcatgtgagactagtttggagtttgaagactttgtgtagtccaactctnctctgcctctggccagtttttcttcagtcatcttcacgacaaatttcacagtggtatctgtatggtattccctatagtccc

SEQ ID NO: 134420 - DNA, 1047 bp, Homo Sapiens
  misc_feature (545)..(954): n is a, c, g, or t
  misc_feature (956)..(957): n is a, c, g, or t
  misc_feature (966)..(967): n is a, c, g, or t
tttttgtcaacgacatgattggtctttttacttcataagtcttattttgtttcaccaaaagcttcacagtgtaacaaaccaaactcagcacagaaaacatatgacaatatattttagattctctaagacaaggtctcataagtttagatgacaagtgacaacatcaatggactaagtatatcacctcccataacttaaaaggctaatactcataaacatgaaagttctggagtatgaaatttaaaacacaaattttggatataaattatctgagtacaaagctgtaggtaattcttatctttcacttcccctcataactccaaacataacgccattgtaggtgggttgctgctagactacatccaagattgttcagctgaggacttgcccactctcccagttacttggaattttcaaccttcccatactctagcccacatggcatttgcactcagcttctcctactgatccagccacacatcatcttcttcatgaatgtgggcagtctaaagacttcctgtctggcacctcgtgccgaattcttnnnnnnnnnnnnnnnnnnnnnnnnnnnnnnnnnnnnnnnnnnnnnnnnnnnnnnnnnnnnnnnnnnnnnnnnnnnnnnnnnnnnnnnnnnnnnnnnnnnnnnnnnnnnnnnnnnnnnnnnnnnnnnnnnnnnnnnnnnnnnnnnnnnnnnnnnnnnnnnnnnnnnnnnnnnnnnnnnnnnnnnnnnnnnnnnnnnnnnnnnnnnnnnnnnnnnnnnnnnnnnnnnnnnnnnnnnnnnnnnnnnnnnnnnnnnnnnnnnnnnnnnnnnnnnnnnnnnnnnnnnnnnnnnnnnnnnnnnnnnnnnnnnnnnnnnnnnnnnnnnnnnnnnnnnnnnnnnnnnnnnnnnnnnnnnnnnnnnnnnnnnnnnnnnnnnnnnnnnnnnnnnnnnnnnnnnnnnnnnnnnnnnnnnnnanncaaaggcanngacgttaaaggccccgtgctggggttttcaaaggtccggccccctgagagaacacaaaatcgagctcaatcaaaggggga

SEQ ID NO: 134421 - DNA, 1001 bp, Homo Sapiens
  misc_feature (594)..(594): n is a, c, g, or t
  misc_feature (741)..(741): n is a, c, g, or t
  misc_feature (856)..(856): n is a, c, g, or t
  misc_feature (867)..(867): n is a, c, g, or t
  misc_feature (875)..(876): n is a, c, g, or t
  misc_feature (902)..(902): n is a, c, g, or t
ccacttaaaaaaccacagaattttattttgtcaactcaaattttcagcacaccaaataagagtaatcatctcaggactgcacaggactttctcattttaccatatgcatttatggactacttgaatttgttatataataaatgtgtattttataatgaaaaattatttttctagcaggtaattctctaacacaattcatagaagagagcattttatcagtctttatagcatcttaaagatgaaaacattctttgaattcaagataggtatctcaatatctagatcaaactgagctgagtactagaagacaaactgagtgtattattcagcagttgcaggtgggagcatgaacagataatttaatgaattgctggactgtcatgatagagttattaccttttggaatgtccttcatgcttatcaaggtgcacggaagagaagcatctctggtgcctcagtttctctgaaatcaggataagctgctgtcctctgcagcagctgtgtagagaaccttttcatacatggtctgccttcaggggtggtgaaagtggacgaggtctggtggggtgcgtgtcactgatgctactgcactanaaggctgagtgccttggcccgcccttcctttccgagcactcacccctgtttatttctgtttcattaaggtcacatcagcaactcctgtcgtgctatacggacacattttcttcacaggctcagtcaggcaacacttgtcctttttanagtttactatgctaaaaatatataggatatattttgacagacgatctctagaatgttcctttggatgatccactgtgataatgctatagtgatgactagcatccaggaaagtcanagaggggatanaatctcannatatctttgatctagaatactcgtanagataacaggtgttgtagtaggtgtggtgggtgggataacacaaaactatcgactctgtctaatataacaactgtcatcgtcacaactgctatcaggca

SEQ ID NO: 134422 - DNA, 1610 bp, Homo Sapiens
  misc_feature (299)..(299): n is a, c, g, or t
  misc_feature (604)..(615): n is a, c, g, or t
  misc_feature (627)..(818): n is a, c, g, or t
cgagaatagtagagggtgtgtgggtggcggggaagaagacacaaataacgtgcgcctcgattggtcgccccaccacgggggcgtgtttgtatggaggagagagagagagtgttttttatgattaataaacaaacgagtattttgggcgtcgggcgggtttgtttttcaccgcgcggggaagaagtttataaccctccggcgcgcatatgatatagtcgcttgtttttgcggcggcgcccgggcgtttgttcatattttggggaagccactattttgttgcggagggaggggtgctgtangggcggggggaggggacagcttttagataaaattaaaagggccccttctgttgctcgggggtatgtatagagtggtggcgagggaaaattgcaaacaaacgtctattcgggagagggcgcctccccaaattacaggaatcgcgcccggggcggggggtttttattttgtaatgagagaaggttctcccagagattgttgttggtagaatgcgcggttaattctccttatggaaacttctccttattttttttcaggggcgggccgctgttggaaaaaaggttttttaaatgaaggaattccaaannnnnnnnnnnncgccagaatagnnnnnnnnnnnnnnnnnnnnnnnnnnnnnnnnnnnnnnnnnnnnnnnnnnnnnnnnnnnnnnnnnnnnnnnnnnnnnnnnnnnnnnnnnnnnnnnnnnnnnnnnnnnnnnnnnnnnnnnnnnnnnnnnnnnnnnnnnnnnnnnnnnnnnnnnnnnnnnnnnnnnnnnnnnnnnnnnnnnnnnnnnnnnnnnnaatagtaataacctttatttaaaatagatttaatttaggaaagctcattttatatgagtttccaactaattattagagtcagaaacaaagaaaataaaatcagagaaaatcctctgtagaaaaaatacacaaagaacatttctacatgtgaaaaaacagtaaacagtgttaacatccaagttattagtctcaattccacgtctcctagtgaacaccactatcaaccttgagatctgatttgttcttgtcattcttcactgagtagatgaaatatgttaaggtgtctttttcattcactggaatagacctaaagtggcaaccaactatctcaacaagttgtgctttattaagtcctggtctggttggtagcttgaagtgtcttttgtatctcctaagtgtatttacttgtaattggtataaatcaacctctggggtatcaatatcttgaacaggtgaatcacctccatcatcatcactcccttttctctttcttctgtttcgaacactctgaattaagtttttatgataatcacatatgtaaagatgccttgcgctcttatccagctcgatcttcaccttcttctgggagatgctcttctggatcctcttgctgaagctggcgttgcctgccgcccggccgcaccgctcaccatcctcccgcaggcagcacagttgcccggggcccggcccggccgcccccgggggcccagccgctgagaccgcccccgcgcccggcacctcagccccggtgcccgcgccggtcccgttccccgccgaggcggcggcggccgc

SEQ ID NO: 134423 - DNA, 878 bp, Homo Sapiens
agtagtcagcaaagttctttattgggtgttaagcccaacaaaccccagatgagccaagcttggacagcacccgcaatgcatctgcccgccctagctgggcgaggtgtgtgccaagctggcccagggaggcagagggctcccttgccaccaccatctcaatcagagcccgcagcggcgagcgactcggcctcagcgaataggcaaaggtggaccaggcagcaggcagcccatatcttgcggccaggtgtcgagtagtgccatgggccatacccccacctggcccaggctcagggtccagcagtacaatcagctcttccagcacctccagctcatccaggaggcgagacaggggttgtgacgccagactggacagttccctgctcaggagtggaagtagtgaggcctccttccatgtgtcccctgtctccagggcgcctggggaggacagatgcgaggaggaaggggtgtgggtgttggggactccgcagaccaagccaggatagggataggggtcggctttctccttgggccagcagagatgccagagcagaataaacaggaggatcgctatcaccgccaaggtcaggagcaggaccagcaccacgagcggaaggaaattcggccaggcctgctgagggacaggctcaggggtcctccaggcaatggaacttgctggtgagctgcgctcctgggagctaggggcgcctgggtttccaggtgtgagggggcagtgccccttggcagggaccggcctctgccaagctccgcccaagcaaggctcggtctcggattctcacccgggcaggggggcggcccgaagcgttgcaggcagctgctgcagcacttgttgtctgggttccagtattcaaggcggccgc

SEQ ID NO: 134424 - DNA, 525 bp, Homo Sapiens
tctagggcgaagagcagtgaggctatctgttgggtctttgcccaattaggattgtacttcaagaagtacttcagtgctaattgtatactgggcttagtagtcagcaaagttctttattgggtgttaagcccagcaaaccccagatgagccaagcttggacagcacccgcaatgcatctgcccgccctagctgggcgaggtgtgtgccaagctggcccagggaggcagagggctcccttgccaccaccatctcaatcagagcccgcagcggcgagcgactcggcctcagcgaataggcaaaggtggaccaggcagcaggcagcccatatcttgcggccaggtgtcgagtagtgccatgggccatacccccacctggcccaggctcagggtccagcagtacaatcagctcttccagcacctccagctcatccaggaggcgagacaggggttgtgacgccagactggacagttccgggcaggggggcggcccgaagcgttgcaggcagctgctgcagcacttgttgtc

SEQ ID NO: 134425 - DNA, 583 bp, Homo Sapiens
actgggcttagtagtcagcaaagttctttattgggtgttaagcccagcaaaccccagatgagccaagcttggacagcacccgcaatgcatctgcccgccctagctgggcgaggtgtgtgccaagctggcccagggaggcagagggctcccttgccaccaccatctcaatcagagcccgcagcggcgagcgactcggcctcagcgaataggcaaaggtggaccaggcagcaggcagcccatatcttgcggccaggtgtcgagtagtgccatgggccatacccccacctggcccaggctcagggtccagcagtacaatcagctcttccagcacctccagctcatccaggaggcgagacaggggttgtgacgccagactggacagttctctctgcagcgccacggggttctgcccccgcccgcggcgggagtaggggtcacggctccgccgccgcaggggctacatagctccgcgccgtcggggttgcactgcccagaagaacactttcggaacgggggcgttacgaaatcgccgtggtcattgcctcgtgccgattaaacacccgggccctcctgcactatcgtt

SEQ ID NO: 134426 - DNA, 992 bp, Homo Sapiens
  misc_feature (699)..(699): n is a, c, g, or t
  misc_feature (738)..(738): n is a, c, g, or t
  misc_feature (781)..(781): n is a, c, g, or t
  misc_feature (827)..(827): n is a, c, g, or t
  misc_feature (876)..(876): n is a, c, g, or t
agacaatagcatctttattaaactatatagatggtgtaaagggagatttatatgcataaattgagcatatttgtacaaacaaaatacttcattttaaacaacatatttacgcctttaggaaaacaaagttaacataaggaaatacatcagctatgtaaagagtacatctgtgccactggttatccggaagtataaatcactaatgcttaatagaacaacctccaggagtgacatcatgacaatgctcttgggtgtttagacaagatccaggctgactcacagtctcccatctgatatatagcaataggtccattaaatgaaaatgacttggtgttctgtagcagagctagtccattgcaggcatttgctagaagaaagtctccactcaggatagcaattttatttccaaattgcatgtctttcagtggaccatcagatgattgcaactcatttaaatttactatcccacgatgtacaaggagagcaatatgaattagctccgtgatctctgccaaacttctttgacatgagtagatcccactgaccatgtcatagttctgacatgaagtgttcacgctgctgggcccagctgctttagagataaggagcccaccaagccctcaactggaggctttccagctgtcatgtacaaccccctggctgtggtaagcaaagggtgctgagtgcccccagcttccngcactgcatagcgatgttgctgagctcgtcgctcagcangcagcgaaggtcatgaggacgtggggtacccacgatctctccngctctgaactactgatccatgggcggggctgggggacgacagccanaccaccagaatgtgtccaggacggacacaaaggaccgggaacgagtcanatacgtgagtgacacatgcgaatatgttgatcggaaggctggctgggacaaatgcccgacacaggaagagataatactaagacgatctgccataaggtctgggatgcaacatatgg

SEQ ID NO: 134427 - DNA, 748 bp, Homo Sapiens
ctgcttatggtaggtttttttgagtactgatagttttattttggtctctgatatttgtcccagatttttaaatgtattacacagcaagaaagattttggaatgaacatgctctaatcctctatgttgccagccatgaaagctcccatccctctgtacactcaatcacgtcgcctcctctatgcgaacgtcccgtagccctgaccctgtgcctcgctgctgccctcacctgctccacagcatggagagagcggagaggctggcggcaccagagcacccccaagaggctcctgagtgaatgaaacagacaaacggctgccagagtcctgacgagcctctttgaataattctacttcctggaaaaagatcccttcatgaagatgtgagcgtttaacccatgctgcatctagttaatattgttttcacaatttacacaaacccaaaataaggttaaacttcaaccctctcagtctttagtattataatgttctgcagactatgcacaaacatggttaaaccccaatgaatcattagaattatttgcgtactatcatttaacattcagaatagatccttaagaaaatatacatctagaaaaaaagtgttcacaatttagtgctgtggattaaaaactgtcaaggctgcatggctgtacctcaagttcctgtttatcaaatatggccttcacaggagacggctgggtggccgaggccagcagctgctgcaagaggatcatggggggctgcggcc

SEQ ID NO: 134428 - DNA, 1149 bp, Homo Sapiens
gcttcacctggttcatttattctgccaaatgtatgcctggtattgtgttttttggtcttgaaacacgtttcacaaaaatcaaagtcatcacagtttctgcatttgaatctggatccattgataggaaacatctgacatccatcacacctttcacaacccccacactctgatgagtcacagatccccatttgtattttggtgtggtgacagaggctttgacccgcactttatcaccaatcttgatgtgagaagaacttcttggtggaggatagcctataagttccacatgaatgtacctaaaccagtagatgccccctttctgctgccagtcacactgcacattgagatcatgcaatccatctctgtccagcttgatgactttgccaacatcacatcaccttcgcacacttcttcgtatgttcggcagcatctaaccatcattcccacctgaatattctctctcacatatacagcataatcatcattacccaagaaaccagctcggtttttgtacgtctggctctccgtcacaacagcaccagtagacatggagtaggcggcatcatccatgtcctccaccacctcctcgtcagaatactcgtcggacaccgtgtctgcatctgagagctccgtgacctgtatgtcggagtggtccagcagccacccgaccaaggcttccacaccaggcaagccggacgcattcccggaagcaccagtgagagacttcagggcaaactcgatgttccttctgggaaatcccatctccatgagctgcaccacgatcggcagagcgggaacgggtgactgcttgcgcctcttcactctggcagggcggatgtgctgcacgttgacaggcgtggtggcctcactggagctgcagtcttcaaatcctgggctcgaagggtgagtggactccacaacgcccagtgcagcagtctcaagttcctgtttatcaaatatggccttcacaggagacggctgggtggccgaggccagcagctgctgcaagaggatcatggggggctgcggcccttcaggagacatgtccccaaggtcaggtgataccactgctccatcattgttttcatgtttccacagcaataaacatatacagctagccctccgatccatgggttacctccaggatct

SEQ ID NO: 134429 - DNA, 1436 bp, Homo Sapiens
cacagccacaagtatttattgagtgcctgtagtgcaagaaagagagatggtccctgctcccgcggagcttacagcttcacgactccagcatctggctagattcagaaacaactgcagcaagcacttgtctacccaccagcagcactgtaaaaagcacatttctcacattatcggtcactgttacagtgaaattgttagatgtaaaaattatccttgaaatctgtagtcatagagatgacatggtacataatgtccagcaaatgcacatttatggcttgattcctcacatatctgaggggtctatggaaataaagtacaaatcaggcagaaaagacttagtaacacagttcctaagaatactggggtagtagtttattatcaaactaccatagagctcttggcagggcaggaaattatttccagcaaaatttgtgcaatatagtggatttaatcaaacctgcaactgtcaaccatacatggtccctcatgacaggtaaatataatctacctgtctgaatggtaaaaggctacaggtgtgcatttattttttaaagcttcttaaagactcatagcacaagtggcacattgaaatctagtgaaaacttgagataatctaaaaattaaagtgacaaaagtctctaattttactacatatgtaggtgcagagttcagatttcaagtagcgtccagcaaagcacgtggcttttctgggcgagaaggggatagcttttggttggctatcacagactccacctacatctcctaacacccactggcaggcacttcctgtgcatggttctgcccacaagctgtcaccgtttagatgatacatttgaaggggcaattatttggaggatactgtcaataatttttagatatagaacctatatgttataccgaattacccccagagtcaccaagttaagaccgaagtgctttctgaacttacacgtgacaggttatcaaatttgttaaattgtttggtggctatatataccttacacaccagagggtatgcgttaatttgaaactccgatatagctcattttgtttgcaaagcgtgaagagaacatcttagaccacgctaacatatgtcagtccaaggcagtttttaggtcaactgtcttcggacataatctagcttttttatttcagaaagtatgctacctcaaggctgggcgcagtggctcacgcctgtaatctacaaacccatactgtgccactgagcacaggtggggaagctcggcagagctcatggaagtaaaatattctagaaagtagtagcctttcaaagtaaaataaaagtcaggttctcaaaattaagacattaaagaaccaaagagagggcttcccaaacttttaaaagcaattgaaatctctaagaaacccggccgtaatggccgaattcccgggcatatgtccggtaccgtcgactg

SEQ ID NO: 134430 - DNA, 1008 bp, Homo Sapiens
  misc_feature (601)..(601): n is a, c, g, or t
  misc_feature (744)..(744): n is a, c, g, or t
  misc_feature (758)..(758): n is a, c, g, or t
  misc_feature (764)..(764): n is a, c, g, or t
  misc_feature (775)..(775): n is a, c, g, or t
  misc_feature (783)..(783): n is a, c, g, or t
  misc_feature (835)..(835): n is a, c, g, or t
  misc_feature (858)..(858): n is a, c, g, or t
  misc_feature (989)..(989): n is a, c, g, or t
tttagtatagacaaattattttagtcctttagtacagtctgtttcctccttcacccccagaacaaaaatcgaacttctggttggacagcgtcagatgtcactgaggtgaccccagcctgtttgcagttccaagtcttccgtgtaggcgtcactgctactggaactttgtagatgaggagcctgtatgatgatgtcctgaacatttctatcctttcctcacacagagggaagctactgggaatatcagagacaagctattattaaacaagtgtctctagtccaagacatctcctgtggcagggaaatgagggggcaggctgtatcagtgatatttttataaactctggttttagaaaaaattcttcagatggacgcattattttaagactttaacattttccaaaaccaactgaatcttatcccctccatttatccccctccagacacttctaatcaaggtcaccatctccaacttcccccatagacaataaaaatatggctggagaattctactgtaatagaaaaccaaggagatatagtaatttgacagtgtgtttcctttccatccactagacaagaatacccctcccattctttcctncccctcagtcacagaatgaaggggctggaaaacgttggtctggttccttttagagctgattccccattggatactgcctggaggccttggggatgaatgagaattctgcagtttggatcagtagcagagcaggtacacatcanggaacggtcagctnagatangagggacaganatgatganagagttctgataatttatcagctaattgctatggcaccccatgtctcctgtnatgtccaacctaagggatactangtaactaaactttgtgtcttgcctgacctggacatgggatctctatttcatcaatggaacaactgctcttcctgcctatcatcaaggcccgtgagcatcctcccgcgatcttggctcgaggcaatcctaangagcgataattcgacagta

SEQ ID NO: 134431 - DNA, 1170 bp, Homo Sapiens
  misc_feature (976)..(984): n is a, c, g, or t
tttgacaaattattttagtcctttagtacagtctgtttcctccttcacccccagaacaaaaatcgaacttctggttggacagcgtcagatgtcactgaggtgaccccagcctgtttgcagttccaagtcttccgtgtaggcgtcactgctactggaactttgtagatgaggagcctgtatgatgatgtcctgaacatttctatcctttcctcacacagagggaagctacagaatgaaggggctggaaaacgttggtctggttccttttagagctgattccccattggatactgcctggaggccttggggatgaatgagaagttctgcagtttggatcagtagcagaagcaggtaacacatcagggaaccggtcagcctaagataggaggggacagaaaatgatgaaagagtttctgatacatttatcagctaaattgctatggtcacccccatgtctcctgtaatgtccaaacctaaggaattaactaagtaaactaaaacctttgtgttcttgctctgaccttggacaatggaattcttcttattttcattcagtggatagcaaatctgcttcttccctgccttaactcactcaaggtctctgtgatgcactccagagttttcctccttccctgcatagtcttctcctccctagctgcctttcaaattggtgaaaatgaagcttcaggattatgaaaactagtacttaatgaagaccattattctaatgacaatatcgctggactcttgaacttgttatgctgggatctagaaaccctttccccagcaatctttcacacagcacctctgggaagcggtttcccactaacaggaaatagaggtcaagtggaaacagtccagttctcattactgaaaagctaagattcagaagaatcacttttcttgaggaaaatggctaattctatttctatccataagacaaaatcagaattgattgctcctcaaacattctttnnnnnnnnnttaaccttttaagttcatgtaaattttaaacactgagctattttccagaaggaaaatactcagaagtttgaaacaagtactcaaaaacaatcggttccaactgttagaggaatataatgaaaccagtatgatcaaatgctccatccttacctagaaggggctatttctacttttaggacagaaaat

SEQ ID NO: 134432 - DNA, 266 bp, Homo Sapiens
ccggttccctgatatgttacctgcttctgctactgatccaaactgcagaacttctcattcatccccaaggcctccaggcagtatccaatggggaatcagctctaaaaggaaccagaccaacgttttccagccccttcattctgtagcttccctctgtgtgaggaaaggatagaaatgttcaggacatcatcatacagctcctcatctacaaagttccagtagcagttacccagtgacttcctcatcaccggatcctctagatcact

SEQ ID NO: 134433 - DNA, 978 bp, Homo Sapiens
  misc_feature (707)..(707): n is a, c, g, or t
  misc_feature (753)..(753): n is a, c, g, or t
  misc_feature (855)..(855): n is a, c, g, or t
actactatttccttttatttgttgttgtgaattttactcagaattaaagataaatgattagtaattacaggaaaactaacttgtaaaaatcttaaagacattgaatgggttaatgtactgagcagctacggaatgcaaggcactgtaggagtagggtgagtatactccccacaagggctcagggtcaggcaggggaggtgagataaaaacccacagccatacactagctggcctgtcctgagggttgtgaggcacaaaatgctaggagactagagaagtaagaaatgtcttgacatgaggagaaatcaaggaaagcatggttttagaacatgtgtgggatgttttttgtatcgagactgaagaggctttttaaagtggagggaaggcaaactgaggcatagagatgccaataccaggtcttgtcaggaagaacagagtccaatttggctgcaggatagggcataggtaggggaggggataagactggcatgggggcagagggggacttgaatgtcaggtgacagagtcaaagcttgcactcaagtaggtgattgataggtgatcttgggggcttttgagcaggaagagtgataatcaacattggcttaggacatccctttggctttggcgaattgtgaccaagtaagggaagttgggggagacaggatggggagatgcatgataatgggcctgagctggacgcacangaagcatgcatgtttgtagaataactaacaagcagcgccacatcancgaacacagattctagcatgtagactggaggtgaactactccctgaactgttcatctacaaatgggcaatacactatgtcaaggtgcttaggcagtatatcntgtaagattacaactctgataaatgggatgccagtaaatatgtacgattcatcattcctcggcgatcttggccgaggcatccctaagagggttaatctacagtacacgtctgtgaaatgaccc

SEQ ID NO: 134434 - DNA, 996 bp, Homo Sapiens
  misc_feature (765)..(765): n is a, c, g, or t
  misc_feature (767)..(767): n is a, c, g, or t
  misc_feature (829)..(829): n is a, c, g, or t
  misc_feature (861)..(861): n is a, c, g, or t
  misc_feature (902)..(902): n is a, c, g, or t
  misc_feature (920)..(920): n is a, c, g, or t
cagttgttgtcaactttttattattacatatagcacatagtgggaatatttggttgaaagtaaattagaaataaaaaagggggaaagtaggaagaaaaatcccctcctccaggtctgaaaatcagacaaaaatccttaaaacttgtagccttgccatgctacaccacatctgccaatacatgaaactgacccattagtgctctgctggatcagcctgcccaggcactgctgcctgctggggctgctgtcatcctctggccgctcctccaaagagggacaatgggttttactcagggctaccactgttgctcctgactggggccaccatggtgcccaggcttcaggcacagggccctgcctccttccccgcaccgccctccaggtggtccacctcgtggctgtcagttcctgttggacctggagctgctccggcttcctgaggcctgttgcttttacatgcatcatccaaatgcttgtgccacagtattgcatgaaatcgggaaccagtctgaaacttgtaaacattgcctttgtcagggttgttcagctggaagatatctgggtgctcggggtcatcgggcagctgcaccatccagcccacgatggaaactttttgccaggtgtggatttatagtgttttctgtctgtgccccgcaaggacttggctccgtagtacaggagggtggatcctgagagtatgaccagtacctggtccacgaggacagcgcaggcttccgccttccttgagcagggtttttctctcanangccctccatggtgggacagctgcggagtccccagagacacatgcacgggcggtggggctgtnaacaagctcgggtctgggagaatcctactggnaccgcagtgggcccagggtggataaacgtcctgttgtgctnagtgggtctccggttctngacggagttggggagtgcacacaatggtcagaagtggctcggtgactccaacgggcacaagactgaatttctggaa

SEQ ID NO: 134435 - DNA, 915 bp, Homo Sapiens
  misc_feature (753)..(753): n is a, c, g, or t
  misc_feature (801)..(801): n is a, c, g, or t
ttttttttaattcttacaaagcaagttactttattagcattttaaacaatgtataagtgatggaatcattctaacaacacatctattcactgcttacaattccaactaatttcagttctttgatatctaatgacaagagcgaagacctgttaaagttccttccaccagtaaaactcacagctcaaagttgtgggagtgattaactgagccacaggccttcattcacatgtttaccacattaaaataccacacagtgttttcttataaggtcaaccaactgggaagcaattaacattagcattaagatttaaactgttaggcacagggctaaatcaggcattatatgaaaacttgtggttccctagtcaagtcaaacaaatccccaaatatttcagcttgtaacagttttgtccttcctctcttgagacaattatttgagtacttgcttttggaaataaggtaattcatgatggaagcttcctagctgtgatggtgctctaggcaacttcagagaatgaagatagaagttatgcatgattatataacatgaagagtttaatttttattacacactcaatttccatgccctgatttctcttagctctataaacacatgtaaatcttctgcagagctttaaagagctctgaaagggaaaacacctttccatatatggaattgatagcatagtaaggccgtgtgcagtggcttataccctgtatccaacattgtgaggcagtgggaggatgcttgangcgggagttgagacagactgggtacatagtgagacctgtctctacaanaaaaatgtagctggtgtggtgtgcaactgtatcaagtagtctgatgctgagcagagatggtaagatggagagtaatgactagagtacactgatcagctggggaaactgttcatc

SEQ ID NO: 134436 - DNA, 1034 bp, Homo Sapiens
  misc_feature (630)..(630): n is a, c, g, or t
  misc_feature (647)..(647): n is a, c, g, or t
  misc_feature (679)..(679): n is a, c, g, or t
  misc_feature (807)..(807): n is a, c, g, or t
  misc_feature (809)..(809): n is a, c, g, or t
  misc_feature (813)..(813): n is a, c, g, or t
  misc_feature (820)..(820): n is a, c, g, or t
  misc_feature (860)..(861): n is a, c, g, or t
  misc_feature (869)..(870): n is a, c, g, or t
  misc_feature (874)..(928): n is a, c, g, or t
  misc_feature (962)..(962): n is a, c, g, or t
  misc_feature (973)..(973): n is a, c, g, or t
tttttcatgcttttcaacaagattcaacatcttttatttacatgtttatgacatacattaatggtcatacacaatttttaaactaaatctagtaacaacagaggatggaacataaaagacacaattccaaattttagtcaggttgaaatgtttttccactaactgaaagataagataaatgagcagccattataaagttatgggctgtatgtcaattcacgtcttaaaattgaaagtcagccacacagctgttaaaacaatgggaaatttgcaaatgcaaatatataatgcatgcacagctatcacatttattctttatccttaaagccatttttaaagtaaactgggagaggcaacttagtaatatatgtacatcaaggcacattcttttcttgtgctttaggaatgatttacatgtgatctgcttatatcttaattttatactttataacagcttctaatacctaaaagcttaatttttaacaattattctttgagtggtagtttcccagagagaaatgtggcatctctcatggttattttcacagtcagaaaattggatagcttgaggaggtgggatttaaaaatcaaacatatgaattaatataacttagttttcataacctttanaaataatttatcttcancaatttagtggaactgtaatcaatttcttcangtatgatactatgagggctgcactgaataattttcaacattctgaaattacctgacaattacatggtatccacagagctgctgtgaatgtctatattgctatctgatttccaactgcagtttttcaancnattnaacattnaacatgatacaaaagctgaaaacataccaaatccctcgtnngcgattcnntggnnnnnnnnnnnnnnnnnnnnnnnnnnnnnnnnnnnnnnnnnnnnnnnnnnnnnnnttctgtgtgaattgtattcgtcacattcacacanatacgagcggnagcataatgtaagctggggtgctatgagtgactactcacatattgcgtgcgctcatgcgct

SEQ ID NO: 134437 - DNA, 1036 bp, Homo Sapiens
  misc_feature (94)..(95): n is a, c, g, or t
  misc_feature (208)..(208): n is a, c, g, or t
  misc_feature (218)..(218): n is a, c, g, or t
  misc_feature (295)..(295): n is a, c, g, or t
  misc_feature (324)..(324): n is a, c, g, or t
  misc_feature (948)..(965): n is a, c, g, or t
tgtcagtgtcatgagctcccctctcctattcccagatcgtcgcgcgagaggaggggacttgaaggagtgactaagtggagagagacatgagctnnggtggagtgtgacccctgaagcagcaggcggagccccgtgagtgcgcgcttgtgttggctgagcaaaggcgcggaagaggtgccccggctcacctgctcccaccgcttgtccncaggtccggnccagcgccattgcacaggacgccgaccagaactacgactacgccagtaacagcgtggtgctgcacttggattcaggngacgaagtgtatgtgaagctggatggcgngaaggctcacggaggcaataataacaagtacagcacgttctcgggctttcttctgtacccggattaggggcgcggggggtgcgaggcggggtggctgcaggccgcccggtctccgcccgggcgcggctccttggcaaaggccactctcgattcataacacttcctgacatctcctttggaaaagacaaatccctgcgtcctccctgccccgctcctggcctcagtgcgtctgcgacccaccacgctcagggctgtgctcctggtctccatccccatcccggcaagggaggaagggacgcccgagcccttgaggcggcggcacagactttgcaaacctgattagcctggacaggcagggccgggagcctgccctcctcagacagcctcctcccagtgcctagaagcggagggctccgggccctggccagggaggtaggccagagggagcgcgggcttcctggggcgtccttctttgtgacccgaaatacttgtgcagatttccctgtccatcagccaaaaccccacccacagcagaattccagcaaacagaaaattcacctctccacaccgcattccctcctgactcagactcaccgcgatgcattaaattatgtttttagactnnnnnnnnnnnnnnnnnncctgagaggcggccgcaagctttttccctttagtgagggttaatttcggctaggcactggccgtcgttacc

SEQ ID NO: 134438 - DNA, 1161 bp, Homo Sapiens
  misc_feature (98)..(178): n is a, c, g, or t
  misc_feature (424)..(454): n is a, c, g, or t
  misc_feature (515)..(1050): n is a, c, g, or t
ctccattatggcattccctggcactcttcttatactttatacattgaaggcagctccctcttttatggccagtataagcaggcaaagaaacaaaggannnnnnnnnnnnnnnnnnnnnnnnnnnnnnnnnnnnnnnnnnnnnnnnnnnnnnnnnnnnnnnnnnnnnnnnnnnnnnnnnttgggggtagggaaaggagaggagggtcatgtaaacctaaacagtcatcacattaccccaaatgagcctgactttaacaaaaagataataaataactcctgggggttaagtgacaacatgggtgcagcaagaagggaaagggcacaaatttaactattaaatacactttgatatttgtttggcagagttcaggccaaccccaggcttctgcccttgccagacaagtaagctgatgatattcaaagnnnnnnnnnnnnnnnnnnnnnnnnnnnnnnntcaagcctacagccgcggccgctccaacatcagaatggtaacacctcgtgccgaattcttnnnnnnnnnnnnnnnnnnnnnnnnnnnnnnnnnnnnnnnnnnnnnnnnnnnnnnnnnnnnnnnnnnnnnnnnnnnnnnnnnnnnnnnnnnnnnnnnnnnnnnnnnnnnnnnnnnnnnnnnnnnnnnnnnnnnnnnnnnnnnnnnnnnnnnnnnnnnnnnnnnnnnnnnnnnnnnnnnnnnnnnnnnnnnnnnnnnnnnnnnnnnnnnnnnnnnnnnnnnnnnnnnnnnnnnnnnnnnnnnnnnnnnnnnnnnnnnnnnnnnnnnnnnnnnnnnnnnnnnnnnnnnnnnnnnnnnnnnnnnnnnnnnnnnnnnnnnnnnnnnnnnnnnnnnnnnnnnnnnnnnnnnnnnnnnnnnnnnnnnnnnnnnnnnnnnnnnnnnnnnnnnnnnnnnnnnnnnnnnnnnnnnnnnnnnnnnnnnnnnnnnnnnnnnnnnnnnnnnnnnnnnnnnnnnnnnnnnnnnnnnnnnnnnnnnnnnnnnnnnnnnnnnnnnnnnnnnnnnnnnnnnnnnnnnnnnnnnnnnnnnnnnnnnnnnnnnnnaagcgtttcccctggaagctctctctgcgctctctgttcgaccctgcgcttacggatactgtccgccttctccttcggagcgtgggcttccaaactcaccgtagtactagt

SEQ ID NO: 134439 - DNA, 1264 bp, Homo Sapiens
gtttttaaactagaatttattggtatacaaaactccatttcatagataaagtggcacatctttgcagcttctattgcaccaagtatcgaagattaaaaacacaaaaaaagaaacatttggttttgaaaacactgcaaatagccaagtacagtactttggtaaataaaaaataaaatggttcagatgaacacaatccgtggaaagaaacaatctagggggaaggaactatggacatcagacaatggtcacaattctcaccatcgagctccatagataaggcaagacttgctaagtctatggatcacgaccccatggaggtcttaagtatctccagactgaagctagaacaagtatagtgcaattagaaagagagaaggcccttccttccacgggatacatccacccctctgtaaaggagatttgacgcatgccaacacttctacatgggaaaggggagcccccgggtgtgacggtctgacttccttgcgccttttcttctttcctctgagcttagtgctggtggaggcctctggaagaggcactgggggaggccaagggcccttcctactatgaaaaatgaactgtaagagtgggaaaatgtgtgaagcctcttaccagtactgctcgagggacctgccagggatcaaaccgccagctgaggtctgtggctgagctcacatgattgtcatggatggctggcagcctgccgcaggctgacacgccaaggatgagagccaggccacagagagtctgtccggcaatcgccgccagccgcaaggactggcagtgagcagcagcagctctggatcacggctatgacctgcttagaataaattccctatgcaaaagttcgtagttttacagaaaatagattctttacactggtaccagccccttctcaagtaattctgcaaggatgctaaacattttcatggaaccacaaaacagtcctaacgaggacagtaaagagagggactctacaaagcagctgcttcaaagacataggtcagagcctgaggttttaaaggaatttcaccttgggagagaacttccaggccaaccacaaggcactgctctttccggaggtccccatcagcggtgtgcggtaagctctgcatcctaagtgcacgtggtgactggtgctccgtgttctctccacgttacaaatatgactgtcccctttctaatatgcgatggcagacgtcgtaatttatgccatctagatcttcaaatcaatgatgtcattaaaaaaatacaatttact

SEQ ID NO: 134440 - DNA, 425 bp, Homo Sapiens
aaaatttaactcctcattcaaaaactgcttttccatgaaaaatacaaaataagaacaaatgtgggctggaatgcggtgggaactgcccttcaaactgactacaccactccctgatgatgcttgagggccggctttggctctgggacctgtcacttctccgacacggacccgacccgttcctctccaggcaggtggtgggtgggggcaggaacaggaggccgggcaggccctggcgtctggctcctgtagcctggtgttgtcaggggagcatctggcagcctgaaggttgggggcagcgggcaccacaagggggcaagaatcctcagtgctgagggcatctcatcttcttgccattggcaaagaaatcaaagaaacaaactccatcgtcggttttgtgctgggtttttttgttgttctctcgtgcc

SEQ ID NO: 134441 - DNA, 1254 bp, Homo Sapiens
  misc_feature (390)..(420): n is a, c, g, or t
  misc_feature (444)..(453): n is a, c, g, or t
  misc_feature (708)..(1140): n is a, c, g, or t
  misc_feature (1156)..(1156): n is a, c, g, or t
aaagtgaggctccgtcaagtcttccctcccccctcccccaacaattcttttgaatttccctccctcccaaacatggtagacctaaggacggaaacacacccagtgcaaacaaagttaaaaagctattttttttcagtatatatgtttcttagcaacaacttccatataacatgaaaaaagtgaaaaactagaaactaatgtttttaatttttttgtgtttaaatttaaatggtatgtgtacttgcttcacattgtctttctaggttggcgttcatgattcaagtatttcaagagtgatatgttctctttttggattcatattccaaacgaaaaaactgaagttataagggaggcaactatgtgctcagacagtctgtcaatgacccaccnnnnnnnnnnnnnnnnnnnnnnnnnnnnnnnaaaaatgtatttattgcaagttgnnnnnnnnnncgaaaaggtcaagttagtgctgctgctgttccaaaaaaggtcacgaggtcagagttgaaagttctaagttcagattgaatccgaccctcctcccagaaggtcaccaggtagtaaaggagcagggctgcccatcctatggggatcttccaccgttgggactccccataagctagaagaatagtttgggggcccccacaatgaagcgccagcaagatcggccccgctgctgccaccagccctcgtgccgaattcttnnnnnnnnnnnnnnnnnnnnnnnnnnnnnnnnnnnnnnnnnnnnnnnnnnnnnnnnnnnnnnnnnnnnnnnnnnnnnnnnnnnnnnnnnnnnnnnnnnnnnnnnnnnnnnnnnnnnnnnnnnnnnnnnnnnnnnnnnnnnnnnnnnnnnnnnnnnnnnnnnnnnnnnnnnnnnnnnnnnnnnnnnnnnnnnnnnnnnnnnnnnnnnnnnnnnnnnnnnnnnnnnnnnnnnnnnnnnnnnnnnnnnnnnnnnnnnnnnnnnnnnnnnnnnnnnnnnnnnnnnnnnnnnnnnnnnnnnnnnnnnnnnnnnnnnnnnnnnnnnnnnnnnnnnnnnnnnnnnnnnnnnnnnnnnnnnnnnnnnnnnnnnnnnnnnnnnnnnnnnnnnnnnnnnnnnnnnnnnnnnnnnnnnnnnnnnnnnnnnnnnnnnnnnnnnnngcgtgctggcgttttncatagtccgcccctgacgagatcaaaaatcgacgtcaatcagaggtgcgaaccgacagatataagatacagcgttcccctggaactcctcgtgcgtcc

SEQ ID NO: 134442 - DNA, 1035 bp, Homo Sapiens
  misc_feature (235)..(253): n is a, c, g, or t
  misc_feature (303)..(886): n is a, c, g, or t
  misc_feature (963)..(963): n is a, c, g, or t
  misc_feature (975)..(975): n is a, c, g, or t
  misc_feature (1004)..(1004): n is a, c, g, or t
agagacgggtctttgtcctgttgctcaggttggagcgcagtggtgcaatcatagctaactgcagcctagaccttctgtgctcaagcaagccttccacttcaacttcccaactagctagagctacaggcatacaccactatgcctggctaattttgtttatttttgtagagatggggtctgctatgttgccctggctggtctggaactgctgggtcaaacagtccccatctctacnnnnnnnnnnnnnnnnnnngcctacagccgcggccgctccaacatcagaatcctcgtgccgaattcttnnnnnnnnnnnnnnnnnnnnnnnnnnnnnnnnnnnnnnnnnnnnnnnnnnnnnnnnnnnnnnnnnnnnnnnnnnnnnnnnnnnnnnnnnnnnnnnnnnnnnnnnnnnnnnnnnnnnnnnnnnnnnnnnnnnnnnnnnnnnnnnnnnnnnnnnnnnnnnnnnnnnnnnnnnnnnnnnnnnnnnnnnnnnnnnnnnnnnnnnnnnnnnnnnnnnnnnnnnnnnnnnnnnnnnnnnnnnnnnnnnnnnnnnnnnnnnnnnnnnnnnnnnnnnnnnnnnnnnnnnnnnnnnnnnnnnnnnnnnnnnnnnnnnnnnnnnnnnnnnnnnnnnnnnnnnnnnnnnnnnnnnnnnnnnnnnnnnnnnnnnnnnnnnnnnnnnnnnnnnnnnnnnnnnnnnnnnnnnnnnnnnnnnnnnnnnnnnnnnnnnnnnnnnnnnnnnnnnnnnnnnnnnnnnnnnnnnnnnnnnnnnnnnnnnnnnnnnnnnnnnnnnnnnnnnnnnnnnnnnnnnnnnnnnnnnnnnnnnnnnnnnnnnnnnnnnnnnnnnnnnnnnnnnnnnnnnnnnnnnnnnnnnnnnnnnnnnnnnnnnnnnccgacctgcgctttacggatactgtccggctttctccctcgggaagcgtggggcttctcatactcacgctgtaggtnctcattcggtgntagtcgtcgctcaactggctgtgtgaganccccgttagccgacgctggcctatcggtaca

SEQ ID NO: 134443 - DNA, 1035 bp, Homo Sapiens
  misc_feature (44)..(219): n is a, c, g, or t
  misc_feature (224)..(224): n is a, c, g, or t
  misc_feature (227)..(227): n is a, c, g, or t
  misc_feature (248)..(249): n is a, c, g, or t
cctctccccgcgcgtgccagatcataatgcagctgcacgacagnnnnnnnnnnnnnnnnnnnnnnnnnnnnnnnnnnnnnnnnnnnnnnnnnnnnnnnnnnnnnnnnnnnnnnnnnnnnnnnnnnnnnnnnnnnnnnnnnnnnnnnnnnnnnnnnnnnnnnnnnnnnnnnnnnnnnnnnnnnnnnnnnnnnnnnnnnnnnnnnnnnnnnnnnnnnnnnnaaatntgnccctcgagcccaagaatcgcnnacgaggtgaaaactttatttcagtttaaacaacaaagcaaatgatatttatgtcatccagggacagataggagagtacagtcattcttcatagcagtttcattgccaaactccaaatgagagatgtaatctaggtaaaagacacttattattccagattacatttacctcacaatctgagatcatgaaaattagtcaaatatattagaaacagatgtacacgaagtcacctcagataaactgagaaagtgatgtctaatgctttggaaaattctgtttctacttaatactcagattaatgagttttaaagatcaggaacatctttatgggggttcataaatgttaggaacaatgatatgcactttcatcagtttaattattaggattcaagatggtatttaaaatctagatgtaggctcagttagtcagtgccaaaaatggaaatcttacatttttttagaggaaacacaaaaatatgactatttggatcttgtcttaatttacaactggtaagttcctttttaatgcttaaaaaaatggacatggtagaattgctacacacctgaaaaaggtctcaaatagaatgttccattaacaacaacaactcagaaatctaattcactctacagattttatttctgatcaactaatcaacttttattttcttgagcctggctgctgctgattatgtataacttgccaaataactacacatcactgaatgttacacatgagtttaaatgggtaatatacaggttttgttataataaagttactgattaaatt

SEQ ID NO: 134444 - DNA, 378 bp, Homo Sapiens
  misc_feature (278)..(313): n is a, c, g, or t
tgcgtgagccactgtgcccggccaggagtaggattctcgggctcccagatgactcctttttgtcagagttggtgtttccaggaggcccttggtcttgacatggagactgttgggtgcagccgtgctctgcaagagcagggcccgttctacagtgctagtgtcttgggacagttccacaggcaacaggcagcttctgctcttttccatctgcacaatgcagatgacatttctgttgcagcccaacctcacatatccaggtgcttgtagagtctacgacnnnnnnnnnnnnnnnnnnnnnnnnnnnnnnnnnnnnagggcttccccgccccgttctcagagctcgcagtggatgcagtcactacaccactcccgggctcc

SEQ ID NO: 134445 - DNA, 1031 bp, Homo Sapiens
  misc_feature (637)..(637): n is a, c, g, or t
  misc_feature (782)..(782): n is a, c, g, or t
  misc_feature (827)..(827): n is a, c, g, or t
  misc_feature (874)..(874): n is a, c, g, or t
  misc_feature (880)..(880): n is a, c, g, or t
  misc_feature (892)..(892): n is a, c, g, or t
  misc_feature (907)..(907): n is a, c, g, or t
  misc_feature (932)..(932): n is a, c, g, or t
  misc_feature (938)..(938): n is a, c, g, or t
  misc_feature (977)..(978): n is a, c, g, or t
  misc_feature (1016)..(1016): n is a, c, g, or t
ttttgggcgggggggaggtttatgaagttttgctctttgaaccacagctttattatggtcctttacactggagacagacacagagacactgttcagaagatgaactaaactcagcagtggtctggtatcaagagctttctgatgttttacagcctgaatttggagggataacgatctgctgtgcctttgcagtcactgcttagcccaaagtaatagtacttttgataataactcactctgtgcgatattcctgaataagtccatctcaaaagtttgggattttcctcctcttaactttcttaatatttggacatgcagttgtcgccaaacttgggtattcatggaatttctagtaaatgaaatacctatactttgatactgaagactgccaaatacataggaattttctttcttaaaaaacagtaatgaagactatatctcctttcccagcactgaatgttttactagcactgggtgctcaccatgcaactgaagaaaatgtggaaactcaaaaggtcaggacagacttccaagcacttgcaactgatgttactgtcttcaattttaataattacacatatttgtatatttcagagaagtttttaatatttctctgtccactttttataagctttanaatgattttctctgccttgagatttgcatcaagaaaaagcacctctcttcacctgaaagctttgaagactagagacacgctttacacgttttaacaagtatattgagtccacgtttggtagcatcagttgttgagttaacagaanatttatgcatttgatctggatggatttaccagatactatgttcantattaaacggatattcacatttgccccacatatgtttctttttatgntaaaangacgaacttggngacattaccatgaanaagtcttttatcactagctcatgtnattganggagagcagctgtctttttatatgttttttgacaatcannatgtatccttttgtacaaaaagactacttgtattctanacgaatatgaaatgc

SEQ ID NO: 134446 - DNA, 970 bp, Homo Sapiens
  misc_feature (855)..(889): n is a, c, g, or t
  misc_feature (911)..(911): n is a, c, g, or t
tgtccatccctcctgggccaacagtgtccacagaagctgagaaggtactgagaacttgttgtgcaggatatggaccaccaagtgggtaagacaagcctggtaaccactgggattgggaggtatccggatggtatggagagattccacctggcatgcctggcatgtaggaagtattttggtggccccgttgcctggtatggcggataggatgccgaaataggacgagagaagactggaaggttcatctccaaataccacaatcatgacctgaataagccccaacaagtctgacttgtggggtgtttccattcatgtagataaggaagatatatcgttcccatttgcatcaacatgctttcctgttttaatagtcattgaactagtaggcttaacaaaacagatagggggattatatgggtatgtgtccagtagccataggcatattggaatattgtatgtattacctctataaggcacagggattgttccagtgaggttcattagttccctggaactgccatcgttaaaaacatatgaatccaaaacaggtttgagatctttgtatagagtaataacattgacagtttcacgtacagttaggtctctgtatttgtactgggtcacaatcttctatggcttcccatatgtcttctataacttggacaccattttcttgagctggctctccgacaccgccatgacggccgcctggcgactcccttccccgcaggcagagggtcagccgctgctgggctgccccagaccgtcccacacaatcgcacacccccaacccggcctcaaacccccggccgtaatggccgaattcccgggcatatgtccggtaccgtcgactgnnnnnnnnnnnnnnnnnnnnnnnnnnnnnnnnnnncggccgcttcctcgctagctanctcgctgcgctcggtcgttcgacaaaagcaggatgcgccatattaggtatatagtcttt

SEQ ID NO: 134447 - DNA, 1512 bp, Homo Sapiens
ttttttttatgcaacaaattttatttagcagtcccaacattcagcacaaaaagtttacagaggatagaaagtgcattaataaaagccagtctttaccaaaagaaaacagaaaatatattattgattcaaaatattttacacttgaatgataaactgcaataacttattctgggcacctactgataaaaggaagagaagaatactttaagaagagctcaacctccagctggtatcagagaagtcagtagaggtcactgagaccggcagtctttcttgctttttgcattagtgccctcagctggaactgtttacgggacagaagacgtacatgcttcaggaagacatccaggtctatcacgccccttctcaaggcttctcccaagtaaaagatagtgtcttcaatagcgttttcttctgcatacagattcaggatctgtttgtataagggagctgtgggaatgataacttcatcgatatcattgttttcagactgattttccattttttccagagcagaactgagttcttcatccttctttttcaaaagttctatgtttttatcaacctcggctacttcttgatctaaacgggtaaccatctcttccagtttctggtgaccctttttcaggtcttcttctgttcgtttcaaggcattgagctctgcctgggcacgatccatttcctccttcatccgccatctcagtttgtcactgaccgcagagatgagagaggctcggatggtgtcctcgctgattgtgccatccctactgggaccaacagtggtcacaggaggctgagaagggtactgagaacttgttgtggcaggatatggaccaccaggtgggtaaggacagcctgggtaaccactgggattgggagggtatccggatgggtatggagagattccacctggcatgcctggcatgtaggaagtatttggtggccccgttgcctggtatggcggataggatgccgaaataggacgagagaagactggaggttcatctccaaataccacaatcatgacctgaataagccccaacaagtctgactgtgggtgtttccattcatgtagataaggaagatatatcttcccatttgcatcaacatgctttcctgttttaatagtcattgaactagtaggcttaacaaaacagatagggggattatatgggtatgtgtccagtagccataggcatattggaatattgtatgtattacctctataaggcacagggattgttccagtgaggttcattagttccctggaactgccatcgttaaaaacatatgaatccaaaacaggtttgagatctttgtatagagtaataacattgacagtttcacgtacagttaggtctctgtatttgtacttggacaccattttcttgagctggctctccgacaccgccatgacggccgcctggcgactcccttccccgcaggcagagggtcagccgctgctgggctgccccagaccgtcccacacaatcgcacacccccaacccggcc

SEQ ID NO: 134448 - DNA, 1044 bp, Homo Sapiens
  misc_feature (766)..(766): n is a, c, g, or t
  misc_feature (805)..(805): n is a, c, g, or t
  misc_feature (814)..(814): n is a, c, g, or t
  misc_feature (858)..(858): n is a, c, g, or t
  misc_feature (866)..(866): n is a, c, g, or t
  misc_feature (880)..(880): n is a, c, g, or t
  misc_feature (902)..(902): n is a, c, g, or t
  misc_feature (925)..(925): n is a, c, g, or t
  misc_feature (988)..(988): n is a, c, g, or t
  misc_feature (992)..(992): n is a, c, g, or t
  misc_feature (1004)..(1004): n is a, c, g, or t
  misc_feature (1015)..(1015): n is a, c, g, or t
ttttttcagaccagctagatatttttattaatgatatataacctctttaaaacatgtatatttaccaaaagcattctgatatggcattcctctagtgtgactttttgcatgtaaattaatacagcctttttgaccttccatacagtcaggttcctcttcagtgtggatgtttcctaacgaccaagttcaagggctttccaacatctctttcactcatgggacttctcaatgtgtgctttgacatgttcccaaagtggaagctaaaaacaaagaagaatctccacacattttacattcataagatttttcacacttgtgagatcacagctgaatattaaggtataaggcagagcgaaaggtttcaacacattccttacagccagaggacgtgcatttatatccaatgtgctcacaagctcagtaaggcccgaggaaaataatgaaagcttttccaccttcctcacattcatagcatttctctccagcatgagttcaaacagactcagtaagatgtaagcatcgacaggtttcctacgttcagtttgtttcctaggatgcacagacacatgaatagtaaggcctatggaaggagccaagattttcccacattccttacattcatatgtcttctcttctattggaattgttaagatctgagacaccaaggaaggcttcccacattccttatgactgtgtacattgccactatgaatgagtacatgttcagtaagtgtgaggacgtagtggctttacacattctttccangtatcagccccaattcacacacatttcagtaggcatgangaatactanagggttgccacattcctatatggttctccaactatgacttctanatgtcgantagatatgtggacngagtaaaggtttcccacattcntgacattcaaagggcgttcacantgtgagtctcatgtgtactgtaaggctgatgagaactgaaggcttgccaacttttgacattanaggnctctccctgtangtatcttttangtgacaaaggtgcagatactaaggctcca

SEQ ID NO: 134449 - DNA, 1298 bp, Homo Sapiens
agcagtgatcaccaagtcttctttagaaatgacactacctaggatatcttagaagaggaatcaaactttcttttaggtattaattgccctcagcaattgtgggttaattaaaactgccaaaataaaaattagcagagagagttacaggcagaggttatagcccatacaatggcatgaagataagataggatctggagacagcccatcatcaggactcttctctccagcaggaattagttgtcataaagcctggctcagaatccccatgtgttgcttttcctcttcctacttataatcactgagttggggagcctattctagacccagaatgacctgtgagactctgaagtactcagaattagtgtggtgagagactggtgcattttatgggaaaaggcatgtatatacacagggaaagaatgcatatcagaggctagagagacagtggggactggagtgtttgtgtcccatgactctgggactcatgcagtgggaagtataaaggaacacggtgatctgccttcccaggctctgctattccgcattccctgcccacaccccctccttaccaggcttgcaggccctgagctattatacttgagggcaataaatatttgttgaattactccttcagattcatttttttacaaattaggtctatgacaatttctgcagtagagacgagtcttcatggagtgtctccagattctgttctcttctcccctgcccttgctacctttctacccacctttacgtctgagataccatcatatccaggaagtctttagtgactcatagaccagatttaggtatccctgccatgtactttgatggaaacccgcatttttcctaccaaagcacttaccacactttactgtaattactgtttagtatatatgcatatcctattagcccttaactctgggagggcaatgaccaggtctacctcaatgcctagcacatagcaggtgctcaataaactagtagacttgaattaacctcagcaggaagctcaggattgaggagacaactggcaagggggcagaatgaggcaccattcctcaggtactattttactgcctcagatattattaaactaatagcataattcaatattttcacacctccaaattcaacatttcagatagttgaataactctcagcacatgcctccacctgacaaatacaatgctcttgccaggcacatttgccatcttataagaagctctttcaggatctctgccccaatcatggcattactgtgaaggtgcccagtggaaattatatctgagttggca

SEQ ID NO: 134450 - DNA, 1017 bp, Homo Sapiens
  misc_feature (655)..(655): n is a, c, g, or t
  misc_feature (693)..(693): n is a, c, g, or t
  misc_feature (795)..(796): n is a, c, g, or t
  misc_feature (818)..(818): n is a, c, g, or t
  misc_feature (829)..(829): n is a, c, g, or t
  misc_feature (842)..(842): n is a, c, g, or t
  misc_feature (859)..(859): n is a, c, g, or t
  misc_feature (883)..(883): n is a, c, g, or t
  misc_feature (910)..(910): n is a, c, g, or t
  misc_feature (917)..(917): n is a, c, g, or t
  misc_feature (958)..(958): n is a, c, g, or t
  misc_feature (971)..(971): n is a, c, g, or t
gaaatgagaaaaactccaacctgctttatgtagaaagggcagaggtcaggggagggaaatagtcaaaaactgcacgtcattccttggacacatctaccctctgagacactggacactttgagtccagagggaactggcccccggtccatccctctttgaaaggatttctttagtttgactctttgacactcctcttgtgtctgggctctgggccgctggctgcactggcccctggcccaggaaggctgggtccggcaacacctggctagctctagttgatgtagtacaccttggcggcatcataatgggcgtgggtcatgtagttcttgttcctaaggggccaccagtggtcagggtggtaggtggctgggtagacatggggctggtgttgaacacaactgaagagcgccaggctccggtctgtggccacagtgggcaggtagagctgcagcttatccagaagatgacccggccagaaggaattggggtgtgtttgctgcagaccactggacctcttcaccttcagcttcctggtaaattcctcaaactccttaaagcgcattttcttgcttttctttggcgttttcctagtggagaagagagaggattttgtgaggagagtggaaatccaggccaatggggctttagggagtangtcagggccgcaggggtggacccgtttctaagtctcanacgagagctctgaaagaaaatgtcttccacctggggtggacctgactctgtgcctccatgctccaagggaacacagtgggcttgggtcagctggactacccnntcagatctggcaggtgacctgngcagtcactcncctttctcatccntggtttctcatggtcanaataagactctcaggtagtacganggagtcagtagtcatgcaatcttttgngtcctgntctatcccatccaagctacccacctgagacaagtgtaatcnacccctccctcanctgagctgaaaatcatacgtcaggatcttccacactctgcgatctg

SEQ ID NO: 134451 - DNA, 725 bp, Homo Sapiens
  misc_feature (614)..(674): n is a, c, g, or t
aaagacaaagaaatcagattctttatttggaattaagccatgcttccctgggtggggataggagaggttctccgggcatcctgatatcacacaacatagttcacctgctcctaagtgaggtctgagtggaactattgactacattgtcatttttgttgggcccatgccgggatccaagaagaccatgcccttctgtggagtatgctccatgacaggcaagaatggccaaagacacagtgctagcatcatgggccaccacggggtcctaagaccaccactcagctattattgctcgggaagacattgccccctcgtggttcctcatgtaattgagggaagctggcagtgcaaagagctgccagttaaggcaatcaatacatccaaacacgtgcaaagtttccacattcactgtagccttatctcttctgaatgtcttgggttgcagtttcaagagttggtttattttcatccaggatacatgtttgttccccggtgcaagacaggagcagcaggctgggatggagaattcctgggaggaagaagtggggcagaacccactgatatatggagttccacatttatacctttgtagcagtcaaatctaagagtttaannnnnnnnnnnnnnnnnnnnnnnnnnnnnnnnnnnnnnnnnnnnnnnnnnnnnnnnnnnnnagggcaggagctcgagctcagcctgagcaacaagtgagacctcatttttct

SEQ ID NO: 134452 - DNA, 1093 bp, Homo Sapiens
  misc_feature (672)..(680): n is a, c, g, or t
  misc_feature (716)..(716): n is a, c, g, or t
  misc_feature (727)..(973): n is a, c, g, or t
ggccgcggctgtaggttttttttgtttgttgcttgctttggtaattgaattctgaagaatttatctgcatgacgataactaggcattctatccatttgtagatcagagaaagtgaagagattatatattagtacttaaatttttacattttccaaatgaatgaaaatgtatgtttctttgtacttttttaaaaaaatcagcttagtaacaatactatatggtttcaactagtaggtaatctgcttatatttctaatgcaaacttaacaattgtgtactttttaaaagctgcaatatgtgatggaaaatagctgtggtcaattttgttatccatatttcagactcaattttagatacaatggtggctttatattttaagtatatagagctactcaaggagttgaatctccccttttctcattaacacaatttttctaagttgatatggtgtactcattaacatacaccaaatttacttttactttgttcagattgtggaatgaatttccaccagttctcttctttttaatgtgtaccctaggaggaattttactgaggttatagcataccccatgagcacagtggggaagaagaatgtgttgttatgtgctgctgctaaacagaagcagcagttgtaatttgtttttcagtttacatgtggttatagttagannnnnnnnnaagcagcaacttttcacaaataaaatgtgcctcgtngcgaattcttnnnnnnnnnnnnnnnnnnnnnnnnnnnnnnnnnnnnnnnnnnnnnnnnnnnnnnnnnnnnnnnnnnnnnnnnnnnnnnnnnnnnnnnnnnnnnnnnnnnnnnnnnnnnnnnnnnnnnnnnnnnnnnnnnnnnnnnnnnnnnnnnnnnnnnnnnnnnnnnnnnnnnnnnnnnnnnnnnnnnnnnnnnnnnnnnnnnnnnnnnnnnnnnnnnnnnnnnnnnnnnnnnnnnnnnnnnnnnnnnnnnnnnncaaggggtttgccgtatgcgcgtccttcggttcttcctcactgactcgctgcgctccgtcttcggttgcggtgatgggatcagtcattcaaggcgggatacggttatcacagatcatggg

SEQ ID NO: 134453 - DNA, 656 bp, Homo Sapiens
gctcttaaccacgtttattgagaggggcctcttcagagaaaggtgtcccatggccccaaaaagaactgccaagttttggtgaggagtaacaccctggcatgacattccttctctttcctggccctcaaccacttccttcctttggctcttaagacctagcaggttctgtgaactctcaggccttggccagcactagttaggggaggtcaggtggtcaatgtcctggtgattttatgagactgccccactgagaaaacttacttacttcaggcatccagtgcccccacccagggttcaggccctgtctaaggtgttgcttaaagacaaaaaggcaacatgtgcctcactggtggtgtgccactgttctcatgctgcctcctaagtgactccgattttcagccctggtagaataaggaagacagctgatgcctccttagccccttagcacatgttcctaaggtgtgttgtcaagccaacctgaattctgcctccctgttatagtccctgtctcccccacagagacctgtgggtgctcccagcagagttgagactggctccgttgagttaatgactagaatatagtgctttcactacttgattgttaacctgttttcttctgatgccatcagtaccagcagtcctcgtgccgaattctt

SEQ ID NO: 134454 - DNA, 1027 bp, Homo Sapiens
  misc_feature (47)..(47): n is a, c, g, or t
  misc_feature (237)..(237): n is a, c, g, or t
  misc_feature (242)..(242): n is a, c, g, or t
  misc_feature (249)..(361): n is a, c, g, or t
  misc_feature (422)..(422): n is a, c, g, or t
  misc_feature (967)..(985): n is a, c, g, or t
gtattttttcgggggctataaccccacccttagtcgctttggcttgnaatttctggttcgtgttggaacgttcccttgatgatatcgtccgcaccaagacggccagggtcatgaggagagggagacccatacgcaacgcctttcccggcgtgccgatcataatcagttgcacgacagttcccgactggaagcggcagtgggcaacgcataatgtgagtagctcactcattagcaccncaggnttacacnnnnnnnnnnnnnnnnnnnnnnnnnnnnnnnnnnnnnnnnnnnnnnnnnnnnnnnnnnnnnnnnnnnnnnnnnnnnnnnnnnnnnnnnnnnnnnnnnnnnnnnnnnnnnnnnnccaaggaattcggcacgaggattaagatagtgaaatctagcgcaaaggatctcaaaaattntgtttgatgattgaaggaatattctgaaaattacctagtatagatgttaggataaagagcagacccttttcaatataggtgagaggagaagttggagggtgtgatgatactcaaaagtttttcactgaagagaaattggggcgtgcagtaaacatgtaaaaagattcttactaataagcaggtggatgcaaatgaaaatcatcatggaaggttatttttaaaactggttctatcattgcctcactttatatattacagagttatacatactactttgtaagataacttttcttttcaaaactgaagtcaatgtgatagaatggtgagcattattttggaaggccagactaggaggaggtgggaggaagaagtcagactcagcctgtgaacagacgctaaccttggcagaagccaaaacagtcagacagtgttgtctaaaaatgatcattcaagaagagcgaaacagcaaggtgatttgtgaaagagatttattagaaaatgaaacacatttatacctctgttcaataaaaatctgcttttcgtcnnnnnnnnnnnnnnnnnnngcctacagccgcggccgcaagcttattccctttagttgaggt

SEQ ID NO: 134455 - DNA, 1086 bp, Homo Sapiens
  misc_feature (290)..(305): n is a, c, g, or t
  misc_feature (541)..(541): n is a, c, g, or t
  misc_feature (742)..(742): n is a, c, g, or t
  misc_feature (751)..(751): n is a, c, g, or t
  misc_feature (758)..(758): n is a, c, g, or t
  misc_feature (829)..(830): n is a, c, g, or t
  misc_feature (836)..(836): n is a, c, g, or t
  misc_feature (842)..(842): n is a, c, g, or t
  misc_feature (850)..(850): n is a, c, g, or t
  misc_feature (853)..(853): n is a, c, g, or t
  misc_feature (856)..(856): n is a, c, g, or t
  misc_feature (921)..(921): n is a, c, g, or t
  misc_feature (946)..(946): n is a, c, g, or t
  misc_feature (961)..(961): n is a, c, g, or t
  misc_feature (1051)..(1051): n is a, c, g, or t
tttacagttttaaaaaaaggatcggtttttaatttacaagagttctaaatgtacagaattctcctttaaaaaaatcgttatacacaataaatacagtacaaaaaaatttatcttacagtactagttatgtctccgagatttcaaaatctggcgcgggcggctggaggcaggaagaacagagggaagactagctggggagaggttcgggggagaggaagaccccagtttcttgttttgctcagatttcaaagtcgaggggtgggcgttcgaaatctctcactcacttgtgnnnnnnnnnnnnnnnnggtcacggagctggacgtgcggatgtcacacgggtgcctgcgggcacagcacgctgggaggctggctcccccaccccctctccggttttgtttgacagcctgttgggggcggcggggagaggctgagactgtctggaaggaccctgccagctcccagcaccctccaccatctgagaagccacacagacaagacaggcacccggagcgttggcatcaacccggtggccccatccctnggcaaacacatgcgcgtgtcccccggacagaggggcagagtgtgccaggaaatgggaagaaacaggaactgacacagcactttgcccctccctttggcaggggagacgttttacatcacagccccctcccctaaatccacgcccacccccccagcaacccagctgaagcaggcggcagggaaggaggcctttgtgactcanataacttangcaaganaaccgtcaggggatccccggctcgagtccccaagaggctgagggcggacaccgactgtcccggcgtcctcnngaagangggacngggaaggngangcngccggtgtatctggtcacgtcctggcgccgagcaccgtgtgacggagtgggtagcccgggctgtnagggcgcgggaatcgggtgcggcgnagcactggggtacanggcgcggctccggcggggctgctgagtcagatctgtcatggcctgcaggtccgtgacttcacctgcgttcctgggaactgctgtcaatcnggaccgggcctgcgatcttgccaggcatccaaaaa

SEQ ID NO: 134456 - DNA, 1022 bp, Homo Sapiens
  misc_feature (734)..(734): n is a, c, g, or t
  misc_feature (791)..(791): n is a, c, g, or t
  misc_feature (797)..(797): n is a, c, g, or t
  misc_feature (803)..(803): n is a, c, g, or t
  misc_feature (807)..(885): n is a, c, g, or t
  misc_feature (897)..(897): n is a, c, g, or t
  misc_feature (968)..(968): n is a, c, g, or t
ttgaaacatatgcaaaaacattttatttataatagatcaacatttttgacatgaaaggtagccactttcaatttctcaggaatgcctagaacccaacagttttcagaaagactacttagttcacaattatttcactgtaggtaaatgaaataatttcagaatgaactttttaaatggctttgcctatggcaaattgttttataaacttgaatgtatggtaagctagctttcccaggaaatgaatgtaatccaactatgttccaaatgtattaaaccagtttatacaacaaatatgagaatcacttatgtgcatcaactgtgctaaaacaagaattctttttatcaaaatattcatttttcaaaaaggcctcacattaaccccttaaaccaagcacccccttcctatgtccagcactcttttctacttcgagttgcatgactgtagagacaactgtcaaattccagtggaactgtacactgacttaagactctatgtaatatacatcaaacacaggaggtcactgactttaagggacgaggtgataactaactagttataattcagccaatgtcttttttagtttagagggaaaaaagtagcccccaagtgtccttaacttttcagtacttctctgtaacacacagaatgaaaaggtactctctaaaattaaaatcattagaaaatatcttaaataaaatgttttacataaataagtgttaaatttcagattcanactatattttcttctgtatctcaatttgggaaaaatccctcgtgccgaattcctggnctcgangggcanattnnnnnnnnnnnnnnnnnnnnnnnnnnnnnnnnnnnnnnnnnnnnnnnnnnnnnnnnnnnnnnnnnnnnnnnnnnnnnnncatacgagcggnagcataagtgtaagctggggtgctatgatgagctaccacataatgcgtgcgccactgcgcttcagcggaanctgtctgcactgatatgatcgcacccgggaagcgttgcgatgcgctcgctccgc

SEQ ID NO: 134457 - DNA, 1259 bp, Homo Sapiens
tttccttgaataatcattttattaacaaatacaaacttgaaatgttggtgataaaatatatcaatattgaacaaaaatgtgtgtaaacagtaattctacaactgggaacatatctcagttttgttaattttggtgacgtcttcccaaccatgtctaatcttcagtatcttcttcctcaagcatggcaggaatagtatgcttttaaatatcaggacaacaattggaaggaaaacagctatcataaaagttggaggtgtataccatacaaattgttttatatctatccacttattccaggcaaaaatcaatgcgtgtattgtgcccagtagaagggaaacaattcctagcttgctctgaatatagtgaaattctctccatgtcaaagagtcactcacagatggaatagatgtcacagccaacagagccagtattgccaatcccacaattcccagagacacataaatctccattctccaaacatcatgctcaatccaggcatcttctttattttgttggacctgttgatatgcccagtttagcaacttgtatctgtaggatcgcctcattgggtaagacagactataaattgcatgcagtacagcaaaaaagaaactgagaagcccaaactgctttcttgttaacatccacttatccaaccaatgtggaaacttcttatacttggttccattatgaagttggacaattgctgctatcacacctggcaggtaaaccaatgccaagagagtgatggaaaccattggcaagactttgttgatgaccaggattggaattttataaaaatattgttgatgggaagttgctaaagggtgaattacttccctcagaagagtgtaaagaaaagtcagagatgctataatagcagctattttaattggcaagtgccactgtggaaagagttcctgtgtgtgctgaagttctgaagggcagtcaaattcatcagcatgggctgtttggtgcaaatgcaaaagcacaggtctttttagcatgctggtctctcccgtgtccttatgcaaataatcgtcttcttctaaatttctcctaggcttcattttccaaagttcttcttggtttgtgatgtcttttctgctttccattaattctataaaatagtatggcttcagccacccactcttcgccttagcttgaccgtgagtctcggctgccgctgctgcccagaggtgcgggccccacgcggcgcctgagcctccagagcgcggagcctccaagccagctgcccc

SEQ ID NO: 134458 - DNA, 1421 bp, Homo Sapiens
  misc_feature (1240)..(1353): n is a, c, g, or t
ttacggctaggtacgaggctgggtggtgaattcggcacgaggcagagccgccatgccggaaccgcgcgggtcgtcgcagctgcgggtgaacgcggcgttgccgcgcggtacaaccgctaccgggagcgcgaggaactgcagcggctgaaggatcgctacggggaccgagacagcagcagcgactccagttccgagtcggactcaagcgacgagcgcgtggaatttgatccccagcaggagcgggacttttacaaaacgctctccttgttgaagaagaaggacccccgcatttatcagaaagatgccaccttctataacagaacagcatcgtcatcagacagtgaggaggacccagaagccttggagaagcagaagaaagtgcggcccatgtacctgaaggactacgagaggaaggttatcttggagaaggcaggcaaatatgttgatgaggagaactcagacagggagacttccaatcacagactccaggagaagcccgtgttcgaacccggggacaagacgttcgaggagtacctggatgagtattaccggctggactacgaggacatcatcgacgacctgccctgtcgcttcaagtaccgcacagtggtgccctgtgactttggcctcagcactgaggagatcctcgctgctgacgataaggagctgaaccggtggtgctccctaaagaagacctgcatgtacaggtcagagcaggaggagctgcgggacaagcgggcgtacagccagaaggcccagaactcatggaaaaagcggcaggtcttcaagtcactctgccgagaagaggcagagacacctgcggaagccacagggaagccacagagagatgaagccggcccacagaggcagctgccagcccttgatggcagcttgatggggccggagagtcccccagcacaggaagaggaagcccctgtatcaccccacaagaagccagccccccagaagcggaggagggccaagaaggcacggctgctgggccccactgtgatgcttggtggatgcgagttcagccgccagagactgcaggcctttggcctcaaccccaaacggctgcacttccgccagctgggccggcagcggaggaaacaacaggggcccaagaacagctcctgagcaccagggagcaggcaggggcctcaggctcctctcctcaaatcaagccctggacaggtctcgcacccacaagtactatctgctgcagagatcctctcatctnnnnnnnnnnnnnnnnnnnnnnnnnnnnnnnnnnnnnnnnnnnnnnnnnnnnnnnnnnnnnnnnnnnnnnnnnnnnnnnnnnnnnnnnnnnnnnnnnnnnnnnnnnnnnnnnnnatgtggtgacacatgcctgtagtcccagctactcaggaggctggggaaggaagatcacttaaggccat

SEQ ID NO: 134459 - DNA, 1607 bp, Homo Sapiens
gagagtatgaagtcgacggcgcgccgaattcggcacgaggagagccgccatgccggaaccgcgcgggtcgtcgcagctgcgggtgaacgcggcgtttgccgcgcggtacaaccgctaccgggagcgcgaggaactgcagcggctgaaggatcgctacggggaccgagacagcagcagcgactccagttccgagtcggactcaagcgacgagcgcgtggaatttgatccccagcaggagcgggacttttacaaaacgctctccttgttgaagaagaaggacccccgcatttatcagaaagatgccaccttctataacagaacagcatcgtcatcagacagtgaggaggacccagaagccttggagaagcagaagaaagtgcggcccatgtacctgaaggactacgagaggaaggttatcttggagaaggcaggcaaatatgttgatgaggagaactcagacagggagacttccaatcacagactccaggagacatcgtcgcaaagttatgtggaggaacagaaacagctcaaggaaagcttccgggcatttgtggaggacagtgaggacgaggacggcgctggggagggcggctccagtttgctgcagaaacgtgccaaaaccaggcaggagaaggcccaggaggaggccgactacatcgagtggctgaagggacagaaagagattcggaacccagattccctgaaggaactgacgcatctcaaggaatactggaacgaccctgagttggatgaaggggagcggttcctgcgggattacatcctcaacaaacgctatgaggaggaggaagaggaggaggaagatgaagaggaaatggaggaagagaagggggtccacggtcccccagtccagctggctgtggacgactcctcagacgaaggggagctgtttctgaagaaacaggaggactttgaacagaagtacaatttccgtttcgaggagccggactcagcatcggtcaagacctacccacgcagcatcgcgtcctccgtgcgccgtaaggatgaagcgcagaaaggagaagagggaagagactcgggagcgaaagaagagggagaaagcaaagaagcaggaagagctcaaagcagctgaagaacctgaagaggaaggagattctggccaagctggagaagctgcggaaagtaacaggcaacgagatgctgggcctcgaggagggggaccttgaagacgacttcgaccctgcccagcacgaacaggtcatgcagaaagtgctttggggacgagtactacggggccgtggaggaggagaagccacaattgaggaagaaaagggttgaagacgatggactgggacacgtgggacgggcctgagcaggagggagactggagccagagggacctgactgtgaggacccaattcgacatggaagcggataagaaccaggcagccgaggagaaaaaggggagggcccattatgcgaaaaagaacgcaggtgccatatcagggcggggagggaaaacacggtcgacgggaaagtactagagcgagggaaacagcgagcaagaaaaccgcgcgggtaacacagaggccgagcaccaacacgagagaagcggcaaaggaaggcgg

SEQ ID NO: 134460 - DNA, 274 bp, Homo Sapiens
tggtgatctagaggatcccggtctatgcgtggtgtgacgtaagccacggtcaacccacaagccacggtcaactcacaagccacggtcaacccacaagccacggtcaacccacaagccacggtcaacccacaagccacggtcaacccacaagccacggtcaacccacaagccacggtcaacccacaagccacggtcaacccacaagccacggtcaacccacaagccacggtcaacccacaagccacggtcaacccacaagccacggtcaacccac

SEQ ID NO: 134461 - DNA, 989 bp, Homo Sapiens
  misc_feature (57)..(57): n is a, c, g, or t
  misc_feature (88)..(88): n is a, c, g, or t
  misc_feature (116)..(116): n is a, c, g, or t
  misc_feature (142)..(142): n is a, c, g, or t
  misc_feature (145)..(145): n is a, c, g, or t
  misc_feature (201)..(201): n is a, c, g, or t
  misc_feature (204)..(204): n is a, c, g, or t
  misc_feature (217)..(217): n is a, c, g, or t
  misc_feature (262)..(262): n is a, c, g, or t
  misc_feature (270)..(270): n is a, c, g, or t
  misc_feature (275)..(275): n is a, c, g, or t
gattatcgatcatataggattgcctcgagccagaattcgcacgagtgcagaaagtcntaacctgtgaaggagcatcccactcgttgangaagtgctatgtggggcacccatatgtnccgatgccctatccatcatcagctcntcntgaagacaaagtccgggagaggatcaaatataaagacatctgagtcacgcagcatngcncaggagtgtctcncagaaaactgggtggtacgtcaaattgatctcgccacttgaattnccagttcntaccncaggtgaacgccacccagaatcccttcgatgagatcatcctgttctccctccctcttgccttagactgggactcagtacatgttccaggtccccatgctatgaccatccaagagttggtggactatgttaatgccaggcaaaagcaaggaatctatgaggaatatgaagacattcgtcgtgagaaccctgttggcactttccactgttccatgtctccaggaaacctagagaaaaaccgttatggggatgtaccctgcctggaccaaactagagtgaagctaacaaagcgaagtggccatactcagcacataaactgaattcacagtcctatccaggacccttggagaagattttcctgcaggagcatttgagctaagagactggctggctggagggtaaattcatcagtactgctgagatcatcatcgtatatgccctgaaggagtggagtacagtggttgagttggggctctggagtcagagatacctgtatttatccattttgttgacttccctgtctccagtacctagaacagtgcctgccacatatcagacactcaggacatatttgtgaatgagtgaatcttagtgtactgggagattcttctaatcatcctgtggttaatatgaagatcattgtctgatttgtagtccctctccttactgaaacattagcggaggctttatttttatagtaaatggagtatttaggc

SEQ ID NO: 134462 - DNA, 1152 bp, Homo Sapiens
ttttttttctggttgtcagaactagggttttgtttattaaactggaaattatattaacaatgaaacaaatcacacggggcgggggtcgtcaggaagaggttttgaggctggggtgggaggcagccgggtttggctgcggctgctgtgaaccacaatgtcgtcgtattcatcgccctcgtctccgctgtcgctgtcgctactgctgctgcaggggccggatttctcgtcctcgccctcgggctcaggggctccgtgtgcacggaggaggcgggcgaggatggggttgggccggagcatggcactgccgagtggggtgcggccaccgtacatgcgggcagcagggttcgcgcctgccctcaggagaagctccagcacatcggctgcctgggcctccactgccaaatgaagggggctccggccgcacgtgggctccggtttgtcaaggtcagctccagcatctcggagcagccggaccatctccacatctttgtggataacggccacgtggagtggggtgtggccctcgtagttttcagcctccagctgcagcttccagtcctcctcactctcctcttcttccttctccaagtcggaatcggggtacaaggcgacaggggtatggttggtgtcgggagtacggtcagggccctgagcgaggtaggtgtcgggggcttccctggggcgccgggggcggggctgaagcagggcacgggcacaggcgtgtgcccccacacggcaggccaggtgcagcgccgtgtggcccctacgctccgccacacacagcccggcgcctgctgcgtacagcttctccaccgtggatgtctcccccaggatggctgccaggtgcagggctgtctggcctaggtcattctgcaggtccatgtactcagtgccggccgagaagcctagaagaaaatccaggaagggttcatgctgatgaatcacagccaagtgcagtgccgtgtccccatcctcagtgacgtagccgaagacgaggggagcccacgacagccccgggcccaactccgcgcccaacccaggtcctccgggggccgctgcgtccggacccagggagcccaggccgctgtcgcaccattcatctgcctcgtgccgaattaaacacccagccctcgtacctagccgtaaagttga

SEQ ID NO: 134463 - DNA, 1129 bp, Homo Sapiens
  misc_feature (44)..(73): n is a, c, g, or t
  misc_feature (713)..(713): n is a, c, g, or t
  misc_feature (836)..(836): n is a, c, g, or t
  misc_feature (841)..(841): n is a, c, g, or t
  misc_feature (849)..(850): n is a, c, g, or t
  misc_feature (859)..(860): n is a, c, g, or t
  misc_feature (864)..(927): n is a, c, g, or t
  misc_feature (1024)..(1024): n is a, c, g, or t
taacctcactaaagggaataagcttgcggccgcctgctcaggtnnnnnnnnnnnnnnnnnnnnnnnnnnnnnnctgggcagaaaaaggactagaaagggagcactttaatgaacagaagtacagacgtgctggcaaggatggaaatctccactggttcctggcccccttcacctccatgcatccccagcatgggtgttaatcattacccaagctctcgctgttccccctcaccccctgcagagtccagcaggtctagatacgtgctctttgaaatgtgttctgggattaaaaatggtgccctgaggctgtctaaccctcacaaaagacagacacatgcacacacgggccttggggagggctgtgtattagcagtcaggtgggccctcctgggagagcttgctcaagaactcttctcggaaggaaacccaccttaaggtagggttctgataggcagagctcccagaggggacagccagctgctagaagatggggttatccagggtttgtaaggtttaaacaacgggcagggaggcaaaccgagtcaaatggtttggaaacctactgtgtgcagggcattctgagggaatcctgaactctgcctctttggcatgaccaaagctgaagccagggacatacatacgaaggccctttgagctggtggaagaataggcactgattggacccttagctggaagaatgatccattcttaancaaaccctgggagccccagggattctgcagcccctatcccagcacgtgtcaatgaaacaggcatgaactatccttggctgtgcagctagctcaagggtacagttacccctgtgcttccaaccntcgtngcgattcnntggctcgannggcnnnnnnnnnnnnnnnnnnnnnnnnnnnnnnnnnnnnnnnnnnnnnnnnnnnnnnnnnnnnnnnngctcacattcacacacatacgagccggagcataatgtaagctggggtgctatgatgactactcacatatgcgtgcgctcatgcgctttcatcggaanctgtctgcactgcatatgatcggcacgccgggaaagcgttgcgtatgggtctccgctctcgtcatgatcctggtcggcgtcggtgcggacgttcatcatcaaggt

SEQ ID NO: 134464 - DNA, 1147 bp, Homo Sapiens
gccgtctcaaacttcgaccctcggccataacccctgctctggaaggagtttggagctgagttcaccccatttgcttgctgaggctggagggaccaaacatgtggggccatactggaaggcacctgggcatgcctgtgtagtagggaagaccagtgtagctatagccaggtggcagtgcaggattcacgaagggctgctgggctgtgtggtgggtctgtgattggctctgctgtggctgagctggtgtggtagcgggtgcaggggatgcagagtccccacggccaaagctttgtgacatcacctggatatggattattagctaggctcccatctcggctggcaagcgctgtgggtgcagcaaagggaattccatagtagtccactggcagccgtgactgcagcatctggagctcgtcatagccatagatcgggtaggcaggaagcagtcctccgggacctacgaggtactggttgtgcagcaggggaggcaccccctgaggtaagtttgggggtgctttgcctgaggtcaccaagggcgcggccctgctactgctgctggatgcactcgcgggggtcccacccagacagaggctgttcgcggtgttcatgctactggacaggctgacgcctgaggatgcggaacttgagacggaggtcgctgccgtggagaaggtggctgaggactggtgggaagaggcgctctccacactggcatgtgtgtgtgacgtgcttcgaggagagggctgcatgtgcagagaggctgctctggtggctggagagcgaactgctaagctgagagagagggctgctagtcaggtcgccagtgtgctgggatgtggacggcagaagttcagtgcaggaggtggtgctgggcagggaggcaaaccgagtcaaatggtttggaaacctactgtgtgcagggcattctgagggaatcctgaactctgcctctttggcatgacccaagctgaagccagggacatacatacgaaggccctttgagctggtggaagaaagtcctaggcactgattggacccttagctggaagaatgatccattcttaacaaccctgggagccccagggattctgcagcccctatcccatgcacgtgtcaatgaaacaggcatgactatcttgctccaggc

SEQ ID NO: 134465 - DNA, 1478 bp, Homo Sapiens
  misc_feature (515)..(515): n is a, c, g, or t
  misc_feature (1192)..(1257): n is a, c, g, or t
accggcctccaggatcatgtggtatgtcagcaccaggggcgtagccccacgggtcaactttgagggggccctcttctctggctatgcacctgacgggggcctctttatgcctgaagagctcccacagttggacagagagaccctgtgccagtggagcacactctcctatcctggcctggtgaaggagctgtgtgccctcttcattggctctgagctccttccaaaagatgaattaaatgatctgatcgaccgagccttcagcagattccgtcacagagaagtggtccatctgtccaggttgaggaatgggctgaacgtgttggagctgtggcatggcgtcacatatgcatttaaggacctgtccctgtcctgcacaacacagttcctgcagtacttcctggagaggagggagaagcacgtcactgtggttgtaggaacatctggggacacaggaagtgctgccattgagagtgttccaggggcaaagaacatggacattatcgttcttctgcccnaaaggtcactgcacaaagattcaggagctccagatgacaacggtgctgaaagcagaacgtacatgtgtttggagtggagggaaccagcgatgagctcgatgagccgatcaagactgtgtttgcccgatggtggcttttgtcaagaagcacaatctgatgagcctgaattcgatcaactggtcccgggtccttggtgcagatggcccatcacttctttgcttacttcccgtgtacgccatccttggacacacatcccctacccctgtggaggtggtgtgccaacaggggctgccggtaaccttgcagctgggtacattgctcaaaagataggcctgcccatccgtctggtcgtggcagtgaaccgcaatgacatcatccacaggactgtccagcagggagacttctctctctctgaggctgttaaatcaaccttggcatcagctatggacattcaggtgccctacaacatggagagggtgttctggctgctctctggctctgacagccaggtgacaagagccctcatggagcagtttgaaaggacccaaagtgtgaatctgcccaaggaactgcacagcaaggtcagtcactacccacacaccacagagaaaggaaagggtacagccacatagcagacttggggtttggaagtctggtcaagggaagaggacacctgnnnnnnnnnnnnnnnnnnnnnnnnnnnnnnnnnnnnnnnnnnnnnnnnnnnnnnnnnnnnnnnnnngaggagaggtaatagagaacatggtttagagtcaaatgagctcaatcccaagtgagctctgagacattgggctagtttcctaaactctgtgccttggttccttcgtttataaaatggggataataagaatgcctacctcatagagttgttgtgagatttaagtcaaataatatatgtgaagcactttgcatacttcctggtaatatatggcttgatacatt

SEQ ID NO: 134466 - DNA, 1194 bp, Homo Sapiens
  misc_feature (611)..(611): n is a, c, g, or t
  misc_feature (944)..(957): n is a, c, g, or t
gcggccgccgaggatggggaaatccaacagcaagttgaagcccgaagttgtggaggagctgaccaggaagacctactttaccgagaaggaggtccagcagtggtacaaaggcttcatcaaggactgccccagtgggcagctggatgcggcaggcttccagaagatctacaagcaattcttcccgttcggagaccccaccaagtttgccacatttgttttcaacgtctttgatgaaaacaaggacgggcgaattgagttctccgagttcattcaggcgctgtcggtgacctcacggggaaccctggatgagaagctacggtgggccttcaagctctacgacttggacaatgatggctacatcaccaggaatgagatgctggacattgtggatgccatttaccagatggtggggaataccgtggagctcccagaggaggagaacactcctgagaagagggtggaccggatctttgccatgatggataagaatgccgactggaagctgaccctgcaggagttccatgagggttccaatgcagacccgtccattgtgcaggcgctgtccctctacgacgggctggtatagtcccaggctggagctggatgcctgngaaccactcacctccttctgtgccatgaggccacctcagccctgacaccaaccccgtgcgtccacccagccttcttccgcatccacacacagccggctgcccttgacccgggaggccccggctctcctctcccctgtcctgcacccatcccccgcctgaagccaccggctccaattgccagcaacctctgcttgtccggaaaacgacaacacgaaatggaaaaggctacagccctctgcataaaccaaggacttggctgcctcgcaggcagcctccgttcctcccgctctcttgcgcgtgtgcttttgttttttattttgaacagacgttttnnnnnnnnnnnnnncaactaccttctgtcctagaagacacagactgacagatggggtgaaggcctggggacctcagagaactctgccttgccctcgtccctcgtccttcggcagccggagaggctgtgggtgggccgagggtgtctaggggttctgcctagtcaacgttatttgtcgtcccatcttttggcagcaaaaccacctgcgtggctaggatgattaattatgaggatgatgattttttttgtgat

SEQ ID NO: 134467 - DNA, 1806 bp, Homo Sapiens
cactgttaagctcttgtactttattgagcagctgtggaattaggaaggggaagtaggataggggacacgattacgttcctaagtgaaggtttcaagctgggctttgcagggggtataattagtatggtcactgtgtcttgtaggatgtttggctccttggtgatagagcttgccaaaatggtgtcctttgataaggagggctggggggcagggagttgaagaaattcccttgccaggcttggggatctgtaaacatttccattaatcaacaagtgtgtactaatcccgagtcttacattgcgatgcctcactatccccacagccccatccctacctctctgcccaccagggctgagctcaaatctgtgtgttgtggacctctgcataggccccaagggagggagactgaggctcagcctgggactcagcagggcaggtgatcaggctcccggccagctggagccagagggggacggggcatccttggcccccgtgctgtgtgcagaacagagggctacgttgcagcgagtgcatccttgatggcattggtgagagggaagcgcagatcctggccgcagaaggagccctggaagtcatccaggtccagggcccataccatggcgcccgccagctgcctgtccttcaggtactgcaccttgcttttgacgctttcctggtcgtcgtatcctacccactggttgcccttggtggcataggggacctgctggccgaggattctatggactgtggctccgcggaggaagtcacagatctcatagtaggcaagggtccctgcctccttggtgaaccggcctggaattcccggtcctgagattggggctccaacaccagtctcagaagaagccagagtgaagctcctcccgaaggtggggatgcccatcaccagcttactgggcaggagcccccagcctcaaacatgtaccccacagcatagtcagtgttgctgaatctgtcaggacttgcatcctcctgacctcggaacaggggactgtgatggcctgtggtcccacgccaggctcccatgaaaatcgtaggtcatgatgctaatgaaatccaggtgttgggatatcttggcaatgtcatagctgctgtcaatggtgaccttccccgcagacagtgctgcgctgagcaggagctgctttttccctggctgggcttcctttataaattcggccttcatttccttgattagggtggtaaaatgctgtttgtctctccgtccagggtagagccaggcaaggtccagcccatcaaagccatgggtgcgcagaaatggcggtactgacttgatgaaagtccggcgactctgggtgttggaggctatcttggaaaatctttgagacccaaagttccatcctccgacagacaagagagtcttcaggttggggttcctgttcttgagtgtgttgagcatgccgtagagcgtcacatcattccactcccaggtgtcgatgtgatcgttgcttatattggcaaagctgtagatgatgtgggtacagaggaagcggtcaagggcatctgggaagcagctcccatcgccttcccggtactgggaccagctggtgtagtagcagaccagtttgtatgcagagcagcactggagcagcaccaggaccacaaagcctgtttgagacgccttcacacccattctggctgcagcagagcagggcagggtgtggcctcttcccttgcccacggctcctggtgccagctacctagacagggcctcttccccaggccctgtacttcctcctcgtgccgaattcgccacccaggcctcgctcc

SEQ ID NO: 134468 - DNA, 1107 bp, Homo Sapiens
ttcttacccccctggggttgccccctgggtgggcatagggggaccttgctgggcccgaggaattttttgggaccttgggttccccgggaaggaaagtccccagattttcatatgtaggccaggggttccctggcctcctttggggaacccggccttggaatttcccggttcctgagatttggggcttccaacccccatttttcagaagaaagcccggagtgaagcttccttcccgaagggtgggggatgcccatcacccagcttactggcaggagccccccagcttcaaccatgtaccccccagcatagtcagtgttgctgaatctgtcaggacttgcatcttcctgacttcggaacaggggactgtgatggcctgtgttcccacgccaggctccatgaaaatcgtaggtcatgatgctaatgaaatccaggtgttgggatatcttggcaatgtcatagctgctgtcaatggtgaccttccccgcagacagtgctgcgctgagcaggagctgctttttccctggctgggcttcctttataaattcggccttcatttccttgattagggtggtaaaatgctgtttgtctctccgtccagggtagagccaggcaaggtccagcccatcaaagccatgggtgcgcagaaatggcggtactgacttgatgaaagtccggcgactctgggtgttggaggctatcttggaaaatctttgagacccaaagttccatcctccgacagacaagagagtcttcaggttggggttcctgttcttgagtgtgttgagcatgccgtagagcgtcacatcattccactcccaggtgtcgatgtgatcgttgcttatattggcaaagctgtagatgatgtgggtacagaggaagcggtcaagggcatctgggaagcagctcccatcgccttcccggtactgggaccagctggtgtagtagcagaccagtttgtatgcagagcagcactggagcagcaccaggaccacaaagcctgtttgagacgccttcacacccattctggctgcagcagagcagggcagggtgtgcctcttcccttgcccacggctcctggtgccagctacatcccgggaattccggacc

SEQ ID NO: 134469 - DNA, 784 bp, Homo Sapiens
tcccaacttttttattctctagttcctagtctagcgttttcaagcacctcttcaaatcctgataaccttttgctgggagggggagttaatgagtctataatgattctgagacagagaacccctaagataaagtggaggaaaaacgtcctttatacatgattagatatgctcagggggtacagattaagaagtaaatgcaatggagcaaaagtggtatagtaacaggaaatatttaattttccaatctccactttccatttttataaactgaaagaaaaaaatttaatatattacaaaatatctgtacatagacaagatacacccaatgggggtcaaaaacgagagagaaaggaatcagtgtcaggaacctaaatcagggagaatgaggtggcaactgacacttttctgatgcagcattctctctcaaaacctgctggtaaccattttagcacggtaactaatatatgcatattatatatacacacacacatacaagtggttgggtgatgtctatggcataagctaatagaagttctacttgcaaatttgtgctaactgccctgctttaaacgtatagatttgatgttgctttcaaatacttatcgttcctatggacagttgaagaaaaaaactaaggaaactgggtcaagtatatttgttttcaaaaccacaaaaatgatcacggtcaaaccagttttgcctcccactcatgaacagaatcagatttctcatctgttcaaaataatgtatttaatagacaatatctctcattgtacaataatta

SEQ ID NO: 134470 - DNA, 1017 bp, Homo Sapiens
  misc_feature (685)..(685): n is a, c, g, or t
  misc_feature (697)..(697): n is a, c, g, or t
  misc_feature (700)..(700): n is a, c, g, or t
  misc_feature (705)..(831): n is a, c, g, or t
  misc_feature (844)..(844): n is a, c, g, or t
  misc_feature (863)..(863): n is a, c, g, or t
ccttttggttttcaactattttctaattttcaacaagagtgagcttgtacataccacactaacccaaagaggggaggcagaaaaagacatcagcaacggtctttggagtttggcctactggctgccaccctaaagtgggagataaaactctggaatctatcttgtatctgttggccaaattgcttaattccttcctattctcttcttgtaaaatgaggcactaatatcttaccggccagctccaaggggatatagagccaactcactcattcattcaacaagcaacgaaagccagctatttgtgtggggacagtgtcaggtgcaaggatatgtggctgttcacgagccggccctagacggaaaacactctaaggataacaatagctgctcttgattcttatttctggggtagcagtgggtcagtcaaggcaaagccgggctgtcatggtgtcctctttcagggagatgtcatgggcacaggcatggggatcagtcttgcccctgggggcaggcacaggaagtccaatgcataaaacctttggctgaggcttacttaaggttcctttcctttttttctttcctcccttgtacatagtttacactctccacactaggtcattcaagcctggagtcacaaagaaaaaagaacctacagccgcgggcgctcccctcgtgcccgattccntggctcgagggncanatttnnnnnnnnnnnnnnnnnnnnnnnnnnnnnnnnnnnnnnnnnnnnnnnnnnnnnnnnnnnnnnnnnnnnnnnnnnnnnnnnnnnnnnnnnnnnnnnnnnnnnnnnnnnnnnnnnnnnnnnnnnnnnnngctactcacatantttgcgtgcgctcatgccngctttcaatcgggaaactgtcgtgcagctgcattatgatcggcaacgccgggagagcggtttgctatgggcgtcttcgctcctcctcatgattcctggccggtcgtcggtgcgggacggtacactcatcaaagcgtataggtatcaaaacaggc

SEQ ID NO: 134471 - DNA, 1430 bp, Homo Sapiens
  misc_feature (1268)..(1302): n is a, c, g, or t
  misc_feature (1305)..(1345): n is a, c, g, or t
ttttactgtcaagcgaaatagttttaattagtaggctgatcataaataaatctacataaaagatttaacagaattacaaagagttttgtgttcctttgtggactcaattcataatatgcattagtcaacctcattctctaactgtgacaaaaagagttgtcatccaacaatgcagcacagtttaagcaattcatatgctatagttacatttttacattttctttacaaatgtaacatttatgtacattatatatagatttttttctatagttcatgtactgaaactctattgtttttacagagaaaatgttgaattcatttaatgaataagaaacattccttgttaaaaagtaattcatataaacaaataacacggtaccaatgccttttggcatctcttgccagagttcaagtccagaaatgttatattaattataagaaaaaagaatttatctaattttacattatgacatatcattccacatagctacataaatttgccagcttgcaatgaacagagcactgtactgccatactactggaaatgtgtagaaaccaattcaaaatatacttggtgaaacagcatcatcgttaccattaatttgagttgaaaaagatctgtcaagttctttcttcccctttactttttaccaaagcctcagacagagtgctgtgcgttgcatcttgtattaacaatgccttcatttcaaatttctcacgcgcttctctgacagattatgctttacctaggttatagatctttttcttattcaattttattctacttcacttacaaatctgctgctgaacatgaagcaaaaattcatagtaagaaaatgcagcctctgtccggtcttcaatcaaatgctgaaaaaattctgctttggcaggactctcatcttttactatgtgaaggattggacttaatggtctgctgtctctaagccaagttatgaaggatctggctctttctgatgaaagtgtatctagctctggaagatgtgtcattttctgtggtattgatgcaaaattagtatatccaagcacatcctctatgaagttattgtcacagcctttcccaacccaaatgtaaaaaacagagccacagtccataaggaaagcaccttctcttgtcagcttctctgcagacaatttttgaagaggtggctgtggtacaatcctgtcattaacatgtactgcaccctcatctgtcaatccccggccgtaatggccgaattcccgggcatatgtccggtaccgtcgactgnnnnnnnnnnnnnnnnnnnnnnnnnnnnnnnnnnncgnnnnnnnnnnnnnnnnnnnnnnnnnnnnnnnnnnnnnnnnntgcttcacgacccttaaaggccgggccccccactttaaatttaaagggttggaaagtttccggtatagtttcccaaagggttttt

SEQ ID NO: 134472 - DNA, 2076 bp, Homo Sapiens
  misc_feature (370)..(370): n is a, c, g, or t
  misc_feature (400)..(400): n is a, c, g, or t
  misc_feature (491)..(499): n is a, c, g, or t
  misc_feature (906)..(906): n is a, c, g, or t
  misc_feature (911)..(1021): n is a, c, g, or t
  misc_feature (1948)..(1948): n is a, c, g, or t
  misc_feature (1956)..(1956): n is a, c, g, or t
  misc_feature (1960)..(1961): n is a, c, g, or t
  misc_feature (2006)..(2006): n is a, c, g, or t
cgcggttggaattagactgcatcgtctatatatgtatgatacatactggagacggttggtgtcctctggcactcgacaacatgcagtacgtgctctcacagtgtgtcgcatctatcacacgacggcgagttgttgtatcagaccaagacattaagtgtgtctctgttctaggcagacaatacaaacttacacccgttaggtggtcatcacacccccacatcaggtggcgcgtggtatactagtagccgcgcagcgactaatgatgagaattgcttgttttgtatccagatgtgtgcgtagtggttgtttcctccccgtgccgcacctgtatatctctccgtgtgggcgggctacatattatgtattgttntggatgctgacgctcgacgtggtgtttganaggagtttgaacattcgcacctcgggtttgtgggtatacctagcccaaggggtcatgatagaaatctccacgctttgttaggggacactcnnnnnnnnncccattggtctatagaatgttctgggggggtcgcagggctaggcgggggccagcgctcgtttctcccaggctgggttgttagacctatagcggagggggggagacaatcacatggtcgacggggtgagtctaaaattggggatttcccacgccacttcatttttcgcggccgggggtggtgcccttcaatttttaatggcaaaccggctgttttttttggaggccgaattctttcccgttgatgggcattccgggcggggggttctggactaaataaagagcggtggcgaacaccccgaagtggtgtttgtactgcgagcaatcccaagcgcctgccgccggacgtgttttcctatgctatcgtgggggtgccggggttcggttttttttcttggttcgtgtggcgnttggnnnnnnnnnnnnnnnnnnnnnnnnnnnnnnnnnnnnnnnnnnnnnnnnnnnnnnnnnnnnnnnnnnnnnnnnnnnnnnnnnnnnnnnnnnnnnnnnnnnnnnnnnnnnnnngaaaacaaaataaatttattcgtcctcctccacataacattttccctgaaggagagtgtccctggcacctggcccagcttccacaatggaatggataggccccttccctccttttactccctaattggcccaaagcttttgaacagaccctcaaaccaagcagaggaagccatggtgtgccttccaccactggagggttacatttgaaattggtgtcccaattttaaaacgtcccagctgccataggagaggctcttgggagtggcctccagctcttgacaagggcccacagaggccactgccccatcacggggggcacactgggcccgtgaggaggaagggcctcgctgcctccaggatgtccagtttggggtccagtgagcggccaagcccctccaacaccatgatggcaaacacaatggaggcaaagttgctctcaagctttaccttgtgagtcatcagcaacttaaagacactagagagaaggctggacacatgaagcttctccagggtgatggtgttcttcctggcctgggtcaccagcatggccatctcggttttgaacccctccacgtccctgcactcgctggcccgggcatgatgcaggatcagctcagccactctctggccctgccccatcaccacagccatgaaaactgcccggaaattcctcaggtcaggggcctgcagctccgccacaatgccagcatccagcagcaccagtcgcagcgggcagagggaagatggcacgggcaccaccagagtgtcacagatgtccgcctgctgcagctgcgcctcctgactcgaggacaggccgttggcaccctgaaccaggatgtttccagggtgaaggtctgcatggacaagttatccacaaatatcatcttcaggagcatgttgatccccagccgtgcatcttcctttcangtcacggnaatnntctgctgctggtactggcacaggcaactctctcatagtttcacangactctctgtgacaaaggggcaaggggtgggactgacgcttcaatcgctcgtgcgattctggctcaggca

SEQ ID NO: 134473 - DNA, 1014 bp, Homo Sapiens
  misc_feature (912)..(912): n is a, c, g, or t
  misc_feature (918)..(918): n is a, c, g, or t
aaggtagcgaggcctgggtggcgaattcggcacgaggccgagtgacgccccacccgtggactcacactgagcgcttccttcggcaggcttttggggatgactgggggagcatcctctcttttgagaaccgggaacctgtgggctcaggctgcgtggcccaggtgtacaaagcatacgccaacactgccttcctggagactgacagcgtccagagacttggcagggcctcctgtctgccgcccttctcacatactggggcagtcggtgggctgagagagctctttggataccttggaaatggccggaaacctccagaaaatctcgcagaccagtcgtttctagaaaggctgctcctccctaaagctgacctggttggatcaaatgcaggggtgtctcgggctcaggtccctggccaccaacctgaggccaccaacctcatctccgtggcagtgaaagtgttgcaccctggcctgctcgctcaggtgcatatggacctgctgctgatgaagattggcagccgagtcctgggagttttgccaggcatcaagtggcttagcttgcctgagattgtggaggaatttgagaagctgatggtccaacagattgacctgcgttacgaagctcagaatctagaacacttccaggtcaacttccggaatgtgaaagccgtcaagttccccacccctctgcgcccctttgtcaccagagaagtcttggtggaaacgtatgaagagagtgtgcctgtgtccagttaccagcaggcaggaatttccgtggaccttgaaaaggaagattgcacgggctggggatcaacatgctcctgaagatgatatttgtggataacttttgtccatgcagaccttcaccctggaaacatccctggttcaggggtgcccacggccctgtcctccnagtcanggaggcgcaagctgcagcagggcggacatctgtgacaccctctgggttgggtggcccgtggccattctttcccctctggcccggctgccgaccggc

SEQ ID NO: 134474 - DNA, 1025 bp, Homo Sapiens
  misc_feature (196)..(209): n is a, c, g, or t
  misc_feature (777)..(777): n is a, c, g, or t
  misc_feature (787)..(787): n is a, c, g, or t
  misc_feature (812)..(812): n is a, c, g, or t
  misc_feature (823)..(825): n is a, c, g, or t
aaacaaaaagacttaatttattaggactgcagtggtgatgtgttgtcacttcaggacaccccactacctgaattgcagcagtgttgcgaatcatcactctgcagtgaatgggaatttttggtttagagtttaacagattttcctggtctttctcctagcgactgacacagaaatacgaaagaataaaatgattccnnnnnnnnnnnnnncacctacattaaccatttgggggtaaaaacgatgaaaatgtaaaggcaaatgatgaatttatcaaaaagaatgaaggaacagatagcatatgtatgtaggaacacagtagctttaaaatatcagaaagatgaaggacagaaatgccaagtgaagcagagggtttctacatttgtcttctgcttttgcatgtcccacattcccttatgtaatagatctttaatggattccctactgtcacagaacctttataagaccagcctatggagaatgcaaaggaactaaataatggacagttaacgttctggaaaagcaatttattatcttgctaggagctggcttctcattgcatttagaataaactttaaacagctatatcatcttccaggcctgatatgatctggcccctgcaaacttaccttcacatcttccactcccatcctcattcttcaggctctagctacactggctttctttcatccttggactttctacactggttctttctgccaggctttgcactaccatgctctctctctggaatgcttttcctttgactacatttttccnatgtattcanggtcttagttcatttttatctcccntaagagattcnnncatctatctaagcagtctatgcccttcctatcctatgtccgcatcacttactagtagattcctcactcgtgcgattctggctcgaggcaatccctaagggtcgataatcgtacatgtcaacgtccgtgtgatgtatcgtcaatccaaacatagacggacaaatgtagctggtgcatgatgacatcactatgctgccacgc

SEQ ID NO: 134475 - DNA, 1046 bp, Homo Sapiens
  misc_feature (744)..(744): n is a, c, g, or t
  misc_feature (775)..(775): n is a, c, g, or t
  misc_feature (792)..(792): n is a, c, g, or t
  misc_feature (808)..(808): n is a, c, g, or t
  misc_feature (855)..(855): n is a, c, g, or t
  misc_feature (858)..(858): n is a, c, g, or t
  misc_feature (940)..(940): n is a, c, g, or t
  misc_feature (958)..(958): n is a, c, g, or t
aatgcaataaatgcccatgtttattacaagatagaaacattaaagatttcttaggcaaaagggcaacaggtatgaaagtattcacagggcgccaaatttacaacagcttgctccaggcgatttacgtgaatcctggcctgtcccagcatgaggccattgacaacctggcgcctctgccaagcctgtgtccaggtgcctggcatgaccaggcgtgatgcccaccaccacagtccctgctgcatctcagaggccggggacctcccacacaaggatctcgttgcgggcggccgtgaagagcagcctggcggaaggtgtaaacctgcacaggtgcactgcgttgtcgtggccggcaaagtcttgggcagtccccatggcacagtctaccagcctcagcatgcactcagcaaagccaacagccaggaggtgggtcccgggggacaggctcagggacatggcaaaaaagggcagtggtatcttctccaccacctgcttctggcagaggttgtagatgatcacctccttgtaaacaccggggcccacgtacatcaggagcgccccatcccaagggcagaaggcagcgagggagggtggcaggtggccctgagtctccgtggtggcaggcattgggaaactcaaccagtccacaagctcacagtggttccgcagccagtcggaggcccagacgctgacccgctggtccccactggcagccagcataggtctgtgccctccacccctaagtcntcacactctttgcacgtgacacagatggtanagattggggcgccctgntggcactcagacacgngatgttgtcctgtgcgggggtggtcacagcacgagccatcctgtctncanagagacatctgacatcggtggagaagcacagtggcagcgcacggggtggggtgatctgagctcatggcgtcgggaacctganatccaggagctcacgtancagcgctaccgtgtgtcaggtggcaacacgggggtccatgcagcaagagctggtcacactggatggtacactcagcggcaagcaacgc

SEQ ID NO: 134476 - DNA, 1254 bp, Homo Sapiens
  misc_feature (74)..(108): n is a, c, g, or t
  misc_feature (491)..(528): n is a, c, g, or t
  misc_feature (1097)..(1118): n is a, c, g, or t
  misc_feature (1149)..(1157): n is a, c, g, or t
  misc_feature (1174)..(1203): n is a, c, g, or t
tgtatcgatcctataggggtagctcgccgcagcgaacgacgagcgcaggagtcagtgagcgaggaagcggccgnnnnnnnnnnnnnnnnnnnnnnnnnnnnnnnnnnncagtcgacggtaccggacatatgcccgggaattcggccattacggccgggggggaaaaagtgtcaactcttgttattgaaaacatgtttatttttctgtctttattttaaccttgatagaaccatgcaatatgggggcctttgggaacggactggtatgtaaaagaaaatccattatcgagcagcattttatttacccctcccctatccctaggcacttaaccaagacaaaaagccacaatgaacatccctttttcaatgaattttataatctgcagctctattccgagcccttagcacccattccgaccatagtataatcatatcaaagggtgagaatcatttagcatgtgttgaaaggttttttttcagtgttctttttannnnnnnnnnnnnnnnnnnnnnnnnnnnnnnnnnnnnntgtcacaccattgctcacagaattggcatctcatttttgggacctcccatctttctgttttgaaaagtgtacagtagtgcagtgttcctgatgtaactttatggcttacaatgttgacatgtctcaggttcatgtgtttcgattggtgttttccgtctcaggtagattgcaaagtgtaggccccacacattggaaaaaataataataaaacaaagcaaaaacaggaaattatggattttagttgtatattggtttatgtattttttcttaagtatacagtgcactgtttgaaatgtattgttgagtattactttgtacaggttgatcactttttttagagtgaagaaagaacaaacttgttttttgtgttttttaaaggaatataaaataatgaaggatgtataattgatgccaaataagcttgttctttagtcacaccgacgtcttatttttccctttaggccagttctgtttttaaggtgtacatggacaatgttacagtgtaagaaactccatatccatatgttcccattcgcattttgtattggttcatgtataccatttttacnnnnnnnnnnnnnnnnnnnnnngaagtactataaaatatctgtcttcttaatnnnnnnnnnttaatgttacaaagtgnnnnnnnnnnnnnnnnnnnnnnnnnnnnnngcctacagccgcggccgcaagcttattccctttagtgaggttaattcggca

SEQ ID NO: 134477 - DNA, 1078 bp, Homo Sapiens
  misc_feature (619)..(641): n is a, c, g, or t
tttactaattttcttagttaggaaggcagtagtgtgtggtttgcatgtactgtatattacagatatttgtcatgctgggatttccaactcgaatctgtgtgaaactttcattccttcagatttggcttgacaaaggcaggaggtacaaaagaagggctggtattgttctcacactggtctgctgtcgctctcagttctcgataggtcagagcagaggtggaaaaacagcatgtacggattttcagttacttaatcaaaactcaaatgtgagtgtttttatctttttacctttcatacactagccttggcctctttcctcagccttaagaaccatctgccaaaaattactgatcctcgcatgatggcagccatagtgcatagctactaaaatcagtgaccttgaacatatcttagatggggagcctcgggaaaaggtagaggagtcacgttaccatttacatgttttaaagaaagaagtgtggggattttcactgaaacgtctaggaaatctagaagtagtcctgaaggacagaaactaaactcttaccatatgtttggtaagactccagactccagctaacagtccctatggaaagatggcatcaaaaaagatagatcnnnnnnnnnnnnnnnnnnnnnnntctattacattttcagtgagtaattttggattttgcaaggtgcatttttactattgttacattatgtggaaaacttatgctgatttatttaagggggaaaaagtgtcaactctttgttatttgaaaacatgtttatttttcttgtctttattttaacctttgatagaaccattgcaatatgggggccttttgggaacggactggtatgtaaaagaaaatccattatcgagcagcattttatttacccctcccctatccctaggcacttaaccaagacaaaaagccacaatgaacatccctttttcaatgaattttataatctgcagctctattccgagcccttagcacccattccgaccatagtataatcatatcaaagggtgagaatcatttagcatgttgttgaaaggttttttttcagttgttctttttagaaa

SEQ ID NO: 134478 - DNA, 1203 bp, Homo Sapiens
  misc_feature (409)..(423): n is a, c, g, or t
  misc_feature (916)..(916): n is a, c, g, or t
  misc_feature (924)..(924): n is a, c, g, or t
  misc_feature (960)..(960): n is a, c, g, or t
  misc_feature (1009)..(1009): n is a, c, g, or t
  misc_feature (1023)..(1023): n is a, c, g, or t
ctttttatgtaaaatttcacattgtttaaaacaccatgcctggccaggggggatttttctcttctcctctttaaaaggaaagggactatgaagttgaacaaggtctttagataagggattgacctagagccattatgtttctccctcacctactattatttaaagaaaattacacactttaggcattctgtggaatgtacttatttttgtaaattgaaacaagctctgtacagaactatgaaattcacaacacaaaagagcatctttaatttagctggccatttgataaggcaactgcacaaggcttcttggaatcaaagcgtaaagtaccagtaaagctaacagcctatactaaatgatttacaaaaacaagcgccaagataacattttctagctattacattttacnnnnnnnnnnnnnnnttagcttatctagaccaccatgtagagaatgttaaagccaacacagacacttggaatgctgggttatgttcctttttgttaagaaaataaattttgtaatgaaagatgtcagaacaacaatgaaagatttatgtaagaaaagtattatctgatgagtataacataacaatcacatcagttttatgggctgtagagaatataaacacagataaaggggatttcactttttagaacataaaagatcattttagaggaaaagatccactgtgagcaacttggtgcatcctcctgggatgtagatggctcttatttgattcttctaagggtgtgttacttttaattgcaaaatatggcacagatgagaatcattctggcactacagagtttaagattctttgcaaataatatgttcaacaatgaggccaatgattaatatcaacacatgttattatacatatctaatagtagtttgggttggtttgaaggatcaganggctccanaatagtttataaaataaaaatagtttgctcttatcnaatattttccctgcaggactatttttataggcatgttaatataattganaaatattccactantttttaacatagcttactttccatgaatagtattctgtaactcgtgcgattctggctcgaggcaatccctaatgatcgataatcgtatcagcaactgtcctgtgtgatgtacgccaatcaacacaagacggacaaatgtagcggggctagagacatcatatgctggtcagcgtcatcgaa

SEQ ID NO: 134479 - DNA, 886 bp, Homo Sapiens
tttatgtgttatgcaagtatcccacttcattcaaataaattattctttccttgaagaaaagcatggccattagctctctgaaaaggaaagggtaagtttgggactgaactagtaataacaacaacaaataaaaccttcaaaagttgtggggaaacaaattattttcaaaaacaatttacatagttataccatcctcatatcatctacactgaggtaaacagatagacaagtacaaaatctgaataacatttgctgtatttaaagacaaagatgcccttattggctcttcaaagggcaggtgaggatttacattgatccaattcttatggtcttatctactcatcctttggagccagtaataatctgtatataggatctggttaagccaactgtctccattcctccatccatccatccacccacccaatagttctttgtgtgaggcactgtgctggatcatgaagccatcaagatgagtaaaattagattctcacccattaataagtttacagaacagtaggagaaacagtcaagcaactacagtgatgtcatataatacaggcataaacaaagtactatggtagccccttactgcctggaggaatgaatgaaaggagtcagaaagaaggtgatgtttgagctgaaacttgaagctaaatgggaaacattcccagggaaatgaatcttcagctcctaatctaaaggatagcaaattttgttcctattttaatgagaggaaattaaaattcagagagaatgcttacacctagtagggcctcacagtgacaaggcaaaaccatagtacgactcagaaatctggactgcctattgctagattcacagactaagaacctaagaacacggtccctgtgcattgctagtactc

SEQ ID NO: 134480 - DNA, 1036 bp, Homo Sapiens
  misc_feature (446)..(555): n is a, c, g, or t
  misc_feature (571)..(779): n is a, c, g, or t
acaaaaaaaagactagatgcttttactggcggtggagagggggccaggcgtgacccctagcggcatgtcggagaggctgggcgcgggcatttacggaaggtcggtaggaagtggcaccaccgggtggagtacctctgcttgctgcgtcggcagcagcgtgtccggggtcagactcctgggcacgcagaacggcggcagggcgatgacgcgtggccgcgaggtgagtaccacctccccgcggctcgcctccaccaggatgttctggatcatgttctccagcatcgcctcctgcaggttggcgaaggccgggagccttctgatggtctccttctcgtcctgttcttgctcctccttcaccatgacattcagctgctgttgccactgccattgcatggactcctgggactcaggctgtggtgtgggcccgatgcccgcccagctcactnnnnnnnnnnnnnnnnnnnnnnnnnnnnnnnnnnnnnnnnnnnnnnnnnnnnnnnnnnnnnnnnnnnnnnnnnnnnnnnnnnnnnnnnnnnnnnnnnnnnnnnnnnnnnntcgtgccgaattcttnnnnnnnnnnnnnnnnnnnnnnnnnnnnnnnnnnnnnnnnnnnnnnnnnnnnnnnnnnnnnnnnnnnnnnnnnnnnnnnnnnnnnnnnnnnnnnnnnnnnnnnnnnnnnnnnnnnnnnnnnnnnnnnnnnnnnnnnnnnnnnnnnnnnnnnnnnnnnnnnnnnnnnnnnnnnnnnnnnnnnnnnnnnnnnnnnnnnnnnnnnnnnnnnnagctgcattatgatccggcacgcgcgggagaggcggtttgcgtatgggcgccttcgcttctcgctcactgatcgctgcgctcgtcgtcggctgcgggaggggatcactcactcaagcggtataccgtatcacagatcagggatacgcagtatgactgtagcacaggcagcacacgcatgaccgtaaacggcgcgtgctgcgttttcatagctcgccccggacagatacaaatcagccattcaagggggaccgaaggg

SEQ ID NO: 134481 - DNA, 1089 bp, Homo Sapiens
  misc_feature (85)..(85): n is a, c, g, or t
  misc_feature (113)..(113): n is a, c, g, or t
  misc_feature (119)..(120): n is a, c, g, or t
  misc_feature (133)..(133): n is a, c, g, or t
  misc_feature (154)..(154): n is a, c, g, or t
  misc_feature (237)..(237): n is a, c, g, or t
  misc_feature (290)..(290): n is a, c, g, or t
  misc_feature (296)..(296): n is a, c, g, or t
  misc_feature (306)..(306): n is a, c, g, or t
aagatcctttaggattgcctggagccagaatcgcacgaggccccgccagcccagcccgtggagaccgccagcacacgacggcgcncaggagccgagtcccctggacgggcctntgatcnngagcccccgcagnttcgcccaagggtgcttcgcntgcgtgccagccccctgccctgcaggctccgacgcccctgcccctgagccccgccgtttccccgatggcgcccacactgttcnccatggagtccaagagcagcaagaccgacagcgtgcgggctgccggcgcgccncctgcntgcaagcacntagccgagaagaagacgatgaccaaccccacgaccgtcatcgagtctacccggacaccaccgaggtgaacgactattacctgtgtccatcttcaacttcgtctacctcaacttctgctgcctgggcttcatcgccttggcctactccctcaaagtgcgagacaagaagttctcaatgacctgaatggagccgtggaggatgcaaagacggcccggctgttcaacatcaccagttctgccctggcagcctcctgcatcatcctcgtcttcatcttcctgcggtaccccctcaccgactactaaggcccgccaggcacggctgctggcggagacaagcactgagacatgtttattctcatggtccctgaaacgcaggatcccatgaggttggggcagggcagggcttcttgtcctggggcccccttgagctgtgaactgggcagcaaggccatcagaagctgagtacagcaagggggcagtgagcttggccctcagtccaccccctccgcctcctggcctccaccctgcctgtgtctggggcctgggggcttctcccctcgctgctgcaccctggcttccagcgtctgtgtccctgccctcacgtgccccttcccaggctcctggggccccttggacctgacacctagcaggaagggcttatgcaaaattgtcccaggttgggaggactcactctgtgctccccgaccctgcctcctccacgatgtgaccccgctcagagcccttgtgtctgtgaactttcaatgaaatacccatgcagctcaaa

SEQ ID NO: 134482 - DNA, 615 bp, Homo Sapiens
  misc_feature (12)..(12): n is a, c, g, or t
cctctctatccnacaatcatcctctatctttatcttaattggtatcttttgaatctatgctttcttcttgtattcatcatgagctcgatcagatgtctctcgatcttcagactggtggtgtcctataatgtcctgtgcacgcattcttgagctttccaggatttctgtctgttctctctgtttatctacagaagaaactttctccttgagttcctgttcttcgtagcgccttgaactctctttcctttctggtttacgatcctcctctttccatctaccctgtctgtcttctgtgaggtgcgagggactaagagaacgagattcttgaggtcgtacaacttggctcaagagtctgtgtttttcatttttatcatctccactgttgtaggcatcactgtccggagaatgttcacgccggcgcttcggggactgtctagggctgggactcccttcatttctatagcgcttctttgattttctttcatcatgtccatctcttggattcctatcttctcggatctcttctcgcttttctctgcggtcatctcgtcctttgtctttgtcttcccaatccctttggcgttctcgttctttatccccttctgtcgtcttctc

SEQ ID NO: 134483 - DNA, 942 bp, Homo Sapiens
cagattatctttttattcttcataggtcatagagtcaaagtctgttatggaagcaaggtacattccaaatgcattttgactgactataaaataaaccagttctttgaaaacaacacttaggaaactttcaaattcataggatgtttcaaattcataggatgttaaagtcccttcttccctttaaagtggaaactatgcctgctttttcctttgtatattctcccaaagctcaggctccaggtcataatcaatactcttttggtacctatttagaattggggtaactctagacatacactcccctcctctcaatgcctctatattagaataaataacatgatggtattagtactgtaacatcctaaaccacaatcagcatttagctttcttttgaaaattagaattaaaagtatttcaataatgacattaaaatgacaaggaggaatatttagctttttatttggaaggtattcactctgttacccttaagactaagacccataaactctatcaattacctattcgtggaagaatgacactgtaaactgtggcaatgtcaaaatgtgtactgcactttataaaagcatggataatattaaaggatcacaaaaggcagcattagcattctctatccaggtattattaaatctttttatcccatgcccccctcaaatataggagaattattatctgataagcctgaaacgactttttttaataccataacctaaaaagacacttcttacaggtgtatgcaactttggtcagcagaaacacaatacgagcctctggcgtagctaaggcactctattctgaaagtacggaaaacatgcacgtatgctccttatcatggcattgctccccaaaaggcagctcactgtatgctggggagaaaggctggggcatgaagtcacccacaatatcatgcataagcctgaaaga

SEQ ID NO: 134484 - DNA, 1078 bp, Homo Sapiens
  misc_feature (551)..(1004): n is a, c, g, or t
  misc_feature (1027)..(1027): n is a, c, g, or t
  misc_feature (1051)..(1051): n is a, c, g, or t
gactggggaagtccttctgcattaattacaataagtaatactcattgaaaactttccttatttacacacagttgaacagttattctaagaaaccattttcccaccctatttaatattgacagatttcttcagttagaaacaaaaactcaaaacacacgcaatcctaaagaactcatctatgtcccccttatctcccctcatcttatgtagtccctaaaacagggcttgctgccctttcttcttcttgccttttcagcagatgagtcaaggttgcagaggtggcagtcaaccatagagtcacagagtttgatttttttccatccatcaggtcgtagaagctgccactgagcctgacaagagttggtactcaaaaatgcagaatgaattagtttgaatgaggtgattaaggattaatgagtagtggttaaggaaacaaagaccattagtggatggggtaatattgctgtattactgatggaagcaggattctctaaaaaaactttctgcagccatttacttacatacattttaaacctcgttccgaattcttnnnnnnnnnnnnnnnnnnnnnnnnnnnnnnnnnnnnnnnnnnnnnnnnnnnnnnnnnnnnnnnnnnnnnnnnnnnnnnnnnnnnnnnnnnnnnnnnnnnnnnnnnnnnnnnnnnnnnnnnnnnnnnnnnnnnnnnnnnnnnnnnnnnnnnnnnnnnnnnnnnnnnnnnnnnnnnnnnnnnnnnnnnnnnnnnnnnnnnnnnnnnnnnnnnnnnnnnnnnnnnnnnnnnnnnnnnnnnnnnnnnnnnnnnnnnnnnnnnnnnnnnnnnnnnnnnnnnnnnnnnnnnnnnnnnnnnnnnnnnnnnnnnnnnnnnnnnnnnnnnnnnnnnnnnnnnnnnnnnnnnnnnnnnnnnnnnnnnnnnnnnnnnnnnnnnnnnnnnnnnnnnnnnnnnnnnnnnnnnnnnnnnnnnnnnnnnnnnnnnnnnnnnnnnnnnnnnnnnnnnnnnnnnnnnnnnnaaaaggctcgcccccttgacgancatccaaaatcgacgtcaagtcanaggtggggaaccgacagactataagaa

SEQ ID NO: 134485 - DNA, 1124 bp, Homo Sapiens
  misc_feature (42)..(60): n is a, c, g, or t
  misc_feature (204)..(204): n is a, c, g, or t
  misc_feature (218)..(218): n is a, c, g, or t
  misc_feature (714)..(714): n is a, c, g, or t
  misc_feature (805)..(805): n is a, c, g, or t
  misc_feature (808)..(808): n is a, c, g, or t
  misc_feature (827)..(827): n is a, c, g, or t
  misc_feature (873)..(873): n is a, c, g, or t
  misc_feature (966)..(966): n is a, c, g, or t
  misc_feature (970)..(970): n is a, c, g, or t
  misc_feature (994)..(994): n is a, c, g, or t
  misc_feature (1009)..(1009): n is a, c, g, or t
  misc_feature (1048)..(1048): n is a, c, g, or t
  misc_feature (1053)..(1053): n is a, c, g, or t
  misc_feature (1058)..(1058): n is a, c, g, or t
ccctcactacaagggaataatgcttgcggccgcctctcaggnnnnnnnnnnnnnnnnnnnacctgaggaagatctctttattccttccccttcccactccccatcaaccaggtccccctgcagcacccttccttgtgaaatcacagctgctatgacagtgaccagctccaaaccaccctggtgtcactgaaccttggggtgctngggtgacacatggngcaggaaaggcaggaagagcagggatctgagggcctgggggctgggcaagcctcaggggtggggtgggtgctgatcaatgccaggtgatcaatgccaggtgattggacccactgagtaccaggacaaacctggagtcacgcaactggcctacatcagttgccttggcaacacactgcccttgaccctacccggaaaagatttatttcagccggtagccctggtaacttgagtggctccccagggacaggaagtggcagaacctcaactctgcctctcctgacctgaggggttcacttttcatccctgtcagggacggggcactgcgttctcagcccctatggaagaatgttatgggtttgggggaatccacggggaggagactaggctgttccagcgtgcccctccttcctcagcctgaggccttgctcctctgtggaaggcaacacagggacagagccacacattcagcccctaccctcagccctgctcccatcncctggcccacaggtctgacccgcaagctccgatgtggagacacttggtggctgactcctgcttcctcacacatggggatggccacaggtgnacngactggctgaatgctgggngcatgctagaggactgctgtctgcagagcatggtccctgcattggncagaggttggtgtgagccaggtgagtcatctagcccgtggtgtgtgtggtggttttgatctgcagtacaagcatgttttctcatttctctcangcangctttctcatctttgtatctccangagaggcgtcactgnagggctgagctgactgctgagtgtccccgcaggaagcantccanttcanctgtgccaggacctgggccgagtgactggggtattctatgtcacagtcaacaccacagtgagcttg

SEQ ID NO: 134486 - DNA, 564 bp, Homo Sapiens
tttcatttttaaaaaaatttttattgtggcaaagtatatataatataaaatttacaagtttattcttaagtgtacaattcagtggcattaagtacattcaccgtgttttacaaccatcaccactgtccagttccacaattttttcatcatccccaacagaaactttgtatccattagcaataactgcccattctcttctcccccacccctcattagcctttattctatcctctgtctatgaatttgcctattcagtggaattgtatattagtctttggaagtttagctgcctggcctctttcacttagtacaatgttttcaaggttcatctatgctgtagtatgtatcagaacttaattccttttatggctgaatgatattctattttatggatataccacattttgtttatccattcatctatcgatggactcttgagttgcttctgctttttgtctattatgaatagtgttgctatgaagattcatgtccaagtatctgtttgagtccctgctttgagttctttgggtatatgcctagaagtggaattgctgggtaactatg

SEQ ID NO: 134487 - DNA, 1297 bp, Homo Sapiens
  misc_feature (1141)..(1141): n is a, c, g, or t
  misc_feature (1150)..(1150): n is a, c, g, or t
  misc_feature (1201)..(1201): n is a, c, g, or t
  misc_feature (1264)..(1264): n is a, c, g, or t
tgaatggtcttctccaggttcaaaatggataattgatgactctgcattttcatctcctgggctgtctgatgtggatagcagctgttcaagtagatgagggtaactggcttgaacttgacggatgaactcctgtcctttaattcttatcaagtactcacaccttggaaaccacttggcatgttgaacccatggatcatctccagattcccaacacctgagtccaccatcacagcaaaagcatttgacatcatcactgttacccacataataaaaacccgcacttgcaagctgctcaggattaactagaacactagagggccagttaaagaatgttttaaagcgggctgcatgtgtctgcatgctcagattagaaactgtgtatcttgaagtgtcttgaagctgattttctataaatgggcatttgggaaaatgtctcaggtgttctgacatagcattatccttcggttcccaattgctcaattttccaccacaggcaaagcaagccactctgtctccaggtcctatgtagtaaaagcctgcttttgccagatctgttggcgacagaaaagtcaatggccatgtctgaaaagtaagtaatctggcattttcgttattcattgcacagtggtaggaacttctcatcaaggcagaaaaatcttgatttgctctggagtttacaggatttgatggagagtttgaataagagccacggaaatatccactgttttctgtacccgggaagtaatgagtgtgtggaatttgttactgaagaaggaaaagtaggcttgagaggtagcttccaagttgttaacggaatttagactctgacggaatctgcagctaggatacaactttttatgcttttcagtaggactgtctcctcttttccagttatccagcatcaggccacaacagaagcatttgaccttgtcattcacaccagtgtaatagaaaccagcacgagcaagactcctttctgagacaggaaccccagcaggaaaagtggaatacgtagacattcggtacagttcacatgacaagtcgtatttcagttcaaacgtgttggcgcttttcatcaaatttgatacgaatatgctgttttctactatgttcatatgaatgatggggaagaaaggactanccttcttanggaggtagtttgtgcatgcttgctttatcagtttatactggctgaaagcanatgaaaattttatattttatttcagcattaagttcacatgagatctaatccaacgatcattanggagatacatgaccttgaatcctacatcagtac

SEQ ID NO: 134488 - DNA, 617 bp, Homo Sapiens
  misc_feature (59)..(72): n is a, c, g, or t
gcacgaggtgcaatctgagctgactgcagcctgggcaacagagcgagaccctgtctccnnnnnnnnnnnnnngcaatgtttatattataaaagagtgtcctaacagtccccgggctagagaggactaaggaaaacagagagagtgttacgcaggagcaagcctttcatttccttggtgggggaggggggcggttgccctggagagggccggggtcggggaggttggggggtgtcagccaaaacgtggaggtgtccctctgcacgcagccctcgcccggcgtggcgctgacactgtattcttatgttgtttgaaaatgctatttatattgtaaagaagcgggcgggtgcccctgctgcccttgtcccttgggggtcacacccatcccctggtgggctcctgggcggcctgcgcagatgggccacagaagggcaggccggagctgcacactctccccacgaaggtatctctgtgtcttactctgtgcaaagacgcggcaaaacccagtgccctggtttttccccacccgagatgaaggatacgctgtattttttgcctaatgtccctgcctctaggttcataatgaattaaaggttcatgaacgctgcgaaaccccaaa

SEQ ID NO: 134489 - DNA, 226 bp, Homo Sapiens
tggggttttgcagcgttcatgaacctttaattcattatgaacctagaggcagggacattaggcaaaaaatacagcgtatccttcatctcgggtggggaaaaaccagggcactgggttttgccgcgtctttgcacagagtaagacacagagataccttcgtggggagagtgtgcagctccggcctgcccttctgtcgtcttctcgcagccgtatagtagtagtaggc

SEQ ID NO: 134490 - DNA, 898 bp, Homo Sapiens
aatattgcaagagatttattctcagccagatatgagtgcccagtggcttgtgacacagccccgagatcctgtgaacatgtgccgaagtggttgggctccagcttctttttatactttatatttattgagatgttttaactctgcaggccagagagagagacctatctgaaaccagcttgggcagctggagaagaatgagggtgagcagacatctgggcaagccggagtttgggaaaactgccatcttcgacctttctggagcagcaagatactggtgtgagtctgtcaggagcttcagcctagctgatgaatagacaggagagagcgatgggctctacagacccgctcagcagttctttccaacttggagtgctctggtcatttgcatctgaatcctgctgtgtcttctctccagtggagattttcaaaccaggctgccatcagcacccactcaccaccctaagtttgaatatggactttggagctgggcagcccttttgtgaccgtgaggcaacattgaagatgcaagccacatgctaagacagaagaaaataaagacagaactaagctggggcatgtatgacatttcaagctctcagatcagcccttgatggccaccatccatatttattgacatgaaaagaagtcctcattttgtcaaagccaatgatattcaggactgttattaataacaaaatacaattcttccctctacccactacagtgtatcatgaaactcttcaaacatataggaaagttgagtatggaatctctatctccagccttgaggtctcacctggactcttggttattcaatggactactctgcatctccatgtgcatctctaatatagactcctcaaccttaatgtatccacaactgaacctttggttctgt

SEQ ID NO: 134491 - DNA, 1091 bp, Homo Sapiens
  misc_feature (280)..(308): n is a, c, g, or t
  misc_feature (703)..(703): n is a, c, g, or t
  misc_feature (787)..(787): n is a, c, g, or t
  misc_feature (895)..(895): n is a, c, g, or t
  misc_feature (950)..(950): n is a, c, g, or t
ttttgaatttggaataatctccaaaatactatataagaaagcaagcttcagaacactgtgtatagaattctactatttgtattaaaaatagatatataaatatacatatttataaacttgtaaatgcatagaattgctatgaaaggatacacaacatatagataacagtgattaactctggagaggggactagaggctgacctccatggggaagcttaccatttattgtatacccttttgtattgtggaatgtcttaccatgtatatgtattaatttttnnnnnnnnnnnnnnnnnnnnnnnnnnnnngaaactgcctggtgctgaatatacagtggtgaacaggacagaggttccccagtcttggggaaggcaaagtgttgagcttactgggccacaattatcaaattttttaaaaccagactgtttacataagttaaggggaaagttctttctacaacaattagcttataataattcagcctatcattttacagagataaagcagttggaaaataaatactaagtaatttgtcaagtcttagactgtattaagttgtagtttctacaagggaagggatcttatctgtttaacttgatcagtagagcattcactgcagcataatgtgcagataaacgcttgttacagcaagcattttctgatgatgacaaatgatagcacaaccatttaaaaaaatcttganaaagaaaagaccagaagatgctggactctgagggaactgtgtgttccctgtgagggttaggcaccttttctagacagtcctcanaaaatgatggtgttcaaatggcaaggtacatcccaatgagaatgaaggttgtagagatacacgtttcgaatgtcacggtgtgatctcgaggcctccttggggtgacangcaagatggactccaagagaactggcactggcaggcacccactgcatgggaatangaagcaatgtctggggggtgcaacactgacagctggagctgtcaagcacctggtcctacgacacatggtgaaggctgatcacacacacacagtacctcgcaacgttactctcgagctcggtctcccgtaatggagaatgta

SEQ ID NO: 134492 - DNA, 995 bp, Homo Sapiens
  misc_feature (642)..(790): n is a, c, g, or t
  misc_feature (822)..(822): n is a, c, g, or t
  misc_feature (856)..(856): n is a, c, g, or t
  misc_feature (928)..(928): n is a, c, g, or t
ttgtaacaccttgaggatatcactattccaattgttcccatatgaatacaggtgtggtctctattggatataaatgtgtcttttattcgattttacgtccaggacttggtttgctgtcccaactgcacataaatgtcccttttttgagttattggttgtgtgtgttttcctttttgcataagaaatatgtccatttagtccagaggctcttgctttatccggatgacggagggtacacggggcgtccgcctcagttcccgccgaaggacgtattcactgaactgggacgagtctactcctcccccacaggagcccacgatttcaaatcctctttgctgcaacctctcgaggacctggactgagttgaggtgacagtagccatttagtggaaacctgatgacgtgcgtcgagtcgtgattccagcctgcattgacagagttacacatcacgtcgccgatctctggaaatacttcttctatcaaggatttgtcaccgcttagcgtgatcctttctccgaggtctggggccacacgcacgacgaggcactcacagggccttgaaaatcgaccagtttctctgtcctgcttccatctttccatctccaacaacatgggctgaagctgacctcgtgccgaattcttnnnnnnnnnnnnnnnnnnnnnnnnnnnnnnnnnnnnnnnnnnnnnnnnnnnnnnnnnnnnnnnnnnnnnnnnnnnnnnnnnnnnnnnnnnnnnnnnnnnnnnnnnnnnnnnnnnnnnnnnnnnnnnnnnnnnnnnnnnnnnnnnnnnnnctcacattattgcgttgcccactgccgctttncagtcggaactgtcgtgcagctgcataatgatcngcacgcgcgggacagcggtttgctattggcgtcttcgcttctcgtcatgatcgctcgctcgtcgtccgtgcnggacgtacagtcatcaaggcgtaacgtttcaaaatcaggatagcaggaaaatttgtcaaagcacaag

SEQ ID NO: 134493 - DNA, 1230 bp, Homo Sapiens
  misc_feature (65)..(96): n is a, c, g, or t
  misc_feature (149)..(167): n is a, c, g, or t
  misc_feature (669)..(690): n is a, c, g, or t
ttatttaaatctaccatcacttcgtagttaccacatcatgaaaaagaaactaaaactttgtactnnnnnnnnnnnnnnnnnnnnnnnnnnnnnnnntgagggtatgtttaatgtacaacttctatatacatcacagcccataggcagtnnnnnnnnnnnnnnnnnnntgatgaaaggaattgtgaagaactgtcacgtggaaggtcaaacgccgacagcaggcatgacgggagtggtgaggagcagtttccggatcgttgtcaggtatgtattctcaatcttaaaaaacattgtttttgctcccagcctaatggaaccatattcctgtggagaaaccagtatcatttcatagttttgactactgaccgacatacctccttgagcccctatacctgtatctgtagaaatttctattgcacagaactttgggtgatgggatgcagtttttttcattctctgaggagtaaaacgcataggaaatggataatttttcacctttttgactcagtgtggtgaaattttcgcatcttagcatcttttgccacaacttttttctttaaagtcaatttgcttcccccaaaaatgcaatacaacatgggaaagaacattaaaaagatctgtgaagaacaaaaagtgacctttgaatgcactagacagcaactttggttnnnnnnnnnnnnnnnnnnnnnnccccaaaggatgtacgttatacacacagacagcaaatattaatttcataactgttcaaattaattatttctttaattcccaattggtaaatagtgaatggggcagaggagcaaagattttcttttccttcttcctacgctggataaacaagaacagaaaacagccagttatatgtgaccctctaatcttcactcacacatgcttgccttctcacttatgtcataactgcccaatctgaaacagtacatcacagatgacagatgcaaccagagagttcaggacagctgatatcgagatatccagcaaccggccctcgtgcaaaaggaattccgagcggttttcgtccactctggccatggctagcaaagccttggccgccctgcacatcatgtctacgctaggtggttccaggggcgggggctgcatgtgcatgaggttgtgctggctctgctggtactgggccatcgtgaccccatcctctaggaagcttatcaagtttccaatgcttcctttctgcacagctatggcccttgctgctag

SEQ ID NO: 134494 - DNA, 900 bp, Homo Sapiens
  misc_feature (285)..(285): n is a, c, g, or t
  misc_feature (289)..(289): n is a, c, g, or t
  misc_feature (292)..(292): n is a, c, g, or t
  misc_feature (327)..(357): n is a, c, g, or t
  misc_feature (586)..(586): n is a, c, g, or t
  misc_feature (595)..(596): n is a, c, g, or t
  misc_feature (645)..(645): n is a, c, g, or t
  misc_feature (650)..(650): n is a, c, g, or t
  misc_feature (701)..(701): n is a, c, g, or t
  misc_feature (730)..(730): n is a, c, g, or t
  misc_feature (745)..(745): n is a, c, g, or t
  misc_feature (792)..(792): n is a, c, g, or t
gtagagacagggtctcactatgttactcacgctggcctcaagagatcctcccgcctcggttttccaaggtgttgggattacacgcatgagccactgcacctggcctaatttttagtttaaagctaggaccagaaatgccccaaggaggaacagacaatgaaccatgcatggaaccagaaggtgggctggctacctaagtaggctctgctttgttttctgctacttacaaagaaatatgacaccttcctctatttcatatgcttcaatctgcatcgaaggcaaagncttnctnctaaacaggaacatatttttaaatggaaacaaaannnnnnnnnnnnnnnnnnnnnnnnnnnnnnnccttaatcagctgagctactttcttctgggattgggctaatttctctttgggatgagacatacagtctatggccttctccttctctttagctttagtttcctcttcactctctccacacccaccagtgggatacaactcatctgtttgctggtgagctgggatctcggtttgctgtgacctgtaggtatgagagaggcaaggattcaggatttaccttctccatctcanacaaggtannattgaagggcatagctctcccaactaggggatagggacatgatttctancatanacctgaaaggataaagctaggcagtaaactcacgtcgccctcaaagtctancataaagacagcaatgtgggtagtcaagngaaagcgatttatanaggtacagctctgctgcttactaatcacatgacccctaacaagttantatttacttctctggtaaatgagaatatggatgcctactgatgagggtatgggattaatgagatatactcataatcagacatgtgtacatcactagtgtccttcatgg

SEQ ID NO: 134495 - DNA, 1237 bp, Homo Sapiens
gggggcagtggggccttcggcttcgtgtggactgctgtggacaaggaaaaaaacaaggaggtggtggtgaagtttattaagaaggagaaggtcttggaggattgttggattgaggatcccaaacttgggaaagttactttagagatcgcaattctatccagggtggagcacgccaatatcatcaaggtattggatatatttgaaaaccaagggttcttccagcttgtgatggagaagcacggctccggcctagacctcttcgctttcatcgaccgccaccccaggctggatgagcccctggcgagctacatcttccgacaactagtgtcagcagtgggatacctgcgcttgaaggacatcatccaccgtgacatcaaggatgagaacatcgtgatcgccgaggacttcacaatcaagctgatagactttggctcggccgcctacttggaaaggggaaaattattttatactttttgttggaccatcgagtactgtgcaccggaagttctcatggggattccctacagagggccggagctggagatgtggtctctgggagtcactctgtacacgctggtctttgaggagaaccccttctgtgagctggaggagaccgtggaggctgccatacacccgccatacctggtgtccaaagaactcatgagccttgtgtctgggctgctgcagccagtccctgagagacgcaccaccttggagaagctggtgacagacccgtgggtaacacagcctgtgaatcttgctgactatacatgggaagaggtgtttcgagtaaacaagccagaaagtggagttctgtccgctgcgagcctggagatggggaacaggagcctgagtgatgtggcccaggctcaggagctttgtgggggccccgttccaggcgaggctcctaatggccaaggctgtttgcatcccggggatccccgtctgctgaccagctaaacaccaatttcttcctgcttttctccacttggtttggaaaatcacacagttttcaggctccatctgtttggagaaaatacattctgaagcatccccaattcaccttctaaaaactcatgtgcaggtttgataaacaccagaacagaagacagtgatgctgtattattttagatttattacatagatttggaattcacttttttcatgacctagaaaaaaacattccagtgttcaactgttttatattattaaagggcttttaatttgtgaacttctg

SEQ ID NO: 134496 - DNA, 1011 bp, Homo Sapiens
  misc_feature (543)..(560): n is a, c, g, or t
gtatcaggttttaattttttcattggaacaggatttgggggtggggatactaaatgtggcagggttcaacaaatttacattttatcaaaataaggttcttaaagaatacaatgatagcatatgctttaactctggtagcacaaaccctcattaattgatggtcacagaaaaatactgtaatgctttaaacaaaagttttaaattacatcaatgacacaagtttcaaacaaaatgcagtgatcaaaatacttaactgtcctttcatcaagcttttacaaacacaatcagtcttcgctgtctgaggaaatcagttttagtttcttcatggtcctccatctgtcttttaacatgacacttgtccggttgttgaatttataatgcaacagtattttagaccagtttccctctccatatttcctcacgccagatctcaaattcttgtcttcttcccaaagccagcctgtctttttctagctcgatgtttttcaggagttaccggctgactctttgaaacaggtattctgctttcagtggctcttctgnnnnnnnnnnnnnnnnnngtactttgaggagttcctactcttctttctttcttattaaggtcttgttgctgggttccatgttgcaacttagataagaaaagattcttgtgagacctcaataaggatactgtaccctctgaggattcagttaccgcagactgtttgtcactaacactttttcttgtatccaaattagcttcagtttccatttcaacatcattaccactaggtttatcttgagaagttattgttcttgtccttttgctttctactacttttgccgctgccttcattagaaaggttgatgatttttcacttagcacataattcacataactcttaattttctccatcatgtggttgtagctgaagtgttggaaaaaaggaatgaaatgtatctttctgagagattatcataagcaatttgcttttgaaaggcatatgagaatttggatcaccaaatattctt

SEQ ID NO: 134497 - DNA, 1206 bp, Homo Sapiens
  misc_feature (17)..(17): n is a, c, g, or t
  misc_feature (34)..(34): n is a, c, g, or t
  misc_feature (39)..(39): n is a, c, g, or t
  misc_feature (42)..(42): n is a, c, g, or t
  misc_feature (68)..(68): n is a, c, g, or t
tgggctgtttttaaacnatgccagagaatcgagngaggncgnggtataggtagggcgcgacgagacanaccggaggaggcgcacgctagcggtggaaaggataagcgatttgagatgggcgaaggcgcggccaccgccgagagattaagcgaaggggaggcacatgacgtgggggcgcgcggggaaaggcggttgtgggaaaacgcggggcagggaaacaaagcgggtcgggacgacctgtgaagacaagaatggtggtgaagggcgagcggagcaggggaaggatagggggaatgcaggggccaggagtgcagtgtggtatgaatcgtatcaaggttttaattttttcattggaacaggatttgggggtggggatactaaatgtggcagggttcaacaaatttacattttatcaaaataaggttcttaaagaatacaatgatagcatatgctttaactctggtagcacaaaccctcattaattgatggtcacagaaaaatactgtaatgctttaaacaaaagttttaaattacatcaatgacacaagtttcaaacaaaatgcagtgatcaaaatacttaactgtcctttcatcaagcttttacaaacacaatcagtcttcgctgtctgaggaaatcagttttagtttcttcatggtcctccatctgtcttttaacatgacacttgtccggttgttgaatttataatgcaacagtattttagaccagtttccctctccatatttcctcacgccagatctcaaattcttgtcttcttcccaaagccatgcctgtctttttctagctcgatgtttttcaggagttaccggctgactctttgaaacaggtattctgctttcagtggctcttctgctttcttttttcttttttgtactttgaggagttcctactcttctttctttcttattaaggtcttgttgctgggttccatgttgcaacttagataagaaaagattcttgtgagacctttttcttgtatccaaattagcttcagtttccatttcaacatcattaccactaggtttatcttgagaagttattgttcttgtccttttgctttctactacttttgccgctgccttcattagaaaggttgatgatttttcacttagcacataattcacataactcttaattttctccatcatgtggttgtagctgaagtgttgaaaaaaggaatgaaatcc

SEQ ID NO: 134498 - DNA, 1097 bp, Homo Sapiens
  misc_feature (904)..(929): n is a, c, g, or t
cagtacgataatgttttaggagtactaagaagcataatcctttcctcactccttctttcttattcatagtcagtttggtaagacaaatatatgtaatttgaggagttcctactcttctttctttcttattaaggtcttgttgctgggttccatgttgcaacttagataagaaaagattcttgtgagacctttttcttgtatccaaattagcttcagtttccatttcaacatcattaccactaggtttatcttgagaagttattgttcttgtccttttgctttctactaccttttgccgctgccttccattagaaaggttgatgatttttcagttagccacataattcacataactcttaatgtttctccatcatgtggttgtagctgaagtgttgaaaaaaggaatgaaatgtatcttttctgagagattatcataagcaatttgcttttgaaaggcatatgaggatttggatcaccgaatattctttcaaagacttcttctgcttctttaaagttgccattttccatacaaacagctataggcctgaattttaattaaattctggtatttcttcatgaattttgtcatggttccttttccaattgaaccccccaatcatcagggctgattcccaagggtgtaattcgttcatcagttttgcaaactgtgcatcaagggtttttcctgctgcaattcttgtcaaaaactgacatatgtatatcggttctccaactggcaagctgttagactggataggtccatgaataatagcctctgcgctgttgcgggtcctgcggaagtcctcggagcggccgtcgcggaaagctcggcaaagagagaggcagaggaaatcgagcatccagccggcagccacggcctcggcctcggccaccaggcccgcgnnnnnnnnnnnnnnnnnnnnnnnnnngggggcccccacctgcacctggcactcgagcagttcctggcattcgaactgctcctcgtcgtttctctctgtttctgccatctgctcctcagtagggtcggcatccctaccatccgcacagccccgcgggctcggggccgctgaggaaacatcctccgccatgtaaag

SEQ ID NO: 134499 - DNA, 1696 bp, Homo Sapiens
  misc_feature (97)..(97): n is a, c, g, or t
  misc_feature (123)..(123): n is a, c, g, or t
  misc_feature (145)..(145): n is a, c, g, or t
  misc_feature (161)..(161): n is a, c, g, or t
  misc_feature (204)..(205): n is a, c, g, or t
  misc_feature (212)..(213): n is a, c, g, or t
  misc_feature (218)..(218): n is a, c, g, or t
  misc_feature (267)..(267): n is a, c, g, or t
  misc_feature (284)..(284): n is a, c, g, or t
  misc_feature (401)..(401): n is a, c, g, or t
  misc_feature (1125)..(1139): n is a, c, g, or t
gtagaattatagatccttagggattgcctgagccagaatcgcagagggatggtgatatcttgtgactcgtgattactctgcgaccggcgacctgctntgtggatgggtgatatactctgcgancagtgatatgctctgtcaccanggaattgagagctatntgcgtaaaactgcccgaggctaaagctgaccagaccggactcnntgtgacnntgtcntgcacaggggagtttacagagcagcccctcgatggagatcaagtgatcngactgaacaggaatccntcggggggtgaacagccattccttcgtgacctgtgcacgccttctgcaaccctggagctctgctcggctagtctgactcgaaaagggcgtgactcaagctgacgggactccagtagngactttgagagcacattttgtaaaaatatttatctagacgcaaatgcttatccatgaatgtcctcttagaccatttggggatgaagccatcttaataattagtaataattaattagtaataattagtaagcattttctcaatgctctgattccatcatgttttcttaacatgataacttaaaaaattgacatcctttgtactttctttaatcttaaaaagtacacggctttttacttatttaccttttaaatatgcccctttagcaattggaacaagttaaattgttaactaaaaacagtttggaaattttatttcattcgttatatcacacccccttgtcatgactctgagtcacgtgctgctgtattgcaacgtgcaggaccattttaaacctgtgtgctaaaaattttccagatacttgctttaaagctacttttgtccacaaatgaaatactgtcacagtagacgcttaaatgccacgttttcataccaagagtcattcattacttcatgtgtcacaaactgtggtgtttggaattgggtttttcaatgagtggctttacttatcaatcacaacaggtaatagcaatagacgttagtgcaatacaaagtcaccctcaataaatactgttaattggagatgtgagtttgtacacaaaacatcagactagacctttgtatgggagagaatttactgtacattaaattctttattttttgttnnnnnnnnnnnnnnngaaggcaaacaaaaaacaaaccagcaaaataacagaaagacaacacaacaaaaagagagagggcgcggcgcacgcccacaaagaatatcccctcggggggggccccccagattagactaacacccggtgttttggtgtaaccagaaggggccccccatagaaggggggccccttataataaaaaaccgcacgagcgccgaggggcgcccgccgtttataaacaccgcctgtggaacgtggaggaaaacacgcgccacagctgggaggaaccattgtggggaggagaacgcccccacaatatcggggggcgggggccaccacattattcgggaccacacctaccctccacgaggaagatatatagcgcgcccccaaggggacatatattcaaaccctttacagggtgtattaacggtggtgaaacacccgcggttaatattactccgcgagtgagaaagattgcccccccgagtttatattcttgaaacaatatttcacagccgtgtatctacatacaagtcccactctactgctcactgcagatcatctagctaatc

SEQ ID NO: 134500 - DNA, 1486 bp, Homo Sapiens
  misc_feature (59)..(59): n is a, c, g, or t
  misc_feature (97)..(97): n is a, c, g, or t
  misc_feature (199)..(199): n is a, c, g, or t
  misc_feature (273)..(273): n is a, c, g, or t
  misc_feature (280)..(280): n is a, c, g, or t
  misc_feature (295)..(295): n is a, c, g, or t
  misc_feature (302)..(302): n is a, c, g, or t
  misc_feature (313)..(313): n is a, c, g, or t
  misc_feature (340)..(340): n is a, c, g, or t
  misc_feature (348)..(348): n is a, c, g, or t
  misc_feature (390)..(390): n is a, c, g, or t
  misc_feature (400)..(400): n is a, c, g, or t
cgttatgtttggattgacgatacattcaacaggacgttgactgtacgattatcgatctnttaggattgcctgggccagaatcgcagagtagatgtgnggagtgccttgacattcagaaaatgatattcagacacacctatgtatgtatccctgagtggagagcatcacagggatagttcacaaagctcaaaaaatatantaatgctgtaatatgtgactaacagaaaaaatagccatgtaaagtaggatgcctgacagtagctctattcatcntgtctcntagctgtagcacccntagatcnaaatatgcacntagaaaactaaattactatgtatgtantaggcctntgaaatggatacatgaaaattagtgaaatcagaatgaacgtntcgcctgccnaaagatatgtatttttataagtgatacaagggccccatgagctccatggccacatctgtacaaaacaggccctcctttcaggaactggtctcgagagagcaaaggggtcaactccctaaatggcagctgagacagtcctccctggtggcatggccctgtttcctgttgatatggtgatagttggagagtcaaatttttaccagaatttgtgaatatcatctctggttaatgattacacaaaaccttttaaaattttaaaaaattatttctaattctataaataaactctgcagttgtacagccactgtacagctaacatctcaacactggaaatgaggctggtttcttccagtttggctcagattcttcagggaagcccagttaagacaaacagctctctatactcaatccttactttgctgagaagatacaggcctgcccactcgctcccacctgctcttcatgaggagtcctttattcctgcatgtttcctgttctttgggacctttaggagctaacctccacagatgctgatagtctgtagagtcaggaataccatgtaacatgttgaagtagactaaagattagttctttggcaatagcccagtctggacttactatgtacttttgaaaataaaactgcttatttgtaaactctgtaattaggaccttttgctatttgagttatattcctttctaacttcaaacgtctgcattcatgtataatagccattttatgcacagatgaggtgattcccacacttcttttcgcagatgtttcattatctggatgagtgtattacataataaatttgaataatggtagtcttccaaatgacaaaaagcaagctagttgatttgtcaattttgagtttaaatgttttgactgcttatcagcaaaaaaaatcaaagaatagcatactaatattaatggaaatgcagagtatatttaattggcatgattttttcatggatgtgtgcttcatttgatctattgtatgtagctcgtgatcacattttctgttggttaacattgttcctagcttatatgatggaattaaatatattctgtgtaaaaagaaaaaa

SEQ ID NO: 134501 - DNA, 1176 bp, Homo Sapiens
  misc_feature (96)..(96): n is a, c, g, or t
  misc_feature (136)..(308): n is a, c, g, or t
  misc_feature (312)..(313): n is a, c, g, or t
  misc_feature (353)..(353): n is a, c, g, or t
ctgtctttgaaccgttaccccttgatgagtgtacgttccgcaccgacgacgagccagcggtcatgacgagagcggaagacgccatagcaacgcctntcccgcgcgtgccgatcataatgcagctgcacgacagttnnnnnnnnnnnnnnnnnnnnnnnnnnnnnnnnnnnnnnnnnnnnnnnnnnnnnnnnnnnnnnnnnnnnnnnnnnnnnnnnnnnnnnnnnnnnnnnnnnnnnnnnnnnnnnnnnnnnnnnnnnnnnnnnnnnnnnnnnnnnnnnnnnnnnnnnnnnnnnnnnnnnnnnnnnnnngccnntcgagccaaggaattcggcacgaggattctcaggtgtgtntaagggctgcattccatgatgctatcagtgccttctttcagctcacaggatatcggccatgttaatgagtctgatgttgctagtatcacaggcaccggaaaatatgcacattatgctggagcattagaatgcaacagaaagagccctgggcttggagtatgcagaactggttcttgttacaactcctcttactagtgggctctggaagaaaacacattgaattcatgatcatggttaacctttggagagagagaggagaccaggatgaaggagccagtcgaagatcctgttcaagtgtacactgagccagcaggttcaccagaaagctattgagcgtttgctggaacacattatgcagggtgaatttcttctggaatgttgccaaggattttttatgcttctgtggcaggcatttcttgaacattgtcatttagccaagcaaagaagattttcttaaaggatagaaaatgtttaaaaatttttgtttgtttgaagataggttaaatggctatatgatctcaggataagacagagaaaatcacttatttctctaagtgatctgattaggttagtgatgttttgcctttaaacagattcatcattattcctaaagtattgctgtattaatactgtcttctagaaagtatccaccagtgcctacttttcttcgatatcattagctgtttttcgaaactgaatttgctcttcagagatttctcatatgtttgcgtataaggaactactggtaatagccaagaaaatttggaggtgcagagaacatgctgaaacagaatttttcactttcaattctagaacaaaacca

SEQ ID NO: 134502 - DNA, 998 bp, Homo Sapiens
acgggagaaagtttgacgtgcgctcctacctgctcattgcctgcaccacaccctacatgatcttctttggccacggctatgctcgcctcacccttagcctttacgacccccattccagcgacctcggcggccacttgaccaaccagttcatgcagaagaagagccctctgtacatgctgctgaaggagcacacggtgtggagcatggaacacctcaaccgctacatcagtgacacgttctggaaggcccggggcctcgccaaggactgggtcttcaccaccctcaagaagcggatgcagcagatcatggcccactgctttctggccgccaagcccaagctggactgcaagctgggttactttgacctcattggctgtgacttcctgattgatgacaacttcaaggtatggctgctggagatgaattctaacccagccctgcacaccaactgcgaggtcctgaaggaggtcatcccaggtgtggtcatcgagaccctggacctggtgctcgagaccttccggaagagcctgcgcggccagaagatgttgcctctgctgtcccagcgccgcttcgtgctcctgcacaacggtgaggccgacccgcggccgcacctggggggctcgtgcagcctccgccgctggccgcccctgcccacccgccaggccaagtcctccgggccacccatgccgcatgccccagaccagccgggcgcccgcaggcctgcgccacctcccttggtgccgcagcgtccccggccgcccggccccgacctggacagcgcccacgatggggagccccaggccccgggtcacggagcagtcgggcacaggcaacaggcacccggcgcaagagccttccccggggacagccaaggaggaacgcgaggagcctgagaacgcgaggccctaggggcagccacccgcgcccagcgccccgcgtcccgcgccccagccgtgctgcctgccctcagggacctataaagcccactttgctacaat

SEQ ID NO: 134503 - DNA, 903 bp, Homo Sapiens
  misc_feature (169)..(169): n is a, c, g, or t
  misc_feature (194)..(194): n is a, c, g, or t
  misc_feature (202)..(202): n is a, c, g, or t
  misc_feature (217)..(217): n is a, c, g, or t
  misc_feature (219)..(219): n is a, c, g, or t
  misc_feature (222)..(222): n is a, c, g, or t
  misc_feature (228)..(229): n is a, c, g, or t
  misc_feature (377)..(377): n is a, c, g, or t
ggcgaacatccacagacgttgcgtgtagataccgctcctttagatgccctgaccaagatcgcggaggtccacactcttgccctttcctagagagtgtattgtggatcctcctcctgcaggactgtggccttgatcggacagtccagacagtatgttctggtgattgatncagtcctttgagaccaggagagacngatctccnccaccctcgtccctntntcntcaganntgagcttcttgcaaaatagaaattgcaggacactcttggggtcgtccctcaccctcccacactcacacagccacaatgttacagctgaccctgtgagtctagagtcgagacacggactgagggttgctccatgacctggtccccttcntagatgtgaatcagtgcaagggcccaggacagcggaagaggtgtgaagccatcctgtgatcggggagccacagggtgtccagacccagcgggagccgaggattcaggagaatctccccagtcagctccagaggtgcccaccagtgtgagctctagtgtctcccaggtaggggccaaagcgtcacctgcccggccctgggggtgcaagtggagtggattttactcctgtccagaaaatggagtgagaccctgtctctaaataaatacatacatttagactcctctgtctttgcgtgtatataagcaaagacagaggtgtttttatcaggattacaacatttttcataaaaggttggcacatcattacagcaagttgcttataggcaatgtttctctatgagaagggcacatttaacattttttacaaagggtgtaatagtcatggtttttctgttatctgatctaagcaaggcaggacaacaaaggggaacttaattgataacaagggtcattaattaacagggcac

SEQ ID NO: 134504 - DNA, 1052 bp, Homo Sapiens
  misc_feature (70)..(70): n is a, c, g, or t
  misc_feature (81)..(81): n is a, c, g, or t
  misc_feature (140)..(570): n is a, c, g, or t
agcgacagtaccgtagcgcagtcgaacggagaccagaggagtcccggggaacctgtatctatgtctgtcnggtcgcacctntgattgaggtcatttgtgatctgtcaggggcggactatggaaaacgccagcacgcgccnnnnnnnnnnnnnnnnnnnnnnnnnnnnnnnnnnnnnnnnnnnnnnnnnnnnnnnnnnnnnnnnnnnnnnnnnnnnnnnnnnnnnnnnnnnnnnnnnnnnnnnnnnnnnnnnnnnnnnnnnnnnnnnnnnnnnnnnnnnnnnnnnnnnnnnnnnnnnnnnnnnnnnnnnnnnnnnnnnnnnnnnnnnnnnnnnnnnnnnnnnnnnnnnnnnnnnnnnnnnnnnnnnnnnnnnnnnnnnnnnnnnnnnnnnnnnnnnnnnnnnnnnnnnnnnnnnnnnnnnnnnnnnnnnnnnnnnnnnnnnnnnnnnnnnnnnnnnnnnnnnnnnnnnnnnnnnnnnnnnnnnnnnnnnnnnnnnnnnnnnnnnnnnnnnnnnnnnnnnnnnnnnnnnnnnnnnnnnnnnnnnnnnnnnnnnnnnnnnnnnnnnnnnnnnnaagaattcggcacgaggggctttttattgaacacaagaaatgatacttttcaggcactgggcagataacttgctagaaaggcattttttaactgtgctaagattgagctgagtgcgtggctggagacaccacacaacacggacccttgctaaggcatctagtccacccgcttgttatgtagagggtgaaatgaagcccaaaacagtcaatcgtgaactctaagccgatcaggtgggaaagccggcatctctagaatgaaaacctaaggctgcttctcccactttgcctgagcaaatatagtgagattacacagcaaggcatgtgtaaattgccagtgcctatttctcagaaccagatttggtgatcgcaaagactgacgtggccctctaggtgtgcctatactgcaccagaagagcaagccgagaaagcagtgctcaaacctagagcattcaacctttcataccgataaaggctttaaaaaa

SEQ ID NO: 134505 - DNA, 1053 bp, Homo Sapiens
  misc_feature (23)..(23): n is a, c, g, or t
  misc_feature (25)..(25): n is a, c, g, or t
  misc_feature (68)..(68): n is a, c, g, or t
  misc_feature (99)..(99): n is a, c, g, or t
  misc_feature (117)..(118): n is a, c, g, or t
  misc_feature (138)..(138): n is a, c, g, or t
  misc_feature (142)..(142): n is a, c, g, or t
  misc_feature (159)..(159): n is a, c, g, or t
  misc_feature (182)..(182): n is a, c, g, or t
  misc_feature (200)..(200): n is a, c, g, or t
  misc_feature (205)..(205): n is a, c, g, or t
  misc_feature (261)..(261): n is a, c, g, or t
  misc_feature (294)..(294): n is a, c, g, or t
  misc_feature (313)..(313): n is a, c, g, or t
  misc_feature (324)..(324): n is a, c, g, or t
  misc_feature (340)..(340): n is a, c, g, or t
  misc_feature (360)..(360): n is a, c, g, or t
  misc_feature (375)..(375): n is a, c, g, or t
  misc_feature (395)..(395): n is a, c, g, or t
  misc_feature (418)..(418): n is a, c, g, or t
cagatcctgtatgcctagctgantntgaatgtctggtcctggcatgccagcctccacagtggtacatngaagccaccactgcttcaggctgggggtgtntctgagctcagcctgctnntggccagccagtgtcactgntagntgagaaaaagcagttcncagtgcccagcaaagaccatctntcataactgtcactgtcntgccntgagaagagagccgctctccgtgggcaccccatggaggacacagtaccagagttancagagagggtggcgaaagccaccggtctcttcntaatctgcacagactattntgggtattctngggcgggcagttcctntgcatgtttcgggagaggtntgttgatttggggcntatatgtcaggcctttggtntgcgtcttattttaggggttgtntgggggcctgggtggtcggcctcacatgggaaggggatgggtagtggatggggtttctgttgtatcttgtgggcgggtgattttgcttttgtttttgtttcacattcttccccctccacaagccaaagtcgtttcatttggtttccactgtgtggactgtgctggagcttggcgcctgccagaaaaatttggggctaggcaagccccaggttgcagacatggtgaagcagagaaactgttcttctggttcctgcacaacctcagaggggcaaaaaccctccccaggaaggaggagggtgttcaggagccagacttttggagagaaggcagctcccagcctgctgggtgaccgccattctgcgtgtgttccccagctgggcagggctggaagccttacgtatgaagcatggagaagcagccattgtccccactatgggcagaggggggacccggctggccccttgggtcagactggagccaacaccgccagccaccccctctggcctgctggcaatgccacaggtgcccaagaagatggaggatccctgtgccaggagccaacctggtcttcccgagggtcagtgccccagtgaagacagaagcgagagaataaagttccctgtaggtcctctgtc

SEQ ID NO: 134506 - DNA, 1909 bp, Homo Sapiens
  misc_feature (20)..(20): n is a, c, g, or t
  misc_feature (90)..(90): n is a, c, g, or t
  misc_feature (180)..(180): n is a, c, g, or t
  misc_feature (266)..(266): n is a, c, g, or t
  misc_feature (310)..(310): n is a, c, g, or t
  misc_feature (349)..(349): n is a, c, g, or t
  misc_feature (356)..(356): n is a, c, g, or t
  misc_feature (389)..(389): n is a, c, g, or t
  misc_feature (393)..(393): n is a, c, g, or t
  misc_feature (400)..(408): n is a, c, g, or t
  misc_feature (416)..(416): n is a, c, g, or t
  misc_feature (419)..(420): n is a, c, g, or t
  misc_feature (484)..(518): n is a, c, g, or t
  misc_feature (525)..(528): n is a, c, g, or t
  misc_feature (541)..(543): n is a, c, g, or t
  misc_feature (549)..(560): n is a, c, g, or t
  misc_feature (584)..(635): n is a, c, g, or t
  misc_feature (643)..(651): n is a, c, g, or t
  misc_feature (668)..(731): n is a, c, g, or t
  misc_feature (808)..(852): n is a, c, g, or t
  misc_feature (859)..(859): n is a, c, g, or t
  misc_feature (888)..(905): n is a, c, g, or t
  misc_feature (1721)..(1742): n is a, c, g, or t
tgagatttgccctcgtcttngctcgtgccctgcccgcgcgccggcgtccgtcggccgcgcggcgtgttcggtcgagtggggggggcgcgngaggcagtgatgcttatgtccctttctcctcttgagggcgaggacacataagggtgggaagcggtccctctccttctccctaaacccacnacagacagggggtggcgcgggcacgaacggcagcgaccgagcgtgtttttctctgtttttcccagcagccggaggccagccacgcncattctccccctctccacccgcacgcggtgggtgtgggggaggntaataataaaaataaactatctcttcccttggcctcgtngcacagngatccaaaacacagaaaaacgcgcctccggcgnggtnttctccnnnnnnnnncctatganggnngggcgccgggcgccgccccgctggccgttgtttaaactacctccccgccccccggtggtaaaannnnnnnnnnnnnnnnnnnnnnnnnnnnnnnnnnntgcgcgnnnncccgttcgtaggnnngctggnnnnnnnnnnnnagggggggaaaaaggaggcagaannnnnnnnnnnnnnnnnnnnnnnnnnnnnnnnnnnnnnnnnnnnnnnnnnnnaccccccnnnnnnnnnattaagaaatctcgcannnnnnnnnnnnnnnnnnnnnnnnnnnnnnnnnnnnnnnnnnnnnnnnnnnnnnnnnnnnnnnntggccgtgggtggcggggccccttttagttccagctactcaagagaggctggggccaggagaatgccatgaacctgnnnnnnnnnnnnnnnnnnnnnnnnnnnnnnnnnnnnnnnnnnnnnccatgcnctggcgtgacagagtgagactctgtctcnnnnnnnnnnnnnnnnnngattgatttcgtcaaactgttatcaaaggttggccctctagccaactcaggaaggcgccatcctcttcccattatctccccttcctccaattctcctcctccccttggctccctagccttggaggtaaacactaatatttcagtgcactgttggttaagccagattggcttgggaacctggtaatgtttttatttttattttaaaaaaggacagtcttgagtctcaaaataccaacacatctctgatttatgtcccatttataagctgcctttactactgtcctgacatgtgatcgtctttcatttgctttggagcttagtggtgaagagagggaacatttccataactgaaaataaatggagaaaagtggtaactcttttgtttgagaatatttgaaatactagaaataatgaggaaagtacaagcctagctgagaaactagtttcatcacttgtggacttaaaaaagtaaagctaacagggtttaaagttgagaggcagttcacatcctaagtgatacctagaaacctgctttcttgttcgcaaatgatcaacatgaacatacagaatggctgacatttggacctttggataagcttaaaacatggattgtggaatgtctaatagagggcttttctctcttttttttaataatgactgtcccacactttaattcctcaatgatatgtggatgctaactaaatcagatgaaatgttttctttaaaattctgtatatatttaagaatttctaggaaatgattatttaaaatggagtttctaagtaattattttctttatagtttagtggagtaagnnnnnnnnnnnnnnnnnnnnnncatcaaatctaacctttatcaaagccatcgaggaggttggtaaaatactttgcaaaaatcacagctctgaaccacatagaatgctgatgaacttaaagctttgccagtttggcaagtcttccagtataatacttgttgtgcctcagtacattttaaataccagtagg

SEQ ID NO: 134507 - DNA, 1058 bp, Homo Sapiens
  misc_feature (235)..(247): n is a, c, g, or t
  misc_feature (336)..(394): n is a, c, g, or t
  misc_feature (749)..(749): n is a, c, g, or t
  misc_feature (762)..(762): n is a, c, g, or t
  misc_feature (826)..(826): n is a, c, g, or t
  misc_feature (871)..(871): n is a, c, g, or t
  misc_feature (903)..(903): n is a, c, g, or t
  misc_feature (913)..(913): n is a, c, g, or t
  misc_feature (928)..(929): n is a, c, g, or t
  misc_feature (947)..(947): n is a, c, g, or t
  misc_feature (956)..(956): n is a, c, g, or t
  misc_feature (963)..(963): n is a, c, g, or t
  misc_feature (966)..(966): n is a, c, g, or t
  misc_feature (968)..(969): n is a, c, g, or t
  misc_feature (1045)..(1045): n is a, c, g, or t
tggttttatgtttttattcttatataactttgtgccctcacatataacaagcattctggaagttagtgtccatatatactcaaaaactttaaattagggtatgggatttcattgttattacaggtatcactcaacatagagattacagcttcttctaaacaaatttcctataaaattaaatcttacatataaaatcctattcctactatttatgaaaaacaagaagtgttcttcnnnnnnnnnnnnnccaaaactgttgtccaaaggcataataaaatcatatataaatacagcaaacctttataagtcagcaagaaatatggtaatttcctggannnnnnnnnnnnnnnnnnnnnnnnnnnnnnnnnnnnnnnnnnnnnnnnnnnnnnnnnnnaccagtaactttggcaataggattattgccttatcttgtccaccatcatcttgcagcttcaggccctgccactagtggagaatcactcagggaatttctgtttggaggtggttttggttttggcatcttactaagaatggttgccatctcttttctctcatcgaaattcttccactgctcatatagttttaaaataaccctgattatttccaaaatcttttgcatatccacagaaagctcagctaaccattgcctggcatctttctgctgtacaacacaggctacatgtaggcaagctaaagggggtgggggaataatatcctgatttatgacagttgcagttcatattattganagctcacatgcanggattagtctattactaaagctatcatgaaaggaggatacagtaggcaaagattcgttctgtangtatcattcactatcctcctatagaaatgtaatcatattatactngaagcagactactcatctgattgtattttccntcagagaggncagatttccatcttnncctcgtgcgattcttggnctcgagggncaatccntananngagtcgataaattcgtatcatgtcaagctgttcctgtgtgaattgtatcggtcaaattccaacacatagagcggancaaagtgtaactg

SEQ ID NO: 134508 - DNA, 1052 bp, Homo Sapiens
  misc_feature (340)..(363): n is a, c, g, or t
  misc_feature (645)..(645): n is a, c, g, or t
  misc_feature (719)..(719): n is a, c, g, or t
  misc_feature (754)..(754): n is a, c, g, or t
  misc_feature (776)..(776): n is a, c, g, or t
  misc_feature (791)..(791): n is a, c, g, or t
  misc_feature (825)..(825): n is a, c, g, or t
  misc_feature (931)..(931): n is a, c, g, or t
  misc_feature (995)..(995): n is a, c, g, or t
aacatgcatcttaatttaattttaattttaaaacatcacctgcattttcaaaccaaagaaaaaagactccttcctccaagaaaggtctcctgctggctcctgggcccattgggtgctgttgctgtgtagccaggccgggtgcacattcttcacaggttgtagtgctcctggctcagaccgggaggttgtctgaagtctagtcagctacacaactctacacctggaatgtcagacattcgcaatgcctccagaacaatggatggcaaaaaaattcattctgtgctttttccgggatcgcttgcatgcaattgtgcccgccgagcaggaggactccagattnnnnnnnnnnnnnnnnnnnnnnnngcctactcatcggtctgcataatcagcatcgaacatatttctgccccaacaaagagaacagtgtgttcctgagacgctgccgtgcagctcggaggctcactagtgggcggttctcccgggagggagtcgggtgtttcagcagctctccccacacctaccacccacctttttggggggccccagattttctggcccctaagggggaggacacttgcacagggcctggcagagggcagagacggctctggcccctgtgctccttcatcctctgacccgcatganatacaactcctgcaaatctacctatatgaccaattcaatcccctcgtgtttggcctttccagcactgtcactangcgcaagcggtcagcaaggatttcaacaccactgnggcactttgctgatctctttanatgcagtgtgtgtcntaattccatgatgctggtgggcactcgacattcntatggggggactgtggggttcccaacgcacctgcatctgtctctccaagcacacggacacttccagataaaagaagcacgctgcagtgtggtccaagcccttctangtcctcccttttcagcctctctaactgggtcactggctaggtactaaatctctcgtgcgaatcntggctcgagggcaattcctatatgaatcgattaatcggatcagtcaagctgtcctgg

SEQ ID NO: 134509 - DNA, 1540 bp, Homo Sapiens
gatttccaaccggattcggatcaggctgaaccatcccccaccggattcccttctcgttcgtgaaatgctccagggtgaattcccacccacacttcggcacaaataaatgtagtcctgtggttcttcagctttagtgatgactttccagcttcgttgagaaatctgaagtcggtcactctcaggaggatcagccaaggccaagtttaaatcccagtgatcgaaaaagaagatgcttggggaaaccagattcatcacactctttaatcatgccaatgaaatccatagaccttgtggcgatgaactcagcccggaaggcagacatcacagaattcaacagcaaggcattgtttcctagtttcttacacctttccatcatctcggtcagcagagcccggcacaggtaggcacgggcatacaccgacactagtgggtctccgatccctctgatcatgcatgtcaaccggggcaggcactctgaaattcccgttttggagaggaatttgttacatttcaggatggatgcctccacgtaaaatcttggaatgagttccctgatggaggcaatcttgaaaaaccaatttaggcatgtttccttggccgtgtcatttgcattctctggagaaaagtgatctggtaagacgctgcggctatccacacacatggaaaagatgcgctcgtacacgagctttccaaatgtatcaagtatgtcggtgataaggacaaatttgcttgggtagaactgaataacactggtgtctgaaagaagctttgaacactggatgactatttttagagccttcactttctggtctgaggcccaggcatccttcagcgattggttgagctcctctatgcggttcacgtaatcctgctgagtcaagttcaacagctccttttgggaaccctcctcaaagtcatccagctcctccagccgggtccgcaccttctctgacattgccaatgtggcagtcccagctttgcctttttcagatcccataaacagattaatagacagcttttcggtagtggtgtaccgggcaaggatttctccccgtttgttggtccaaggctcaaaatccgatcctacaacggagttatcatctctatcacgtttccttctggagctgtccatggcagctgccaaggctgcggggtcagcagtggctgcaaacatggagagggggtcagtcccatcgaggacgctgctcagcgggtccaccacggagctggaggaggaggaggacgtggaagaagtgcttcctttccggttcactttctttgtctttgactctgtgacagttatgggtttcagagggtgatagtcccccaaactccaatggtacagcctccagtcggcatgatgcaaattcagctttgtagttcctattcctggagtgccaaggaaagacggccatcttcccagtcacatgaccgcttgttctggggccgtctgctcggcttcccatccttaccccgccactccccgcacccctcggccgccatgtttgtgaagggcagctggccgccccgcagcggccgc

SEQ ID NO: 134510 - DNA, 1164 bp, Homo Sapiens
  misc_feature (1071)..(1072): n is a, c, g, or t
  misc_feature (1099)..(1099): n is a, c, g, or t
gtggcgaattcggcacgagggggatacggtccagaaccagctggtggtccaaggagtggagctcccatcttacctccccttgtacccgcctgccatggactggatcttccagtgcatctcctaccatgcccccgaggctctgctgaccgagatgatggaaaggtgtaagaaactaggaaacaatgccttgctgttgaattctgtgatgtctgccttccgggctgagttcatcgccacaaggtctatggatttcattggcatgattaaagagtgtgatgaatctggtttccccaagcatcttctttttcgatcactgggattaaacttggccttggctgatcctcctgagagtgaccgacttcagattctcaacgaagcttggaaagtcatcactaagctgaagaacccacaggactacattaattgtgccgaagtgtgggtggaatacacctgcaagcatttcacgaaacgagaggtgaataccgttttggcagatgtcatcaagcacatgactccagatcgtgcatttgaagattcctacccccagcttcagttaataattaagaaagttattgcccacttccatgacttctcagttcttttctcagtggaaaaatttctgccgtttctggacatgttccaaaaagagagtgtgcgggtggaggtttgcaaatgcatcatggacgcctttatcaagcatcaacaagagcccaccaaggacccggtcatcttgaatgccctcttgcatgtttgcaagaccatgcatgactctgtgaatgcactcactcttgaggatgagaaaagaatgctgtcatatttgattaatggatttataaaaatggtttcctttggccgtgattttgaacaacagctgagtttttatgttgagtccaggtcgatgttttgcaatctggagcctgttcttgtgcagttgattcatagtgtgaaccggttggcaatggagacaagaaaagtaatgaaagggaatcattccagaaagacagctgcatttgtcccgggcctgtgttgcctactgcttcatcaccatccccctccctggcgggcatcttnncacacgtctcaatctctacctgcattnctgggtcaagtgggccttgggcccaacccagtgccctctccccaagcctggatggcttttttttc

SEQ ID NO: 134511 - DNA, 1241 bp, Homo Sapiens
  misc_feature (155)..(155): n is a, c, g, or t
  misc_feature (257)..(544): n is a, c, g, or t
  misc_feature (586)..(603): n is a, c, g, or t
ccgatgtcacggtgtgagcccctccaagggagggcgttcgtacgcagtaacagacccgggggtccgggaactgatctatgtcttgagtccaccttactggctaattttgtgtctcggggcggctatgaaacccagacggcctttaggttctgctntggtgcctgtgtacatgtcttcctggtatccctgttctgtgatacgtataccgccttggtgagtgatccgctcccgcagccgaagaccgaggcagcggtcannnnnnnnnnnnnnnnnnnnnnnnnnnnnnnnnnnnnnnnnnnnnnnnnnnnnnnnnnnnnnnnnnnnnnnnnnnnnnnnnnnnnnnnnnnnnnnnnnnnnnnnnnnnnnnnnnnnnnnnnnnnnnnnnnnnnnnnnnnnnnnnnnnnnnnnnnnnnnnnnnnnnnnnnnnnnnnnnnnnnnnnnnnnnnnnnnnnnnnnnnnnnnnnnnnnnnnnnnnnnnnnnnnnnnnnnnnnnnnnnnnnnnnnnnnnnnnnnnnnnnnnnnnnnnnnnnnnnnnnnnnnnnnnaagaattcggcacgagggttggagcgcccgcggctgtaggcnnnnnnnnnnnnnnnnnncttcttgtgatctgaatcagatggtgtttctggggggacaggatcctgggtacggctctgtttgtgcttgtgcttattcttcttcttgggaggctgaatatgcatcagacgacactgctccggcaacgggccagtgtggaggcggaagccggccagcatggtccctgtgataggattgaaagagctactgagaatagggggcttctcaatgagagagcggaggctgctgttatcatgggaaccaggcagatcaatcatccctggcaggtcaggcaggaagttacttagcttctccttcaccttcttcccacagaatttattataggcttgttccaagttgtagtgtgtgatcagattcgtgctgcctgtcagctctgtgctacctggcagttccctcatgaggtaaaaagggccacagccagctcctgacttgtccgcgccaggaggagccgtggccgcggtgggaggcggggccgtgccgggtcccccgcccgcaggaggcggtggcgggggtggaggctttcctggtccgaagccgagtgcggttgggggcggtggtgggtcagcctgagccccaaacagtgccgtgaaattctccatcgtaccctccgccccggcgctgtctccgtgtctgcccc

SEQ ID NO: 134512 - DNA, 979 bp, Homo Sapiens
  misc_feature (550)..(550): n is a, c, g, or t
  misc_feature (768)..(768): n is a, c, g, or t
  misc_feature (854)..(854): n is a, c, g, or t
gttgttgccaattgtttttgttgtcttccagaggtaatacaaggctttgctcctttagcaggattcccagttggaccctctccagagaggattcatatttgaattcccatctgaataccaacccaaatgttgatacagaacactcctgtattaaaattaatatccatcccagataaacctactctgtgactaagacaattgagatcttctaggtgaagatgctataattcaaaatattacatggaaaaccatgtcttacttaaaacgggtacttgttttccggccataattattccagtctcttccacagaactgcttctgcaaacagtttttttaatgtatcaaagagagtctctcgccaacatttaatacagtcaaatctattccaacttcagagttcttatatgtcttatttagcagacactatgattctatcttcttattctctggaaatccatcagatgtgtgttccaacacagaagtgccttccttccttctcatggtgggaaaaagcatatccatcatccccaaggtttctaacaattctctnttggtaatcaatctctttttctacaagtcctttgagtagtaaaaactttttatcaactacaggggactggccaattacaggcagatatatatcaataattatttcagcagcattggttaaaacaggggcaaatcttgggtgagaaagattccttatcaaaaaattaagaacatgactgatttccttctcatccgactgcagcgcattgcaggacgctnctcgattactccttagatggcacgtatccgggtgtcttatgtacatggattagatctcgtgcgatctgggccgaggcaatcctaangatctataatcgtacagtaactgtctggtgaatgttcgtacatcaacaaacagcgagaaatgtacggggcagatggtacaatatggtggcacgcgtcatcgacgttgatgtagatgaccggaggg

SEQ ID NO: 134513 - DNA, 467 bp, Homo Sapiens
aagaattcggcacgaggagaaaaacaatttcttttaatttggtttgttggtcccacaccccatctatcaatgtatgtgctatttacaaataagttctatacagtatttttgcagtacctttgataattcctagacctctattttcattctgtgtattaatgtgaataacagatggatattttaatatttaaggcagatggtaaactttcctataggtcttgtgagacttcgtcttataggctgaacaccattcacaaaatgtaataatgcttcattccttcaggttgaggtaaagaaacttgagcaactgggattagcaaagctgcaaagaatgaaatgtggcctaagatgtaattatgttctctgcccttcctttgggccagggtagttttgcacttgacacaatggaaaataggccataaagcctgaaaataaaatgttctaaaccccaatctcacagcacttta

SEQ ID NO: 134514 - DNA, 1008 bp, Homo Sapiens
  misc_feature (728)..(728): n is a, c, g, or t
tttttgactaaaatgaatatattattctaggttaatttttttccattcaaatgtttatactccatctacccagaacaattacagcagaaaaaataggcacctccaaagtcttcccaagaatgatgactttctgaaatgacacactgtacaaactggacaaatgagacgactgactgtgacaggggccggggagctcttcaaggggccgttttcttcaagtctcggatctgtttaatcaagtagttcttctcgtcagcgaactgctcatcatccgtcctttctttttggaagctgctcagaaactcaatgagtttgggctgattttttaacaggatctccacaataggctgtgttttgtgaggactggccacaaacaccttaaaaacatgaaaggcttcaaactggatgttgggacttttatcccgaaggaggttcatcatgagtttcaggttctccggcttgctgatatactttgtcatgatggcaaagttgtgacggtccaggatcagctcccctagcagctttaaagactgtctcttagtaacataattctcagactgaagcaatttctcatagtcttcaaaaatagtgtcgtaattttgttctaagaagtctgctaccaacactttatgtctgggttagtcatccttgaaagtagcaaaggcatctgaagcaatatcaaatgttgacactccacgtacttaaagaatctctgaattgattagaangaggatgttttggcagtggtcatgtcgatacatctctcagcatatcccacacgtagggatctgtggggctcaatcttttgggagataacagaatgagatgagactatatctcacagtagatcggatgctactgctctcagatgtgttatatcgggcaatctttttcctcaagtcacactgcagcactacatgtacacagcatgcgtaatctgtggcacgacacgctctgtggggtctctcgtgacaaagatctcatgctcggcatctggccaggcatctg

SEQ ID NO: 134515 - DNA, 997 bp, Homo Sapiens
  misc_feature (774)..(774): n is a, c, g, or t
  misc_feature (783)..(783): n is a, c, g, or t
tttgtcattcaaaatacactttaattatcaactatattggattaaaggggaaaaaagtacactttaatattgactatcactggcaaagctaagtttggcaagcaaatgagtgggtagagagcagaggagtgaatggactcctgtctccaggatgccttttccttcctgaagatgatctgagcacacaaggtccccaagctgggccacagtccagactagagtcttcccagatacatgggtcactctgactattcttgcctggtggggcaacacgggtccctccttagcagaagtgacgctggggagggcacctgcttcctgccgtcttaaggacagtgaccccggctctgtctcccactctgcacttgcaccttacctcgtctttgaagaggcgtgcttggtcctcacaacctgtcagggtctgaacaaagccgaagacctcatcgatggtccacttggcgactgtcgaggctgagatgcccgctactcctggcaggagcttgcagtgctgctcccagcacactgagagtgagcggtcagggtgggccgacagggctgacatgaagagggactggtgcacgacatcgggcgtgagggtctggaaatcttcctgcggaatctttcgatacttcggagggcgtccaattcggccgtgatggcgaggcttcttccttggggagaagcctgagaggttttcttgcgggctgaggctccgagtcagacagtccgctttcagccggctctggttcctctcagccagtgggcagctgagangcatggtgnctgtgacttgctgagaatggcagagcgtcgcacccagatggctcgtgccgattctggctcgaggcaatccctaatgatcgtataatcgtacatgtcaacgtcctgtgtaatgtatcgctcaatcacaacatacacggacaaatgtagctggggctagatgacatcaatatgctgggcacgcgctcatcggactgctgcatgatagatcgcaccg

SEQ ID NO: 134516 - DNA, 1153 bp, Homo Sapiens
  misc_feature (1037)..(1071): n is a, c, g, or t
cccagaattaatattttttatatgacaatgagaagaaacattactgtaaatgtcacaactgttacacagacttttaattatccaacatgattgaaaaatatatttatgttgagaattatatatagtaactatttactaattttttttaaattacgatacaatgaaattactaacaaaacagaaacagacattatttaatctattaatgcaattggtatttcatgaaataattacaccttagatcattatgaacatcaataatcatataaactgttgacatggtaggtctaagacaactccacttgcatcagtcaaaagaatatacacatcccaaattgcacacatcccagactgctctatatatgccttattcatctaattttcttcataaccgagttattctacgagtaaagacagaaacttaaatttttacagctttgtggtttttggatttcagattttaaaagaaatacatgttctgttgtgttgctcccaagtttgcatgaaatttcgctgatctcccaaaacttactctagtaaaaataaaattagcatagtaatttttaagtctgtggggaaacattaaacattaaattatattttgaaaaataaagatatttaacttactactttttacaggtaagttattttaaaataaattatgcgcaccatgttttctgggcactttttacaaataatagcaggtcctccattattagagatcatctgaaatcctggtagacatacacatgaagttcctcgggcatcttgcctctggttagctccacaaggacacacgagagggcggagaaaaccaaagtaactgtttgttgtcgcacttctccggctgctggaaagggaaagagaaggtctgggcctgtaagaagcgagggaggaacaacagaaggaacgcggtcacggcccgggcggataagagggaccaaaccgccattgccaccccagccccaccgcgcgtcgccatggtccccggccgtaatggccgaattcccgggcatatgtccggtaccgtcgactgnnnnnnnnnnnnnnnnnnnnnnnnnnnnnnnnnnncggccgcttcctcgctcactgactcgtgcgctcgatcgttcggtaaaaaagacctagcgccctatagtgagtcgatactatt

SEQ ID NO: 134517 - DNA, 1260 bp, Homo Sapiens
  misc_feature (198)..(780): n is a, c, g, or t
  misc_feature (807)..(826): n is a, c, g, or t
  misc_feature (899)..(1131): n is a, c, g, or t
tgtcgtgtgcccttcagattggccccaatctgttgtactgtacatgtgtcgtgcgtatgtttacggtgatagacgtataccgtagccacgtcgctgacggggtctcaacgccagctggacgaagactacacgaatgagtctacggtgacttggaagcgcagcttcccgaggagaaagcggacagttccgtagcgcagnnnnnnnnnnnnnnnnnnnnnnnnnnnnnnnnnnnnnnnnnnnnnnnnnnnnnnnnnnnnnnnnnnnnnnnnnnnnnnnnnnnnnnnnnnnnnnnnnnnnnnnnnnnnnnnnnnnnnnnnnnnnnnnnnnnnnnnnnnnnnnnnnnnnnnnnnnnnnnnnnnnnnnnnnnnnnnnnnnnnnnnnnnnnnnnnnnnnnnnnnnnnnnnnnnnnnnnnnnnnnnnnnnnnnnnnnnnnnnnnnnnnnnnnnnnnnnnnnnnnnnnnnnnnnnnnnnnnnnnnnnnnnnnnnnnnnnnnnnnnnnnnnnnnnnnnnnnnnnnnnnnnnnnnnnnnnnnnnnnnnnnnnnnnnnnnnnnnnnnnnnnnnnnnnnnnnnnnnnnnnnnnnnnnnnnnnnnnnnnnnnnnnnnnnnnnnnnnnnnnnnnnnnnnnnnnnnnnnnnnnnnnnnnnnnnnnnnnnnnnnnnnnnnnnnnnnnnnnnnnnnnnnnnnnnnnnnnnnnnnnnnnnnnnnnnnnnnnnnnnnnnnnnnnnnnnnnnnnnnnnnnnnnnnnnnnnnnnnnnnnnnnnnnnnnnnnnnnnnnnnnnaagaattcggcacgaggctgctcaggnnnnnnnnnnnnnnnnnnnngaagattcagaactttattttttcaaggactaagaacagaatcccttgccaggcgaggtggctcacacctaannnnnnnnnnnnnnnnnnnnnnnnnnnnnnnnnnnnnnnnnnnnnnnnnnnnnnnnnnnnnnnnnnnnnnnnnnnnnnnnnnnnnnnnnnnnnnnnnnnnnnnnnnnnnnnnnnnnnnnnnnnnnnnnnnnnnnnnnnnnnnnnnnnnnnnnnnnnnnnnnnnnnnnnnnnnnnnnnnnnnnnnnnnnnnnnnnnnnnnnnnnnnnnnnnnnnnnnnnnnnnnnnnnnnnnnnagacaagagtgaaactccatcaggattccccagagccgatggtccgatcatgtggcaggaagccaaaccttctggctgctcacaatatcaatcagcttccctttaatcttcaggaagtgtctcttgaac

SEQ ID NO: 134518 - DNA, 976 bp, Homo Sapiens
  misc_feature (73)..(83): n is a, c, g, or t
  misc_feature (88)..(148): n is a, c, g, or t
  misc_feature (157)..(256): n is a, c, g, or t
  misc_feature (836)..(836): n is a, c, g, or t
ggggggggaaaacccacccccctttttctctggcgccggggtttctcttggaaaaaaacctttttggcacagnnnnnnnnnnngttcnnnnnnnnnnnnnnnnnnnnnnnnnnnnnnnnnnnnnnnnnnnnnnnnnnnnnnnnnnnnnccgccaaannnnnnnnnnnnnnnnnnnnnnnnnnnnnnnnnnnnnnnnnnnnnnnnnnnnnnnnnnnnnnnnnnnnnnnnnnnnnnnnnnnnnnnnnnnnnnnnnnnncacaagaattatgtctttattggttcatcttagaattaaatcaacatggaagaaatatgtactttttgaattaaacaaaatgttttgataaaaatgagatacgtgtgtataaaagctggaaaactcatgtcccctgaaacttggtttccaccagatgagtttcaaattcagatactaaacacacatgaagaaataatcaaatgaattctattcatcctttccccaaagttttgcttacaattaagatataggtattatttgtatgccgaacaaacaaaataaattggaagatgtttggataaacagggaagtgaacacttcaggaactactatttgcagtttgcaggacaggataatcttctctaggaagaataatgtcaacatagcagcactatattcaccaggattccccagagccgatggtccgatcatgtggcaggaagccaaaccttctggctgctcacaatatcaatcagcttccctttaatcttcaggaagtgtctcttgaactccaatccatcacccttagaaagccggaagtcaaccaatattttatcatccatttctaacaaattcactnttgaaaatgagtttattgtttctcctatcagttgttgatatagtaaacctgattcatacaacttttcttgcattgatagccccacttctcacagtctctttcaggcattgatcagatttgcctgcatccaatttgttaaa

SEQ ID NO: 134519 - DNA, 926 bp, Homo Sapiens
  misc_feature (153)..(165): n is a, c, g, or t
  misc_feature (353)..(579): n is a, c, g, or t
  misc_feature (641)..(641): n is a, c, g, or t
  misc_feature (691)..(691): n is a, c, g, or t
  misc_feature (693)..(693): n is a, c, g, or t
  misc_feature (699)..(699): n is a, c, g, or t
  misc_feature (727)..(727): n is a, c, g, or t
  misc_feature (734)..(734): n is a, c, g, or t
  misc_feature (749)..(749): n is a, c, g, or t
  misc_feature (771)..(771): n is a, c, g, or t
  misc_feature (805)..(805): n is a, c, g, or t
  misc_feature (807)..(807): n is a, c, g, or t
  misc_feature (830)..(830): n is a, c, g, or t
atgagcccctgcgcctggccaaaaaattatttaaaagacatgacaaaaggagaggaaaccttttaaattaggggctggctcttgattgatttaatctaaggaaagaaattggagactagcaaaagctgggagtgagcaatgagctaagagttnnnnnnnnnnnnntgtaaacacttgaaattttaacatcctaaaagtgttactcagtttttgttccccagcacaatggcattttagctcttctgctagggatgaagattgcagacagcatcagaccctggggaatgcaacgtcggacctggaggccttctacctggctagctggatgggttatgggggttctgtgaacttcnnnnnnnnnnnnnnnnnnnnnnnnnnnnnnnnnnnnnnnnnnnnnnnnnnnnnnnnnnnnnnnnnnnnnnnnnnnnnnnnnnnnnnnnnnnnnnnnnnnnnnnnnnnnnnnnnnnnnnnnnnnnnnnnnnnnnnnnnnnnnnnnnnnnnnnnnnnnnnnnnnnnnnnnnnnnnnnnnnnnnnnnnnnnnnnnnnnnnnnnnnnnnnnnnnnnnnnnnnnnnnnnnnncacctcatgggtctgctgtgagaattaagtgaaaatcaatgcaatcctttggacatctctangcatactactgttatatctgatctggatacgatttggggttttcggatgnanggtcancaagccacagtgtattcaagcatgggantggtganatgccaacaaagcangaggatgaccaggtgatcccanacactcgtgcgattcttgctccaggcaaatccanangagtcgataattcgatcagtcanacgtcctgtggaatgtatcgccaaatcaacaaaacaacggacaaatgaagcgggggcaagaatgacatcaatatggttgccatgccttcatcggaa

SEQ ID NO: 134520 - DNA, 1980 bp, Homo Sapiens
  misc_feature (133)..(133): n is a, c, g, or t
  misc_feature (306)..(306): n is a, c, g, or t
  misc_feature (1608)..(1608): n is a, c, g, or t
  misc_feature (1655)..(1655): n is a, c, g, or t
  misc_feature (1671)..(1671): n is a, c, g, or t
  misc_feature (1707)..(1707): n is a, c, g, or t
  misc_feature (1732)..(1732): n is a, c, g, or t
  misc_feature (1770)..(1770): n is a, c, g, or t
  misc_feature (1890)..(1890): n is a, c, g, or t
  misc_feature (1911)..(1911): n is a, c, g, or t
  misc_feature (1918)..(1918): n is a, c, g, or t
gggcaaatatacgagatcataggcaaatatagttctgataatcgactatggcggatcgtgaggactagcaaggtcagacatgcgaggtgtaactgggcgtgagagaatcagtggagaagtgcgtggtgtaganactgatagaacataggagaacaacatggggtgtgtagcggaggtggggatggtcacgagagacgagtgaacaggcagaatgagaagaccgtgtgcgggcatattgggaatggcgagaacaaggcgacggaggtaaagtgagtggtagaaagcgaagacgcggcgaatcatganaggcgggaggactgcgggaggcacacacgaggggcggttgatgtttgtgggcgagacagcacaagacatgaggaaaatggtggggggtgggcggagcggatatacattgtgtagagaaagggtgtagaagtgcggagtgcgcaaggttcgtgcatgagacacaaagtacaagatgagtgacggtcataatggcgaataaaggagggaaaaaaataaagatagtatggaaagaaatgagggtaacagagaaatggcggaagggagaggtcaggtgacgtagcgaacgggaggtaggcgaaggaaagcgacaaatgggggggaaccaggtattgggaagaagggtataaggggggaaaacaaaacaaaacaagggggagtagacgttcaaagggcgaagtagtgggggatatggtgacagaccagtaaggagtaggaggttgtgttggctaggagagcgtagcgtgaggggaaaaaggacaaggtgtgtgagcggtgtaaaatggataaggtgggcaacgggttatgggaggaggaagagacgagcggttaaagggttagtgtgtcgggaagtgtagtatatgaggaggaggatgaaggcgatatagggacagcgaagggcagttaatggggttgtatggggcgaattcgtggttttttttgtattagaaatgacgttgttactaaaaagccacacaatatctcatttagagaatatgcttaacaaaatatacatcttaaaaattcagcactccagaatgctttttcaggtgtttccatttgagaaataaagaataaaaattggtaataattatagacacaacttcatacaataatctggataatatgcaagaagcatcatgttgactttcagatatttctctttgtggctaacgaaccacacatcaaaggatggaccaaagttcagatgtacacagtccagggcacctccgagcacagtggcagtgcccttggggattttctttccctcagtgagagacacgggggatggggaggagcccaggagtgtcaccagaaagtacacaacccagcttcttacccagcctgctgccatcatcaactatcaaaccatttgctcctctttgcaagaggtgctcctttagaaggtcccaataatttctgcttatattgttcgaccagctggttgaagcgggtttccgtcttatttcccttagcttttttcctagatacctgctcggacgataattgctgcttctcctgcttccactggtttatctgtggctttggctttttgggatggacgggcttcactttgcctttgtnccgcacctgattttggggctcggtgtgaggggagcgcaggaccttcntctcttctttcatcangcagctcacctgctcacttcagcctggtctggaccnggtcatgaggtagagccgccttctnctctgctctgggggcacttgctttgttctctgtgtggngttgagctgcctctgttgctggtctttgcaggtctggtgcccttctgaggctcacagtgcaggctggtctcatttttgcagctggctggatctaatcctcattttagtttctcgatctcnaagaactcactatgtccttanagggcanattctggatgtgtgataggcgaggctcaggcatgtctgtctggatccgcaaggtatcaggag

SEQ ID NO: 134521 - DNA, 418 bp, Homo Sapiens
ttttttgctcaactaaccaaggtacaaacatggctacgacctggcagaaccatgccataccaaagctgtatgtcctgcagaactcacctgctcggacgataactgctgcttctcctgcttccactggtttatctgtggctttggctttggggcatggacgggcttcactttgcctttgtcccgcaacctgattttggggcctcggtgtgaggggagcgccaggacctttcttctcttctttccatcaggcagctccacctgctccacttcagccttggtctggaacccggtccatgaggtagagcccgcctttctcttctgctctgggggcaccttgctttgttcctctgtgtggtgttgagctgccttctgttgctggtcttttgcaggctctggttgccccttctgaggctcacca

SEQ ID NO: 134522 - DNA, 1035 bp, Homo Sapiens
  misc_feature (789)..(879): n is a, c, g, or t
caagattaagtgatttatttgtttgcttttctctcggtctgacatctcacactgtcagacacacagataaatataacacttgttcctccatttttcaagtgataagcagtgtgccgaggccacaggtgctccaatggttctggtgaggtggtttcaagatgtcacttggaatctcctcttgaaagtcaaagttgtcctctgaaaagatttaggcacatattgtgaacctgtcaaaatactttgacctgtccatgtgtgagcagcaaattccatttgtgtcaatgaactttttcgaggcgtatccgactgccggaacgtgtgggttgtgctgggccttgacaaccgttccagggtggctgttctttctcgaagacgcgatcgttctgtaccgtcaggcatggcactcaacacacggttttgtagatgccttcctctgtaagaaacaaggcggcatccaggaagtgctgtattctgccccctggtctccgtgactagcggggggaacctgctccgtgacgtttgaaccagtggggaagccatgtggtccacgccagtcggcagttttgttccccgaagaacttcgtcactatagatgttgggagtttttagtctctgtgaatctgaagcaagagaaggcagcctccacggcactggtgttttctttgcagaaggtgataatcatgagtgtctgagggccgtctcactctgtgcggtgcggaggagagagccctgctcctccacccgatgctttgtcctcctcgtgacgaattcttggtctcgaggggcatnnnnnnnnnnnnnnnnnnnnnnnnnnnnnnnnnnnnnnnnnnnnnnnnnnnnnnnnnnnnnnnnnnnnnnnnnnnnnnnnnnnnnnnnnnngagccgggagcaaaagtgtaaatgctggtggtgctactgatggactactcacattattgcgttgcgctcactgccgctttcagtcgggatctgtcgtgcacttgcatttatgatcggctcgcgcgggagaggcgttgcgattggcgctctcgcttc

SEQ ID NO: 134523 - DNA, 1580 bp, Homo Sapiens
  misc_feature (499)..(510): n is a, c, g, or t
  misc_feature (763)..(774): n is a, c, g, or t
  misc_feature (1180)..(1180): n is a, c, g, or t
  misc_feature (1187)..(1195): n is a, c, g, or t
  misc_feature (1244)..(1244): n is a, c, g, or t
  misc_feature (1260)..(1260): n is a, c, g, or t
  misc_feature (1269)..(1269): n is a, c, g, or t
  misc_feature (1447)..(1447): n is a, c, g, or t
  misc_feature (1489)..(1489): n is a, c, g, or t
  misc_feature (1523)..(1523): n is a, c, g, or t
ggattcccgggatatcgtcgaccacgcgtccggacaccatcttgatgccagtactggattccagcattcagcaggtgcagatctcggctttacacaatttgtctttacctagggttcagtcagtaatttctgctttttagcagggccagtgcagggtcagttaatgctatagttactgtatagcaaacagtatccttttttctccttcccctagcctattgggctttgcagatatctggagtgttttaaagtcaattattttaagcagtttgaggggatgtgtaggagtggagcatgaaacagtttataaggctggggctgtattatcagcacagcaaattaaagaatgaaagaagtacttctttttacatttcagctccagcagccagctatttaaaaaatatttttaaatatcttccccaaagtttaagatgtgggaccatctacttgtaagaaacagtggcttatttcttcatttctcagtaatcattgtaaaccnnnnnnnnnnnncttctccactctaacaaaagtaaaagaacaaaacttttgctgaggtcttggactccactacttgttagttatgttggcctggacagatggcaggtctgtcggcagttcctcagtctgtaaaatgaagattatcattcttgcctctccctttgtcacagtgttgtcgtgaagatcagatatgtatgaatgcagtcaaataaactaaaaactaggaaagtgttaactatcgttgcccaccgaatttgaggtagcnnnnnnnnnnnngaatgttctggtacatgaacagactgagaaggcctttcgacatccctgaagctagtctcctgtctagactaaaaatatccttgaaagaatagtagcaaacagtatgcagtactcctgtgttctaagttcttttatgttttagtttaccctcacagcagccatagtgttaagtcattatgagcttcatcttaaagataagaaaactgaggcaaggggagattaacttactgccaaatttcaaacagttagtagtatttgagaccagtagtatggctctaatcttacccttagccctcccaaccattatgctgtactatctacccataaatacctccaggaaacattcccctcttggtaatttgtccttctatagaagcttcaaagattaaatcaaattaattttcanaaaaaannnnnnnnnagaaatgttattttccctgtgatagaggatgacttcccagtttcaccanagtctgtttatatcancacacacanaatgggataattctgagtcactaggcaatcaatctactgtgggtttactatgtaagggtgaaattaactggaacgatgtttgtttgctatacttacatagtcaactttacaggccatgacataattgcactctttgtatttgttgtaaatgctaaggagttttctaaaatttgtaaangactgtcagagatctggagttgatgattatccagatatgtanacctgcaacctttggtctttagtcgggttgtaangaagattgctacaaatttgtatgtcaagtatcatacgacgttagtcattttatattt

SEQ ID NO: 134524 - DNA, 998 bp, Homo Sapiens
  misc_feature (716)..(716): n is a, c, g, or t
  misc_feature (800)..(801): n is a, c, g, or t
  misc_feature (818)..(819): n is a, c, g, or t
  misc_feature (833)..(833): n is a, c, g, or t
  misc_feature (846)..(846): n is a, c, g, or t
  misc_feature (857)..(857): n is a, c, g, or t
tttgcaaaacaggtttacttttttatcaaacaagattatcacataaaaaatagctacagtgctacggtagtatataaagtgctcaagtatcctgaatgtaaccatgagtcatgacaagtccctccctgaacgagagagagagggcgggacttctgcctggctgcttgaagaaaaatcttcgcttgggctgatgaacgtggcctgagcgggggctgacgaggcacccgggttgtcgtcctcagacaggggcgtgttcttgggtgctcccccagattctctgcaggcactgtcttgattgaaataccaccggctggggggcgccatgccctgggtctcttcccagacttcctggtttgccaaggctgcctctttgcttgcctctgcggagagttccagcacctgggcaaagctccttcggagctcaaggtcctttttcgccgtcacgtccttgagttcgctcagtaagtccagcacctgcacattttcttccgaatcaccaacatcaagttctcccaggaggcgctgagtggtcaccagttcatgctgcagggcgtctaagagctgctgcccatctccctccaggtggatggacctcacgggcagctcgtgcctggtagtgtccagggccgtggcgaatgtcctgtattgctccttgaagcgtgtggccactgcctcgaaggggctgagcatctcgatctgggcatccaggacatctngcagctcccgcttcctctgagagaggagaagctgcgcttcagctcgtgggctttttctgtagcttctcttctccttacacatanntataattctttctgccnntcttcaactcagangattgtctcatcntacggatatangtcagcatatgtctgaactcatcattccatgctcaataatcgggtcttttcgagggagaatgagtgaccaggttctgaatgtttgcactgggctcttttgcagcttgcatatacaaaatcagtagtgactggcagcctcag

SEQ ID NO: 134525 - DNA, 997 bp, Homo Sapiens
  misc_feature (487)..(510): n is a, c, g, or t
  misc_feature (543)..(566): n is a, c, g, or t
  misc_feature (618)..(827): n is a, c, g, or t
gacacgggaaacaggaggatttatttagatgtacaccggctcagtggatttgtatctgaaaagctgaccattgaacaaagactgagtgtggtttttataggcaaacttacagaagcaaaacaaaagcagttaatgatacagtcacaggtcatgtaatctatagcataactgctgacttagcataacttgtggctttgcacagctgttggccttgcagctgtgtcaaaagaaaaacagagtctacaaatcttactaaatacaaccattggcaaacagtcatatttaatggttcagaaaaggagagacagtaaaggaatttttcttttcaactttgctccggaggaggctgtctggagcccattcctttggcctcgacttttcagtgttataactgtccttgaagtaagctggctaagcagaggaaaacttgttcttgttttctttttaacccttaccccctgccacataatcacatctttacacttcnnnnnnnnnnnnnnnnnnnnnnnnaaagatgggaagtcggagtctcgctctgtctcnnnnnnnnnnnnnnnnnnnnnnnngcctacagccgcgggcgctccaacatcaaaatggcctcgtgccgaattcttnnnnnnnnnnnnnnnnnnnnnnnnnnnnnnnnnnnnnnnnnnnnnnnnnnnnnnnnnnnnnnnnnnnnnnnnnnnnnnnnnnnnnnnnnnnnnnnnnnnnnnnnnnnnnnnnnnnnnnnnnnnnnnnnnnnnnnnnnnnnnnnnnnnnnnnnnnnnnnnnnnnnnnnnnnnnnnnnnnnnnnnnnnnnnnnnnnnnnnnnnnnnnnnnnnactgtattatgatcggcacgcgcggggaaggggttgcgattggggctctcgcttcccgtcatgactccggctcgtcgtcggtgcggagggtatactcccaaggggtatacgtatcaagatagggataccagacaactggcaagcacaaagcagacgtaaagccttgtggt

SEQ ID NO: 134526 - DNA, 1081 bp, Homo Sapiens
  misc_feature (130)..(150): n is a, c, g, or t
  misc_feature (963)..(997): n is a, c, g, or t
aaacaactttcccccataccactccttatcccacacccccatcctctatcccctatcccctatccttcatctctttgtcactgttgctcactcgctctctcactctcatgtgtgtgctctctctcacatnnnnnnnnnnnnnnnnnnnnncccacctacataatttcttctcttacacctttaatataaatatctgagttttggttcagttttgcaaacatttaaaaggcaaacatggtattttgcttgtttcagcatttaataaggtagtgcatacttctttcatatggaaggaaaacatcatattaagttaatatttaaacgtacacaattataatttgccaaaaaaaatcaagatgataatttcttaaatagtaaattgaaataaatgatattttcctagcatgcttgtcattcagcaataataagaaactgagataagaatgcaggcagttgaagttcacttcagcctgagtgcaagtatacacaaaacagcaaaaatattacatagaaaataaatgttgtccattggattgagtatggtgctaccatttgtcacagtgttcatattcatagttgtggctatctttggggtcactgctgtattcagacttgtcttggaatttggagtcatctagggatttgaggtcattttgagatttgggcttgtcccaggattggtgctaccatttgtcacagtattcatattcatagttgtggctctttggggtcactgctctattcagacttgtcttggaatttggagtcatcttgggactcgaggtcattttgagatctgggcttatcccaggattggggttcattctgggattggtgctcttcctgggattaggtctggtcccgggattcaggcttgacgcaggattggatactgccatagaatttgaggttcccggccgtaatggccgaattcccgggcatatgtccggtaccgtcgactgnnnnnnnnnnnnnnnnnnnnnnnnnnnnnnnnnnncgccgcttcctcgctcaatgactcgctgcgctcgtcgttcgactataacgcgggagcgccctatagtgatttatacatcctgtg

SEQ ID NO: 134527 - DNA, 1447 bp, Homo Sapiens
  misc_feature (33)..(33): n is a, c, g, or t
  misc_feature (86)..(86): n is a, c, g, or t
  misc_feature (617)..(634): n is a, c, g, or t
  misc_feature (666)..(1241): n is a, c, g, or t
tgtggaaatggtgctgccagaagattcaatgtntgaagatgccagtgtcagtgaaggtagaggaacccagatagaagaaaatcctntggaagaaaatattctggcgggggaagcagcatctcaagctggtgacagtggtaacgaggcagccaacagaggagatggttcagatgtttcaagtcaaacacctcaaacctcaagtgactggcttgaacaagtacatttagtgtgaactgcacacatctgggctctaaatgaattacaggtacagatggtatgctaggtggagtatgcttgatagagactttgattcacttaattccaactcagtgataaaccactgacattagggttgaatacagagaagttcccttgaatggtagcttcattttttattttaaccttacagggaatttcctttgtacttaattgaatagcttttcccctttttgctgacaaaaagaagagcaagagaaagagaaacaaaaatgaaataaataagttgtattccacactctaagaaaatgcagtcctctatttagcctaggcttgacaatacttaaattgaacatttaaactaaaggcttactccctaatctttgggtggctttcctttnnnnnnnnnnnnnnnnnngcctacagccgcggcctcgtgccgaattcttnnnnnnnnnnnnnnnnnnnnnnnnnnnnnnnnnnnnnnnnnnnnnnnnnnnnnnnnnnnnnnnnnnnnnnnnnnnnnnnnnnnnnnnnnnnnnnnnnnnnnnnnnnnnnnnnnnnnnnnnnnnnnnnnnnnnnnnnnnnnnnnnnnnnnnnnnnnnnnnnnnnnnnnnnnnnnnnnnnnnnnnnnnnnnnnnnnnnnnnnnnnnnnnnnnnnnnnnnnnnnnnnnnnnnnnnnnnnnnnnnnnnnnnnnnnnnnnnnnnnnnnnnnnnnnnnnnnnnnnnnnnnnnnnnnnnnnnnnnnnnnnnnnnnnnnnnnnnnnnnnnnnnnnnnnnnnnnnnnnnnnnnnnnnnnnnnnnnnnnnnnnnnnnnnnnnnnnnnnnnnnnnnnnnnnnnnnnnnnnnnnnnnnnnnnnnnnnnnnnnnnnnnnnnnnnnnnnnnnnnnnnnnnnnnnnnnnnnnnnnnnnnnnnnnnnnnnnnnnnnnnnnnnnnnnnnnnnnnnnnnnnnnnnnnnnnnnnnnnnnnnnnnnnnnnnnnnnnnnnnnnnnnnnnnnnnnnnnnnnnnnnnnnnnnnnnnnnngacctggcgcttaccggatactgtcgctttctccttcgggagcgtgggctttctcaactcacgcgtagtatccaattcggtgagtcgtcgctcagcgggctggtgacgaccccgttagccgacgctggcttatcggtactatctctgagtcacccgtagaccactatcgcatggaaatcatggtaaggataccaaggagtagtggg

SEQ ID NO: 134528 - DNA, 1014 bp, Homo Sapiens
  misc_feature (334)..(349): n is a, c, g, or t
  misc_feature (693)..(742): n is a, c, g, or t
  misc_feature (752)..(752): n is a, c, g, or t
  misc_feature (792)..(792): n is a, c, g, or t
  misc_feature (849)..(849): n is a, c, g, or t
  misc_feature (855)..(855): n is a, c, g, or t
acagaatatttgataaactttattgaaacgatttatcccagtatatattggtaagttctaaatgcttccagtacatagtcttcaaaagaaacttcactgtgctgttatgaatttggataatattttgtattatttaaataccagtgttaaaattcattgcttttatacttataaaaatggaaaaatagggcaattacaatgttggatattttagcattagaaaaaaacgtaaatacctgatttcatgtgacaatgaatgacattcaaatgattgttagaaaggtaattttcaagcttttaaatgtaactaaaaccaaatataataattcatccnnnnnnnnnnnnnnnngacatttgaaattacaaaaatttttatgttatacgtgtatatacatttgaaaaaacaattcttaaatggattgatctgaaaatttgaaaccactgaatcaaaagcttatctttctgagtagaggtgaaatttaaacttctaaaaactgctatatacacccaccaagaagcaccaataattcattcttaaaccttactttctgaatgtatagactataatatttgaaacattttaggccaattaattgctttgcatcaattaaaacatactgagtgtagaaaagggagtaaaacctcatatatatagattctaagaggtgtctgtcttacgaatgtataatttgnnnnnnnnnnnnnnnnnnnnnnnnnnnnnnnnnnnnnnnnnnnnnnnnnnggtggttacnaggtcaggagttcgaactcagctccacatgctgggacaangtgtgagcactgcaccgggcatacatctattttatcagctctaacaggtgtctagtnagacanacacacaaaaacatttttggttgttgtttttggacatccatcctgttacagctggagatggagataagtcatgtgttactcccagtcagcattccacttaatccaatatggacaagggtcgggattaatttttaaagggctgagtttcagggaccatcg

SEQ ID NO: 134529 - DNA, 975 bp, Homo Sapiens
  misc_feature (763)..(763): n is a, c, g, or t
  misc_feature (790)..(790): n is a, c, g, or t
  misc_feature (808)..(808): n is a, c, g, or t
  misc_feature (878)..(878): n is a, c, g, or t
  misc_feature (880)..(880): n is a, c, g, or t
  misc_feature (951)..(951): n is a, c, g, or t
tttgggtttgagagtttaatctgtgctctggcgcccacagtgctgcagcccctcatgggccagagacaggatgcacggggactcccagcccctacccggcaagagaggcatcactgaggctgcatctgccatgcgctcctggtgtgactgcaccctgtcaggccagacccggcttgagccaacttagccaagccagcgtcagtgtcaccagcctcatgggtggagccaccctcatgctgctctgcagcaccctctgaacccgatatcccaggcctgggaggtgctgaaggctcaggacgcctcttattgctctgaagtctttgtgaccaagtggagtgctgtgactgtggggccaagagagaagctgccaggtacagggaaaggcgctggtagggagccagccagaaggtgcagcatcccgggatggccctgctgagtctgctgtcaggcctgtgaaaggtcagcagagccaaggagcaggcaggagaggctggagccccgcccagaaccttggcgagctggtggccctgccaagtcctgctggccactgaagagggaatccagggcaaggcaggtgacctcctgggccaccagtctctaacccctaccccagcctagggaaggggaggacaggaagagactggatgctttgtaaaggacttcctgttcttggggacataactctcgtcccctcccagagccctggatgactgacaggcattccttggcacaagcttgagcgcgctgctggtgcaggcactgnagacagcatccttggcacaatgctcancgcctgcggtgcagcaanagtcctcatggatttgctagaacaacaactatatcactaatcaatcatgctgaagtgtcaagtaactgtnanatgtctgatctgatgacggagtattgaggtcacaggatgctcgcatctgcccagcatccaagagcgtatcnacgcacgtctttgattacccatcc

SEQ ID NO: 134530 - DNA, 980 bp, Homo Sapiens
  misc_feature (428)..(437): n is a, c, g, or t
  misc_feature (526)..(535): n is a, c, g, or t
ttttctcattaacaaagcagtcaattccctttatttttaaaattttatgtacacatatgaatgatctgtataatgtacattcaatatagaaagctttatatatttgatagtgtatagaacatttcacaattacactcatcttttacataacatcttgacatccatttttaaatttttttgcacaagctccttttcattcaatttggtaaagccagttatacatactaatgtgtactgtgagctttcagaaggttaatgattgaggatgccagtgaagggtgcagggacaaaacctaatagtcttggatggtggggggaggatggccacgcagacttgatgcaggagagggaaatattctttcctggggaaaagtgacttagcccaatttttgttgactgtagctcaaccctacagtcatgctagttcnnnnnnnnnnttacaaaaactaggaagaaagttttgtctttttgattcacagttttgtaaacagatataaaggaacaaatgtgcttacatacaccaagnnnnnnnnnnttcttgtgtacccacttatgttgatccacagagtgctttcttataatgtgatacaattaggatcactgactttttttcctaaaaatatatttatagaaataggaatatcactgtcatgaaaccaggagaaaggcagtaagaggttgcttcaacgtatcacctggaggaatgtggacttggcactggcctttcaccgtttattgtctctcgggaatatttcaagtctgatagccaagtcccctgcctcactggccacacgaggtggcagggtacaatgactgatgtaatgtactgcggtagggaccaacactcaaggtcttgtaggatctgttgttgtgccagaatgacaatcagttcggtcttgaggatcacctgaaaaggaaggttcataccgttcccaatggaactcgggcatgcctgaggctacactgacttatggcgcggg

SEQ ID NO: 134531 - DNA, 566 bp, Homo Sapiens
gaattctgggatgtgggaagggttgtgggggtgaacttggtcagcatgacgggcctctggataagctgaggagctgcgagcatgggaggtggtgctggggcaataggaatgttattctgggccacaggcttgggtcgaacctgtggaagaaagtttggacgtggagtgagtctaggaggggggataaactgtggtactttgatgggctgaggaggtgttgcctgaacctgcagagtgactgtgttttttgccacaatttggacagcctctgccccaggcccagtgaccttactagacgtctggaggttgactggtgtgttctgcacatcagtgctgagcacagccttctgactgttgatggcggtcaccatagcaatggtaggtctctggcccaccgcagaggcaggcatggtcgcagttgctgctttcaagacgagaggtagtgtctttgtggtaatcatagaagctgtagttacagtcttctgtgaagcagtcaggttgggagaggctgcagctgactgctgggcgtggtggtggtggtactgatgctgttgttgcagttgccg

SEQ ID NO: 134532 - DNA, 2370 bp, Homo Sapiens
  misc_feature (58)..(79): n is a, c, g, or t
  misc_feature (1452)..(1452): n is a, c, g, or t
gtgccaagctaaaattaccctcactaaagggaataagcttgcggccgcctgctcaggnnnnnnnnnnnnnnnnnnnnnnaatgttaacattttatttaaaccagtacaagcaccatgcttaacaaaagactgtccaaaataaacatgcaatatgaactagcagagactgaaaccacagcttaaggagttgtgtcagttgttggttttgttaaacgatgacagagaactgttaaaattcacaagactaaaccattaatgtttcaagcctcctgaatgagattatcttggaccatctaaatcagtgggaactgccctggcatgttaatgatctcaaacaatattcaagtaattatatttatatgaattataatccaaaaagcaataaaatacaatttctatcacaagtttactgtatatgagcactgatttgaaatgtcaaatggcataataaaaacaaatttctcaagaatattcagcttgggagcattggttttaagcggtctagaagattactacattcttccagaaatacaaaataagatttgtccagaaatgtttgaaacacatcctcacaaaagttgtaatggctcaaactctataaattccagtattatcagtctattgaacaaatagggaaagcaaccatagtaagaatacttgaattgatagaatatgagttactctctacttccaccaaatatcagcatttaaactcttatgaaaatatctattcatcactagtccacatatggattaatgacattgctcaggttttaaaagcagtccaaacattttttaagtacaccttccttaatatctatatgggttggggggaacagccaaatttaatttggcaataaactcccctaactggaaatttttagctaaagtgtcagacaaggatacagtttatggctacatttgactcctgaaaataggagataaaaaaggagggaaaagtgctgacacacattttgccacacagattatttagtaatgacagtaaaaaatttagcaacacacacttaaacaagagtatgtttaactgcactaggcatttagtaaacttttagaactagacaatttgaacattttagaagtcaattaaacaaaaacagtcaaccaacttttttcctaatataattgcgtcaataccagaacaaagtgatcactattcaaaactcagacattttggaatttcagcatagtaacctgagaagttttcttcgtatgtatttttgttgtcatggaaaccacactaaataatactgtgattaccagttggttctatttttgacattagatgctatgcagaactttatgcaggggccaaaaatttcaaaactaacactgacttagaagcccacgaaggaggatcccaggaaaaaagttgctgctaaaaaggactcagatttaaggctgaatgggaatggttgtaccagaaaggataancggaatgtaaaaaactggaattatgaaatctggagtttattatttggggaaatggcagaaaaaaaagacagtaaatacgaaacatacttgaaaagaacaatgcaaaatttagtaagatgaaagggaaatctatataaatgtttgagaacattttagagcacgggatttgtaaatttccccataggacagatggaataaaaatgtcctactgatcctctaacctcaatctgttgtcttgccaaaaacatgttattaattaggagtcagacaagctcaaaaaagcatggtttatcacagctctttgctcctgttaaagacagtagcggaactaagagtgctaacgtatggcaggtcaatattatctgacattatggaggacctccaaatttaaaaataagcaaaactaaaacatgcaagacaaaataaggaacttcattaaaaaatacattcttgcagcactagtttctcttactgctgcaaaacaggtgaaacaaaacctcatttccttcattcaaaaacattaaaaacactctccactcacttggattacatgtgcattcctacagaattatatgcatgttattctccaatatcaaaatacctgtttaaagaatttttaaacttcctgggtgagttttctcttctctctggaaattggaataaagaatcttttccctccaagaaccaaaacaaacacctactctagcacttcctcatctccaactttctattgcttcctgacttctaaattagtgaagccaaacagtgtctgggaacagaagatgttctattcaatatcgcaaaaattccaactatctttacttctcacagaaacctcaaaaataaaatgcaaagaacatatgaatggaaaaccggacgcgtgggtcgacgatatcccgggaatccggaccggtccag

SEQ ID NO: 134533 - DNA, 991 bp, Homo Sapiens
  misc_feature (634)..(706): n is a, c, g, or t
gctatctaaggacataactttattggaaacaaagagtggggtgcagaagatggctaggagtcaggctctgtgggaggtggtggcttctcatcatcagggggacaatcgatgaagtcggccagcatggcagctgtgtcatcctgctccttttcctggagagcttcggcctctgtctctgtctccatctcttcttctgcaggtgtctctggtgggggctgcaccttgtcactcccatcctcagtctcctcttccaacagggttgggggagcagagggctctttttcaacaagctcctggggagggggccctgccgcagggctttccccttccctctccacctctccctgggaggggagcgcttcaggggccagggtgggagctgtgtcagccccacgctcctcctccgtccctggctcctccacttccaaaagcagcccgggttcgggttcgggttctggctgcacctttgggggagactcagggggagggagagctggaggcagggttgggggtggaggtgcacttcttctacctcccctcctgctgtgccaaactccaggtcttccacctcttccagttcttcttcctcctcctcatcctcccctcttgccgaattcttgggctcgaggggcannnnnnnnnnnnnnnnnnnnnnnnnnnnnnnnnnnnnnnnnnnnnnnnnnnnnnnnnnnnnnnnnnnnnnnnntcacagttccaacaacatacgagtcgtggagataaagttggaacgcttggtgggctaagaggtggactaactcaattaattgggttgcgctactgccgcttccactcgggaacctgtcgtgcagctgattatgaatcgccaacgccgtggataggggttgcgtttggcgccctccgttctccccactgtcgctgctcggctttctgtgcgggagggttagtcacctaagggtaataggtttacaaatcagggaacgcggatagaattggcatagccgacacgcac

SEQ ID NO: 134534 - DNA, 1986 bp, Homo Sapiens
  misc_feature (62)..(62): n is a, c, g, or t
  misc_feature (88)..(88): n is a, c, g, or t
  misc_feature (98)..(98): n is a, c, g, or t
  misc_feature (1795)..(1916): n is a, c, g, or t
ttaacacagcttcccactgtcctagaattcctctaaatggccagctatagctaccatatccntgataagcatttcaagagttgtgtgnctgagccttntaaaagataactagtttataacctatgtctccttatgtggctacatcagttactcgtggtcccaatgaagtataaaagaggatataagctgctgaagatttcacagaagaaacggagatatcagaaacttcatgatcatcaaacttaaaccaccgttgtcttgctgcatttttacaataggctgtgtagtggcctccatccagcccaccgtagtgatttgaaacagaaaacaaattatatttcttcaaattgttctttggaccaataacatactgtgacaagtcaagattttctaacgggaagtccacagatgtctgtaatttttgtttccacctgccatcgtaggaaaaacgtttcagatgcactaaaagcacaggtggtaacttccagatttctatcttttttagagaatcccgtcgagctctgcaatgactgcagtaaaatctgttgttatctgtgagtttttcttctttggaaaataatctaaggcaatcctgtaatgtacatttacttgtggatgctagtggtagagacaaatacatgaaggcctcaaatgtcctagactttttgtgacatgtgaggcactgtactgtagatttgaattgaccctgaaaaagtgcaacaataatagactcattgagctgcttgtgtttctgccaggcatgttctgcagctttaaagtcatcgagatgatcattatttttttctttatatctcttccgattatcagctttatttagatcttcatggagaccatccattaggaacagaagcaattcttgtgaatcttgctgactgtatcctgcaaactggtcattgatcttcccaatggtgattttaaagtcctttggactgatatatctatactgtcctgtccacagggctttcatgattataccaaattcttctgccacttcacctttatgccccaacaaatttgacctgttaatatcatcctgataacagtttcggttgaaataatcagccaaatgtggagcgttacataggcactgcaatattgagttcatataacaagtatttcctaagttacgaagtccagtaagagctggtccagaacctccaaaaacaggattgaggttccgaatctgagaagcagaaagccttgagatctcagctttaggataacatgttggcttgttttcccgattaactgttggagttactgttggcttcctcttctcttcctcttgaatagcctgggttatatctggggaggagtaggagcgcttcagtttggaaggttccctatcccgctcagcaggaatctgtggcttggctttatgagttggaggggtggaaggaggtgcagatgaaggagccatttccggtgggtacatatgaacagtgttggtgggtgaatgataataacgaaaggttccagtgattgggtcaagaaacttggcccagcctgaaggcagtcctggtacgatcctccccatttcttcacttcgtgctcttgtcaaaggttctcgttgagccttgcctgaacctgaatcccctgtcacagatgtatggggcacatctcctgttgactttttctgtatttctggggttggacaccttttccccctatcttctacagatttcttgggatcagaagtttcatgttcacttttactttgtctttttactcctgttatttctttgcccctctttgctgaggtttctttatcttnnnnnnnnnnnnnnnnnnnnnnnnnnnnnnnnnnnnnnnnnnnnnnnnnnnnnnnnnnnnnnnnnnnnnnnnnnnnnnnnnnnnnnnnnnnnnnnnnnnnnnnnnnnnnnnnnnnnnnnnnnctcagtttctctttctgttcctcttgctgcctttcccgaagttctttttcttgtatgtttttccagtaag

SEQ ID NO: 134535 - DNA, 773 bp, Homo Sapiens
  misc_feature (696)..(714): n is a, c, g, or t
gtttagtgtgagacttaaaaccagatttatttgttgttgtagagagatttccacagaagttgtgttttagggacctccatcatctttgtgggggtacagatatttatgtgtaaatatcattttatgtgatttccaaattttcgagggaaacatttcaattcccagttcaacaaaaggttaaatactaattgactcaatgaccaccttcaggaaagttaaatagtaaattaggttaaattttgactggtgcttagacatttcctagttatattaacttaagcagacagcagcacattaacctgagttacacctgtgaggaaatgaccttctaaatttgattttgtttttcatctccagggccttaataagagtgtgttaacacacgactattttacaatgatagctctaaataatttattttttatttcaagaaagagaaatacaccttagaaaaacaaaacccaagattttattttatttttaaagccatatttttgtgctagtagcatttagattattccgtatgtgagatccgtatcagcatttcattacctgggtttgttctaaagaagatttatttttgttctgtgaataatttttgacagttcttgtacatgtacagatatagatacgtttgaggtcttttattgatattcctacaaagaatacaaataaactttaactttaaacatttcnnnnnnnnnnnnnnnnnnncctgagcggcggccgcaagcttattccctcttagtgagggttaattttgagcatggcac

SEQ ID NO: 134536 - DNA, 1296 bp, Homo Sapiens
  misc_feature (146)..(632): n is a, c, g, or t
  misc_feature (665)..(682): n is a, c, g, or t
ccgtgactatagaaacaccacgttccgacggagaaagcgcacagtatcccgtagccgccggctcgaacagagagcccaggaggagttccaggggaaacgcttgtatcgtatatcctgtcgggttcacccctctgactgacatcgannnnnnnnnnnnnnnnnnnnnnnnnnnnnnnnnnnnnnnnnnnnnnnnnnnnnnnnnnnnnnnnnnnnnnnnnnnnnnnnnnnnnnnnnnnnnnnnnnnnnnnnnnnnnnnnnnnnnnnnnnnnnnnnnnnnnnnnnnnnnnnnnnnnnnnnnnnnnnnnnnnnnnnnnnnnnnnnnnnnnnnnnnnnnnnnnnnnnnnnnnnnnnnnnnnnnnnnnnnnnnnnnnnnnnnnnnnnnnnnnnnnnnnnnnnnnnnnnnnnnnnnnnnnnnnnnnnnnnnnnnnnnnnnnnnnnnnnnnnnnnnnnnnnnnnnnnnnnnnnnnnnnnnnnnnnnnnnnnnnnnnnnnnnnnnnnnnnnnnnnnnnnnnnnnnnnnnnnnnnnnnnnnnnnnnnnnnnnnnnnnnnnnnnnnnnnnnnnnnnnnnnnnnnnnnnnnnnnnnnnnnnnnnnnnnnnnnnnnnnnnnnnnnnnnnnnnnnnnnnnnnnnnnaagaattcggcacgagggccgcggctgtaggcnnnnnnnnnnnnnnnnnnctaaccatgtaatgtgctacttttaatttattaaaatcacaattgagggtttttcccaaagaattttagttcttagaaatgacatctgtatataaatgttctaactcttattcacagtaggctctaacatgaacggcaaaatcagacatcaacagtagcacatcatgttactctatacgaaagcacagatttaggcactttatcaaagaaaaatgtttagaaacaaatgaggttattgagtcgtctgtcacactctgcaaaggactctgattccctacttaaatcctttaaaactgtcacattaaatggaacatataacccctcgacaccagcagtactctttcctaaataaggaaacaaaacagaacccctaactttacagaccacataaaacctgacagacaccaagagttctcttactgatgagtaagattcaagtcaaagaaattcaaaactacttaggatttcaagtgacattttttctattctccgcatttcctgcatagattttggatttacacaccctggcttcctggctacagacatctgagttcacaaagcatattttacctttaacatcattttcattatgttaaagcctcgtgccgaattct

SEQ ID NO: 134537 - DNA, 1732 bp, Homo Sapiens
agggtttttcccaaagaattttagttcttagaaatgacatctgtatataaatgttctaactcttattcacagtaggctctaacatgaacggcaaaatcagacatcaacagtagcacatcatgttactctatacgaaagcacagatttaggcactttatcaaagaaaaatgtttagaaacaaatgaggttattgagtcgtctgtcacactctgcaaaggactctgattccctacttaaatcctttaaaactgtcacattaaatggaacatataacccctcgacaccagcagtactctttcctaaataaggaaacaaaacagaacccctaactttacagaccacataaaacctgacagacaccaagagttctcttactgatgagtaagattcaagtcaaagaaattcaaaactacttaggatttcaagtgacatattttctattctccgcatttcctgcatagattttggatttacacaccctggcttcctggctacagacatctgagttcacaaagcatattttacctttaacataatgaaaatgatgtatatggcatgaagagtttactcaattaagtcaagagttttaaagtcttctctgatcagaatttgctatctgatcagagcaggccacccaatcacagcaggtgcttggaggggagtggaatctcagtagagttgatgactcaccaagtgtaaatgggaaaaagcaacacagtcacatttccatgtaaggagattttatagtaaacatgaatttgtcagtgtccagtattaattagaaaacatctgtcttcttacttgaagcctattaagcagtaattctttgaccacaaactggtcatgtggcagaccctttctagaagacactagaatgtcatccggtgtgcagttgcctgagaccactcccaccccaggagctgggcaaagagctttccacgtccacctgtccccccacagcgcgtcactgctgccccatcacaggtcttctcttttattcccagctcgattttcttccttggaagaccgagatttcagatctccttccttcttttttttgcccttgtcttgctttgttttatttttctctttgcttcctcctcctttgccggggtacacctggccctccagagttacatcagcacacctgtcttgaccgaccaaaaagtccttgatctcccaggcgtagctcccatcgcgaagcatgaagatagcacggtctgatcccacaatgaacctctggacgtcatagttggcattgaaaaggctgccctgccagaggctcgtaatttcctctgtctccttctcagtagggcttcctgatacagtgacaaacatcatgagagtcttcccttttttcgtcattttcaatatgctttcaggcttgcttgggtctatctttgagaagtcgacaggtgctgaaggtctcttgtgctctggaagatctccttcttcaatgtcatcatctttctcccattgctccagaagacgcgccatgtctgcatcattgtaatcgcgaatatccttcttcttcttccggggaggtggggtagactcgtcgggcgtcccgggcgagccttcggccgcgcaggacccaggcggtggtagcagtagcagcagcagcagcaggtcagaggcacaaagcaggaccacggccttgcgcgcccacctggaagccgccattttcgctgcgccgccgtaatagccactctgcgttgataccactgcttcc

SEQ ID NO: 134538 - DNA, 1122 bp, Homo Sapiens
  misc_feature (24)..(24): n is a, c, g, or t
  misc_feature (116)..(136): n is a, c, g, or t
  misc_feature (491)..(499): n is a, c, g, or t
  misc_feature (552)..(965): n is a, c, g, or t
tcttttaggttttcggctcctcgngtggggttggtgcggcgtgtgggcggacggccagtggcatgctcgaattaacctcactaaagggaaaaagcttgcggccgcggctgtaggcnnnnnnnnnnnnnnnnnnnnnagggctgaatcctcaactaaaattttatttccttgtgctgaatagaacacatacagatccatattaaaaacagtcatcatattaggcaaattcaatctgtcaatgtagttttagtccagaaccaaaccagtgatagttaggaattacagagttaccaaccaaactgatttgctttcctggtggttctttgtgtaacagatgagagaaataaagtggcagagtaccagtgaacatttggagaaaatacctaattattttcttcctaacccaagttagccactgaatagtcatctcagaatagtcacctcatcccagttggcccattaggttcctgtgtgcttcatcttctgtgagnnnnnnnnnccttatatcattccttatttcagatgtaagatgcccctcgtgccgaattcttnnnnnnnnnnnnnnnnnnnnnnnnnnnnnnnnnnnnnnnnnnnnnnnnnnnnnnnnnnnnnnnnnnnnnnnnnnnnnnnnnnnnnnnnnnnnnnnnnnnnnnnnnnnnnnnnnnnnnnnnnnnnnnnnnnnnnnnnnnnnnnnnnnnnnnnnnnnnnnnnnnnnnnnnnnnnnnnnnnnnnnnnnnnnnnnnnnnnnnnnnnnnnnnnnnnnnnnnnnnnnnnnnnnnnnnnnnnnnnnnnnnnnnnnnnnnnnnnnnnnnnnnnnnnnnnnnnnnnnnnnnnnnnnnnnnnnnnnnnnnnnnnnnnnnnnnnnnnnnnnnnnnnnnnnnnnnnnnnnnnnnnnnnnnnnnnnnnnnnnnnnnnnnnnnnnnnnnnnnnnnnnnnnnnnnnnnnnnnnnnnnnnnnnnnnnnnngggcaggaccgtaaaaaggcgcgttgctggggtttttcataggctcgccccctgacgacatcaaagatcgacgctcagtcacagtgggaatcggaaggactaaagaaacagggtttccctgggagtctcgggggtctctgttcgacctgcgcttacg

SEQ ID NO: 134539 - DNA, 673 bp, Homo Sapiens
  misc_feature (244)..(254): n is a, c, g, or t
acctataaatatattttattcatacttttaaatattttacaattcaaataaaaaccttatatgtagacaatctgggctaaatttccatgtatgttttgaaaaataatgttagcatgaatagattcatatttaaatatgattttaaatactcttaatagaggagacataagaaatatttacataaaagctaagtagcatgatacagctcatggttattttcctcataggaaaacaattacttgannnnnnnnnnngcataggattaagactgagtatcttttctacattcttttaactttctaaggggcacttctcaaaacacagaccaggtagcaaatctccactgctctaaggttctcaccaccactttctcacacctagcaatagtagaattcagtcctacttctgaggccagaagaatggttcagaaaaataatgattataaaaaataacaattaagaaaaataatcacatagaggtaaaataaagcaactaaacatcatagttttgcatttttagaaaagcatttagacatttagaattatagtaaatatattacatttattctaaaacttcaaaattattctgtttttgtagtactgaaaagaagatagtgccatttgaaagttaaaagaatgtagaaaagatactcagtcttaatcctatgcagaac

SEQ ID NO: 134540 - DNA, 1211 bp, Homo Sapiens
ggggggcagctccgggcgcggcgcttgttttggtttccttctaacttgcccacggcagcttcggggtgagcgactttcctgcaccagctgccgcgcctgctcacaccctgacctcgttttcgggctctctgagcccgcagttccgcaagcccctggggcgggctcctgccatgccgctagtccgctacaggaaggtggtcatcctcggataccgctgtgtagtccgaaaggacagaggatgtgaatgtggatggatgatttggatacaactgtcacactgctccccacagggaagacatctttggcacatcaatttgtggaaggcgagttctcggaaggctacgatcctacagtggagaatacttacagcaagatagtgactcttggcaaagatgagtttcacctacatctggtggacacagcagggcaggatgagtacagcattctgccctattcattcatcattggggtccatggttatgtgcttgtgtattctgtcacctctctgcatagcttccaagtcattgagagtctgtaccaaaagctacatgaaggccatgggaaaacccgggtgccagtggttctagtggggaacaaggcagatctctctccagagagagaggtacaggcagttgaaggaaagaagctggcagagtcctggggtgcgacatttatggagtcatctgctcgagagaatcagctgactcaaggcatcttcaccaaagtcatcccaggagattgcccgtgtggggaatttcctatgggcaagagcgtcgctggcatctcatgtgagcccttgggtgtggggtaactgccttgcttctgcccccggcacttgccatgttccagtggggggcagatcctcaggacttcacgggtatggttgccagctgtgttcctggcccctggacacacagtgtggcatcctcatgtttgcacactttccccaggctccagtggcctggatgtcaatgtttacaaaggggcaaggacctctcatggacactggcctctagccctctgtttttgtttgatgaattctgttataacctatggggtcaggatatgagtcctgggcattatttatccaggacccatcctcttgggtgggttttgggtgttggctgggtaaggggagccggggacttctgaaatagagctggctccatggggtgacaatgtatatatgcaaataaattgagaaatctttt

SEQ ID NO: 134541 - DNA, 1068 bp, Homo Sapiens
  misc_feature (61)..(78): n is a, c, g, or t
  misc_feature (201)..(352): n is a, c, g, or t
  misc_feature (370)..(619): n is a, c, g, or t
  misc_feature (633)..(652): n is a, c, g, or t
  misc_feature (705)..(813): n is a, c, g, or t
  misc_feature (823)..(906): n is a, c, g, or t
  misc_feature (941)..(941): n is a, c, g, or t
  misc_feature (1031)..(1031): n is a, c, g, or t
gtgccaagctaaaattaaccctcaactaaagggaataagcttgcggccgcggctgtaggcnnnnnnnnnnnnnnnnnncatatttagtgctttttattaacagtattactaaggcaactcatcgatgctgaagtcccatccagtatgctatttttcatgcctcaggtctaataaatcttaataaaaccagaatgactagannnnnnnnnnnnnnnnnnnnnnnnnnnnnnnnnnnnnnnnnnnnnnnnnnnnnnnnnnnnnnnnnnnnnnnnnnnnnnnnnnnnnnnnnnnnnnnnnnnnnnnnnnnnnnnnnnnnnnnnnnnnnnnnnnnnnnnnnnnnnnnnnnnnnnnngctgggtgcagtgactcnnnnnnnnnnnnnnnnnnnnnnnnnnnnnnnnnnnnnnnnnnnnnnnnnnnnnnnnnnnnnnnnnnnnnnnnnnnnnnnnnnnnnnnnnnnnnnnnnnnnnnnnnnnnnnnnnnnnnnnnnnnnnnnnnnnnnnnnnnnnnnnnnnnnnnnnnnnnnnnnnnnnnnnnnnnnnnnnnnnnnnnnnnnnnnnnnnnnnnnnnnnnnnnnnnnnnnnnnnnnnnnnnnnnnnnnnnnnnnnnnnnnnnnnnntcctgctgtatccnnnnnnnnnnnnnnnnnnnngcctacagccgcggccgctccaacatcagaatggtcctcgtgccgaattcttnnnnnnnnnnnnnnnnnnnnnnnnnnnnnnnnnnnnnnnnnnnnnnnnnnnnnnnnnnnnnnnnnnnnnnnnnnnnnnnnnnnnnnnnnnnnnnnnnnnnnnnnnnnnncggagcaatnnnnnnnnnnnnnnnnnnnnnnnnnnnnnnnnnnnnnnnnnnnnnnnnnnnnnnnnnnnnnnnnnnnnnnnnnnnnnnnnnnnnagctgcattatgatcggcaacgccggggagagcgntgcgtatgggcgtcttcgcttctcgtcatgatcctggctcgtcgttcgtgcgggagcgtacagtcatcaaggcgtaaggtatcaagatcnggaacgcagagacatgtacaagcagcaagcagacgta

SEQ ID NO: 134542 - DNA, 1196 bp, Homo Sapiens
acacttagagtttataattttggggcaggaaggaagtaactgtaaaaagaaaaacaagtgcaagttttctttaaaaaaataataggctgatgggacttgctatcgaaggggttgagttttatgccctggaaagggctgggaaaaagccagtttttcccaacatgggtagaaattataaagcaaaatgtggcattttcaattcatggtagcagttctgaaagtttatttacacagtaagttccgagctagaagtggacagtctccagtcttcctgtcagactctgtagttatggggtgttcccagtcagccaaagcagcaccaagtgcagtgggaatgaagagaacccagataaaaaactgactcagtattcttgttttattggtttatggcttgtgggcagctggctgaggccaggaacaccagaggccctccttgtatttccctctcccttatcaggtaattccacacttagcaggtcccatacctggaagcagcgggttgaccaggtaggagtaggatgcagtgggtatactaggaaaacccagctcttcccactaacactggtaccgtagtttactatgctagaactgatagggaggtaatgaacttggtccccactacctagcccaagaaccagcctgggtacccacgtaccattaggagcggggaggggaagaacaggataggggaaaaagatgaccttcatcaaggagctcttgtggtggaggacataaggaagccctgaggctgccatcctttctccaggcagccttgatactgaaggcagtaatgttagagccataaagcactgtatttctcatactcttggtataatgctagtgccactgtgtgatgctttagtcaaataaatggaggggccattagagagggtaggaaggcaatgaaaccactctgaattatgtaaagatcttgctacttcttatagcctaataggaagaaatccaggcaggggttatagggcatcagctgttgaatgaatgttcaacattatgcttttaaggattagatagaagaggtctcctacctattccttttagcaccttggctgcaaagctccagaggaagatttgggggaaagagtgagcctatgaccaggaagacagagcccagccctgctatagtccagttgctcgtccacagggcacctggagcttagggggttaggatatttcag

SEQ ID NO: 134543 - DNA, 549 bp, Homo Sapiens
gtttgtggggggttgtttctttggtataaaacatgtcaatttattggtctttgtggagaatttagatgcatcaccagtatattacaacagagcccattaatcttgtagcttcatcaacattaactggtttgctttcatgacgctgctgaggaatcagttctttctgcagaggttcaagtgaaatgctttttgcgaaatgtgcaagttccttttgtacatttacaaaagctttatttactctgttaactttttcctcattcataatgtttatcttcttaagattagtggtaactggttttgctttgtttttagccttaaagtttttttggctggctatgtgaaatacattcctggacttcggccctcttaatttgttcttggccattgttgaaacagcaatgcttttgaacgccaacagtattcctcctacagaagtttaacacttgcgtgcagctttttaagctccaggtaacaccatctggcacgtacggcgtctagccccggccgtaatggccgaattcccgggcatatgtccggtaccgtcgactg

SEQ ID NO: 134544 - DNA, 1295 bp, Homo Sapiens
  misc_feature (71)..(81): n is a, c, g, or t
  misc_feature (388)..(398): n is a, c, g, or t
  misc_feature (492)..(554): n is a, c, g, or t
  misc_feature (709)..(844): n is a, c, g, or t
caaaggggtatatgtgtaaggagaggaaaatatatgttgttggtgttgaaggggcggcagagggcgccaannnnnnnnnnnagtgtgcccccgcgactcgggtgtgtttgtaaagagggtgggccacggatatgaaagggaaaaactgttttgtttgcgccgccggctattttttggccacggggggggcggataaatatttgtatccgccaaaagggcgcgcaacaggggttgtgtgagaggcacccgcgcgtgggaaaaggtaagcgatgatctaacacaaaccgacttggtgaggaggggtttcgccaactgcggcgggggaaaaggtgtgttaagtggtatgtatcaccccccacggttctttggtaaaaaggaggacgcgacnnnnnnnnnnncggtaatttatggatattagggagaactccgcgtgtgggaacccccccctataggaagaagaccgcgagaaagaggcccccgcaaaaagtccannnnnnnnnnnnnnnnnnnnnnnnnnnnnnnnnnnnnnnnnnnnnnnnnnnnnnnnnnnnnnngggaggagaacaccaccacctttgtgatatcgccggggtttttctgggagaacagaggtttggccgggtttcactttcttcgttgtggccccccggccccaaaaagagggttttaaaaatttttttaggggggggaaggggccggcaagaagaannnnnnnnnnnnnnnnnnnnnnnnnnnnnnnnnnnnnnnnnnnnnnnnnnnnnnnnnnnnnnnnnnnnnnnnnnnnnnnnnnnnnnnnnnnnnnnnnnnnnnnnnnnnnnnnnnnnnnnnnnnnnnnnnnnnnnnnaaaattgtataaaacattcaatttattggtctttgtggagaattagatgcatcaccagtatattacaacagagccattaatcttgtagcttcatcaacattaactggtttgctttcatgacgctgctgaggaatcagttctttctgcagaggttcaagtgaaatgctttttgcgaaatgtgcaagttccttttgtacatttacaaaagctttatttactctgttaactttttcctcattcataatgtttatcttcttaagattagtggtaactggttttgctttgtttttagccttaaagtttttttggctggctatgtgaaatacattcctggacttcggccctcttaatttgttcttggccattgtcagaagtttaacacttgcgtgcagctttttaagctccaggtaacaccatctggcacgtacggcgtctaggaagttccgggccc

SEQ ID NO: 134545 - DNA, 889 bp, Homo Sapiens
tttccagtaacaattttatttatccccctaatttttatcatgggaaaaatccagaaatcaaatgtcattatgttatataaggtttaacttactttaaacaaaaatgtaacatagtgttaaaactggctttccaaaacagtcacagcatagctgtactctgtactaataatcacaaaattgtaatatagaactctgttatgcagtcccattatgttcttacaaaaatagaattaaactgtgtgaccagacaaggacttcaattacactacttggcaaacttagaatttcagtggagtctttttcctcttgcagtttaaagcaaaagtcaaatatcacatctttttcaagactcacaaagatgattcaggttgtttgtttggcatgtttttaatctctatcacaacagcagggatgttttcagctttagtcctcctgggcttcttctctagattgttactaagttctaaacaagaaatgctaactgctggggtcttttctgcatcctttccagaaggggcttgtggtagtgtcccacaacattgcttcaaagcacactgggttctgcaggcaagttcacacggaactacacttgatttagagcctacactagcaaattcaggctgaatggtagtagcgtgaattccgtgattatgaaaaacgtctttaatggttttagccacctccatgtatgatgttggatcttcacattttatgtgagcagtggcaatgattctgcttccagcaagttgccaaacatgtaattcaatgaacttcctcaactcccttcaacatttcgaagttcttttatcaaaattctggaatcaatttgtttaaggaccagttgttgaagaataagagcagaattcttaagtattggataggttgggta

SEQ ID NO: 134546 - DNA, 1071 bp, Homo Sapiens
  misc_feature (143)..(143): n is a, c, g, or t
  misc_feature (174)..(282): n is a, c, g, or t
  misc_feature (288)..(289): n is a, c, g, or t
  misc_feature (298)..(299): n is a, c, g, or t
  misc_feature (311)..(312): n is a, c, g, or t
  misc_feature (459)..(459): n is a, c, g, or t
cttgagactgaacgtccccaccgaagccggcagggatcatggggagacgcgagaccccatagcaaccctttcccgggcgtgccgatcataatgcagtggcacgacagttccccgatggaaagcggccgtgagcgcacgcaatnaatgtgagtagctcactcataggcaccccannnnnnnnnnnnnnnnnnnnnnnnnnnnnnnnnnnnnnnnnnnnnnnnnnnnnnnnnnnnnnnnnnnnnnnnnnnnnnnnnnnnnnnnnnnnnnnnnnnnnnnnnnnnnttgccnntcgagccanngattcgcacgannggttggatggaggtagcagggccttgtgtgggctgcgatgttgtgcggtgcgccaggtatatctaggcatgggcactgctggatggaagccctgtctggtcaggctatctcttgtgtgagggatgacaacggggcagtggatgttgngacctgaaggtgtctgctgtgtcatcatagagagatgtccatcacattattgcatatgtgggttgcaagttggaggagcctgtcttgcttccccataatgaaagttcacaggtaggataagatgccctctgagaagagatccaggatggagcccatctcccacccaatctgcacctcacaggcagaatgcaggaagtcctcactgtcaaatgcactttggtccgcctcatcccaagtccctccagccttcctgcttctgttttcttcctggatgttcaggtgtgtccctcagatcctccagagggcttgatggcttctgtccatgtgacccttcctacctctgcctacccagttcactcaagatctgaagaccaacgaggcctcagaaggggccacagccacattgcagtgtgaactaagcaaggtgtcgctgtggagtggaagaagggacctgagaccctcagagatggggactgtgttctctgttcctgggccgtgtgctttctcaccatctgtatattcatttgcttattctgccatggtcctgtggtggtttgtgtgcctcccttgtgtgtgtctgtgttctgtccacagagttgtccagttagtctg

SEQ ID NO: 134547 - DNA, 978 bp, Homo Sapiens
  misc_feature (707)..(707): n is a, c, g, or t
  misc_feature (791)..(791): n is a, c, g, or t
  misc_feature (899)..(899): n is a, c, g, or t
ttttaggcaaacatattcctttatttagattttatattcacatttagttttttatgcacacatttaagactttataaacactaacattagcaattccagaagggtaggtagattttttaaatataattactcttataaaaggaagaaatagagactttactaaaggactgtatttttgacttcacctataatgcaactaatcatctacttagttgctatgttaatctatttgcttcttcagcaaattatcactgactcagtggtttaaaacaacacaaatttaccatcttatggttctgtgggtcagaagtttgacattgatctcactgggctaaaaaggtgccagcaaggctgcattcctttctggggactctaatggagaatctgtttccttgccttttcaatctttttttacaggcccccttcattccttggctcaaggtgtcttcctccttcaaagccaccttttaacttccttcaaaagtagttgtctttcttatacaggatcactctgacctcctcttttgcctccctcttcaacttttaaagatccctacaattatattaggccctccaaagtaattcaggataatctccccatctcaaggcccttaataacattttaaattaatcacttctgcaaaattcttttgcaatgtggcatacatattcacagttcctgagaattaaaacattggcatccttangcaatctgcttactttttcatttagctcatatctttttactccagatagagagtgagttaagtaccaagttcagcagattacantcttgatcgcttttaagtactagctgatcagaccgagattcgatattggaatgtatgttctccatgagcatcattacataactttctctgcagaataatctgaactanacaactcgtcctctcatcaccaagaaagtcctgagttggactctcggcaacatggagcagatcatcggcaataacaatt

SEQ ID NO: 134548 - DNA, 948 bp, Homo Sapiens
gttcaaaagattccaaaagaattttacaaaaacaaaatccgggtgcagcctgtgagggtccaacaaaatgatcatcatttgttcaagtacaatcaaacagagtcacatctctgtaagaaggaaacgtttcaaccaccaggtgcaattaacttctgcgcactattctcactttctcggacgcagttgagaaaagagcctccaaacttctgccagcagaattttcccggtttcattgagaatccgatgcctctcttctaactaaaggcatggaaacgtctgtgtcagaacgaagtatattccgaacctgatccagggtcactgtcgcgtagtacgaggcactagttattggtatcccttcgtcgagggctctgttgacggcggcgcacagggaccagtacccactgtatgttttccctctgtacctcaccacacacttgtgctcgtcctgctccgaccaaaaggagaagttgagcgtgtctgtcacgaacacccagttgaccgcggcctcgtcggccgccctggggttcagctcatgaagggctttccacccctccacgcgcagctctggccccgccgccttggccagcagcagctctgccaccctccgtacgcctccgctgtcaataaacacatcccgactgttttctgcaatgaatttagaggattcctgggatttaggagcccgtccattctgccctttgggacccggcgggccaaactcttcccgccctaggcgggtcaaggtccactctgcgccttgcgctactacgaaccgcgcgatcacagggcctaaacaaggtcccgccctgccagggagtggcaccgagaacttagtgcgagccaaggtaaaggttctctcccgcggcgttgccctgattaggaaaccggagagaccccggggcagctcgctgcctcgtgccgaattcgccacccaggcctcgcttccta

SEQ ID NO: 134549 - DNA, 1130 bp, Homo Sapiens
  misc_feature (939)..(939): n is a, c, g, or t
  misc_feature (954)..(954): n is a, c, g, or t
  misc_feature (1012)..(1012): n is a, c, g, or t
  misc_feature (1032)..(1033): n is a, c, g, or t
  misc_feature (1054)..(1054): n is a, c, g, or t
  misc_feature (1061)..(1061): n is a, c, g, or t
  misc_feature (1067)..(1067): n is a, c, g, or t
  misc_feature (1073)..(1073): n is a, c, g, or t
cagtcgacggtaccggacatatgcccgggaattcggccattacggccgggacttgtaagaggcttttgaaaaggtgggactccacaagaggccagagggggccattcaggaattggttccagtttggggacacaatgggaacaatgggagagtcttagacctatctctcgaagtatatggactggtgtgcttggatccaacagtttagcatgatacaaccaggaattaggatttaaaggtttccaagttgtggaatattttaaaaggcacttaacctgccaggcaagactctcaagaggcgataagttgggcaccatagagtcctcttcttcagaggaatcccactcttccccagaactctcatttaggtaactaatattttcttcttcctcactttctgattctgacaagtggtcaggagagggatttctaggacccatcagaataaaacacagtaaggaaccagaaaaaggtaataatctaagccagcagaacactgactaacactggcaaatagaaataagagatgaaaaatcctttcaccaagattaatttgtctttcagtccgttacacacataaagtatgcttgtggcccataccactgtgccgttcttcaagattatgttgtatattcttcacttacaaagaagatatctcagtttccaggaccagttcagtgtgtaaaagtattagtcacttaccagtggcacaggtcagagtatctccttcaaatcctggctacccaagaatagaaggggtcctcatctaggcaagctgatttacttagcatagtcccaactggtagtgatactgtggaagagacactttttgtgctgttttgctggcagtgatattatatctacttgacaatcaaaagaagctcagtagttgtctttgcttgtccgctggtatagcaacttttgtgcaggggggatganggatgactgtcaaanatctggtgtatacgtccgatgcttccataaggatgcaatgcctttggactgtgattanctgtggatatctggaaggannctacctcaaagtgctgttggnatattanggggcngtctgnggaaactgctaagttagacctgcggactcacatttgtctatacaatctttacccggg

SEQ ID NO: 134550 - DNA, 1032 bp, Homo Sapiens
  misc_feature (756)..(756): n is a, c, g, or t
  misc_feature (863)..(863): n is a, c, g, or t
  misc_feature (865)..(865): n is a, c, g, or t
  misc_feature (867)..(868): n is a, c, g, or t
  misc_feature (881)..(881): n is a, c, g, or t
gtattttggaaaaaaagaaagtaaacttttgtctaatttattttgctcattgaaacattccagctcaaaatcaaggtgagaagatctgatggagtttgagttgggctaagaggaggtgagaagagcttatggaaatctgagtattcttactttgataattcaggacagacctttccaaattaaactttagaatggagagactacagagacagagtacaaagaaaacaaaaagctaaacaacccattagcattgctcattttgaatgcttcattaggcctagctacacaatacatagaattctgataactcaatttgctcacaagtggtagagtgatggcaaaaaagaaaggctgaggaaacagcccagtcctgcctccaacacagctgcgctgcaatctgcgccaggtgtttcaactttctacagctccagaaagcaggcagcatgacagcactttggacatgggaatcacacgcactgtacacacacacatgtaacctcagcaccatgcctggcactgactaaacacaaagtacacgctggctctccccggcctggggcacccgagaatgaacctactcttttccaggtgcaggaagagcttgggcatgctggcggatgtgtcctgctgccggcgcttgggctgaggtgaagcgctgctctcagaaagcctgtcacagttggcactgtggcgcgtggaccgctcagagactgcaatgcttctggctcagctttgcgccttttgggggtggctggnttcaccggtggtcggctgactctctgtggactgtggcgtggatggattcaacaaaggcggactgggagagagttcctcctggctccctgtagtgctgtggacttccntnanntggagaaaattanacgagtcacttttaactgagcttgtcatatgatgagtacacaacggagatgtatcaagggtatctatcatcacattcctacaagtcacatctttctgctggaatatgacgtcatgtggcagtgcaactgatgtgacagcctcgtgcggatc

SEQ ID NO: 134551 - DNA, 1014 bp, Homo Sapiens
  misc_feature (128)..(128): n is a, c, g, or t
ctatgcagtcagctgagtcccgacaacagggagtggggggaatgggagtccaccgcctaccggaatcgattgcaagtttcgggtttcctgcactgagtattctggcccttttggttaccagccagcgnccccttttgagaaggaaatggcggcccggaccgggcaaaccaccctccacccgaaggagaacttgggttttcagggtgttgacatcaggctcaacctgtggacagcaggacccaggaatgggagattaggacccccaggaggcacagaaagcatatctgcaacgagaggactcagtggggacagaaatctgactcctcgctggacgctgaggtgtgacaagccccgccaagacagacctgcaagtcttcgtctcaagggacctccctcatgccaggcccgtgcctctgacagcagcaccctttcctctcattgtccctgttccctttttgcctgtggatctgtttggccagggtccctggggtcaggaatatttgcaagactcagccagctccttcccagcccagcctcttggggctgggactttctcaccctgcggcaggcacaacagatgctgggacccagtctctgcccaggtcacagcacaagtgcacatcagcactatggggcctatgtcctgcccagagacctctgctccttcctgctcacatccacagtcagggcacggcgcccctcaagaactccagagtcacctgtctcatcggctcccagcaagtgcctctttgtctatgatgtcccccttctctgaggcctggacccacccatctttgtccctggggcctgctcccagccactgaggcccgctctggccaggggagaaggagctgccgtgcgtcttccctgtgccccgtctccctgcttggttctcccctcccttccctggccggctgccattgccaggagctaagtgcctttttgtgtgcatccatttaccctttctctgaaaaacctgttctcaggaaggatctgataaactcatttactctc

SEQ ID NO: 134552 - DNA, 379 bp, Homo Sapiens
aaggtgtgacaagccccgccaagacagacctgcaagtcttcgtctcaagggacctccctcatgccaggcccctgcctctcacagcagcaccctttcctctcattgtccctgttccctttttgcctgtggatctgtttggccagggtccctggggtcaggaatatttgcaagactcagccactgaggcccgctctggccaggggagaaggagctgccgtgcgtcttccctgtgccccgtctccctgcttggttctcccctcccttccctggccggctgccatggccaggagctaagtgcctttttgtgtgcaaccacttaccctttctctgaaaaacctgttctcaggaaggatctgataaactcatttactctcaggtg

SEQ ID NO: 134553 - DNA, 1184 bp, Homo Sapiens
  misc_feature (901)..(917): n is a, c, g, or t
tttgtttgaacgcagtcagaatgattttattgaaatgttttagtacagtgttagaggatcttaaaatcttacattttaaaccaatacaagcactgcaaatgatatactcctgaatctagttgatgtagtatctaaaaagaaaagtgatcatatgagtatctataagttgactaatgtaatttaagttggaggctaaacaaacaactttggtatattcatatttctctggctcctgtttttggccagataaatgccaggtccacccccattcagtagaattggacaggaccaatgtatttggtggtctcacttaagtttccacgccaggagcagcaagaaatgtacaaattttgggattaagctgctcccaagacagtcttcatcacctttgtgaactggaaacaccaaatagtcaaggtctgaatttccattgtgtgtggctaagtccagtcgcattggttcataaatgtattctgaaggattttaaaatacaaaggtggggctaaataatgatagaaaccatcagttcttaattcagagaatgacaatgcaggttcctatatcctttttaaaaatctgagatcattattttaaaactagctctatacattcttaggctttaaatttaatcttagctgaaatgattacctttaagtcagttggctttaggccttggcgattgctcaatataattttggaattttaggatgcagcatttcaggtaagtgacagttatgttttagaagaggtcatttataaaaatgatccagaaatacactgctctgatatgtctaatgtatacccccccaaatgtgtcagtgtccatattaagctaaataaaatttggtccaaattaagccacccgtaacccagatggtttatctgaaactgagttatcccnnnnnnnnnnnnnnnnnggaaaattcaaaatccatggtattataattataaattttccaaggttcactccaaagtaaaaggataattaattctatacagggttttacccaaatgtccataggcattatcagtatatatttacacagaaggctttaatctgaagtcacctttggcaacctcgaaatatataaactatcgacgcgtgggtcgacgatatcccgggaaattccggaccgtaccagcctgcttttttgtacccaacttgttctataggtcactatgcg

SEQ ID NO: 134554 - DNA, 611 bp, Homo Sapiens
ttttctttttccagtgtttttagttgcacatttaatagtcacaaatctttttacagatttttcacagatttattatttatagaaaaaaatcaagattaaaatggagtattgaaaaggaccaagaaattactagcagtgatggcaaagtacaaaggctctgaaagaacagagtaaacaagagcagcgcagtgcagcgtgtggccacttcccaccaggcagaacacttgacttcattaaggcaaagcctttactctgttactttttcctcccacatagtttaacccaaatagaaaggcattctattctcacactactgctctctaaggtcctaggaatataactggtactataagcaaacagatgcatcccttgactattaatacctgaatagacaagttaaattgtgatgcattaaccatccctctgggagaattaaaaagaaagaggcagaaattgtttgatgcttaagactgagaaaaaggggtatatatgtgtggtggtggtggaagcgggaaaaaaaagtggttcaaggagggatgagggcaacaaacctctttccaatgtccaactgttcttatgttctcagatgctgctgatacagtgttccatta

SEQ ID NO: 134555 - DNA, 1091 bp, Homo Sapiens
  misc_feature (846)..(846): n is a, c, g, or t
  misc_feature (960)..(960): n is a, c, g, or t
  misc_feature (965)..(966): n is a, c, g, or t
  misc_feature (971)..(971): n is a, c, g, or t
  misc_feature (973)..(973): n is a, c, g, or t
gagctcccctccattgtttaaaagagcactctttccgtttctatttcccactaactgataaagaggacacacccaaactagatcactgaactgtacaaatgatctttactcttaatctaaacaaacatgtgttaaaacattctgaaatgctgcatcctttgatttcttcatcttttcaattgcccgatgcaggtcctgctgttgaacaggccgaatttcatcttcgtcatggctttcttctgatgtagaattaacatattctctaacacagaggagggcagcatctcgacacatctcttttaggtcacttcctgaaaacccatcagtttcctgggcaacttctagcaggtctacatgcctatccacattttcatttttcaagatgagtttcaggattgcttctctctgttttaaagcaggctggttgatatgaaatcttgtaggcattcttctcattatagccgagtcaaggtcctgaggacgattggtagctcccattactatgacctggcagctgtgatcagtatccaatccatcccagagactcataaactgagctttcatcatggctgtagcttcatggtcagaacttgaacggtttcgtagaaaggagtctatttcatctataaagatgatggatggttgtagctttatggcaagggagaagacagcagcagccaatttctgagattctccataccacttatcggtcagtgtcgaaggctgaaggttaataaatcgacagcctgcttctttggctgtggtcttggcaatcaacgttttaccacagtctggaggccatagagacgacacttttggaggctgcagaagctggattctcaacanatgttccttttgataggtaaatgatgtgttttcaatttcgtatgacatcatctaactgcatatcatcaagttactgatcacttgtctgacagactgcattgtctgaacgactgnagtgnngcatnantacaaacttatataattcattcctaaatgtaaaaatctctgcgatcttggctcagcaatcctaaggagcgatattctatcagtcaatgttcggggaatgttcgtcaatcacaaaagac

SEQ ID NO: 134556 - DNA, 502 bp, Homo Sapiens
gaaagtttttttcttacaccgtgactgagggaaacattgcttgtctttgagaaattgactgacatactggaagagaacaccattttatctcaggttagtgaagaatcagtgcaggtccctgactcttattttcccagaggccatggagctgagattgagactagccttgtggtttcacactaaagagtttccttgttatgggcaacatgcatgacctaatgtcttgcaaaatccaatagaagtattgcagcttccttctctggctcaagggctgagttaagtgaaaggaaaaacagcacaatggtgaccactgataaaggctttattaggtatatctgaggaagtgggtcacatgaaatgtaaaaagggaatgaggtttttgttgttttttggaagtaaaggcaaacataaatattaccatgatgaattctagtgaaatgaccccttgactttgcttttcttaatacagatatttactgagaggaactatttttataacaca

SEQ ID NO: 134557 - DNA, 1473 bp, Homo Sapiens
  misc_feature (1236)..(1236): n is a, c, g, or t
  misc_feature (1278)..(1278): n is a, c, g, or t
  misc_feature (1287)..(1287): n is a, c, g, or t
  misc_feature (1368)..(1368): n is a, c, g, or t
  misc_feature (1381)..(1381): n is a, c, g, or t
  misc_feature (1429)..(1429): n is a, c, g, or t
cgagggggccaagagggataagaaaacttctctgggtgcccacgtggtactgagcgcccttgggagggctctggagaagaccatcgccttccagggtagctccctccctcaaaggtttgagatcatggtccagttctcgggtctcccagcctcagtttccccatttgtaggaaaggcgttcacagcctctatctcagaggaggctttgaggattcagagagctcagaagaggggaaggaaactgaggtccagaaaagttatgactcgccccaaggggattgcctggcaggacgtgaaggggaagaggcccaccctggagtaaccctcactggagaatccagagacacgccgctttttggatgcctcctatgcctggcgggagtcttgtctgagctggcaccaccacacggcccacgacatcttcgcagggaagcctgtggaccctctgccaggctccacaagaggtcaggacagtgcagtgtgttcacaaggccagtttctgatcgtccgccccgaggctgaggaccagtaggcagctcccaagatgggtgaaaggaaaggggtcaacaagtactatcctccagacttcaaccctgagaagcatggctctctcaaccgataccacaacagccacccgcttcgggagcgggctcggaagctgtcacagggcatcctcatcatccgattcgaaatgccatataacatctggtgcgatggctgcaagaaccacatcggcatgggtgttcgttacaatgcagaaaagaagaaggtgggcaattactacacaaccccgatctacaggttccggatgaaatgccacctctgtgtcaactacatcgagatgcagacggaccccgccaactgcgactacgtgatcgtgagtggcgcccagcgcaaggaggagcgctgggacatggcggacaatgagcaggtgctgaccacaggtgagcgccacccacttacctgcctgggggccctggccctgagtctgcgctggggcccccaaagcccagccgagctctgatcgttgcagagcatgagaagaagcagaagctggagacggacgccatgttccggctggagcatggcgaggccgaccgcagcacactcaaagaaggcgctgcccacactgagccacatccaggaggcccagaagcgcctggaaggacgacttcgtcctcaacagcatgctgcggagaaaggtcccgggtgagggggggtccagtccggggtcanagaggatgcatggtggaccaggtctgggtctagcctcacccnacacatctntacttgagcaggcactgtacctctgagctcagttccccactgctaatggtgatatgcctgtcttatccatctgggtacttnattaaaatccatnacagaacagtaaatttgctggcacatgccaccctgtatccaccatggnaagtgcttgagcagcctctgcgcccttgcgatcttggctcaggg

SEQ ID NO: 134558 - DNA, 1101 bp, Homo Sapiens
tcgctatggacccctttggttttgttgggagggccggaatcccggggggccaaaaagggggaaccccagggacgcggggctgaatggttctccgtgtccggcctggagttttctgctttgtccctccgtagggagtcccaggggtgtggaactttcagcaggagcccgccaagctgcggttcattttccggtctcggggcaccaggcgggatgttcaggctcgcccttggcttgcaagggcctggcgtctctcctcctctcctggggatggctttttctttttcccggaaccttctccgcagcatgctgttgagggcgaagtcgtccttccaggcgctctgggcctcctggatgtggctcagtgtgggcagcgccttcttgagtgtgctgcggtcggcctcgccatgctccagccggaacatggcgtccgtctccagcttctgcttcttctcatgctctgtggtcagcacctgctcattgtccgccatgtcccagcgctcctccttgcgctgggcgccactcacgatcacgtagtcgcagttggcggggtccgtctgcatctcgatgtagttgacacagaggtggcatttcatccggaacctgtagatcggggttgtgtagtaattgcccaccttcttcttttctgcattgtaacgaacacccatgccgatgtggttcttgcagccatcgcaccagatgttatatggcatttcgaatcggatgatgaggatgccctgtgacagcttccgagcccgctcccgaagcgggtggctgttgtggtatcggttgagagagccatgcttctcagggttgaagtctggaggatagtacttgttgacccctttcctttcacccatcttgggagctgcctactggtcctcagcctcggggcggacgatcagaaactggccttgtgaacacactgcactgtcctgacctcttgtggagcctggcagagggtccacaggcttccctgcgaagatgtcgtgggccgtgtggtggtgccagctcagacaagactcccgccaggcataggaggcatccaaaaagcggcgtgtctgccctcctcccgacgtcacgcatcccgggaattccggaccc

SEQ ID NO: 134559 - DNA, 1491 bp, Homo Sapiens
  misc_feature (595)..(619): n is a, c, g, or t
  misc_feature (1160)..(1160): n is a, c, g, or t
  misc_feature (1164)..(1351): n is a, c, g, or t
  misc_feature (1353)..(1353): n is a, c, g, or t
  misc_feature (1393)..(1393): n is a, c, g, or t
aaacaaaattggttttatttcataagatgtttagagacaggcaatggctggtgttgggtcagcagctcaacaatgtggcaactggcatcttcgtggttctcttggcccttccgtcgtggttcaaataactcctccagctccagtcatcactttggtgtttatggcagtaagggggggaggaggtggcctagctgcatatgtatctttaatcaggaagtaaaagttttcccagaattcccaaggccaaagctgtgtcctgaggccactgagagttgttagttgcaacagaggctgaaaggggagcaattagcttttctgggttctttagtgaaggcaggtaagggagaagggggttgggaatggctggcaaattggagcaccaacattacctttatggataatttctttttcaaaatgggcagctgatatgtgaagaaatatctaacaacaattttaaggttgtaatttgaaactcagttctgctttcaatcatgacatttttaacagatgcatttcagctatactattttttcttgtgccccactccccaacattctagaatggaactaaaataaaattacttaatctttcaagnnnnnnnnnnnnnnnnnnnnnnnnnggccaacagtggcaagatactttcaactactcttgatgtcattgtccttctacaccaaagaacatctggaaaacatccccacatcctttggtgtttaagaactgatagagctgaccaaagtccatgtggtttcccctggctccattaacactgaacactttttcttcaaaaatggaaaatttcctttgtctttccgtttcatcatttgtaccatcaaaaggaatgtcttctcgatggcgaattaaaattctcttccagtttaattttctgagtcattttttcgtcagatacatccaggttcatattgatagtaaagtagacttttgaagatcgcccctccattgtcttcttttcaatacaatctttcagttctgctacagccagctggtcattcactatgagctcattctcaccagggaacatactggctagcaggtctaactcagcaagctgggcctccgcctgctccatctcaatcatttttggacatgtgtaagtttcgtgttagccctcgtgccgaattcttggcctcgagggccanattnnnnnnnnnnnnnnnnnnnnnnnnnnnnnnnnnnnnnnnnnnnnnnnnnnnnnnnnnnnnnnnnnnnnnnnnnnnnnnnnnnnnnnnnnnnnnnnnnnnnnnnnnnnnnnnnnnnnnnnnnnnnnnnnnnnnnnnnnnnnnnnnnnnnnnnnnnnnnnnnnnnnnnnnnnnnnnnnnnnnnnnnnnnnanctgcattatgatcgggcacgcgcgggaaaggcgttgcgtnatggcgctctccgcttctcgctcatgaccgctgcgctcgtcgtcggctgcgggaacgtacactcactcaaggcgtatacgtatcaagatcagggaaag

SEQ ID NO: 134560 - DNA, 1075 bp, Homo Sapiens
ttccggtaggtcgccagctgaggcggtttgtaagttttgggtcgcagtatgctagaattttgaggctcccttctgatgaaaattgagctgtccatgcagccatggaacccgggttacagcagtgagggggccacggctcaagaaacttacacatgtccaaaaatgattgagatggagcaggcggaggcccagcttgctgagttagacctgctagccagtatgttccctggtgagaatgagctcatagtgaatgaccagctggctgtagcagaactgaaagattgtattgaaaagaagacaatggaggggcgatcttcaaaagtctactttactatcaatatgaacctggatgtatctgacgaaaaaatggcgatgttttctctggcctgtattcttccctttaaatacccggcagttctgcctgaaattactgtcagatcagtattattgagtagatcccagcagactcagctgaacacagatctgactgcattcctgcaaaaacattgtcatggagatgtttgtatactgaatgccacagagtgggttcagagaacacgcctctggctatgtcagcagagatacttcatcttccacccaccacaggaagcacagtccagatcagttgacctcatcttcacgagaactctggatctacagccatcatatctataacaaatgcacaaagaaacgaatattctaagacgtgggcaaaggagcttacccctgacatgggtacaagaatgcctggaaaaacctggagtcgcacagagtaggaaagggcccaacacaacgtgcactgatgacagaaaaactggtccacagactcagacaaactaagactggcaggacgaaactgcaacaatacggcccaacagcaggacagcacagtcccgtcacgaatgcgtaccacatcgcacgcacgccgggacaggaccaacggaaaactcgacccagactagggacgaaaacaagggtcccacaggcaaactggcaggccggggagagacccagatggaacgacgagcaccagcccaaccaggcatcgcgacgccgccaacggcacaccgcgcga

SEQ ID NO: 134561 - DNA, 855 bp, Homo Sapiens
  misc_feature (103)..(121): n is a, c, g, or t
  misc_feature (335)..(373): n is a, c, g, or t
  misc_feature (375)..(376): n is a, c, g, or t
  misc_feature (378)..(385): n is a, c, g, or t
  misc_feature (387)..(395): n is a, c, g, or t
  misc_feature (397)..(398): n is a, c, g, or t
  misc_feature (400)..(403): n is a, c, g, or t
  misc_feature (405)..(405): n is a, c, g, or t
  misc_feature (407)..(409): n is a, c, g, or t
  misc_feature (411)..(414): n is a, c, g, or t
  misc_feature (416)..(420): n is a, c, g, or t
  misc_feature (422)..(423): n is a, c, g, or t
  misc_feature (426)..(426): n is a, c, g, or t
  misc_feature (430)..(431): n is a, c, g, or t
  misc_feature (434)..(436): n is a, c, g, or t
  misc_feature (439)..(439): n is a, c, g, or t
  misc_feature (442)..(443): n is a, c, g, or t
  misc_feature (449)..(449): n is a, c, g, or t
  misc_feature (451)..(451): n is a, c, g, or t
  misc_feature (455)..(456): n is a, c, g, or t
  misc_feature (460)..(460): n is a, c, g, or t
  misc_feature (463)..(463): n is a, c, g, or t
  misc_feature (470)..(471): n is a, c, g, or t
  misc_feature (476)..(476): n is a, c, g, or t
  misc_feature (478)..(479): n is a, c, g, or t
  misc_feature (484)..(484): n is a, c, g, or t
  misc_feature (488)..(488): n is a, c, g, or t
  misc_feature (490)..(490): n is a, c, g, or t
  misc_feature (492)..(492): n is a, c, g, or t
  misc_feature (496)..(496): n is a, c, g, or t
  misc_feature (522)..(522): n is a, c, g, or t
  misc_feature (526)..(526): n is a, c, g, or t
  misc_feature (533)..(533): n is a, c, g, or t
  misc_feature (543)..(543): n is a, c, g, or t
  misc_feature (549)..(549): n is a, c, g, or t
  misc_feature (552)..(630): n is a, c, g, or t
  misc_feature (641)..(641): n is a, c, g, or t
  misc_feature (645)..(681): n is a, c, g, or t
  misc_feature (685)..(685): n is a, c, g, or t
  misc_feature (688)..(688): n is a, c, g, or t
  misc_feature (717)..(718): n is a, c, g, or t
  misc_feature (736)..(736): n is a, c, g, or t
  misc_feature (741)..(741): n is a, c, g, or t
  misc_feature (772)..(774): n is a, c, g, or t
  misc_feature (779)..(781): n is a, c, g, or t
  misc_feature (788)..(788): n is a, c, g, or t
  misc_feature (798)..(798): n is a, c, g, or t
  misc_feature (800)..(800): n is a, c, g, or t
aaaccgggcaatattgtgttcaggtagtcactgtattttattggaaaacattgatatatatttttcttcacagcttgaactgaacacaatattgcccggtttnnnnnnnnnnnnnnnnnnncattccgaaaatgtccacagcctcacgcctacctgcccttaccctcagctcttggctgggtctcccactatgccccatccctccttccctcagaggctgggtgccagagggtggatgagaagagattctcaaagctgggcaggtcccaggaaaagccacttgatcgacctgggcagtgaggggaagcagggggtggggggtgggttgggaaaannnnnnnnnnnnnnnnnnnnnnnnnnnnnnnnnnnnnnngnnannnnnnnnannnnnnnnnanngnnnnanannnannnnannnnncnncanaggnnaannncanaannaagggnanggannaagnccnccgcggnnggagnannggggnaagnangngggngagggaaaagggaggaaagaggggangggnaagaaangggaggaagngggggnaannnnnnnnnnnnnnnnnnnnnnnnnnnnnnnnnnnnnnnnnnnnnnnnnnnnnnnnnnnnnnnnnnnnnnnnnnnnnnngaaaagagggngaannnnnnnnnnnnnnnnnnnnnnnnnnnnnnnnnnnnnaccncgnggggacagagcccgggggacagggccaannccccaaaaacgggcgganaacangcgcaccagggcaagccgggcccggagcgannncccannncgccaanccgcccgcanancacccgcagcacacggcaggcggggggccccagagcgccccccgcgaggacgggg

SEQ ID NO: 134562 - DNA, 1122 bp, Homo Sapiens
  misc_feature (563)..(598): n is a, c, g, or t
aatggaagcgaggcctgggtggcgaattcggcacgaggcggaggaaccttgatccccgtgctccggacaccccgggcctcgccatggctgaccagctgactgaggagcagattgcagagttcaaggaggccttctccctctttgacaaggatggagatggcactatcaccaccaaggagttggggacagtgatgagatccctgggacagaaccccactgaagcagagctgcaggatatgatcaatgaggtggatgcagatgggaacgggaccattgacttcccggagttcctgaccatgatggccagaaagatgaaggacacagacagtgaggaggagatccgagaggcgttccgtgtctttgacaaggatgggaatggctacatcagcgccgcagagctgcgtcacgtaatgacgaacctgggggagaagctgaccgatgaggaggtggatgagatgatcagggaggctgacatcgatggagatggccaggtcaattatgaagagtttgtacagatgatgactgcaaagtgaaggccccccgggcagctggcgatgcccgtnnnnnnnnnnnnnnnnnnnnnnnnnnnnnnnnnnnntcaacactcccctgcgtaccccggttctagcaaacaccaatgtgattgactgagaatctgataaagcaaccaaaagattgtcccaagctgcatgatggctcttttctcccttcttcgctgagtctctctccatgccccctcatctcttcctttgccctcgcctctttccatccacgtcttccaggctgatgcattcataaagttgaagccgtccccagatcccccttggggaagctcttggcctccatccaagccggggatggtcctcccttcacttgtggctttagttccctcttgttgtggcagctaattatgggcgcgtggggggggttgccacgccttgtcacgggacctggttggcagtgccacggaggcccttccccaaggatgaatagcttccttttgcgtggtttgacacagcctggtgttcacggtgcagtcccagccgcttgttgcgccggttgcaagacggcttccagaccgcagggcgcgtcggcgtcgggtcgcgggcttccgagggttta

SEQ ID NO: 134563 - DNA, 861 bp, Homo Sapiens
  misc_feature (40)..(40): n is a, c, g, or t
  misc_feature (777)..(818): n is a, c, g, or t
tagagaagaagacgagataggggcatggagatagactcanggaagaaggagaaagagcaatcatgcagcttgggacaaatcttttgttgctttatcagattctcagtcaatcaattggtgtttgctagaaccggggtacgcaggggagtgttgaagagagagtgcgcgcgcgagaagagagagatcaagagaacgggcatcgccagctgcccggggggccttcactttgcagtcatcatctgtacaaactcttcataattgacctggccatctccatcgatgtcagcctccctgatcatctcatccacctcctcatcggtcagcttctcccccaggttcgtcattacgtgacgcagctctgcggcgctgatgtagccattcccatccttgtcaaagacacggaacgcctctcggatctcctcctcactgtctgtgtccttcatctttctggccatcatggtcaggaactccgggaagtcaatggtcccgttcccatctgcatccacctcattgatcatatcctgcagctctgcttcagtggggttctgtcccagggatctcatcactgtccccaactccttggtggtgatagtgccatctccatccttgtcaaagagggagaaggcctccttgaactctgcaatctgctcctcagtcagctggtcagccatggcgaggcccggggtgtccggagcacggggatcaaggttcctccggcggcggcagcagctgcagcagttccagctccgccgcgcgtccgcgcctccacactcactnnnnnnnnnnnnnnnnnnnnnnnnnnnnnnnnnnnnnnnnnnacggccctcgtgccgattaaacaccaggcctcgacctagctat

SEQ ID NO: 134564 - DNA, 695 bp, Homo Sapiens
  misc_feature (89)..(127): n is a, c, g, or t
tttggggacaaatcttttgttgctttatcagattctcagtcaatcaattggtgtttgctagaaaccggggtacgcaggggagtgttgannnnnnnnnnnnnnnnnnnnnnnnnnnnnnnnnnnnnnncgggcatcgccagctgcccggggggccttcactttgcagtcatcatctgtacaaactcttcataattgacctggccatctccatcgatgtcagcctccctgatcatctcatccacctcctcatcggtcagcttctcccccaggttcgtcattacgtgacgcagctctgcggcgctgatgtagccattcccatccttgtcaaagacacggaacgcctctcggatctcctcctcactgtctgtgtccttcatctttctggccatcatggtcaggaactccgggaagtcaatggtcccgttcccatctgcatccacctcattgatcatatcctgcagctctgcttcagtggggttctgtcccagggatctcatcactgtccccaactccttggtggtgatagtgccatctccatccttgtcaaagagggagaaggcctccttgaactctgcaatctgctcctcagtcagctggtcagccatggcgaggcccggggtgtccggagcacggggatcaaggttcctccggcggcggcagcagctgcagcagttccagctccgccgcgcgtcccc

SEQ ID NO: 134565 - DNA, 1607 bp, Homo Sapiens
  misc_feature (1252)..(1289): n is a, c, g, or t
agagtatcccgggtgggagtacggaatgaacagaaaaggggaaaaaacccagacgactgaactgcccacattgacttacttgtcccagaggcgaaagtcagaagcaagggcacggatcatgctctccgctgggggagtatgggggcaggcaggtgggcgagggaagaggcagggaagagggcacggagcacagatgtgaggaagcggcgccaagtcaccacggagaagcgggaggtgctggcggaccaggacgcagaggctgctgtagctgccgtcccctgggcagctggccgacaagactgttttattgcaggtgcgttctcttgagagcgtggtggggcccatcttccctctccccaccctttagctagcccagcatggttctgaacaaaatgaaagtcttaagggccatagaggggaaagggttgaaaagagaaccagcacattacaaagcgaccatccccacatccattcctaggacgggccctcagggcggtgggtgcatcgtgaggagggagcggcatgggatgttagcaccaggtatttacagaacagctcgagagcgcttcaggaacgcgggcaagtccaatctgcagagtggccaaatgagcagtccccacccagccaaacctcagaaagccaatcagatggtttcagaacagcagccagtgggatgtgagtgttgcccactgtcagtccccttctgtgagttggccccctcgaccccctcctgggccacatccagtcaacgccacaattcctcaacgccccctcagtccttctggaatgcctctcttggcacccctgccccaacaggctgctgggatctgcacgtggaatcacagggctggttgcatgcaacggcaaagggcatgctcttctgcctgggggagggcctcttgtccctcccagcaggtcccgggacagggctggcagccaccccagcacccaaaataagatgacaaacaagaggaaacaaaccaaaatggaggagagccatccgggctggaggagggcagaggctccccaaggggatctggggagggcttcaacttatgaatgcatcaggccttggaagacgtggatggaagaggcgagggcaaaaggaagagatgaggggcatggagagagactcagggaagaaggagaaagagcaatcatgcagcttgggacaaatcttttgttgctttatcagattctcagtcaatcaattggtgtttgctagaaccggggtacgcaggggagtgttgannnnnnnnnnnnnnnnnnnnnnnnnnnnnnnnnnnnnnacgggcatcgccagctgcccggggggccttcactttgcagtcatcatctgtacaaactcttcataattgacctggccatctccatcgatgtcagcctccctgatcatctcatccacctcctcatcggtcagcttctcccccaggttcgtcattacgtgacgcagctctgcggcgctgatgtagccattcccatccttgtcaaagacacggaacgcctctcggatctcctcctcactgtctgtgtccttcatctttctggccatcatggtcaggaactccgggaagtcaatggtcccgttcccaaccgcatcacccgtt

SEQ ID NO: 134566 - DNA, 852 bp, Homo Sapiens
ggagtcgatctcgcaaaaggagaagcccctcccctcgccgagaaaggcatcggagcaagagtccaagacgtcaccgcagcaggtcccgagatcggcggcacagatcccgttccaagtccccaggtcatcaccgtagtcacagacacaggagccactcaaagtctcccgaaaggtctaagaagagccacaagaagagccggagagggaatgagtaatggactcagtttggttttagtccacatggcctcctgtggatataaggatatctgtatgtggaaggattaagatctcccccaggcagctataagaatattttagtttttttcttatcaagtttctcaacctttatttttaatgaaggaggtgctgagttttgtatctttttaatcataatcaacatcagtttttgacccaactaaccttgactgtattcaaacttatgagagtataaaggatctggaggttggggatatgactgacaaggaaaggctgtggccacctgatgaccctttccctttttattaaaccggacacactggcccgcacatccgtactggcccgcgggccagtacggatgtggcccaggagggggtcgagggggccaactcacagaaggggactgacagtgggcaacactcacatcccactggctgctgttctgaaaccatctgattggctttctgaggtttggctgggtggggactgctcatttggccactctgcagattggacttgcccgcgttcctgaagcgctctcgagctgttctgtaaatacctggtgctaacatcccatgccgctccctcctcacgatgcacccaccggcctgagggcccgtcctaggaatggatgtg

SEQ ID NO: 134567 - DNA, 1483 bp, Homo Sapiens
  misc_feature (1052)..(1052): n is a, c, g, or t
  misc_feature (1136)..(1136): n is a, c, g, or t
  misc_feature (1261)..(1261): n is a, c, g, or t
  misc_feature (1282)..(1282): n is a, c, g, or t
  misc_feature (1301)..(1301): n is a, c, g, or t
  misc_feature (1322)..(1322): n is a, c, g, or t
  misc_feature (1326)..(1383): n is a, c, g, or t
  misc_feature (1401)..(1401): n is a, c, g, or t
  misc_feature (1413)..(1413): n is a, c, g, or t
  misc_feature (1429)..(1429): n is a, c, g, or t
ctgactgggaatttattcccctttggaaagccccattctccaatttgtttgcccccccttggagggttccacctgtgaaacttctggtttgggagctgaattaatgcccaaaacccaacttggtggtactttccttgaagttttggtaaaaagtaaagatgaaccctgcaacaccgccccaagaagacaaccagttctttcgaacctttttcccattttcagcaatttttgttacatttaataatccatatttctcttgatctgtatcttggtgctttggtgaggagggagaagactcattttcaggaaagcagggttttgaggcagttggagattccttatcattagtgtccaatacaatggtgctatgtctccactttgttaatactattggttcttgcagccgcctgtccaggctcctacttttaattatttctctttgctgctgggatgaagcattatactttggcaattcccattctgaccgagatccgtctgcactgtagtaatattgtctaccttgatcatcaacatgcttgagccacttttcattagtatagtcactggtatataaggtatgcccacgttcatccaactcttctgaccaaccccttggaggagaaccacactgactatctgactggctgtaagaagtgctgtagtagttttcttccgatgaaagaagctcttgatcccctggattttggaaatctcctttgctgatgcttgcatcccgagtccaacgaggaggtttccaagttctttcctgtgtccctctgttatagtaatagcaacgccctgagctgtctttatgagtttcccattctccattaatctgaattgccgggctcccaggaagtgggggaagagcagactgggatattttcagttcttgaaggttagcatagacaggagaatctggccttccttgatttggaggtgtggttgcccttatctgttcagtggagctgctgctaagttcatcaccagattcagaatcttgatgtattctttcagagccttctcctgcggaatcacaagattgttcctgngagaagctagttttctctacatccaagaactctggaccgggaaaatgaccaaatgagcgtgtcctattctggctggaactttangagaatgtgagtcattgttaaactttcccgttatatgggtcaggtccaggcttaggttgacagtctgaccttttgatatactgggtccaaattctgattggatcacgactacgactgttccttgnacagatgacgatggctttccngaacttgaagctcctcgtngcgattttctggctcgagggncaannnnnnnnnnnnnnnnnnnnnnnnnnnnnnnnnnnnnnnnnnnnnnnnnnnnnnnnnnatcgtcacatttcaacanatacgagcggancataagtgtaagctgnggtgctatgatgactactcacatatgcgtggctcatgcgcttccatcgggactg

SEQ ID NO: 134568 - DNA, 1042 bp, Homo Sapiens
  misc_feature (472)..(480): n is a, c, g, or t
  misc_feature (743)..(743): n is a, c, g, or t
  misc_feature (795)..(795): n is a, c, g, or t
  misc_feature (873)..(873): n is a, c, g, or t
  misc_feature (876)..(876): n is a, c, g, or t
  misc_feature (890)..(890): n is a, c, g, or t
  misc_feature (894)..(962): n is a, c, g, or t
  misc_feature (1002)..(1002): n is a, c, g, or t
acttatgaatgtttaggaaacaacatgaaagctgaaaatttatttcactaatatacataagaagttcacaacaatgaacagacagaaaatagcagtatatacagaatttcactacttacagtacattacaatagagaaagcattttataaacagttcagtattggattaaaatcttttaaggatggctaattctattcagcaggaatctaacttctagacacccagcaaacccattcctatcagggtgagagagggcttttgctgttgctatagtgtactgtaaaaatatttgttccttataaatgaagtggaccacagcaacttctaaatgaacattatattcagtgtaagtctcatattattaaatttcagatttttgactttttagatcgcaattgtttttaaaaagcaatttaaatgtaacagtgtttactttgaccatagatgaagttttataataaaagtaaaacnnnnnnnnnctgtttgcaaaagtatgaagcattaagaagcatggtgctatatatctctttatctacatttaccctggcccctctagttctgcatctaaacagaacctgtaatgtagaagttatgattatttgaacactttttgttttccttcagcattatacaatataatttaataagatacaaatgcatatttaatgtttgttcatgaagaaagttgtgtgagggtgggcatatatctaggaaaacactactggttactggcttctcatcnaatactacaaagtaccacatacctttgtttcagaaacacccattctacattnaaatctaattcctttatcatctatggctccttgttattatagaatgtctacataggtatttatttcctcgttcccgantcntgggctcgaggggncaannnnnnnnnnnnnnnnnnnnnnnnnnnnnnnnnnnnnnnnnnnnnnnnnnnnnnnnnnnnnnnnnnnnncacatttcacacacatacgagccgggagcataagtgtaangctgggggtgctatgatgagctactcacataattgcgtgc

SEQ ID NO: 134569 - DNA, 1035 bp, Homo Sapiens
  misc_feature (265)..(276): n is a, c, g, or t
  misc_feature (613)..(613): n is a, c, g, or t
  misc_feature (684)..(684): n is a, c, g, or t
  misc_feature (1015)..(1015): n is a, c, g, or t
  misc_feature (1023)..(1023): n is a, c, g, or t
tttcttcttaagattttatttactaggtagcaacatgtgattatactcaagacacatcaggatgccagtctagaaggaaacttacgtgattgtgttccaggggcaaacagaattaacccagtgtccaaggtggaattgtatagatcaagaaccatttcctaaggctgtggtctcttcaaagagaaaacctgatcaaaccatttagcctcaattctgaacatgtgattttcccaaaatcagttacattcgaaaggatatcattttnnnnnnnnnnnntcctgatttgacaactctatgtctttgaatttagaagtgttgcttcacaatctcgaattagagctgtttttctcttgcttaaatgagtttgcagttgtctgtcttaacagctggtctttagagctgcccctatctattttttctgtgccccacgaccactaggctacttctctgataatatatataatgtctaaaagccaaccgctgtttagatctgaagatctgtgggaacccgcctaccaatgagattgttcgttagggacactacgtgatttggaggacaaacaggattattacaggttctgaccaaccctggctcaaaggacagccctcccanagaatcagcagtgtttggaatgtcaagtgattgagaatctccttgtgaaggaggaagggttctgactgtgncctttctgaactgggccttgagggtacctttacgaggtgaccccggttttcatgttctgtagaggaaccctcgtgccgaatcttggcctcgagggccaaatccctatagtgagtcgtttaaatcgtaatcaggcatagctgtttctgtggtgaattgtatccgctcaaattccacacacatacgagccggaagataagtgttaacctggggtgctaatgatgagctactcaattattgcgtgcgctcatgccgctttcagtcgggaactgtcgtgcagtgcattatgatcggcaccccgggaaaggcgtgcgtatggcgtctccgttccgncatgaccntgctcggtctgg

SEQ ID NO: 134570 - DNA, 1591 bp, Homo Sapiens
  misc_feature (61)..(78): n is a, c, g, or t
  misc_feature (1232)..(1435): n is a, c, g, or t
  misc_feature (1535)..(1535): n is a, c, g, or t
gtgccaagctaaaattaaccctcaactaaagggaataagcttgcggccgcggctgtaggcnnnnnnnnnnnnnnnnnnctgaatggagatgaaaactatcatttatttcaattgaatttagtttcattaaaaaattctatgataacattaaaacagaaacaggacgtttatatgactgtctttaacctcaaaagtccaaataaacatatagacattttgaatatagctatcgttttaacaaacctcattatgatcactgttgcaatttcagtcacctaaaatacgaaccatgactattaataaacatttactgtgtgtggtttgttggactgaacattaaccatacgtgtatttctaagtactaggagttgaacagctactacggtcaatgtattttggcagttagctgtgtgtggtgtgtgctttttaaggcttcactcaataaaacatctgttgctctctgctgatgagcaaaaaacttgctatacgaaggacaaatatatgtatacaaacaaatgcacacgtgtgcatgtctatatacatatatgcaatttcagggaggtgacaccttattctgagaggtcatgagactccacttcaaaccataatagtaaaacctttagtaaactgaactcaacatattacagccaccatcatcaggaaaaattaaagactcatagttcaaataaagtacaaaaggtcccaggaagtattgtggtttgttgattcattcaacagaaagcccaaatgacaatgctattagtggtcaggagtaaactaacctggacaggctcatgaaaatgaacccctggatgcatcctgagaacgtactgcataattatagtcaatgcttgcaataattttcagtttgtctcatcacgttagcagagcctattcatgcaatttagaaaggatttcaatacagcccaaaccaaaaggcttacagtcaacagagggttagccttccataaatgagaaatccaaaaaagaataatgccacgtatttcaggaatgtcggttagaggtttggccttcttgggaagtgtcacaatgctgagtctaaaactgcaacagttaccgtgtccaagtcatgcaactctaaaggaggatggacggtcacatttgtgtccttcagtatcaaagcacctttaagggcttccattttgagaaagtagtattttctcttccttctcttttagaacatatgataacctcgtgccgaattctttggnnnnnnnnnnnnnnnnnnnnnnnnnnnnnnnnnnnnnnnnnnnnnnnnnnnnnnnnnnnnnnnnnnnnnnnnnnnnnnnnnnnnnnnnnnnnnnnnnnnnnnnnnnnnnnnnnnnnnnnnnnnnnnnnnnnnnnnnnnnnnnnnnnnnnnnnnnnnnnnnnnnnnnnnnnnnnnnnnnnnnnnnnnnnnnnnnnnnnnnnnnnnagctgcattatgatcggcaacgcgcggggagaggcggtttgcgtatggcgctctccgctcctcgctactgactcgctcgctcggtcgtcggctgcgggancgtacagtcactcaaggcgtatacggtatccaagatcagggatacgcagaagacag

SEQ ID NO: 134571 - DNA, 978 bp, Homo Sapiens
  misc_feature (129)..(329): n is a, c, g, or t
  misc_feature (403)..(458): n is a, c, g, or t
tccgattttgtacgtatccccttgatggtgtcgctccgcaccgagccgagccacgatcatggcgagagcggagacgcccataccaaccgctctcccgcgcgtgccgatcattatgcagctgcacgacannnnnnnnnnnnnnnnnnnnnnnnnnnnnnnnnnnnnnnnnnnnnnnnnnnnnnnnnnnnnnnnnnnnnnnnnnnnnnnnnnnnnnnnnnnnnnnnnnnnnnnnnnnnnnnnnnnnnnnnnnnnnnnnnnnnnnnnnnnnnnnnnnnnnnnnnnnnnnnnnnnnnnnnnnnnnnnnnnnnnnnnnnnnnnnnnnnnnnnnnaagaattcggcacgagggaaatataaaataaggtatattaaatattttagtacttatttgaattttagttgtgnnnnnnnnnnnnnnnnnnnnnnnnnnnnnnnnnnnnnnnnnnnnnnnnnnnnnnnnatagcaggaataaaatagataagacctttgctttcaagacaacactcagttgctaaacccatttccttttttttaggatattttcattgtctccgaattttagagctgaaaagtgccttagagatcatctagttcaacctctccgttcaaatggagaacctgagccactaagattcacaggagagtaagataattgagcaaacaactccaagtaatgacagaaaattataggagaatcagtacaaattgtgagaatttactatgttgttagcatcctaagtatgagtttagaaaaggtagaagttataagaaaagttaaattgttttaatatgaatggattccactgttaccttcaagataaaatgaagacatacttttttctttagtattatagttaaacgaatattgtatcctgtagtgactaaattcataaatattttttctgcttatagacttgagtttcaaaagcagctgtacagatgatgctgttaatgagtgtttaggtagtgttgattaaaa

SEQ ID NO: 134572 - DNA, 1002 bp, Homo Sapiens
  misc_feature (350)..(350): n is a, c, g, or t
  misc_feature (752)..(752): n is a, c, g, or t
  misc_feature (769)..(769): n is a, c, g, or t
  misc_feature (840)..(840): n is a, c, g, or t
  misc_feature (842)..(842): n is a, c, g, or t
  misc_feature (975)..(975): n is a, c, g, or t
aatctttaattttaacctttattatagattaaggggtacacatacaggtttgttacatgggtagattttggaaggctgaggcttgctgtcccaatgacctcatcactcaaacagtaagcatggtacccaacacggtggtttttcagcccaggtgcccctcctgtctcacctgtctagtgatctccagtgcctctggttcatgtgaattcaatgtgtagctgccactttccaatgggaacatgcagtatgtagttttctgttcttgcattaggttgcttaggataatagcctctagttccatccatgttgctgaaaaggacatgattttgctgtgtttggtggctgcatanatttccatggtgtttatgtaccacatttttttcattcaattcactgttgctgggcacttaggttgattctgtgtccttgctagtaagaatagcactgtaatgaacatattggtgcaggtgtcttttggataaaatgaattcttttcctgtggatatatcccgagtagtgggattgcaggcttgaatggtcgttctattttaagttcttggagaaatctccaaactgctttccatagcggctgaacaagtttgctttcccaccaacagtgtctgtttcttttcctctgcaggctcaccaccatctcgaactttgtgactggtacgagatggtaactcattgcagttttgatttgcacttatctgatgattagtgatattgagcattttttcacgtttgttggncacttgtatgtcttctntttgacaagtgtctgttcatgtctttgcacattttttaattgggtttttcctccttgctggtctactgttnangtactttgtacatctggatattggccttgtcaatgcgagttgcaatagttccccatcacaagcgtcagttacggtgatgcagtcttttcgtgcacactcctcctgcgactcgtggctcgaggcaatccctaanagatcgatgaatcgatcagtatagtgg

SEQ ID NO: 134573 - DNA, 995 bp, Homo Sapiens
  misc_feature (379)..(387): n is a, c, g, or t
  misc_feature (672)..(672): n is a, c, g, or t
  misc_feature (798)..(798): n is a, c, g, or t
  misc_feature (813)..(813): n is a, c, g, or t
  misc_feature (829)..(829): n is a, c, g, or t
  misc_feature (842)..(842): n is a, c, g, or t
  misc_feature (892)..(892): n is a, c, g, or t
  misc_feature (949)..(949): n is a, c, g, or t
ttttctgggaaatgtagtctttattctaggaggcatacccacttgaaaaatcaaaggttctatcattatgtgaaaagtaaagaatggatattgaaggaaaattggtgctctctgcacatctcttatttagatatttgtacagaaattcaaacttgaaaatcattctactgggaatatgacaggaatgactagctgacataccaactattctgggttttcatttataaaggattagtttacttcctttgttcatccaaaagcaatgaaatgcaaaacattacctgaatgagttccacgctatgttttattggtataaaaccaaaataagatgatgtaatactctggtctaccagttagttagctatttagacctaggtgnnnnnnnnntatttttaaggaaagaagaaaaatcttttacttataataaaatactgattagtcttgtcaatttatctgaccaaaacaaaaatagttctttaatttttatcaaataagtaaaaagtcaataataatattgttacttctgaaaaaattcataaaactgaaaggcagagaaaaatttctccagccatcagtatatttttctcctttattaagggagaaaaaaggtcttcatgattctgctaaaagacatcacctaacaacgcaaggggtagtcagggaatgtcttanatctatatcctattgatgaataccttttgctcttcctatgcaggaagactatttaaggtcatgttacacagcagctacatgatctggtgcaacacactataatcagtttgctttctgctgatgcanagctctcactcctantcagtgttatgtcaanagtgtcttcatcntatatataatactacctcatgtgatcttagagcatcatcaagtacaaaanatatatctaagtattttgttgaataacatggcaagttcattttctgaaagcagacanagtacaatagaacacttatatattaatgacaatttgatgatatgtg

SEQ ID NO: 134574 - DNA, 1145 bp, Homo Sapiens
  misc_feature (862)..(862): n is a, c, g, or t
  misc_feature (935)..(935): n is a, c, g, or t
  misc_feature (964)..(964): n is a, c, g, or t
  misc_feature (1009)..(1009): n is a, c, g, or t
tttttttcttccattcatttattataaccagatgatgaatgggaaaagtaccttaaagtaaacaaaactggtgctaatccatggcgttgaaggaaagttttgagagaaagctgtccagtgatggtcacatagatttttaacatgttccactttaggtaggcgaaacctttgagcagaaaatagtggatcttttctccaaaaggtgtttaattttatggagatgttgaaaggtacatgccaaatctgagtatacgtgtgaaaataatatgaaagaggagcaaatactaaaccttgtatatcaagtttacatggggaaaaaaacattagataaataaatacatttacatgcctctttaagaaatagccctttggcccacaggatatactgtttgaaaatggaaagttattactaaaaagtctgctataatttattttagtcttgcacttaacagtcccactttcacatagttcaaaatcaggatatgtggatcttgattgggccttaagatgtcagttttgaagggctcagtcagctgcgtgatactaagatgggccctttgaatctttaggaaagttcatccatttttagtcaataaaattggtgtactgtcaagtataagatttcttgaagtaagccacttgaaccattgtgaagctacacataacttgatgtctgaatgaggttaaaaatgggtgtataagtctttaatacagtaaaccatgctattaacccaacatctgttttataaagaagcaagtttaacctgctttgcagtcttaatttctgttaatgtgcaactttaccatgctaagacattagtaaatttataaattttcttgttgaacagcagcttcaatgcanacacaatgcttccagcattggtattttggctaaggtaatctacaatcactcactgttgatgttatggaataancttttcaagcattggttttaagtcatcanatattacaaatgatgtactcggagattacaaggctctaaaggcangatgaatctgggactgtgatctaactgcatactcatatcaaacgatgctccagctggggaagattgttactgagatgagcatttctctgcgatctggctcagcaatcctaagatcatatcgacagcaacgttcgga

SEQ ID NO: 134575 - DNA, 1709 bp, Homo Sapiens
  misc_feature (57)..(75): n is a, c, g, or t
gtgccaagctaaaattaccctcactaaagggaataagcttgcggccgcctgctcagnnnnnnnnnnnnnnnnnnnactgcttcaatggtcattttttattaaaagaaaaaattcaaaacacatgataagaaattagacttttatcaatacacaaataattttacttaaaatcaacccagttacatatttttaaaaaattgcagaacctctccacaccaatgtccacagcctagaacaggttcatgtgaaacctgcagtcctaccccggagcatcagttaagtgatggtccaggtactcactgacacgtttctcttgacactgagatggtcgcaaacaaaacaccgttcttgcctggatgaagcaagagttcacataaaagagctttataaaatgtctatgaaggagaattgataatatcagaagagctccagcacttcaattgaatataatcctctattattcttttcttgatttaatttctgtagctcccgaaaacttacttcaatcttgttgagctcagaataaacagatatctgagattttacaagcttgtaaagatttatcagtagcctctttgcttctggcatcattacaacaacagtaaaatttgcatccagaagtagacatatccaatccataatctggttcaaggtaggtgggtgtattccaggaagagtcatagtagcattttcgctacacttcaggtacaggaaatacaaatacttaagaaacagcgtgatatgctgtgctgggatgtctttcaaatgaggcagaagaaatgtctcgctatatgctgaatgaagaattgcattaagtagagctgctcttttttgtaccacagggcatgaagtgctctcctttgtttcgtcctggggctttttatttaactcttgatcacagttattgcatttatcttcttcaggattgaagccattttgaagaatttcagtttgctcttccattttctcatcatgtacagaatttatactatagtcaaaaactgactccatattaacatctgtttcttgaagactgtcatcaccaatgctcaagaaaatttttaagcaagcacaggtgactgattcaggaatgtcagggaactgctgtagacagagttgtaacaactgtacatctttcttttttaaggcaatctccattaagtcggggcacaaactgtaagaaagcacatgcgtttggataagctgcatcagacagttccggggataaaatgatggttctgctttacacctttccagaagtcctgttactgtgtccccaatgacagtatgaaagtcaggtgtctgcttcagagccaaaaatttccgtacttctacttcaatgtgtttttctgaatctttcattatggttgacaaaagttgtttggatggtggaacctctggctgtaaactcacttcaatttttcgtctccttaaaattcttcttgactgctctgagttctggaacccaagtccacatccttgaggtgtctcccagtttacaaaatgggacacgacatgagttcctggatcttgactatgcttgagttttccaagagcacctgctaatgatgacacttcacacttgtatggaatcacagttagagattttccatgtagcatatacatatgttctccataataccagagttgacccctggtcccttgtgcctcgtgccgattaacccccgtcctctacctatgccttattt

SEQ ID NO: 134576 - DNA, 927 bp, Homo Sapiens
  misc_feature (226)..(629): n is a, c, g, or t
  misc_feature (649)..(747): n is a, c, g, or t
  misc_feature (816)..(817): n is a, c, g, or t
  misc_feature (827)..(827): n is a, c, g, or t
catcacactgtcttccacaatggttgaactgatttacattcccaccaacagtgtaaaagcgttcctatttctccacagccttgccagcatctgttgtttcttgactttttaacagttgccatactgactggcgtgagatggtacctcattgtggttttgatttgcatttctctaatgatcactgatgttgagctttttttcatatgctcctcgtgccgaattcttnnnnnnnnnnnnnnnnnnnnnnnnnnnnnnnnnnnnnnnnnnnnnnnnnnnnnnnnnnnnnnnnnnnnnnnnnnnnnnnnnnnnnnnnnnnnnnnnnnnnnnnnnnnnnnnnnnnnnnnnnnnnnnnnnnnnnnnnnnnnnnnnnnnnnnnnnnnnnnnnnnnnnnnnnnnnnnnnnnnnnnnnnnnnnnnnnnnnnnnnnnnnnnnnnnnnnnnnnnnnnnnnnnnnnnnnnnnnnnnnnnnnnnnnnnnnnnnnnnnnnnnnnnnnnnnnnnnnnnnnnnnnnnnnnnnnnnnnnnnnnnnnnnnnnnnnnnnnnnnnnnnnnnnnnnnnnnnnnnnnnnnnnnnnnnnnnnnnnnnnnnnnnnnnnnnnnnnnnnnnnnnnnnnnnnnnnnnnnnnnnnnngggcagcaaaaggcaggaannnnnnnnnnnnnnnnnnnnnnnnnnnnnnnnnnnnnnnnnnnnnnnnnnnnnnnnnnnnnnnnnnnnnnnnnnnnnnnnnnnnnnnnnnnnnnnnnnntacaggcgttccccctggactcctcgtgcgcctctgttcgacctgcgctacggaactgtcgcttctccnntcggaggtgngctctcaagtcagcgtagtactcatcgggtaggcgtcgtcaactggtgttgacaacccgttagcgacgtggctatggtatacgctgatcaccgtagacac

SEQ ID NO: 134577 - DNA, 964 bp, Homo Sapiens
  misc_feature (678)..(678): n is a, c, g, or t
  misc_feature (692)..(764): n is a, c, g, or t
  misc_feature (815)..(815): n is a, c, g, or t
atagttgttaatctttcaacaacttttattgaacatgtagagagagaaggggaggttattaactctcctgctcgtactgggataaatgaagaagaaggcataaggacaataaacatggaactccactgcaaatggattttatgcagctgaggaaagtttgggcttattagtatttgctccagcgaacctccaagttttctccattgcggacaacgtaactaccagctccttggctcagtggttcgcctccactcagaagttcccagtaggttctgtcattattgttggcacataggccctgaatacaggtgatatagggcccccatgagcgctcctccattgtgaaaccaaatatagtatcattcattttctgggctttctccatcacactgaggaagacagaaccatttagcacagtgacattggtgaaatatgtttcattgattctcacagagtaattgacggagatatatgattgtgagtcaggaggtgtcacagttataggctcatcagcggagatgttgaagttacctgaagcagagacgcaagaagagtctttgttaatatccaagaaggtctttcccatcagggcaggtaagacctgggctgcagcgtttggattgctgaatgctccttgagaaatttcagtgagcactgtattcagagtttgtcctcgtngcgaatttcttggnnnnnnnnnnnnnnnnnnnnnnnnnnnnnnnnnnnnnnnnnnnnnnnnnnnnnnnnnnnnnnnnnnnnnnnnnatacgctcaaaatccacacacatacgagccggagcataagttgtaagctgnggtgctaatgatgactactcacatattgcgtgcctcatgccgctttcatcggaactgtctgcagtgcatatgatcgcaacccgggagagcgtgctatggcgtctcgctctcgcatgtcctggtcgtctcgtgcgacgtacatcataagg

SEQ ID NO: 134578 - DNA, 1045 bp, Homo Sapiens
  misc_feature (812)..(812): n is a, c, g, or t
  misc_feature (853)..(853): n is a, c, g, or t
  misc_feature (856)..(858): n is a, c, g, or t
  misc_feature (863)..(863): n is a, c, g, or t
  misc_feature (875)..(875): n is a, c, g, or t
  misc_feature (887)..(887): n is a, c, g, or t
  misc_feature (892)..(893): n is a, c, g, or t
  misc_feature (934)..(934): n is a, c, g, or t
  misc_feature (964)..(964): n is a, c, g, or t
  misc_feature (988)..(988): n is a, c, g, or t
  misc_feature (993)..(993): n is a, c, g, or t
  misc_feature (1013)..(1013): n is a, c, g, or t
acaattcaaacttttatttggcaataagttcagagtcacataacacataaaatcaacatttaaaataaatagcaaattcacatctagaataaataggtctgcctaatttgcattaattgtgcctgatatcatacaggcacaatctgtcattccatgagataactggaaaagtctccaaagtcagagttcaaacctgcaggactgaaaacacacagaagcactgtcgcaggttgggttccccgaaagcagatactgaggtggagaatggcgtgcaggaaggttcataggacagtgctgtgggctgagccggctgggtacaggcttgtcagggagaggcactgggctgtaatgtggccacaatgaggtctcactgaccccacaaggggctctggagctgggatggccccagagggtttcccaagttggggtgaggaggccagccctttgtaccccatatggagccggtaagggttacaggcaggaagggggtatgatctggggcaggcagggctcttcagcaggggaaactcctcataagggctggaagtaaatggccagccagcagcactcccagctgttaggggagtatgtccttcagtctggaaaggtcatccgggcagctgagctcagcacccagcactagcacaattacaaactaatgcaatgagaggtatattcaacaagtgtctgagcctgatggctcaagtacacacactggccatacatgttactatgcccaggaagtagctcagagggaatacagtgcacttatttcctacagacttttctcctctctgcatcccagctataanggttattcatctgcatgttctcagcaaggggaaatctgcantgnnncgcancacatcccatanagcaagggctancaagnncacagctgaggacaatacagccacagctgtctgggtaacangtgtgctggacaagcatgacatgtcatccnacagtatatagaaagcaacagcanagcanatactctatctggcttacangaaagttgtgactgcataggactcatcctact

SEQ ID NO: 134579 - DNA, 719 bp, Homo Sapiens
  misc_feature (517)..(559): n is a, c, g, or t
cagagcagagggtttttctatttattacaaaagttgttacacaaatacagctgaccagaaggtctaaaaacagcccagactcttccaaccctcatgcatctgtagatagaaggagagctgtggtcttgctcacacacaggggagcccttcttagaagaactgcctgtcccttggaaggttcagagtcttgggtccagcagcagagaggagcccaacctgcgtggacaaccccttgaggcagcccttggtcacagctgctctgggtgggcagcaggtttaagtttcatagttcacatgttcccaccacacaagtcaaatcaaggcatgaaaataaaagggaaaaaggggaaggctggaaaagggagcctggaagaggttgcaggtaggggaaggagacacagtgggcttccgagaagctggcaatttcttgacttggatggagttacgtagtattcactttaaaattattctttaaattgtacgtacatgttatatacttttcagtatgcatatcttnnnnnnnnnnnnnnnnnnnnnnnnnnnnnnnnnnnnnnnnnnnggcagatgatggaatagaaaagaaattaaagaggagagacgacgaaggaagaagatggccaaggtggaaaacgagaaagtcctggaggtgataatgctggcctcagtttctcttcttctgtctggatactggttctacttctagataccggagcccgacc

SEQ ID NO: 134580 - DNA, 883 bp, Homo Sapiens
  misc_feature (708)..(743): n is a, c, g, or t
cagtcgacggtagcggacatatgcccgggaattcggccattacggccgggggacaaatggctcaggtggactccgggctggagctgtcctgggggagcttgtttgcggcagcggctgctgctgccactgctgtgctgggggcccggtcgccaggcaaaaagccctcccacgtttgaggggagtcatgagccgtttcctgaatgtgttaagaagttggctggttatggtgtccatcatagccatggggaacacgctgcagagcttccgagaccacacttttctctatgaaaagctctacactggcaagccaaaccttgtgaatggcctccaagctcggacctttgggatctggacgctgctctcatcagtgattcgctgcctctgtgccattgacattcacaacaagacgctctatcacatcacactctggaccttcctccttgccctggggcatttcctctctgagttgtttgtctatggaactgcagctcccacgattggcgtcctggcacccctgatggtggcaagtttctccatcctgggtatgctggtcgggctccggtatctagaagtagaaccagtatccagacagaagaagagaaactgaggccagcattatcacctccaggactttctcgttttccaccttggccatcttcttccttcgtcgtctctcctctttaatttcttttctattccatcatctgnnnnnnnnnnnnnnnnnnnnnnnnnnnnnnnnnnnnaaaatttaaagatatgcatactggaaaagtatataacatgtacgtacaatttcaagaataattttaaagtgaatactacgtaatccatgcaaggtcagaaattgcaggttctcggaaggccactgggtctcctttccctt

SEQ ID NO: 134581 - DNA, 1022 bp, Homo Sapiens
  misc_feature (609)..(609): n is a, c, g, or t
  misc_feature (637)..(637): n is a, c, g, or t
  misc_feature (661)..(661): n is a, c, g, or t
  misc_feature (694)..(694): n is a, c, g, or t
  misc_feature (731)..(731): n is a, c, g, or t
  misc_feature (766)..(766): n is a, c, g, or t
  misc_feature (777)..(777): n is a, c, g, or t
  misc_feature (790)..(790): n is a, c, g, or t
  misc_feature (794)..(794): n is a, c, g, or t
  misc_feature (811)..(811): n is a, c, g, or t
  misc_feature (816)..(816): n is a, c, g, or t
  misc_feature (857)..(857): n is a, c, g, or t
  misc_feature (892)..(893): n is a, c, g, or t
  misc_feature (920)..(920): n is a, c, g, or t
  misc_feature (926)..(926): n is a, c, g, or t
  misc_feature (930)..(930): n is a, c, g, or t
  misc_feature (939)..(939): n is a, c, g, or t
  misc_feature (977)..(977): n is a, c, g, or t
  misc_feature (988)..(988): n is a, c, g, or t
tttttttgctggggaaaatcttaatggctaaaacataaaacaaacctgcgtgcacacaaacgagacacaattacagaaagcatagagcctggctctccccctggcctcaaatcccccaggtttgagagtcattacttctgggggatggtgactagaaggtggtgggagggaggcttctaggagctggtgatggtttggtggtttcttcacttgggagcctgctcctgggtgagtgcgggtgaaaagtcatccagcaagaccttcgcacttctctgcaggcaggtaggttatccttgagccatggggatgacagaaagctcccactgctcagcaggggtcccggctcctgcgcaggtctctacggactctctcctgtgacctgggcaatgcccagctctctccagtattcaggctgtggcgtccagcaggccgttatgggaaggaagggcaaaaggatcagagtaattgggatcagtgacagcggctaaggttcatgcagcagcaggggctcggcaccgccttctcggccctcggcagtgaggactggccttgccctcttttccatatgggcacagcgaagtgagggatcctggccaagtcacccagcangtgcgcagcgcggccgggtttgaatcangtagccaacctcagagcccatgtntcacccctgcctgtgtgacccaccgtttcccanaaacattcggctttctgatgccagagtccccatgcangctgtctgtctgcaatgtccttctgggctctcccnacttcctctgncatgcacccctgnctgnagtgtgctctttcctgngcagnccctgctctgtgcctgtccaatgctggagctcaacccccangggctgcactgggcactgaaggtcctcaagaacanngtcagtcctgctgtctctaagattcangaccangaanttatgacanatgatgcttctgatgtcaggcctttcactctatcctgntacgacacaanctgacgaaagtcaatccaagcgccgtatgcatta

SEQ ID NO: 134582 - DNA, 1073 bp, Homo Sapiens
  misc_feature (687)..(687): n is a, c, g, or t
  misc_feature (704)..(868): n is a, c, g, or t
  misc_feature (978)..(978): n is a, c, g, or t
  misc_feature (992)..(992): n is a, c, g, or t
tgatttccttaagtgtctttaatccttttggctcttttctgcctttttcttccttgtcagaatcatgccttttctgatatttttctttggattcatttcttttggtttctttgtcctcctcggctgagtccgtggaccagaggcctctctcttccccgctcaacctccggccctttggcgtttgggcagatacaggcatcagcttctctaactctgcagcacttttgcttctgtcttgattcctctgctttttaggcacagttttcttctctaagaaagcgttcttgttctctagcttcctgttctctctagtgtcctcagcctttctcggggtcttctttttcctcctgcctctgacatcggtatcctcctcagcactcatggcactgtctaggggcttctcaaagccatgctccagccccatgtcctgccctgctctctctcttgcacttttagtgttttgtttctcttctctgctgtcggaatgtagcccattcactgtcatcctctggaaagggagaatcattaagtgtctttaatccttttggctcttttctgcctttttcttccttgtcagaatcatgccttttctgatatttttctttggattcatttcttttggtttctttgtcctcctcggctgagtccgtggaccagaggcctctctcttctccgctcaacatcagnctcttgccgaattcttnnnnnnnnnnnnnnnnnnnnnnnnnnnnnnnnnnnnnnnnnnnnnnnnnnnnnnnnnnnnnnnnnnnnnnnnnnnnnnnnnnnnnnnnnnnnnnnnnnnnnnnnnnnnnnnnnnnnnnnnnnnnnnnnnnnnnnnnnnnnnnnnnnnnnnnnnnnnnnnnnnnnngttgcgtcacggccgtttcagtcggaaactgtcgtgcagctgattaatgatcggcacgcgcgggagacgggttgcgtatgggggctttccgttctgctcacggtccctgnccgtcttcggtggngaacgtacactcatcaaggcggaatgttactcagatatggaaagaagaagaactgtacaagcacatagcagatcgtaagcc

SEQ ID NO: 134583 - DNA, 644 bp, Homo Sapiens
tttttttaagaacagattagtcattagggaatttgagttgttgctgtgaggagtagagtgatgcagtttagaagtagatggaaatcaggatgggttggcctgggagctgtgctgagccgtgtgacacagtcgatggtgaactggcaggtgtaatctcgcagtcaggattcagagcctggggtacgcggtggcaaaggattccaagtgctgattctctggagaaccacaaatggagtgtgttttcctagactgttcttagatgttctgagatacggcactcggagtgctccccacaccctctacagctgagaacagggactccttcccacttgaccagcattctttggtttgggtgggatgagctctagagcccttgggcactgcaaggaaactgtacatcacactggaggaagaattgaagcagacgtttgggtttaatgaaatgttaattcatgactagagtgtagccattatggtcatgggtgctcccatcagactgctggtcatgcaggttcccaggacccacactcagcatgggtcaaatcttgatggagtggttataaaaatgtaaatcaaaagattgttaaatgttggcctggcgcggtggctcacacctgtaatcccagcgcattgagattaatgtt

SEQ ID NO: 134584 - DNA, 1004 bp, Homo Sapiens
  misc_feature (40)..(40): n is a, c, g, or t
  misc_feature (105)..(105): n is a, c, g, or t
  misc_feature (119)..(119): n is a, c, g, or t
  misc_feature (147)..(147): n is a, c, g, or t
  misc_feature (153)..(153): n is a, c, g, or t
  misc_feature (191)..(191): n is a, c, g, or t
  misc_feature (197)..(197): n is a, c, g, or t
  misc_feature (203)..(204): n is a, c, g, or t
  misc_feature (207)..(207): n is a, c, g, or t
  misc_feature (229)..(229): n is a, c, g, or t
  misc_feature (241)..(241): n is a, c, g, or t
  misc_feature (245)..(245): n is a, c, g, or t
  misc_feature (250)..(250): n is a, c, g, or t
  misc_feature (266)..(266): n is a, c, g, or t
tgtgtgtggattgacgtaaattaaccagacgtttactgtnggattatcgctccttggggatgcctggagcaagatcgcagagtttttttgaattagacctacaangaactggtatgagnccaagcggctacagttttgcgtcgtcantaatcntgatgtccgggaacgggatcagaaatgcagttcttgtngaaagngcgtanncanggaaaaggaaaaaagtagctcntacccaatcacnaacntattnttaaccaaagcacatntgatgagtatgaaacctccatggctcagaaaaagatgctaatatattatctcattgtttacataagcttttacagtttcagacctcagcagctgtaaggccagtccagggaaccctcccctgctgctggaaacccttctgagttggccctggagtggctcacgggcagagaagggtagccctggggctgggggagggattggaagcctccctggagtcacctgagccctcgtccccattcccagggcccctccaagcccagctggcaccaaagagcttgggcccgtgctgaccagcccccaaggccctctggccggaccatgctggtcctgaccagctagcctacgcggggatggccgtcagttctggccacaggacccgagtctgggcttgggtccccctgctgctctgcccgtgacccttggggatgggttgatgcgagggtcccactcaagccaaaaagccgggacctttgcgcagctctgtcgactctggtgggtccccactcctggggccccctaaccccaccccaggcagcggaaggggctgactgggtctggtccttaccaacatagacggtgcaaacactcttaacagtgttgtttttgtatcaatatgtttgtgcagtgatgaatgtatttatttctcagacttggggcgagtgagcgggtggcaggccgggctccgccactgcatgctcccgccggaccgagccccagcaagggctcctccaggattg

SEQ ID NO: 134585 - DNA, 1737 bp, Homo Sapiens
  misc_feature (13)..(13): n is a, c, g, or t
  misc_feature (93)..(93): n is a, c, g, or t
  misc_feature (156)..(156): n is a, c, g, or t
  misc_feature (227)..(227): n is a, c, g, or t
  misc_feature (270)..(270): n is a, c, g, or t
  misc_feature (326)..(326): n is a, c, g, or t
  misc_feature (1039)..(1050): n is a, c, g, or t
  misc_feature (1063)..(1063): n is a, c, g, or t
  misc_feature (1074)..(1074): n is a, c, g, or t
  misc_feature (1104)..(1104): n is a, c, g, or t
tagtaaagactgntattagcagaaagactatgagatacttatgtgatgaaatgtacacattgactgtttgccctggatccagtgcccttacantgcaccatgaacctacactccctgtatcatagcgctcatcacctcaacagtcagtctctccanttatattttacaaaagtatacatgggaacacgtgtcattcattaagtccatcttgcgtgcagctatatccntgattggtattttccctgtcctttctgagattctcatgtcatnttcttcatcggatgtgactaaaatttgtctggtgtcttctgccctctctttaattntgcctcttgaggggtagcagatgtgtcagtgcattttattacttgctgaaacattcaggcttacatttcttattagtttagtattttaaaagatttaattttctgaatgaggcatttgaattgtaccagcaatggacttttaaaaaattggatgtaaaaccattcagggtgatttttcttgtcagtggacagtgacgaacagagatttgaaatcccttacctccaataataagccattcagcctaaattcatttttatgaataaatctcttctttctcatggtaaatgtggcttgtgccactcaaacactagtgaaagggtatgtacaaccgcaacatcaggccaggacaccatttatttaaccaagtaatggaggagagtgaaacattttccaaggccttatttctttttcagaatgctttaagtgttgattatgtgtgctgggtctctagagaagtttttatttgttacaatactgctgctttgagcaattttgtttctcttcattgtctgttagggaaatcaccagctttggcatcttaacaacaaacagtggatgggtaatttttatttctgatacgcatctttagagtcaaatatatcttttccctgtactcctcatgtacaaccaaagaacatacattatgaaaattgtattataatatctggaaacacaacattttcctctggcaggtgacttttgtacgaaatgnnnnnnnnnnnncctgtattttttntgttgttcttntgtgattaaggatatacatttagtagtctntgttattaaaggaacctgctgataagtacaagtgtgaccatctcattcaaatgtttgttgttatgatgcaaatggatattggtttcaatagaagctggatccttaatactgcattttctgaattctgttttaatatttgtgttaaagtagacatagctgaactcacatggaatcctggagttttgttatcagcagctttgcagtttgggaaacaaagaaaccaaagctgagtgttttaaagaatgaacatatctggaaatccttgctctcaaaacaaaacaatataatctatcaaaggtgttttactcagtgttctaatttttaaaaaattttatctgcatatttgcatcaaatatttatgtgtaaaatgtatgttttacctccttaaaatgcctaaaagttagttaatagttactttggtttaacctatacacaatgattaagtgcatttaatattggtaatttaatgaaaaccattccttgcccaatggatgtataaatttttgaaagaataagcagaattatataatatgaaatgctatgtaaagttttctatgtaaaaatattatgtataatactattaaaatatcccatgctttgatcaggtggtacatcaataaaattttaaaaagt

SEQ ID NO: 134586 - DNA, 1045 bp, Homo Sapiens
gtataagcccctatttatttagaatctatattttcgaaagaatatgccttaacaaaaggaggtagtattctgaaagaggcaaactcactaaatctaggtagagataaagattacgtggaaactaaacaaatgtaacatattaataactgtgacacttattaaagtattttgatattaatgaatcagcttttaaaatcaaggctatcttatcactttagctatatgattacagctctttcaagtagttttcctttggtactagaaagtcatttttctaaagagcattaacatttcaaataagcaaattttatttaaagatgtaaacatgtaaacattaaaaactcaactaaattttatctttattatgatggtcactgatttaaactattaatgaaaatatgtcatgtcagagatataaagaagaatatatcacccagatagtaacatgcaattaatttccatttgattaatataattggtgatttaacacacatacatatatacacagtagtttggagcaatatataggcaaaacaccataataatttatgcacagtatttaagaatgtgggccttgataacagaattccaacaagattttttttagtgtattaaatgtaattggataaaatacaattaaaagcagcagtgaatatatttcctatctcaataacttaaaaaaacttctttatgtaaactttatacatgtgcattcttgctcttttctatatgttttacagttcttggttcttcttttaaaatagtatttgccactcttctaaatttttgaatagtctaaatggagggaactgcttgtgatacattagtcttcttcagcatcatatgccacttctgctacttctatctctgatacagcattttcaggttcactaaaacttaagcatggtttattatcagctctagattcttcatccaggacatcttgatcaacctcaagtgcagaggactccacctttaggatctgttcaccttctgtttctgacacatccagtgattcttcaggttctaaagacaatgttctgat

SEQ ID NO: 134587 - DNA, 974 bp, Homo Sapiens
  misc_feature (109)..(121): n is a, c, g, or t
  misc_feature (308)..(318): n is a, c, g, or t
  misc_feature (546)..(664): n is a, c, g, or t
  misc_feature (729)..(737): n is a, c, g, or t
  misc_feature (745)..(745): n is a, c, g, or t
  misc_feature (759)..(759): n is a, c, g, or t
  misc_feature (792)..(838): n is a, c, g, or t
  misc_feature (841)..(842): n is a, c, g, or t
  misc_feature (847)..(848): n is a, c, g, or t
  misc_feature (868)..(868): n is a, c, g, or t
  misc_feature (927)..(927): n is a, c, g, or t
  misc_feature (930)..(931): n is a, c, g, or t
  misc_feature (937)..(937): n is a, c, g, or t
tgtggtccaaaggacagtttatttaaaacaaacgtgatgaggtataggaagaagaaaagaaggagaacaacaattctaacataaaaacacaggaagcatctcaaacttnnnnnnnnnnnnnggagtgggggcaatggaggaagctatgtctcatacaaactgctgacctcaattgattacttacatccaaaccttacaaaatagcatttcaagtcagcacttaagccagtgttattagattttcttacaaaaagttaaagctacaaacttcacatttttaaactgtacatagcaaaaacatttaagcnnnnnnnnnnnccaagttggtccgagtgcaagctggtaaaagagattttttttccaaacacaaacaagaacatgtattccaaagacaatgaatataatactgataaaaacacaaacatagtgcttaagaaaagatggggtgaggtggagatgtagattgggcaggaacaattttctagtaaataaggagctgcaatctttagaggcaacatggtatgctagaaaggacactggaataannnnnnnnnnnnnnnnnnnnnnnnnnnnnnnnnnnnnnnnnnnnnnnnnnnnnnnnnnnnnnnnnnnnnnnnnnnnnnnnnnnnnnnnnnnnnnnnnnnnnnnnnnnnnnnnnnnnnnncctatatctcccagcactattaagtttctatagatatagggctattcagattatctacttcttcnnnnnnnnngagacggngtctcattctgtcnaccaggctagagtgcagtggtgagacatggctnnnnnnnnnnnnnnnnnnnnnnnnnnnnnnnnnnnnnnnnnnnnnnntannaagannaaagaagagagagagagacnagactattaattcgcacagcaaatggtgcaggggtgtgcatcctggatgctttggtttntannactacntgggtatcagacttactactaatcagctgtctttcca

SEQ ID NO: 134588 - DNA, 677 bp, Homo Sapiens
  misc_feature (641)..(641): n is a, c, g, or t
  misc_feature (646)..(646): n is a, c, g, or t
tttccatggaaaaaaatggaaaaatttcaaagcttactttattaagcagcatataacaaacagcttttaaagttaaatattgttatggccgtggagtttcattaaacagtatttctattcacacccaaccactggtaagtttgtagaacatctcttcatctaaactctcgttttggtcttttgcacgtgttgagagaaatatgtagccaccaatgaattcatgaaccactttgcaatctacttcagtacaaatgaaggacaatcgtacttcatctgcaaactctacggtgaccattttgatttcccagttgacattccactgtttcatgttgctgaaacgccatgttttaattgcatctccagtgctggcatccatccgaatcagtctgttgtatgcaattccaataagttcttcttttttgcccccttggaaccttgcaatgaagtgagtgatgccaaattcaggtagtgactgccaagcttgaataaatctcatcttggcttctattagactcatctgagctacattctgatgggcctccaagattctcgctgttatctgcttgttcttatacttttttgatagcggggagacaccaaacattcaggaggtatatctgtctgatctggtctggtattanctgangatcgtggttaatgctgctctttcgaacgaa

SEQ ID NO: 134589 - DNA, 1059 bp, Homo Sapiens
  misc_feature (60)..(91): n is a, c, g, or t
  misc_feature (320)..(328): n is a, c, g, or t
gtgccaagctaaaattaaccctcaactaaagggaataagcttgcggccgcctgctcaggnnnnnnnnnnnnnnnnnnnnnnnnnnnnnnnncctgtttaaataacaaatacaagtcacaggtaaatatacgtgagaaaaatacgaggctaatattaaatggcaggtaaggatactgtcactgtaagaaaaaactggcaggatgtgtgtatttagtctatattttaaagcacttgatagaaaaggcgtatgcaaggtttttccaaacaatttttctgtttgtttgtttgataactgacaacaatttaagagtataatgagnnnnnnnnnggaacaaactccctctcaaaactattgacctgctcatcccaaaccatgtatatgttgatggatggatgtgtgtttttgtggatatatggatttataccgtgcacagagtgatacaagcagtgttccatgcccacctgcaaagattggagggtataacactgtagtcattcagcccaggttcctcttaggaaattaacctttcaatttaaagctctctttccttgcctctccctctttccaaactcttcctcaattcccaggtctttgttctgaaaagacaatctggttagaaaagttgccctccactcataattcactgggaaatggaaactgcataaacagtgacacacagacactggaaacaccacttgaatgaatgaatgaatggatatgtatgtgtgtgtgcatgtgtgtatgttttaggtcacatacacatacagtgtgtgcgtgggtgtgtgtataagaggtctaaacttacaaactgagcgtgtcagagtgtgtgatatgacttgtgataatatggtgttatgggaaaacacattttgtgcgcatgatgaagagagcaccgtgaatctagtcttgactgcccctggtggaacatttgaaagcccttgggactccaggagagatgtttttgcagcatgtatgctaaatttgtgagttagcaagaccctgctgtgattactatgttgtacagatcttcaaagtatattgcctaatatgagtcatgt

SEQ ID NO: 134590 - DNA, 896 bp, Homo Sapiens
tttttttagggaaaagtatatttactagacttccataatccatacttactttaaattcaatctagaaataacatgactcatattaggcaatatactttgaagatctgtacaacatagtaatcacagcagggtcttgctaactcacaaatttagcatacatgctgcaaaaacatctctcctggagtcccaagggctttcaaatgttccaccaggggcagtcaagactagattcacggtgctctcttcatcatgcgcacaaaatgtgttttcccataacaccatattatcacaagtctatgaacaattctggttagctaaggtaggcagtatagaactctttacaaataacagtatttcaattatgccatgtaagtaaacaatttgctgtgaactgtcctgtgtatctaatcatttaatacattgcttctataagaaaatactatttgttaaattttagtcataatttcattgtttctcatcatagactgcagatgcaaacatttaatggtgaacaaaatgtttatctcaatttttctttgacatttttatgctttgaaaattcagaatggataaaaacaaatgaagtacaaaatatttcagatttacatagtgataaacaagaaagcacttatcaggaggacttacaaatggaagtacactctagaaccatcatctatcatggctaaatgtgagattagcacagctgtattatttgtacattgcaaacacctagaaagagatgggaaacaaaatcccaggagttttgtgtgtggagtcctgggttttccaacagacatcattccagcattctgagattagggtgattggggatcattctggagttggaatgttcaacacaagtgatgttgttaggtaaaatgtacaacttctggatc

SEQ ID NO: 134591 - DNA, 988 bp, Homo Sapiens
  misc_feature (758)..(759): n is a, c, g, or t
  misc_feature (852)..(852): n is a, c, g, or t
  misc_feature (855)..(855): n is a, c, g, or t
  misc_feature (889)..(889): n is a, c, g, or t
  misc_feature (893)..(893): n is a, c, g, or t
tttgcagaatcaatttttatttctgaattatacagtgaggctatatagatatattgtgtcattaaagacttttatattattaatctacattatggagaatttatttaccaaaacgaagtctaacagacactttattctgagcaatccaatgcatgatagaaaaacctttagatatataaaagattaatttgtgcacatctaaatgtttctaagggaacaaactactgaggcattgtgataagacgagagttgcaaacatagtaccataactgaatatttaaaattacatcttaacaaaggctaggagtagtgacttcctcacacacctcagagaatgtcttagagagtaaccccatagaacattgtatggcttcaacagaaacttcaggattttcttccacactgagctactgccctcaaacaaactttctcactccttgacactatcttctgtgcaaatttctgttctttctcttaatcaaggagctttgagaaacaatgcttttgccccaatgaccccttggttcccttaactacagatctataggagaaatgcaaagcagttcccagaagtcagaaccaaagcaagaatgttcagagtgcaagagctagagagctaaatcatgtgaatgtttacctctgtctacctatctgcttagggattatttttctaggattcatctaggattctatttacttggggtgaatgtcatggtagcttttccctagcacatgcaattaaattatttgtcttttanngatataaatagcagatacttaaatatcagagtggttatgcagcctacagacagctgaaacaaatcattgggcaaatgacataatttcatgtanganatgaggctcaacagatacactgagtattttcaanatgnctggccagttaaatataaataatgtgagatgtgctgtgtcgttggtaaacagagctctagacagtctagctcagttgacctcggcgaatctggcc

SEQ ID NO: 134592 - DNA, 1031 bp, Homo Sapiens
  misc_feature (919)..(953): n is a, c, g, or t
tttaactttccaaatactgtttacttcactaaaacctggagcgaggcagggaaaaggtacatcaatgtctgagacaccaagcctaggagtgcacattgacaacggcgacatacagggccaaagtgctgagggccagcagccccgttaccactgctcgggccagtagagctgcccaactgcccagcgagcagaggtggacgaaggtctccataacaaaggccttgtagacactgaggaacatcagcaggaggacagctggccggaaggtgtggtacagatcatagcgtgttatcatccagacctgagcagacgcgacgatgtaatggaccagactgatgttggagtctatgctcatctggatgtacttccagtcaaactcaatgccccgggctccgacccataggggaatgcagcgggacataataagctcagcagtggcccagcccagggcagcaaccatgatcttgtactctcccttgccggcattccgggacatgacaaggtttagacctatcaggtctgccacatccacgctggccttcatgaactccccaatgaagtcatagatgccgccttcccaggtgggaaagaaagtggccaagaacagcatcttgcagagttggacaaagaggtaggtgactccagcctggacgcatttccagaaggcgttgtactcggacaggccgctgcacttgtaggtgatgaagtaggggaagtaggcaagagcgaagcagttcccgaagtgaaacagggtcatgatgccggccgcccggtcccgcccgcgcggggatcgcgaggcggcgtctccgggagcgggtctccggctccgccggctctttcgccacggccagggcctggcacccacctccccggccgtaatggccgaattcccgggcatatgtccggtaccgtcgactgnnnnnnnnnnnnnnnnnnnnnnnnnnnnnnnnnnncgggccgcttcctcgctcacatactcgctgcgctcgtcgttcgcagctacagcgctagcgccctatagtgatgataca

SEQ ID NO: 134593 - DNA, 1300 bp, Homo Sapiens
acattcaaaaataccctttatttccttttatgctcaataacaaaatgtctttccaaaacaaaaaagagtcatacttctggaccatgaacagatggcactggtgtacccgcgtctcatgcacgtaggcacacgcaggcccaggagcacctgagcccttctaacgtggacacacaggctgtagtggtgccccatgaacacttggcaaggacctactttttgtcttgaatgtgtccttccaccttgtgaagttcttttccaaataatccacacggtttaaagtgaagcacacacttatgtccagttctgtggtttaaaatctccactgtcccatactgctctatccacagcttcccgatgatgacgttgtggacgcagcaggtggggttggtccaggtgtaggcttcattatgtttgagcagcttcagggtgatgttgcctcgggggtcccgcttccacggtttttgccccagaacttgagcttggggtagatggagccatgggaacaggaagtcatggttgagaccttccgagtggaacgcactgatgggggggtggtgactgacctgttccgatataaatctgaatcctaaatcttccctgattaattcatacgtttctcccaagagtggattaaatggtttgccggtcctctcccactgggaagccacagccgaaacagcaaaagcagccacagactgcatcctctccaggggctggggctggcaggaggccctgtggatgaggtacacgtgctccatgtactccgtgatccgctgcaagaagctcagaggctcgttgaaggcgattggcatcgtgatcttggacagctccaggccaacacacttcttcaggatggtccacacgctgaagtcgcttctgctgaacatgggagccggcagcgatgtcctgtgtttctgaattccgttctcttgagagggcctctccccagttttcccaatcctattatttttgctggtgtctaagtcaatcattcccgtgactttctgatttgcctctgaaaattccccagaagagttatcagaatcaaagcctgtgacggcatcaaagaattcttcctctccgttcatccttcagcagccagcctccactgcccctgacatgtgctcttctactgaatcatcgtatctgatccacatctacagtgtaaggaattttacaaactttctcttggaaaaatccaatagacactgaagatctggacgcgggtccctcggttgccggccgagctcactgccgccggacgcgtggtcgacgatatccggagaatccggaccggtcc

SEQ ID NO: 134594 - DNA, 1034 bp, Homo Sapiens
  misc_feature (469)..(948): n is a, c, g, or t
  misc_feature (1005)..(1005): n is a, c, g, or t
cagaatcctgggaatcagtccgcattttattttatagtacattcatataagttcctgcatttccaaggtaaccaggtcacattcaggttagcactgctggtaacaaaatcatacaactaccctggcttcaaaaacaagatagggtaatgcacattaatatctctttccctttaatactgcagaagacaatacatcacaaaataaaatctcaaaaatcacatgccttttacaatccagtgtgaaggcatattatttatgttaaaattagaccatgtggaacatgagaataaagagtttgaaagctctctaaaatttctcccaatgccatctttcgcttctaactgccagttggcacattcagcttcaatgccttgggaagggaggagcagaggaaagcagggggtcactgaactccaaaactcatggttttccaggctacttctatagacatcctcgtgccgaattcttnnnnnnnnnnnnnnnnnnnnnnnnnnnnnnnnnnnnnnnnnnnnnnnnnnnnnnnnnnnnnnnnnnnnnnnnnnnnnnnnnnnnnnnnnnnnnnnnnnnnnnnnnnnnnnnnnnnnnnnnnnnnnnnnnnnnnnnnnnnnnnnnnnnnnnnnnnnnnnnnnnnnnnnnnnnnnnnnnnnnnnnnnnnnnnnnnnnnnnnnnnnnnnnnnnnnnnnnnnnnnnnnnnnnnnnnnnnnnnnnnnnnnnnnnnnnnnnnnnnnnnnnnnnnnnnnnnnnnnnnnnnnnnnnnnnnnnnnnnnnnnnnnnnnnnnnnnnnnnnnnnnnnnnnnnnnnnnnnnnnnnnnnnnnnnnnnnnnnnnnnnnnnnnnnnnnnnnnnnnnnnnnnnnnnnnnnnnnnnnnnnnnnnnnnnnnnnnnnnnnnnnnnnnnnnnnnnnnnnnnnnnnnnnnnnnnnnnnnnnnnnnnnnnnnnnnnnnnnnnnaaatcgagctcagtcagagtggcgaaccgacagatataagatacagcgttcccctgnagctcttctggctctctgttcgacctgcg

SEQ ID NO: 134595 - DNA, 996 bp, Homo Sapiens
  misc_feature (74)..(74): n is a, c, g, or t
  misc_feature (85)..(85): n is a, c, g, or t
  misc_feature (129)..(129): n is a, c, g, or t
  misc_feature (141)..(141): n is a, c, g, or t
  misc_feature (169)..(169): n is a, c, g, or t
  misc_feature (179)..(179): n is a, c, g, or t
  misc_feature (188)..(189): n is a, c, g, or t
tgatagatcgacaacctcatcactcgcgaagcacgggaggctctgggagcagtccaaacactggacttagagantaagcaaaatnccagggggaaaaaaatcaggatgcaaaatgcatcaggaacagtntataaatgaatnttccctctgtaaatgaaatcgtaaaatnacatgaaaantgaaatatnncatgggagattgtttattctgcatattttccttcaccattgtcacctttgttaaaagtttccttcagatgaatacataagaaaaatccaaatccaaaagcttcatttttatttttggtatttaataagattcttttctggcaaagaattcaaggtaaaagatttttatacacactttagtattacaactattttaattattactagtaattaaaacctctgttctgtgcatactgttttttccaagaaaccctcttattataataaaatcttgagtcatttcagctatgtgcaaagttgataaagtcactgactgaatttttttaaaaagcttgatgcttaaatgcttaaataaatgcttaaatctacttttaagcatttatgtcagtgaattcaaaatactattatctttaaatcactcaaaacccattttaaacttgtatgcctttactcagttagttccaatggagtgttaaagggaggaaaagaagaaaaaattactcctaggactgagtaatattctgagctcatcaatctatctttaggtattgggaatatgcattaaaaacatttttttaccttgtctcgtgatacagctgaaggtaattctctggctagcctgtttctcctttgttcctaagaaacacaagcaaaacaaaagtgattatccaagtattgagatatatgcctactaaaaaatgttcatgttaattgaaaagtgtggagtaacttacagatacatcctctcactgttgggactcatgccataattatcatattttaaaataaataagaaatcatttaaccc

SEQ ID NO: 134596 - DNA, 993 bp, Homo Sapiens
  misc_feature (861)..(861): n is a, c, g, or t
  misc_feature (870)..(870): n is a, c, g, or t
  misc_feature (926)..(926): n is a, c, g, or t
aatacaaatacaaaatttatttccatagaaagcaaaatttataagttaaatataaagattaaaatagtgtttgaaaagctcactatagtgctaacaaactaaatgaaaataaggctattttgcatttaaaactgaaatacctcttaaaataatttgatccccagtgtttgctctttttgaagtaaccaacttactcttaaaaaggatggctgccaagatggaaagtcttactgggttttcatgttaacctattctttggacataactatgaattttgtatacaatgcacttcatgaaaagttgtggctcccccagattgcccacaagtgtgatcttgaagtcctaaacatttgtccatgtaagcttcaaaacagcgttaactgagttattcaagtagcagtacttaaagatacaattcttgaagcagtttcaatggtttctgatccaaataatcagtttctgaacattactacttcacataatagagtccatcttcagtttcttctcactttctctttcccttttgggtttcctttttgtggcctgaggccaccagttctttgggtactatcaagatacttccatcatgggtacactggagagcatagtggttgggattgactggcctaccttggtcatctcttaatctactaaaaatatcatgataaaggtcatgcagtttctgtttcattatgttaatagctttgttacattgtgcttgctctctcttacgagtttcccttcttgctttgcagtacatacatcatcgtctaaattcaaattatgtcaatttgcgttacgacattctgcgcagcacttttattttcctcctcgtctgatgtacggataatgagactgtangtctgtcanatatatctacttacatgctatgaaagatcaacctcgtgcgatttctggctcgaggncaatttccctaaggagtcgtattaatcgtatcagtcaagctgttcctgtgtgaaatgtatcgctcaa

SEQ ID NO: 134597 - DNA, 1636 bp, Homo Sapiens
  misc_feature (1528)..(1562): n is a, c, g, or t
gtagcacgcggggcgtctttcccgcgggggagcccgtgtgcccacccggggtgtattgtcataaccgctgtgaccgcccagctggtaaaaaaggccattcccggcaacgctccattaagtagcaaggctgaggaacccgcgagttcggccttcttatgacaacaagccaggagtttacagagtcagcagcactcagtattgacgtggtttaaagtgaattgcatcgggaccactctccctggctgctgagtggaaggcacaggggatggcaaacaagcccgtccgggctctgaaccaccagttggcagccaggatgactccagtctttagccaagagctttccattctaactcccgaatcccagaccagatggatgtctcctcccaactaggggcagagggtagcacagacttccaaaggaaacaccttcattaaatgcagcaggcagtcctatatgctgacccttgggtcaaaccacagcttaagcgggggaagaagtggttctgatccatgtacagccagatctgctgaggagtctggggttcccaggaaccagatttgcagatcctggacgatggtgcttcccttgctggcaccgtatcacctaacctaatggtttctctgaagacagttggcggagaggcaaaaatgactgtcttaaacaggtcttccgacacgtggacagctcagcaggaccacacacctgtccagggcccaccatgaggcagccatcaccaacttggtaaggaggacatatcacacagcatcttcagggtgctggaggcaggcgctgtgagctggagggcagcacctgggaagaggactcctcggatggggctgctcctgagcccatagggctcagtgtagtgatcctgctcggctggccacgaagtgtcagagtaatggtggtggggaccttcaagcctgatgcttggttagagatctgagccaggccagggaggctgcttgccaacttagcgaggcccccattggtcagcagctggtggatggctgtgggcttcccaccaggagtggcacccaaggaggagagagtggtggccacaggaatggtacggacaatggtgctggtgcccgtggtgatggcacccaggctctgcatgggggtgggcaacttcacactggtggcctgtggggctggtcctggggagggatttgctggaaggccagaggtcttgctgctgatatcctgcaagctgaagctgaggccttggaggaggctgctggctgatgtggcccctgggagggagctgccaggagatgtggcccccaggcggctctgcagtgtgtgcaaggcactgggtgcagtgctgctggagaccactgaagggactgggctggctgagactccaccttcagaagaactggacttggctgtggtgagaagtcctgtgagctccttggcccctgctgaagcctgccccagtgtcatggtgatgggcttcccacctgcagcttccccggccgtaatggccgaattcccgggcatatgtccggtaccgtcgactgnnnnnnnnnnnnnnnnnnnnnnnnnnnnnnnnnnncggccgcttcctcgctcaatactcgctgcgctcgtcgttcgctgtaaggtggcgcctatagtggtctataagtt

SEQ ID NO: 134598 - DNA, 977 bp, Homo Sapiens
  misc_feature (625)..(625): n is a, c, g, or t
  misc_feature (732)..(732): n is a, c, g, or t
  misc_feature (763)..(763): n is a, c, g, or t
  misc_feature (765)..(765): n is a, c, g, or t
  misc_feature (801)..(801): n is a, c, g, or t
  misc_feature (816)..(816): n is a, c, g, or t
  misc_feature (850)..(850): n is a, c, g, or t
  misc_feature (860)..(860): n is a, c, g, or t
  misc_feature (926)..(926): n is a, c, g, or t
ttttttcacactgtcacaatttattgaaattttataaaaactcaggccaagtggaagaataaggtacaactcaagagtacaaagacaactccgtttccgttcagtacttttctcctcagcactggtggtaagaaagccccttgctctctagtagccaggcagcatggacttacagtcttaaaatgaggctttatgtatttcaggctggaggcaggttgccttttctcctgaggaatctcaggcagggtaaaagttacttaccactcagtacctctgtgccagaagaaaagctcaatttattcaatccttagaaaagttactatcgtcccctggtcagacactaaggtgtcttgataaggtccagagacaaccacatagtccttattctaattcgtagtgaaaaggctgcaggcatatggtgctcctacgatgggcctgaccctttcctaagcacatctcatttccacatcctttgccttctctttcccccaacatttccagccagcatagaacccaatttctgggaaattgagaggagaaacagtattatgaacacagactcctttcaaattggaacaggagccaaaccaaataaataagagaattgtgtagggaagtggggtanaagggaggtcagggagcaatccttgcctcaagtctggtgcacctcatggaacatcagttcacgggggatggctgtttctggacaaacttggtggctgccgacgctcnaggcagcacattctgtttgacacctcatcananacatgggtggcagctgggagtgcagcagagaacganattcaaggaatcganagtcacagtgcaggtcgaggatggcaggatacanggctgatcgncaatatctctagtggtgagagctgcatcataaacagcttgacaggtgagttgacatggaactgaanggtacgtccagaaggtggagcacctcactggcttcatgacctacgtggtaa

SEQ ID NO: 134599 - DNA, 941 bp, Homo Sapiens
  misc_feature (746)..(746): n is a, c, g, or t
  misc_feature (752)..(752): n is a, c, g, or t
ttttttttacatatatttaatattttataaaatggccagtattttatattgaagattatcgatataaaccgtaacacacaatgggcggctccctggcacttcttatttccttatattgataggagactaagaaccagtaaaatgaaggagagaaagacggtttgacaaaacagtgcttactagtagatatgtcagatacacagcagtggaaatgtaagagattaaggtacaaatacaggttgtgcttatagtcgtctaatgagccacacagggattttaaaaattaagatttcaaactccatgaagcagtcaagttagaccagcaaaggaaagattcaagcaatgaagtcacagtatatatccatacttctgtatcttgtaaaccaatctgccttacctcagccaaggccatatgaattaataacttaaatgtgtacagtgcttttaaacttttaaaccctttcacatctatgaactacgtgatcctcacaacaaccctgtgaggtaggcagggcaggagttattattgatccccattttacggatgaggaaaccactggagggaggtaaactgcttcacatctgtgacaaagctaggatgaaccagctgtctagaacgtggctccatcgttttctattaggtcacccctggcatttctgaaaggtctccatttggtggagatcttgggaaatgactagcattatttcatactatctggtataatggtcatcatgttttttctgangaaagnaaagagcaggatcagaggcagtttggactaactctacagttaggaacaagcttttgtatggtctactttggatccaacactctgagcatttcaggctactgaagcacatgctctctatgtgtgcaactcgatggataagatctgcggtcatggatactgtgacatgctccacaaaaacacgtcagttct

SEQ ID NO: 134600 - DNA, 642 bp, Homo Sapiens
tttggggaagaataaactttattggcccacagaagggatgagggaacgagaaggggctagggataagaatgaataaaagtggaaaaactaaaacagaatgatttaaaatgtgcaaatacactttgcaacctccaccattcaatttagggattgatatgtatgtacagtgagatccatgtaggctaaagtgagtttcactttgtagttgatgctacttgtaccagttctatcattagtaagtcaccgtttaattctgccaaaatcagacaaggatctttctggttagtgcaaacaaggttttccatcctgggctgcagtctgacccgccagtgctcagtaggcatgcttgtgatgaattcgcacactttccagttccccacctccaatggcggccagggtctccagcctgtttaagcgctccaagcttcttccaagaacttcttctagccgactgcgtaacacctgagccccttccagttccacctgcagagttcggtctctctcagagctctctggatgggcatggaacttcaccagactgctatagagctgtctctctgcttgtaaggcctcattgagccgactccgttcatctactagtccttctagcatcagcagcaactgttgtcttcgtttttctga

SEQ ID NO: 134601 - DNA, 1366 bp, Homo Sapiens
tatcgagataactcagacaaaacccttgaagcaaatgaaatgttgcttgagaaacttcgccagcgaatacatgataaagctgttgctctggagcgggctatagatgaaaaattctctggctctagaagagaaagaaaaagaactgcgccagcttcgtcttgctgtgagagagcgagatcatgacttagagagactgcgcgatgtcctctcctccaatgaagctactatgcaaagtatggagagtctcctgagggccaaaggcctggaagtggaacagttatctactacctgtcaaaacctccagtggctgaaagaagaaatggaaaccaaatttagccgttggcagaaggaacaagagagtatcattcagcagttacagacgtctcttcatgataggaacaaagaagtggaggatcttagtgcaacactgctctgcaaacttggaccagggcagagtgagatagcagaggagctgtgccagcgtctacagcgaaaggaaaggatgctgcaggaccttctaagtgatcgaaataaacaagtgctggaacatgaaatggagattcaaggcctgcttcagtctgtgagcaccagggagcaggaaagccaagctgctgcagagaagttggtgcaagccttaatggaaagaaattcagaattacaggccctgcgccaatatttaggagggagagactccctgatgtcccaagcacccatctctaaccaacaagctgaagttacccccactggccgtcttggaaaacagactgatcaaggttcaatgcagataccttccagagatgatagcacttcattgactgccaaagaggatgtcagcatacccagatccacattaggagacttggacacagttgcagggctggaaaaagaactgagtaatgccaaagaggaacttgaactcatggctaaaaaagaaagagaaagtcagatggaactttctgctctacagtccatgatggctgtgcaggaagaagagctgcaggtgcaggctgctgatatggagtctctgaccaggaacatacagattaaagaagatctcataaaggacctgcaaatgcaactggttgatcctgaagacataccagctatggaacgcctgacccaggaagtcttacttcttcgggaaaaagttgcttcagtagaatcccagggtcaagaaatttcaggaaaccgaagacaacagttgctgctgatgctagaaggactagtagatgaacggagtcggctcaatgaggccttacaagcagagagacagctctatagcagtctggtgaagttccatgcccatccagagaggtgcagctgcaggggatgacaccgaagatacaagcactgagttcactgacag

SEQ ID NO: 134602 - DNA, 2020 bp, Homo Sapiens
  misc_feature (1416)..(1416): n is a, c, g, or t
taagatgcgcggggccggcgcgggggggcccgccatctcttgtgggggcctaaaaacatgggggaggaggcacaacagccctcggcggcgatgcggtgctcgtccacacgatgacgggggcgcgccattgataggggataatgtggcagacagcagcgcgggaaaactgtctgcaatcattgcgagataatctatagcggcacctcagcgggggggtggggcacttagtacggacgggggcgcggaggcacaggggaggaagacaagcgcgggactggagcataccgcaggggcgccatcgagggtaacaggcgcggacaccacacagttatggatattcgtcttcgagtagtggtatgtggtgctgtgatagtgggcgggaggatgactagagtgagtcatgtcgggtccgcgcctaatacgcacggcagtagggggcaggcggggaggaaagggcaacagggagagaagtatgttataaattggtggtggtggtgatttacacgcgttctactgaatcggttagagggagtttgtttgtgggtggagaggatatgtagagggtggggtactagggagttgttgtacggggcggtgggaatggagaggtggtgttgggggggaatacaagtaaagaaaaggacgggtgagagggcgggagggtagggaagggatgggtggtggtgtgtaataagtgagataagggggggacaaagagggtggtgttctggtaaatgtgcatttctttaatttttaaaaatatacacaggaaaagccatgtgttttacataggaatacacacattaacaaagcatttcttatagttttccaaaactctattatatcagtccgaaatttataaattaaatatatcagaattcttaaagttaaaatgaattccctgaaactactggatatgctactttttccaaaatcaaatgaacagaggatatggatgtggtttgtgttaaataaggtttattgttagctttattgcctatagtctataagatgcaactttactgtgcctttgcaaacaggatacatttcttaaaaaattgatcaaaattttccatacatatagctctatatgatagattacagtgcaacactattctcgttacataattatagaaatactatagaacccaagagcacggggtaagcaaaataaatacaatcctgagccatctgaacaagatgatttgatgaatcctttagtgtaagtttagaaaacacagagaaggaaaaaaatacatgcatactgcagtcatgagcaaaatacatcaaacacctgttccttgctaggtgcaggtgggggcaatggtgactttcagacacatgcacactcactcacactcccattttcttctgcttccctcccagccccaacacattcattcccgccccttcccnaaaaaaaagatcaggcactaaatcctagtgaaccccacaactgccttgctgggagaaggttaagtgactgctaaagtaagagtgtatgtaggtcctcacccataacatgaaacaaagcatgtgctgtaagccaattccagctgcttttgcctctttggaagtaaatgaagcatatgcccactacagcttgaaactgcagtggaaatgtcttgaaaacaaaattttgtttctcttgctatgtcttgaagtaaaatcaacagtggaaaattcatcctaaaactgcctcatctgctattaaaatacatttgtcattctatttttggtatctattcaattatagttcattaagaacggttcatgaagcttgtacctgcttatggtaaacatcagtgtaccacacaaaacctgccacacctagacaggcttatgaaacaccaaatcttctatgtgttccttgctaacattccctcaagaccacagcattctagtgttaccagagataaagtacgtatagttaagtgatgaaagaaaggtatttggtttgtgtcgtcaccttatacatcctagtgatgaaactaaccaaactatgcctccatgccttccc

SEQ ID NO: 134603 - DNA, 1067 bp, Homo Sapiens
  misc_feature (41)..(59): n is a, c, g, or t
ccctcactaaagggaataagcttgcggccgcctactcaggnnnnnnnnnnnnnnnnnnncattcatcaaagatttattgagtgcttactgtgtgccaggcactgttctaaagacacagcagcaaacaaaactgttatagaacaggataaggcaggtcatctcccagatacgacactttgataggaacacaaaatacaaataggagagtagaaagagatgaaatacaaagagaaagagctgatattgggcttatattaatattgaaaggccttacatgctagatattctaaatgggagaaacatgctggaaagatacttggcatgaatgaacttatgtccctatgttcagaacagactgctttcccttctctgttggttggctcttctagcctcctaggaacttttataatcaccagtatgatccaatataaatactgcacatatgaaggttcccagttgaggagtttggaagcaaaaagggaaagaatggctggcaaaggcttcaatcttctgtctccttttatcttcccaatggctagtagaaaatactatcatcaatctcttccttgcaacaatctcccatttgatatttgtctgcattgtgactcaattcctgaaggttctgttcttcattcctttctggtagaatcactgttgtaagactttgggcagatttcttaatctgaacctcaggtgtcctcatctggttaagttgttccgaggcttaagtgcgataacccctgtaaagcgctggagaacggcaaaagctctacaagccggcagggcggttttaaatgcacgtgtatccatatacaaggtctcattgatacattccgttgtttggagtttagacactggctgtaagacgtttttcttttctcctaagcaggacccgtatttgttttcctccaacgtagactaaatgcctgtgggctggtagctataagacgacccctcgggcccacaactcctagttcactcacctccgcggctcctggcggattcctgtgctcccagggccaatcccctaaaatgagtcctattaaatcgctaccaagtcaaaacgg

SEQ ID NO: 134604 - DNA, 1306 bp, Homo Sapiens
tttttactgtcaaatttgctttatttttaactggacaagaagtttctgacttgccctccctcttattccagcacaattcctagtagggaatccacatggcatgtcagaggctgtccattaacccaagctcattaggggagtcactgacaccagagaaggcttgtgagctcttcaagggcaggggccaggtctgtgccttccaggtgctgggtaaatattgtgcagtagagggcttgtttcagggtctcgtgcacatgtcgcaagccttctccaagcagccttgcagtgataatgcaatcaaataaacagaaacaaagaataaaacatttaaagactggattccattcatcttaccatcagtaaaaaaatatgatctggtcccatcttgtctaacataaaagttttctccaagtttgctgctggctttaaacctaagcatggcatgatcatacagtccgtagtcacgaaacaagacacttttgcctggttttaataccttgtaaatgttttgtaagacaaggtgcatcttatcaggatgaacagctggacagcaccaatatcaacataactacatccacagactctggcggtacatgatccagaagatcatctttagtcagatcacactggaataccttgcatctttctgtatcatataaaggattttgcttaacatattcaatggctcttggagaaaaatcacaggcataggcaaagatattcggatcttcttctaaaagtgggaataaacagtttccaaccccacagccagcttcaagcattgttaacttttgatcttcaaactctctacatgatcttagctcctcaaactctctggtggtccagtgtctgtctttgaagaaattagtgctatttcttttgtaaaaaagatcccaatttttctgagcctcttgttccaatttctgctgtttaaaatcagacaccaaagtttggtctcttttcagtttctcctcttcttcagaggtgagaatccttgcctgcagccctttcctttgcaaagaagccatctctgaaactgacggtaacacttaacacagctgaagattctccatcaccaaataatatgaatccacgctaatggatcagatacatttcctgaggtgagtttcacgcctcaaacagcacagggggcccacagccagccccactgggcctcggaggcagaatacgggaagaaccgcgaaacaaccctaaaccaattctgaggaccacgaattcggattctccgggagttccccggccgtaatggccgaattcccgggcatatgtccggtaccgtcgactg

SEQ ID NO: 134605 - DNA, 1644 bp, Homo Sapiens
  misc_feature (174)..(193): n is a, c, g, or t
  misc_feature (1384)..(1392): n is a, c, g, or t
aatttatttgttcacgttcatcataataaatttgtttaatgtaaaataaacaaatccttgacaagggtttaacaggattttcaacatctgtgcagataaatgtaatttattcctaaagaaaaaacagtttaaaacatgccaggaaacctgcttttaacatttttgtataaaggnnnnnnnnnnnnnnnnnnnnatccaggcaatacagtagtggtttcaaatcattctatttcactcagaagcctgcatgatgaattttatactgaaacagaagtttgcctgacccttctttagcatttcatcttctgcctctctcttttgatttaatgcaccccactcagagttaaaatccacacatgttgggaccaggtttgtgtccttcaaaaggaaaagcagcaggcatatttttacaaaccttctttggtagaaaataaacaaagtataaatgacatatttagtcttttgaaaaaaatcaagcaatgtatataagttaaagctgtctgcaaaaattacattgttgttattagtatttcccatatcatctattcaacattataaaagttgttatgtcagcatggcagggtggcgggggcaaatattttactaaatacgttttgggtacagattaatattcaacttcccgaaagataggtttattattaacttactgatgtttcgctttagactgaaatctgatttgcagtacataaaagtacacaaaagtgaataaattaaagtgaacaaatagaaaaatctcctttattttgcttatttaaaaattgctccaggtttatttctggcacactcagttcatacaaagctaaacatttctaatgctgaacttactcgagtgttttataattacatggtataaaatgcatatactaagcagtatacagaatgtgcctttaaaaaactcgactcataaaaatactagctcacgtacatactgacaactagccatgtttaaaaataaactctcctcaatgttgggttgtcgcctctcggcccccaatctaaaggagtgtggtttccaggcacaatggaactaatactttcaaataagataaatctaaaatatgtggtgttcaaataacattattaaaagaggaaattctcatcaagtgtatttttgcacttggcttactgtcacagaagtcaggaagccgtaaagattgaatatagcaaacacacagcataggcaggctgccatcaaggtcttctggagctctgcaggtgagtacaaaggtggctttggactttgtggcttcagctttcctaggtttgcgctagattattccacgatggtaatgcaatgctgggtctctgtgagtgcacatgaagagaaagggagagggagagacagtgaacggaggcttagggnnnnnnnnntaagagggtgattcggtaactgggaggagaattgaaaaatcacacctttcagtcttcacattttttcttttgttcagcatacaaggataaaccatccggaagaaagaaagattatgactatctataaactaattgtttgacagagacagaaatgctgataatgagtgggttgtgtctgtagttcttggctgttcacatcagccccggccgtaatggccgaattcccgggcatatgtccggtaccgtcgactg

SEQ ID NO: 134606 - DNA, 978 bp, Homo Sapiens
  misc_feature (587)..(659): n is a, c, g, or t
  misc_feature (748)..(748): n is a, c, g, or t
  misc_feature (769)..(769): n is a, c, g, or t
ttttcagggtttgcaaaatgctttattgttaatgccaacatagaattcaaaaagttagtcattggcacctgcaactgatactctactatttgcaaaaggcttcccttcttccactcccagccaggcccatcagattataactatatccacaaaatgatataatcaatcattaaatgggccatttccaccttgatatccagatgtttttcttaaaggatgaatggcacttgagtgtattgaaatcaaccacgaatgacagggcccaccccagcctttctatatgatttcaggagttcttgggtcacagcaagaatctgatccttgtatacagagggaaactgaggtccagagagggaaagtgttgtcccaatgtcacacagcacgttaggactgaaacagtagccccatttcagactcccattccaacatttttcccatgcaggatgaactgacagttgttgctgctgataagtgtgggaccagccttggacctgtgcttcctggtggccctcatccactggaacatccctcctattgagctttgtggcactgagctgggcatcaagggccaggactctggacctctnnnnnnnnnnnnnnnnnnnnnnnnnnnnnnnnnnnnnnnnnnnnnnnnnnnnnnnnnnnnnnnnnnnnnnnnngatgaatagtgacggcaagattgaatgttctccacatttccccaggcacctgtatgttgcagtcgtgtggggtggaagcatcatcatanagtatatattttgtatgctcnatagtcactaacctgtgtaatcactagctacagcataagatgggcatagctagccccctcatctccacctgaggctgtaatttcaggagaagccactcagggcggtcacttgcaagagaaggagtgtatccaaatgaatcaaagggcggtgaactactctaaattaggggcgacgaaatgaattcccctgtgcgcgctggtccacctcc

SEQ ID NO: 134607 - DNA, 875 bp, Homo Sapiens
tttaccagtgtttgcaaaatgctttattgttaatgccaacatagaattcaaaaagttagtcattggcacctgcaactgatactctactatttgcaaaaggcttcccttcttccactcccagccaggcccatcagattataactatatccacaaacggcaagattgaatgttctccacatttccccaaggcacctgtatgttgcagtcgtgtgggtggaagcaatcatcatagagtaatattatttgtaatgcctcattagtcaactaaacctgtgtaagtcactagctaccagcattcagatgggccatagcttagcccctttcatctcccaccctgagggcctgtagatttcaggagaagccccacctcaggggcggttcactttgccaaggaagaggatgttgttatccacaatgaacatcagacagggcctgttgaacactagcctctgagagttcaggcgggccgacctgaaagtgaatattgtccccgtggctgccgctgctctggtttccgactcgtctacctctaccacagctttgtgcaccatctcagacacctggatatttgagtggttgctgatgccggacagatcagcatgggaggtgaagacgttactgatccccagactggggaggactttctccagctgataggagccctcaatggagaatttgggaaggtaaagctcgagctgcctctttttgaacatcttaagccacttcctcagcgttttctcactcagtccattctccacctgctgcatctttccctcactggggagaatgaacaaagccgtggcattgccttggtaggggacccccaccaccctgcaggagaggttccggtccaggaggtagtgatactgatcccc

SEQ ID NO: 134608 - DNA, 584 bp, Homo Sapiens
  misc_feature (407)..(505): n is a, c, g, or t
gaagctaagttgtttatctgaacttctgagaaaccaggagagtaataacagcctaatccccaaacaggctgatccttgccggtacaataaggagttctcttctgctttcacccttacaagaaaagcagcttcgaagtgagcgatccgtgttttctgtttccgctttcctcagcccttccgtctagaaaaccagcctcctctgttcagccccccggggcactccctgctctctgtagagccaagcggttgcccgaatctagcatcacgaatggagcccacgaggatctttaaactaaatttgtaactctgtcttgtgacaattctctggatcagcttatgcagggagggaaagagggcaaatcagacactgtcctagtggacgaggagggagatgtccgacctgccgnnnnnnnnnnnnnnnnnnnnnnnnnnnnnnnnnnnnnnnnnnnnnnnnnnnnnnnnnnnnnnnnnnnnnnnnnnnnnnnnnnnnnnnnnnnnnnnnnnncctgcctgggggtcgggggaccaaggggaagaccctccatgggggcggataccatcaatcgcctgggggcccagataga

SEQ ID NO: 134609 - DNA, 285 bp, Homo Sapiens
caagcattttccatttgcaactcaaatatatggttactcccagaaattccacttttaggtatatacccatgagaattgaaacacaaaaacttgcacacaaatgttcacagcagcattatttataatagccaaaaaagtagaaataagccaaatgcccataattaatgaaaagataaacaaattgtggtatatccatatgacgtgccacacaaaaaataaagtactgatacgtgatacaacatagatgaaccttgaaaacattaagctaaatgaaagaggccagac

SEQ ID NO: 134610 - DNA, 1050 bp, Homo Sapiens
  misc_feature (54)..(55): n is a, c, g, or t
  misc_feature (83)..(83): n is a, c, g, or t
  misc_feature (117)..(117): n is a, c, g, or t
  misc_feature (166)..(167): n is a, c, g, or t
  misc_feature (172)..(172): n is a, c, g, or t
  misc_feature (293)..(293): n is a, c, g, or t
  misc_feature (334)..(334): n is a, c, g, or t
tcttgtcagcatgcatctttaactcatgcatattcctcattgcatatgtctagnnaatcaccccacctgtatgaagcacagcncaggccctaatgagctagcatgatgctttgaggnccagggccatagagcccatgcattactgaagctcagtgccacgtggatnntatcntatagcccgcacctttctgaatgagttaggccagggctgctgatccgctgtggattcaggagctctaaaatgaatctctaccgtcccttaaaagtctttctggtccgtcccagtgtgtcanttgctgaggtcgatctcgtagttgttcagttgtgctctttntgctgtcttgtgagtcttagccagtgatccagctgcccaaggacagggcctccagagggcctagcgccctcctggtaccaagcgtgtgctcctggcctgttgtgacagtgttctttcccgaagcagtgaaatgagaaaattctgcaaagtggccacccggaagatcagtctgtagctcttgggcctggatttctactatgttagtgagtgtaggaatatactgtgtctttaatggatgaaaattcaatgtatgctgtgaatttgttggtttgaaacattgaaatttttcattagacaatgtttacatacctcacctgaagaacctttgagagtgtatatataaaattttaaaatatattaagttgctttaaaacaatatgtatagctataaaagttggagttattttaactttgaatatgtaccaagtctcttaaatattgaaatcttgtagacttcttgtgcttctgtgttttgctttcctatcaggccatgtaggaaactgtgttcttgttattggtagaggggccctcactgaaatccaagcttggaaggatgtcctgtgttgtttcagattctcttgtttggttttgaaggatgcggtgtggagccagaggatgtgtgggaggggtttctctaacactgacttctattccatgagctttttcaaggcgcttattttatggcagcgtattaaacttctttgatattcaaaaaa

SEQ ID NO: 134611 - DNA, 1037 bp, Homo Sapiens
  misc_feature (560)..(944): n is a, c, g, or t
  misc_feature (963)..(963): n is a, c, g, or t
tttttgattttcccagaaaagttaaaagttttatttttcttcaggtaaactctcctattttacaggaaaataagtatctgtaagtaaaccatctgataatcaaatatttatatatgaatttactttcttactactaatgtaatagcaccttctaaaatgaatttaatgcaattattaatttaaatggacagatagcataatagtaatgctctaaaatggaccaatttcaccttccagtcattatgctgacatttcaataatacagggtaagttcatagctacaaagcaagccaacatgagtgctcatgtattctgagatgtctaatccagagttcatacttctggggagtttgctacctaccatatactttctcagctttttaatctataggccatttccaattatttgattctattctattaaagaggttttataatgaaatgggaattatgtgccaacattccttattggtattatcattttaaaaaataagacattcaccaaattttaggaagcacttaaatttggttaaatttttaaccctcttgccgaattcttnnnnnnnnnnnnnnnnnnnnnnnnnnnnnnnnnnnnnnnnnnnnnnnnnnnnnnnnnnnnnnnnnnnnnnnnnnnnnnnnnnnnnnnnnnnnnnnnnnnnnnnnnnnnnnnnnnnnnnnnnnnnnnnnnnnnnnnnnnnnnnnnnnnnnnnnnnnnnnnnnnnnnnnnnnnnnnnnnnnnnnnnnnnnnnnnnnnnnnnnnnnnnnnnnnnnnnnnnnnnnnnnnnnnnnnnnnnnnnnnnnnnnnnnnnnnnnnnnnnnnnnnnnnnnnnnnnnnnnnnnnnnnnnnnnnnnnnnnnnnnnnnnnnnnnnnnnnnnnnnnnnnnnnnnnnnnnnnnnnnnnnnnnnnnnnnnnnnnnnnnnnnnnnnnnnnnnnnnnnnnnnnngatatgtgagcaaaggcanccaggccaggaccgtaaaaggcgcgtgctggcgttttcataggctcgccccttgagagatcaaaaatcgagtta

SEQ ID NO: 134612 - DNA, 931 bp, Homo Sapiens
  misc_feature (131)..(553): n is a, c, g, or t
  misc_feature (563)..(587): n is a, c, g, or t
  misc_feature (590)..(590): n is a, c, g, or t
  misc_feature (612)..(612): n is a, c, g, or t
  misc_feature (660)..(660): n is a, c, g, or t
  misc_feature (673)..(673): n is a, c, g, or t
  misc_feature (718)..(718): n is a, c, g, or t
  misc_feature (726)..(727): n is a, c, g, or t
  misc_feature (749)..(853): n is a, c, g, or t
  misc_feature (860)..(860): n is a, c, g, or t
  misc_feature (866)..(866): n is a, c, g, or t
  misc_feature (894)..(894): n is a, c, g, or t
tggactcaaacaatcctctctcctcagcctaccaagtagctgggactacaggcgcataccacatgcctgactagtttttttggttttagagatgggggtctcactatgatgcccaggctggttttgaactnnnnnnnnnnnnnnnnnnnnnnnnnnnnnnnnnnnnnnnnnnnnnnnnnnnnnnnnnnnnnnnnnnnnnnnnnnnnnnnnnnnnnnnnnnnnnnnnnnnnnnnnnnnnnnnnnnnnnnnnnnnnnnnnnnnnnnnnnnnnnnnnnnnnnnnnnnnnnnnnnnnnnnnnnnnnnnnnnnnnnnnnnnnnnnnnnnnnnnnnnnnnnnnnnnnnnnnnnnnnnnnnnnnnnnnnnnnnnnnnnnnnnnnnnnnnnnnnnnnnnnnnnnnnnnnnnnnnnnnnnnnnnnnnnnnnnnnnnnnnnnnnnnnnnnnnnnnnnnnnnnnnnnnnnnnnnnnnnnnnnnnnnnnnnnnnnnnnnnnnnnnnnnnnnnnnnnnnnnnnnnnnnnnnnnnnnnnnnnnnnnnnnnnnnnnnnnnnnnnnnnnctattcatcnnnnnnnnnnnnnnnnnnnnnnnnncangagacagcatcttgttctgttngccaggctagagcaccatggcacaatcatagcttattgcagcctccanttcctggactcanacaatcctctctccctcagctacagcgcggggcgctccacatcangctcgtgnncgattcttgggctcgaggggcnnnnnnnnnnnnnnnnnnnnnnnnnnnnnnnnnnnnnnnnnnnnnnnnnnnnnnnnnnnnnnnnnnnnnnnnnnnnnnnnnnnnnnnnnnnnnnnnnnnnnnnnngtgtaangctggngggtgctatgagtgagctactcacatanttgcgtgcgctcatggccgcttcagtcggaacctgtc

SEQ ID NO: 134613 - DNA, 1041 bp, Homo Sapiens
  misc_feature (146)..(183): n is a, c, g, or t
  misc_feature (651)..(867): n is a, c, g, or t
  misc_feature (909)..(909): n is a, c, g, or t
ttttacactttagacatttattcacttcaacatcacaatttcacacgaagttggaggaagcccttccctaacaaaacaagcattcgcattaggggaaggaggctgacctgctctagggatgaaatacatctaccaagatatagatnnnnnnnnnnnnnnnnnnnnnnnnnnnnnnnnnnnnnngagacattaaaggaaatgaaaaacgttataccaagtaatgtttataaatccagatcataagtgaacgtaggttacaaaaatggaagttgtaagtattgttattcttgtacttttcacacaaacagaatttttagaaaagcttaaggtcagggagtgctagagagtttctgtatggcaggcaagaattcttccttttgaacaagaccgaaaaacctcaggacaaagagaaagtatatcttttaaaaactgatttcatagtaatgtttctacatattttgaagcacctttatgtatttagagcatatcaaattaattcatttctttccctgttaataaaaaaggtacattcacagaatcagtgtacttagaataaaaaataaacagaggaaataagaactaactcgagttaataacaacatctttaaggacaagtttggtcatttaaaaactcctcgttccgaattcttnnnnnnnnnnnnnnnnnnnnnnnnnnnnnnnnnnnnnnnnnnnnnnnnnnnnnnnnnnnnnnnnnnnnnnnnnnnnnnnnnnnnnnnnnnnnnnnnnnnnnnnnnnnnnnnnnnnnnnnnnnnnnnnnnnnnnnnnnnnnnnnnnnnnnnnnnnnnnnnnnnnnnnnnnnnnnnnnnnnnnnnnnnnnnnnnnnnnnnnnnnnnnnnnnnnnnnnnncattatgatcggtcacgcgcggggacagcggttgcgtatggngctcttcgcttctcgctcctgactgctgcgccggtcttcggctgcgggacggtatatctcatcaatgcggtatacggtatcacagatcagggatatgcagaatacatttagcaaaggcatatatgccagacc

SEQ ID NO: 134614 - DNA, 619 bp, Homo Sapiens
  misc_feature (155)..(209): n is a, c, g, or t
tttttttgagagttacacaatagacatttattcacttcaacatcacaatttcacacgaagttggaggaagcccttccctaacaaaacaagcattcgcattaggggaaggaggctgacctgctctagggatgaaatacatctaccaagatatagannnnnnnnnnnnnnnnnnnnnnnnnnnnnnnnnnnnnnnnnnnnnnnnnnnnnnntgaaaaacgttataccaagtaatgtttataaatccagatcataagtgaacgtaggttacaaaaatggaagttgtaagtattgttattcttgtacttttcacacaaacagaatttttagaaaagcttaaggtcagggagtgctagagagtttctgtatggcaggcaagaattcttccttttgaacaagaccgaaaaacctcaggacaaagagaaagtatatcttttaaaaactgatttcatagtaatgtttctacatattttgaagcacctttatgtatttagagcatatcaaattaattcatttctttccctgttaataaaaaaggtacattcacagaatcagtgtacttagaataaaaaataaacagaggaaataagaactaactcgagttaatcctcgtgccgaattc

SEQ ID NO: 134615 - DNA, 615 bp, Homo Sapiens
taagtgcagtgttggtgcagaatcccataaaagagatttcagtggtttgacctcaggtgtgctgcttgtgctactggcagaggaccctgaaatagatgcatgaactgatgccacgactttggcttgttctggcgggacataccatcttttcttttcatacttttcttgtagaaactctttcactttttgtggatccctgaagtctggaattgctgaagatctatcatcaaataatcctagccaaatctgtttacagacttcatttccatgtttttgtaagaattcaatttcctgttgtgtgaatgttgtcatggagatagatttcaccctgtgtggtggatttaatcctcgcaggctgccggagcaggaggtacacacgaaggagccgaccgtcatgttaacgtaggtggggccgcgctggtcgcagtcgaagcactttcggttgtgcgggaggccggtcatgtcccgcagcatcttcaggtgcttctcctcctgcttccgcttcgcgctggccgccatggccgcggcgccaagggaggaggccggcagggccgggagccgggcagcgctgcgccgggggcccgcggtcccacgggccgccctggccgcggccgc

SEQ ID NO: 134616 - DNA, 2492 bp, Homo Sapiens
tcaatagttaaaataggccttttgcagtctgagaattcaagatacttagaaaaatttgtaaatacacatacatgcaaattcttcatatatacaaatttcacaaaattaataagctgcaaagaaattagtaggattatggtaaatctgacaagctacatttaaatgctttaccactggcatattcctgaatgtagcagtcatagtagttttaataaattttctacatggcctttttataaaaagtcactaagaagtcttttaagaattcaagatgttctcaattcactactcatatttaaggccactttggtaaaggcattgcagcaagaacacaaaaacaatagcatattttataatatttattttttttcacctgcaaactgtagcaaaacatgatcagctttattatgcagacaggtatccctctacattttaaaagaatttaggcatgtataaatagaagagctctttagaaaggaaaaattcaagaatgaataaaaccttccaattttgactctgttactttccagtagcaatggttaaaatgattttaggtcattcattccaagatatatgacagcaccttaaaagtggctgatctatttccccagtaacatttctcacataacaatgtgttaaagttacaaatactgatatgcacaaatagctaatttctaagaaaaatatgtacagtactgcagcataatgaatgtggtatctgcaataacttaatattagccaattttaatatacatgataccgctacccttttctgccaattcacaggttagaaggtgttactggagccctcggttttgcacatattacctggtgtttaatacacaatgcaggctttttaaagacttctcttgtgtttaaagctaagatcagtgaaacaagacaacagtgcaagaggtggagagatgtaatgtgaccacataaaagttcgttccagtaaattgtctatataaggctataagaaaggattggttgatgagcttcctgttggaaattgtcctgttggtgcaccagtcataaaaggattactagatactccagcagctgcaacttgaccaaaaggggttactactggctttgtttgtccaaatgctgcaaaacctgcaccattgggctgttgagaaaaagctgtctgttgagggaaagctgcttgggctggaaaggcaggctgctgaaagctgccactaaagctggtgggaagactgtagggagcaggagtgccgaatcctgtgggcatgctcatggatgcagtgccaaaaggttgccgctgttgctcctctggcattggtctgaaatgggtttgtagaagatgccacagaaggaccagcagcagcaacaaatggatttgtggaaggcgtagctccaaatggagcaggcacacttgatgaagcaggctgtgtctgtgcagaagcaaccactggcactgttccaaaaacattgctgctagcattacttgtggaagtatacgcattactggaggtggctgcagaactgaaaacgctgtctagttctgccagagctgcatacttgtctgaagatgcacttgactgactgggaactgaaaccacagaaccaacaggagctttacctgtggtcccaaagccacttccctgatcaccaccttgcccggcactgaagatattgtctaaattagcaagtgctgcatatttgtctgcagtctgtaaaccagctttgttcgttgaaactttactaacagctgatgctgtttgatgactcctgggaagtattgaaggttcccaactcagcactggaggatttggggaagttatcaaaatgagcaaaattagcatttactgatgcagcacttccacctgtagtttggggctgaaaaggagagtgacttgctgtggggaaacctccaaaattactcgaaccactagactgtccaaatgcatcaaagtttgcaaaatctgcatttgcagaattctgagctgcatgactgttgaaatgtgcaaagttagcaaaattggctgtagctgttgactgaggagctggagcagcaaagatgtctgagccgagatcacttaaaaggtcaaattgcttcttctcctgctgctgcccttgagaacgacctacaactggggactgactaggtgtgcccttatttaagtgcagtgttggtgcagaatcccctaaaagagatttcagtggtttgacctcaggtgtgctgcttgtgctactggcagaggaccctgaaatagatgcatgaactgatgccacgactttggcttgttctggcgggacataccatcttttcttttcatacttttcttgtagaaactctttcactttttgtggatcccctgaagtctggaattgctgaagatctatcatcaaataatcctagccaaatctgtttacagacttcattcgacgcgtgggtcgacgatatcccgggatatccggaccggtaccagcctgctttttgtacccactgtctatagttcatcatt

SEQ ID NO: 134617 - DNA, 1028 bp, Homo Sapiens
  misc_feature (731)..(731): n is a, c, g, or t
  misc_feature (764)..(764): n is a, c, g, or t
  misc_feature (862)..(862): n is a, c, g, or t
  misc_feature (870)..(870): n is a, c, g, or t
  misc_feature (892)..(892): n is a, c, g, or t
  misc_feature (930)..(930): n is a, c, g, or t
  misc_feature (1014)..(1014): n is a, c, g, or t
ttttttttctaacaggactcatctatttattgatattactattaagccacttcccagcagtgtgactgccgtaacaagaacaggactcagtttctaaaggcaataaaataacaaggacatcatggacaaagcattgggaacactcctcgtagggaactggcttttcctctccagccagagcacccaggtgccaggggccactcccgagcacactctttgcgcatctcagccctcatgccggatgctcttctccccgccctaatctgaccttctcagttcatctggataaacctgctgtgcttcctgtccgtgaagcgaggcgctccccaaagcgggagccaaagtctggtgatgaaacagctggcaccaaagagctggttctgcctcctcctcaccaagtaaacacgtactttattttttaaggaaagaaaagtcttaaaaatatatggcactagagtgtaaaactatacaactgcatccaatgaaaattccctgcagcttgcagcctgtggcacaccatgtccctcagatgtagagctgatgggaggccagggtgtccatgaacggccgcaccaggttgtccgtggagaagtaaaagatgagcccgaacgtgatggaaatggggaagggcgggcagcgccttcttgaacacagcaagcagcaggagggtcagacacaagccaatgaggatggccacgaagcaagcagcgtggtattccagtccccgctgnccgtggcagccgcttgcccacagcacactgtanaagatgaagtcccgaggcaagctcacgccctttctcctcttcctcagctctccctgggtagcagtcagggaagtcaaaactcgggtatgaggtcccanactgcaangatcttctccatctcggtctanggggactgaggcacctgaagagggtcactcgcatgcancgtcaacatggaatgataatagggcaggaatggtcatctctctggcattcacacatctcaagcttggacagacaccatatacanatgggcagtgcacg

SEQ ID NO: 134618 - DNA, 998 bp, Homo Sapiens
  misc_feature (647)..(647): n is a, c, g, or t
  misc_feature (706)..(706): n is a, c, g, or t
  misc_feature (720)..(721): n is a, c, g, or t
  misc_feature (768)..(769): n is a, c, g, or t
tttggtcaaaattagtaaactttatttaaacttcaaaaaaataaaataacagacaaaaggcagctttagctttgttcttcccgaggatcagctgtaaccactcacagcaggaactacccctaagttaaaataccctttacccgccccgcatcaagccacaggcaaggaaggatcttcaatttggggacaggcagggggtgggtggggtaggagtgagaacaccactgggccagtgagttctaacagcacaagtggagaacaagacaagaatctgcatcagaaacgggatccagaagttcaccgggagctctgccacaaggcatttatgtacaacggagctgggctgggggtgacgccccgtgagggaggcaagaactgcacggcagcacgggcaagctgccctgggccctagcccgctgccgcaccccacgtgccctcagttctcctcgtcactgtcatccgggctgatagccgggcttgtgagactgtaggtggggctggtgggcgagtaaccaggggaagtgggagagtaggttgagcctttgggggaggtgggcgagtaggtggggctggtgggcgagtacttgggggaagtgggcgagtaagtggggctagtaggtgagtacttgggagaggttggggtgtanactggagaggttggggaataagtaggagatgttggggagtatttggggtggtggtgaanggtggggaccgggnnccggccatcactgggcaggtggggtggcttttgggaactggtagggnntacttggaaagggttggggtatatcgggggaactgggatgtaaaaggacgggtggggggactgggtgaggttggctgtactggcgaactgggctgtaccggtgacttgggacaggttggcacgtgggtgtcctggctggagggatactctcgtgcaatctgcccggggcaatccaaatggtcttcaattcgactgctgtgtcttggtgattttcgtacatttaccaacg

SEQ ID NO: 134619 - DNA, 1140 bp, Homo Sapiens
  misc_feature (167)..(212): n is a, c, g, or t
acatctttacctcatttatttaataaatgatttcaaatgatcattatgacttgctatagctcagttaataatacaatttcatggtactattgggtaggaggagaagacagaagcactctaaaagaaattgcataaagggaaaataattactaatgccaatagtaaannnnnnnnnnnnnnnnnnnnnnnnnnnnnnnnnnnnnnnnnnnnnngtataaaagtattatagtatctttgtgatcagtttttcgatatttaatgtaaatatctaaatagtgtagtcacaaggaataaaacatcagttatatttaaagtaccaaaataatgattgatgtctaaggtttaagtcacattccattatagtgattctaccaaccacacaccaaaattatactctttacttaaggctccatcactgggttctgtctacaggtatcctctctatgcaaaccaatattaccactgttcatctcacacaccatagactctagagaggttaagtgcaaaatcacacactctagacaaagtggttctccagctaaagagactcatggggaggactcatgagtggctcacctctgtgtcccagcacctggctcgaggcccagaacactgtagatgctcagtaaatttttgttagattgaagtaaaattataccataaagatgagtaactttttagcccttggttctatgggtgacagctctctgaaaccagtatctgagaggattctcaccatgtttagtatctaacattagccatactctctccaaattcagacagtaggtggatattgggctttagtggtaatatatttaagatgactggtttagtctttttagatacctttatgaaataaaattactgaacctttgaaatagcacagaaaaatgttgatatattcatttagtatgtacatgtactatgatctgttgctaagaaatcttataaataaaagttatttaatgtttgatcattatctctggtgtgactaaaacaagtatgataaatcaggaacaagaatccccaaaggtcaagctaaataaacattaaaatattctatagttatttgcaaatgatggcattatattatatttgatttttgatatggaagtatcctctgaccaggtgtggcagttc

SEQ ID NO: 134620 - DNA, 1972 bp, Homo Sapiens
  misc_feature (1675)..(1684): n is a, c, g, or t
  misc_feature (1903)..(1903): n is a, c, g, or t
gggggcagcgaggcgccgctcccgccgcctcagcccggccttcctcggctccggcgctccggtcgcggggcccgggttcctcggcacaccccgctccagccgcccccagagcctgtccccagcccttcggaagccccggcgccagcccgggccctcggcagggaggatgacggagctgcagtcggcactgctactgcgaagacagctggcagaactcaacaaaaatccagtggaaggcttttctgcaggtttaatagatgacaatgatctctaccgactgggaagtccttattattggccctccagatacactttatgaaggtggtgtttttaaggctcatcttactttcccaaaagattatcccctccgacctcctaaaatgaaattcattacagaaatctggcacccaaatgttgataaaaatggtgatgtgtgcatttctattcttcatgagcctggggaagataagtatggttatgaaaagccagaggaacgctggctccctatccacactgtggaaaccatcatgattagtgtcatttctatgctggcagaccctaatggagactcacctgctaatgttgatgctgcgaaagaatggagggaagatagaaatggagaatttaaaagaaaagttgcccgctgtgtaagaaaaagccaagagactgcttttgagtgacatttatttagcagctagtaacttcacttatttcagggtctccaattgagaaacatggcactgtttttcctgcactctacccacctattgctggacttctgttgtacaagttggcaaacactggctggaactgggctgcaataaaacatgccagttatcaatgctgacaagagcctaacaagtgccaacttacagatgattacgcattttgaattctaatgaactgttttaaccttcaggaagaattgtaaagacctgtacatagcacaacatgatccggataatatatatactgttcatgtacatccacaaatacaccttgtaccaaataatgctttcttgtagtagaataagaatcgtgtaaattctaagagattttagcaggttttctttcctattcattgtttcttatcagtttaaaaggattcctttaagcatgtcagatgaaaagcaattaggattaaaagtttccatttaatttcccttaaacccttgaggcttcattaaactcttttcacttactaaacttctggatccttctttgtttttgacacacctcccctttggctttttatcttcttaaccctgcccacaaaatgtttcctccaaactgacttctacgcctccaaaataccctggaaaattaaccttaaaatggaagccaaacttaaccctggaaattcttgtttaaactggaattcggacccttttcttaaaaaagggggaaatcctcgtaatccccacactctatagaggagggggcgccctttttttgtggggagtccccccctctgtcttttttttgttgggcgcacacactttctcccctgataagggagttgttgggggcgcgagacaccctcactgacaccccccttccttttatgacggggcgaataatttacgggggcacatttagtttttatgcgcccctacaaaatcgcagacgaccacctcttttttctatatttttgcggaggtcccgccgccgcgtnnnnnnnnnnaagacccactaccccctctagcaaaatctccacccaaaagatgaagctagatgtccagcacgccccctctgggggcgcgctggaccgttcacgccagcatacttccggcaatggggggccgggtccctgtaaaatgttattacaaaatattttagacgtgggcgaagatatatttcggccccccccataatcgatactttacggccgcaacatttgcgnggacctctattctcggccccctctctttacccatatcgccgccttggcgcactccccacccgcgtcttg

SEQ ID NO: 134621 - DNA, 1017 bp, Homo Sapiens
  misc_feature (812)..(812): n is a, c, g, or t
  misc_feature (881)..(881): n is a, c, g, or t
  misc_feature (977)..(977): n is a, c, g, or t
ttttcctattgaaaaatgtaagttttatttacagatcaggccacaggttacaaaattaaaaccaacagcagttttgaattatctgtaccagctagctgaactagccatatcagttcttctttccagtcattcagcattgtagtaagaaaacacttggtaaggcagatggagacatatttatagtctatagtctgtctgggaagctgactgccagacagggcagtttgtcatctttacctagctgacacatctttttccatggcttgctaccgataggcattgaagcctagcaactgttacttcccacgcatgctatcttccaggacttcctgagaaatgcttgcttacagttcaaattctgtttcactttatgtttgagatctcggtatatcttcggattaggttgaatttgcctgttgggtctggaatataccatttttcccaaacatcagtatatgaagcagtccttccccatggcttcaaatgtccattccaatggagtaacttggcagcctttacaaactgaggtgaatatcgttttccagcactggaaccaaggtggcggacattccacataggatcgatggtagagtgctgttgataaaatacgataagcagaggaggtgttgtgatgctaccagccagggttgtgctatacagtccctcttctacattgagtttcatccatttttccagttggttagttatattctgtcgtttccattccgtcaggtttgcaacaaaactccaggattaaatgagcaagtgctggctttcatggaaagcttagatttcttcctttttatagtcangatagcaatgtattgtactggttcctgctcacggatgacactttagtagagctgatcacatcctctganatgcactgcatgtctggctcagtgtgtatgtaagggcagatatcactgcacatactcacatccagtaatggctcttgcgctggacagatggagtanactgcaaggtaagtcatgatcctgtcagtctctacttctt

SEQ ID NO: 134622 - DNA, 2042 bp, Homo Sapiens
  misc_feature (45)..(45): n is a, c, g, or t
  misc_feature (102)..(102): n is a, c, g, or t
  misc_feature (118)..(645): n is a, c, g, or t
  misc_feature (678)..(695): n is a, c, g, or t
  misc_feature (1877)..(1885): n is a, c, g, or t
ccctacccgagtggtactacagcgtactttggaagcccacgctcncgaggagaagccgacagtatcgtaagcgcaggtcgaacagagacgcacgaggagctnccaggggaaacgcttnnnnnnnnnnnnnnnnnnnnnnnnnnnnnnnnnnnnnnnnnnnnnnnnnnnnnnnnnnnnnnnnnnnnnnnnnnnnnnnnnnnnnnnnnnnnnnnnnnnnnnnnnnnnnnnnnnnnnnnnnnnnnnnnnnnnnnnnnnnnnnnnnnnnnnnnnnnnnnnnnnnnnnnnnnnnnnnnnnnnnnnnnnnnnnnnnnnnnnnnnnnnnnnnnnnnnnnnnnnnnnnnnnnnnnnnnnnnnnnnnnnnnnnnnnnnnnnnnnnnnnnnnnnnnnnnnnnnnnnnnnnnnnnnnnnnnnnnnnnnnnnnnnnnnnnnnnnnnnnnnnnnnnnnnnnnnnnnnnnnnnnnnnnnnnnnnnnnnnnnnnnnnnnnnnnnnnnnnnnnnnnnnnnnnnnnnnnnnnnnnnnnnnnnnnnnnnnnnnnnnnnnnnnnnnnnnnnnnnnnnnnnnnnnnnnnnnnnnnnnnnnnnnnnnnnnnnnnnnnnnnnnnnnnnnnnnnnnnnnnnnnnnnnnnnnnnnnnnnnnnnnnnnnnaagaattcggcacgagggccgcggctgtaggcnnnnnnnnnnnnnnnnnnaaaaagtataaaccttttcatttcctcaatcacaatttgtacaactcagtgttatggcattcggcagcaatagtgtttgttccttattctctttttgtcacgttaaaaagaaaagcaattggaccatattaaatgtcactgctaaacaacaactttaaaacgccccttcataaagtgaccaagctattttgagagggttgatgctgacatgtccagtaatgacgttacaatttgtagcttaaactcaataactttaaggtccacatatccagtttactttgaaaactaaagatgttttaaaacttcatgaatacatcaacctgaggagtattttaggtcccaaatccagtttttaaatttatactccacaaaaaagaaaatacatacataaaaatttaaaccacagttctgggcccattaaaacaccaaaaaagaccccccaaaaagttaagatttccagcttatttctggaggggtgggacaaaataagaatgtatattaaaaacatttttccttaattcagacaaactaaaatcttaagaggaaacccagaccaaaatatcactcatgcaacattaagtgtattaactgattgatatgcaatgccatagtggatgaatagcaaattatatgatgcaatagcatttaaaaactttttaatctattcaatttgaacattttaaataatgcaacatagtattctgatattacagtattaacatagtgcttgattaaaagttctgcaaatcttttgtagtaacaccattaagttaaagaaattacctcagaaggtaaatatgaagacgaaaggagaatattttaatacagtaatctgtgccatactgacaattgagtacgaatacagctgaggatagttgactaagtagtaagagcttaattttagtggtttaagaaaagtttagaaatatttaaaaattacagctactttaaaatttaaggattacatataagtacacttggtggccttctggccaaacaataaggtgtacagaaatttattcatacagtgttaattcacagtcctgataactcaatggcttgcataagaaaggtatggctagatgtttctcactggctggaagcagacattatataactaatctttttaaatgacaaaatactgaacttccaccctgcttaataatcatggatacctgcacnnnnnnnnngatgttagcactgtaacaaagaagtcaaggtgttggtaatccactgctataaagtataatattttgcttacctatttaaacaaaactacccatatttgtctgtgacacccggccgtaatggccgaattcccgggcatatgtccggtaccgtcgactg

SEQ ID NO: 134623 - DNA, 1217 bp, Homo Sapiens
tttttataaaacacaattactttattgatttcttacaataaaatactgccaactagcattacgtccactcttgcatcattaaaaacaaagggtatttcctccttggtattttcaaatgatgcattatacaataaacgaagttagaacttaaaatgcaccctgattaattatgtaaactggtaatttgttttaaaaagcataataatttggttcctttcttcataaaatggaaatttaaatatttcttctgatagtcttgaggttatcatgagtagtgcaaagtgtggcacatatagtttcatctagaagggtgtgtatcttacacaccttaaacaaacagaatgtgcattaacaaaatgcatacagtcaatgcatgatagaaagcatgtttcaaatataaggcagcccctccggcgaccatattatttaggttttgcattatcatttatggcattatagattaattacacataacttttatacattttaaccctgaagataagaaaaataactgttgcttgaaagaaattcttccaggtagccatttggtttgtatcaggagaaaccgaacctccatgagtttagcgtctgccaagtcggaatcattagctgaagtgagtgaatgagatacgcagcgcatttcacagtgactgtttcccaagtcctggcaatgcctctgctcccacagtccaccagatgaagcatttccgggattacccttctatgtggttttcccttttcatttctttttgctggattaactattactgtattatttcctcttctcccctcttctgtggccttccattttaattattcataaatcctttcagaatattctcagggagatccataaggggaagttctggagatgtaaaatccaagggaggaagactggggattggaatgtccttggctttcccggcatttgctgcaaacttctgccaggttgaggaggctgtagcagtttctgaatgtggcggcaagctccgtaattctgacgtttctacaaaatcagcatctacatccagctccttttctactggacctttttagaagtctggccttttcagcctttagttattttctttccttaatctttcattctcagccacaaggaattccacacgtctcttcaaatctgcaattttggttgcctattcctctataattgttttatcatcttctggggctttgcttccaatacatggctctgc

SEQ ID NO: 134624 - DNA, 1574 bp, Homo Sapiens
  misc_feature (1363)..(1363): n is a, c, g, or t
  misc_feature (1460)..(1460): n is a, c, g, or t
  misc_feature (1546)..(1546): n is a, c, g, or t
tcattaagaccgggttttcctctttcttaaaaaaacccccttgtatcaatccagggcttcccggccttacttggggagaatttctaaatatgccaacggggtggctgaggacccagaatctctcccagtgatcagatttagagcccacatttagattagctttaggaccttgggtgctgagattgcaaaaatgggaatttattcatgacacaccctgaacactgagcagtgctggtctccacaagcaagagggaatcttggcctcaccagagaattccaaagttcaagtccaagtcgcaccagatgatggcgagcctcataagagctggactgaatataaaaaggtgagagcccaccaccttctccacatgcctggtcctgggcttcttggctccttttcttttgctctacattaaaaggtcagttgagagaaaatgaggaagtcaaacaaaggctcctggcgtctggcaggagctgccgaaaggtggctgatgcaatctccccgaggagccacattaatttttaaaaggcagctgttttcaaagcatacgtttaataattttttttggaaccccagtgtaacagaattcaaatgggaaaagtgagagggagtgtttaaacaaaggcatccccaagtcccttcccagttggtcctgaacaatggaggaggtcaaaccttcttttccacagcatgatggtataaatcagggaagtcctggaaatctattccacaccctaaaatacccaaacccattaaaagcacagatataggcttttacaaacatttactaaataagcaaaaccatacaaaatatgttcccgtcggcaatttttcccataccatggactcaaatggttaaaactccttatcatcccagactaatgccaccttttcaattcccaataattccttccgtaacaagcatcattgctccaagaatctctcaactacattcaaacccgagtcttcagacccttggccctctgggacctccagagcctttgacagtgccacccaaggcagcagccagggcttctgctgggacagcccctcactcctccactctgactgtccccactgggcttctctggagcagaagccacgggcagaactgggcagactgcccagtgctgctgagtccagagaagcggcatctgaggggaggcggtggcagtgtggaccccacccttactgtattcacaggccccagctctccatcagccagcctgcccaggtctctgccaaagaagtcgctggtcaatcttcattctcatttttggcatacacctaggtccctttgatggagctgcctctctctcagcctgttccatgttctttattttcccacttggtcctttctgntacaatgcagtgtgtagaatgagacagacttccagtcagctctggggaaagaggagggagctgttcccccagaggggtccctcagaactgatatcanggctgtgtagcttcaagtccttcccagggcacgatcatttgctgctgacacaactgggactcctgctggggctcccagaggcattnggtacatggcccagtactgtgctcacaa

SEQ ID NO: 134625 - DNA, 1082 bp, Homo Sapiens
  misc_feature (286)..(286): n is a, c, g, or t
  misc_feature (768)..(768): n is a, c, g, or t
  misc_feature (851)..(851): n is a, c, g, or t
  misc_feature (921)..(921): n is a, c, g, or t
  misc_feature (965)..(965): n is a, c, g, or t
  misc_feature (1004)..(1005): n is a, c, g, or t
aatacgaagccatttatttaactcatattccatgtttagaaaattggcctgggctccgcctgaatgttgcccagtccttctgttcctggctgcgctctcatgtgtgtgcagggcagtgaggcagctctgcttcaggatgtccatggggcatctgtctgggtgcctccatctcctccgtgcagttcttcatcctccagccatccagcccaggcttcacctcagcacaagtctcccagcagtggataccagcaccagctctgattgaggtggcaggggagtgacgtanactctgagactccctggctgtagataggcttagtgtgctggctttcttgaatgctggttatgcgagcggtgaacttgtcatgcggaccgactcaagacctctgactggtcagggtgtggtacgcagtggtaacagctgagctcatgcaggcattttctccttcctgggaacagttctatttattcttccttgaggtgctgtgtggactgtgctggttggtctccagctaggaggtggcacttgcaaaagagcaccagctgtggtggtagcagtgggatttgagcttgccctaagttgcccagggaaagtggtttctcaggcaatgggggaagaggggctatgaagctcctaaaagtgtatcttttgtgttaagctaccaggatgggtggatgggtacaccagtgggtccagggttaggtgggtctgcactcctactgtccttggatgaggcaggctgcagcccctgtgagcgccaggggtgngtctcaggctgctggggtcatgttccagaggagagtttatttgctctgctgcacagagagttcaaaaagggagtgggaagtantgggccgcttacagcttgcagtgagttctcaaacattgtactggtcgtccaagggaaggggggtgggggngcactcttcttaaaaggtcccccagatccttccgcaagctcgtngcgctcgtgccgattcttggctcgagggcaatcctaaanngagtcgataaatcgtaccagtcaaactgttcctgggtgaatgttttcgctcaaatcccacacaacgagcggagaaaa

SEQ ID NO: 134626 - DNA, 1047 bp, Homo Sapiens
  misc_feature (22)..(22): n is a, c, g, or t
  misc_feature (36)..(36): n is a, c, g, or t
  misc_feature (38)..(38): n is a, c, g, or t
  misc_feature (58)..(58): n is a, c, g, or t
  misc_feature (81)..(81): n is a, c, g, or t
  misc_feature (127)..(501): n is a, c, g, or t
  misc_feature (534)..(553): n is a, c, g, or t
tatatccttcggttcgcacctntactgagctcgatntntatgctctcaggggcgagcntatgaaaaacccagcacgcgccntttacgttcctgcctttgctgcctttgctcacatgtcttcctgcgnnnnnnnnnnnnnnnnnnnnnnnnnnnnnnnnnnnnnnnnnnnnnnnnnnnnnnnnnnnnnnnnnnnnnnnnnnnnnnnnnnnnnnnnnnnnnnnnnnnnnnnnnnnnnnnnnnnnnnnnnnnnnnnnnnnnnnnnnnnnnnnnnnnnnnnnnnnnnnnnnnnnnnnnnnnnnnnnnnnnnnnnnnnnnnnnnnnnnnnnnnnnnnnnnnnnnnnnnnnnnnnnnnnnnnnnnnnnnnnnnnnnnnnnnnnnnnnnnnnnnnnnnnnnnnnnnnnnnnnnnnnnnnnnnnnnnnnnnnnnnnnnnnnnnnnnnnnnnnnnnnnnnnnnnnnnnnnnnnnnnnnnnnnnnnnnnnnnnnnnnnnnnnnnnnnnnnnaagaattcggcaagagggccgcggctgtaggcnnnnnnnnnnnnnnnnnnnngacaatgctaacaatattttattgggccaggagcatgacatctttactgcttatcaatatagttctttatcaaaagatctttaataaaagcaaagtgcagaacagtatatacagtaagttcctatttgtgtaaaataagaaagctacatttatttctacctacacagaaaattacaatacaaggacatctaagacattccaagtagtctgtgtaatgatggaaaaatgagacaggctagggaaaaaaacttacttttgctaatctactctttggtactgtttgaatagtatttttataatgtttgtgaattacttttccaagtaaaaaaaggagacctttgatactgatgatgatactactgtaggatatagtttgtcttttacaatcccatactcaaagaatgaagattcacaaaaattattataggattttaaatattcagatccactctaaacaaaaactgaagtttactccccaattctatctttagagt

SEQ ID NO: 134627 - DNA, 967 bp, Homo Sapiens
ggtcacaaatcaagttatttattaatataaatatgacttcacaattccaagtgctgaatgtcatcataaacaaaacctttaaaaagcactttaaaaaatgacagaaaggtcattaaaaacaagaaaaatctgagaaactgtcacagccaagaggcatctaaggagacacaactaaatgcaatatggtatcctggatgggatcctttttcacgtttcattttctaaattttcctcctcttgaccttcagacagccttcttcttaaatcagctatttccctctcgtcggattctctatactggtgcccactgtgttcggctcgtgctccagcctaaggtgtaactggtgctcatagtcacgacctgtttctttcataacagcctgaagtgaagcaacttcttctctccactgtcttttcacttcatctatagcttcttgcttggtgttctcagagactgtggcaatcgccttaatattctccatctctgcttgagcttcccacagctgggttcgaaggtgtcccagatcatcttgtgcagcttgtaatactgcattttgcctcttcagatcctcctctttagccaaatataactccttaaattttgctctcttttgattaaattcttgttcaagctgctgttgtgcacgtaaaaattctgcattaattttttccaattctgctacccgttgctgaagagaaacgtcaggctgggaagccgggcccggctgcgccatgaccaggcggccggcctcggggagcggggatgggcggggaagcggcgtcctgggctcccgcgggctcagctggcggaggaggcgtcaaccgagccgccgccgccgccgcccagagagaaaccgctaaggctggatccgccggcgccgccacagccgcgggcagagacggacccgacctcgtgccgaattcgccacccaggcctcgctaccttaggaccgttatagttactgcc

SEQ ID NO: 134628 - DNA, 800 bp, Homo Sapiens
  misc_feature (388)..(388): n is a, c, g, or t
  misc_feature (455)..(455): n is a, c, g, or t
  misc_feature (500)..(500): n is a, c, g, or t
  misc_feature (523)..(523): n is a, c, g, or t
  misc_feature (530)..(530): n is a, c, g, or t
  misc_feature (536)..(536): n is a, c, g, or t
  misc_feature (545)..(545): n is a, c, g, or t
  misc_feature (590)..(590): n is a, c, g, or t
  misc_feature (625)..(625): n is a, c, g, or t
  misc_feature (643)..(643): n is a, c, g, or t
  misc_feature (649)..(649): n is a, c, g, or t
  misc_feature (687)..(687): n is a, c, g, or t
  misc_feature (713)..(713): n is a, c, g, or t
caatgttttatttttacacggttagtttatcagagttgcatatgaatagtgaatgaatcaactcaagtccacaaagacactggtagggtagaaaaagtagctggactggagcaagcacagacggacttggacttgtcctatacttggagctagttactgtaaaagtagagcgagggcaaggcatgaattaaaagtagcccaagaccttgacatcaacgttcatactaagtacttaacagtgcacttcataacttaacagtgtataggctgccaacaaaacagctaatagtcttaggctactttaaaaatgatgaatttagcagagatcatattatactactctattttgtattactcgaaacctagtgaaaggctaggttaaatgttnttgggtggagaataactgagatggtaggggtactaagaatgaggacatgtgacccacagctgatganactggggacactgattgagaggagtcctgaaagacacgtcttcanatatctgaggagatgttatgtgngggatanggccanatgggacanatgaagactgatgggtagggggagacagaaaaagtaactatgggngagttatccagtcctacataaagaaaagtacctanacacagcatttcttcaangagaancgcacagcttcagaaaggagcgactcctgcgtcctaantagatcctcatgggctggagcacttnagaaggatctaggatcaatttgttggcagattctgtaagagcttcaatcctcgtgcggatcttgctccagggcatcctataggagcg

SEQ ID NO: 134629 - DNA, 1147 bp, Homo Sapiens
gtgtgttttcactgcgcccaacctccccactcctctcccgtccacaccaggcactctgctgcttggcctttgggcactctgcagccacctgtacctgtgtgaactggcacttgcctggcggtgtctgtgatccacaggccccaggctcctgtagctcctgcccacctgctcacccacactgtctccctatctcccatgccactttggccacctgtccccagggcaggcatgaagcccctggtctaatgctccaagacccatttgggcaccgtggtgctcctgtggccctgtgtctcatgagaagacagctggttgcaaagccagggctttctctgggagggtctgtaggtgcaaggctcaggcacttcctgagacaggtaggtagaagccagggttcggccagggcccagcccagggtgtttgtgaacaggtggacttgggtgtggctgaaaaggagaggttgtaggaagctggccagagaatcagggcaagtgccaaaggtaagggggttgctcggcccacgggaaagcctctccaagacaggagtggaggaggcggtgcaggagggcacacgggctacctccttttctagtgtttgcagaagtgtttgggctgggggcagatggatgtaaggctatgggccccagggagtggtcagggctgaagatgaaaaagtggaggttgtccaagggttattggaggctgccccagaggagcggtcctgtgcctgagccctcagcgtgccacagttgggagaggagagaagcagcaaggaacctgaggaggggcagaaggtgggagaacccccacagtgcatgacacccagtggctgcgctcctcacccatcctcatcagccctgcggcaggcaggtgatctgtgtgaaagggtaagtctcttgcacgtgcagtggaagtcccagggcggcgctggaggtgacccccctccccaggtgtccacagagggcatggcactcatcaggcatctgcatccgctaacctagagaaaggaccgtgtttgtgggccctgcacacgctgtgtccctcacacagcctcagtttccccctttgaaacgctgggggcttcatctgcctgggcagggcctctggcccctcgtgccgaattcaccaccaggcctcgtacctagcc

SEQ ID NO: 134630 - DNA, 1005 bp, Homo Sapiens
  misc_feature (698)..(698): n is a, c, g, or t
  misc_feature (762)..(762): n is a, c, g, or t
  misc_feature (776)..(776): n is a, c, g, or t
  misc_feature (800)..(800): n is a, c, g, or t
  misc_feature (827)..(827): n is a, c, g, or t
  misc_feature (840)..(840): n is a, c, g, or t
  misc_feature (842)..(842): n is a, c, g, or t
  misc_feature (844)..(844): n is a, c, g, or t
  misc_feature (849)..(849): n is a, c, g, or t
tctttagagttgttttaatgcaggttataatatccacagtacgttggtatgtggcataacttattaggggtgtactggtatggacttctcagcagaggtggccaatctgaacaaggcccaggtccctcccatgcctcctctcctaggcttcttccctgcagctgaaggtggcccatcagcaatgcccgaggggatctctgttcagacgtgagtcctgccttggcctctcccagcaatgcccagaggcagcaggggcttcaggggtcgccctggacaggtcagaggccaggatcagccctgcctggacccctcttgcctcctcctaccctctccaggctttagcccagccttagcaacactctcaccagctcaaatccacattttcccagagggtcctccctcccatccttcctttcccacatccctccccagctgggcccaggtcttggcttcgatgccttctctggcctccctcatcctgcaacagcccctcctgtccagggcctggctcaaggctggtgtgggagctacatgcccagtgaatatacatgctgcttcagacaagcctgcttcccctccaagggtttctttattcaacctgcaaagtcactgtcagcaacttggcctggccctctgctgcttccaacaaggaaatgcttaaaagtcaggaaatgcattgggtgcctttcctagtacanaaattgactactacactttgggcaccctgagataaccaacagcattgcttttctttacttttcntacagatttcaganaaaataatctctatttatatattngataaaactaattatatcacacatctngagatcttcccangnanagaangatcaaggctcggtggtgccttggctggaaagaacaggagacacttctgggacactcggatcattgtacttgtgctgagggggttccaacatctccagaggggggttatacaggagctcacactcaaaccgaagagtgtctaggcttacaaccaag

SEQ ID NO: 134631 - DNA, 789 bp, Homo Sapiens
  misc_feature (108)..(275): n is a, c, g, or t
  misc_feature (671)..(705): n is a, c, g, or t
caatcagccatccaggttctctgtttcttgaagcttctcaggattcaaccattacacccttatatctttgttagctttaactgatcacgtacagctttcacatccacnnnnnnnnnnnnnnnnnnnnnnnnnnnnnnnnnnnnnnnnnnnnnnnnnnnnnnnnnnnnnnnnnnnnnnnnnnnnnnnnnnnnnnnnnnnnnnnnnnnnnnnnnnnnnnnnnnnnnnnnnnnnnnnnnnnnnnnnnnnnnnnnnnnnnnnnnnnnnnnnnnnnnnnnctcctgctgcttttctgaagacaggaagaggctggggataggatgcctgtcctcatccctcacccggccctcttgggaggctctcaaacagccccactaaggatcggatgagtccgcatgcgatagatgattactgcagtggctgggcacagcaacaacgaggtcatgatgacaatggtggccaggatgatgagggcgataacccagatatccaggatgtgcttgggaagcacgacttccatggggacttggctgcctgcatccatgttgcttcactcccagatggcggcgagtctgcggaaagttcctgggtcagggatggctctggaatgcgcggctgctggccccggccgtaatggccgaattcccgggcatatgtccggtaccgtcgactgnnnnnnnnnnnnnnnnnnnnnnnnnnnnnnnnnnncggccgcttcctcgctcaatgactcgctgcgctcgtcgttcggctaataagacgctagcgccctatagtgagtgtatcagtttt

SEQ ID NO: 134632 - DNA, 921 bp, Homo Sapiens
ttttcacattctagcactttattggaacttggttgtgtacatcaatgagatcacatcaaagtaaaagcagcattttcacacaataatatcccgatatctgtgctatcttcttacataatttaataaatcccaagatgctcctgattttggtatcgaagagcttgagtggtccagaaatatctctacataaatataaatcatcacatctaaaataaccatcattgttttagtaggtcccaaaagtcctgggaacacctcttaaaatataattgccataggctggctgcagagctggtgggagggagtgaagggggtacacgtggagctaattacagcaggagctgggcagagggacacacacaaggggatgggggccagagatcccgaaagctgggcagggaactcagtcaccctgcattttccaacattgcttgagtgtcaaagctaacagatgtgagactccagtgcagaaagaagcccatcaccccaactcccttggcagtgcccaaagatggcacagccttccttcagattacacaggggcagagattctggaatggagaaggttctggaaagctctacccatcaccctccaaactgagaaaacatgaaggaatggcaccttaaagaaaatactttgggccaaagtgctgctggccccttggaatggggacagggtgctcttggcttggtttgacctgaggggcactggcaaagtctgctctgcccccagtatctccctcaccacctttaaggccatcatcagcaatcaggttctctggttcttgaaagcttctcaggattcagcataacacccttatatctgtggtagctttactgatcacaaacagctttcacatccactaagtcaggtggttctcacatccctatgaggtagaaagggcagggatcaccatcccc

SEQ ID NO: 134633 - DNA, 2185 bp, Homo Sapiens
  misc_feature (288)..(351): n is a, c, g, or t
  misc_feature (1603)..(1635): n is a, c, g, or t
  misc_feature (2141)..(2141): n is a, c, g, or t
taacagttccgaaccaaaatgttttagttattacccttacaccacatatttagttgctacttgttctctgcataaggtaatgcacaggaagcattggcaccaaaagcatgacatacacaaccatttccaccatctgacgcagtcaagaccaaacaagatgaacccctttcatgcttgttaagaaattgacggctagcgcagtggctcacgcctgtaatcccagcactttggaggccaagcagcagatcacctgagtcaggagttcgagaacagcctgaccaacatggnnnnnnnnnnnnnnnnnnnnnnnnnnnnnnnnnnnnnnnnnnnnnnnnnnnnnnnnnnnnnnnntcataaaacttttaaattccatcacattacattcacaccttttgctaaccaggatgaagagccttaaacaggtttaaagagtgcagactgcagttttgttaatacttttttcctctccaagttcttttatgctaacatttccagtggtgggaagtacaagtactattagtcatcttcattctttgcattgccaaagagttcctctttctccgtcttgttctgaaggatgaacaaaagcttgaggtgtacgtatcagaacgtaaactgcagcacgaagaccaccaacgttcacccagactgtatccacctttcgccatacgtgtcgcattccagataacgccttggtaaagcattttgtgtcttgagtaagtagtacagctcggcctgtggtaggtgtgcagacacggctcatctcccgtaggcaagctggataaaggttccagtttcttttcttggatcccatcctttttccaaatggcaaatctgttacaataatatccacagagccagttctcaatggcagattgcagatatcccactgaacagcatctatgggcaagccccaggagggtttgccttctttaatttggctcttggtcaataaagatgcaatgttatttgctgctctattcacagccagtggattattatcaccagcaatatggaagcagtcagaccattcagtggccccctctattggtattgccccagttccacacattggatcgactattatatcataaggtagaggatcacagagcctgagcatcccataggcaagagttgatctaagagttgtaggtccaaaatgtgttatatttcttcggtggagactctcttcagtcaatgcaatgcccacaatgacttcattatcatggatgttcaaaagaacctccacatcaaagttggtcatgtcggccttccacttaaaataatcttgaacagcacccccaaaatctcttgcagcctcatttgaggtaaagcaatgtttctctcctgccctgttgcatgtgactctaaacttcagcacttgaggctcagtttcttcttttgagctttcatcagtctcatctttgcaagatgccaaatcatcacctattaatgttgatacatcctctttgatggctggattttcataataatctaagatatgagaatctaaagcatggctagtgaacctcttttttaacatttctctgatcgattttgacttcttgtccattattaatcttctcaatacttgaattctgannnnnnnnnnnnnnnnnnnnnnnnnnnnnnnnnaaactggcattaattttccacacttttaaggggtttgaccatgggagttttccagccaagtcttcaaaatcctttagaacttcttcctttgtttgtttgaactggtaatcttgaaactcctgaaccaccacaaataagttatcaactgatctcagacaatgaacctgtgccagactttccactgaaatgacaaaatatatcttgccacggtctctgctgattttgcatgatgacccaagtttctctctgacttcatctgcagctgtttgctcaaagccagtaggtacagtggctccaatagtgactagaagctcagattcacttccgaggtcactttctgtcacttgtacagacttctggttctcatgaaggttcacatctaggagttggttagtggcttcttcaatgtcacacatgttggctgtgcttccaagatccctaacactgtctctttaaaagcagtactgtcagggcccgggaatcctagggagcgggtaaaggcctgngagagggagcaagatgggctccgccacgagatccggctgaagtc

SEQ ID NO: 134634 - DNA, 1008 bp, Homo Sapiens
  misc_feature (242)..(255): n is a, c, g, or t
  misc_feature (313)..(330): n is a, c, g, or t
  misc_feature (372)..(785): n is a, c, g, or t
  misc_feature (791)..(868): n is a, c, g, or t
  misc_feature (890)..(890): n is a, c, g, or t
ggcttaagacagcaaaaatttattgtatcacagttctagtgggaagaagtccaaatcaaggtgtcagcagggccatgctccctctctgaaacctgtcggggaatccttctttgcctcttccttacttctggtggtttgctggcgatctggcattctttggcttatagatatattaatccaattttctgtcgtcacatggtgctgtctctgtgtctccctgccttcacatggttgtcttctgnnnnnnnnnnnnnngagaatggagtctcgctctgtcacccaggccggagtacagtggcgagactccatctcnnnnnnnnnnnnnnnnnngcctacagccgcggccgctccaaccctcgtgccgaattcttnnnnnnnnnnnnnnnnnnnnnnnnnnnnnnnnnnnnnnnnnnnnnnnnnnnnnnnnnnnnnnnnnnnnnnnnnnnnnnnnnnnnnnnnnnnnnnnnnnnnnnnnnnnnnnnnnnnnnnnnnnnnnnnnnnnnnnnnnnnnnnnnnnnnnnnnnnnnnnnnnnnnnnnnnnnnnnnnnnnnnnnnnnnnnnnnnnnnnnnnnnnnnnnnnnnnnnnnnnnnnnnnnnnnnnnnnnnnnnnnnnnnnnnnnnnnnnnnnnnnnnnnnnnnnnnnnnnnnnnnnnnnnnnnnnnnnnnnnnnnnnnnnnnnnnnnnnnnnnnnnnnnnnnnnnnnnnnnnnnnnnnnnnnnnnnnnnnnnnnnnnnnnnnnnnnnnnnnnnnnnnnnnnnnnnnnnnnnnnnnnnnnnnnnnnnnnngggcannnnnnnnnnnnnnnnnnnnnnnnnnnnnnnnnnnnnnnnnnnnnnnnnnnnnnnnnnnnnnnnnnnnnnnnnnnnnntggcggaacggacagactaaanatacaacgttcccctggaactcctcctggtctctgttcgacctgcgctacggaactgtcgcttctcctcgggaggggggcttccaactaaccgtagaccattcggtaagcgtccccaa

SEQ ID NO: 134635 - DNA, 982 bp, Homo Sapiens
  misc_feature (121)..(121): n is a, c, g, or t
  misc_feature (174)..(404): n is a, c, g, or t
  misc_feature (768)..(778): n is a, c, g, or t
  misc_feature (837)..(851): n is a, c, g, or t
cttgaaacccgcaccgctttacgtcctgctttgtgctttgtacattttttctgctttccctatcttgatacctatacaccatgatggtgatacgctccccagcgaacgacgagcgcagcgntcagtagcgagaagcggagagcgcccaatacgcaaccgcttctccccgcgcgnnnnnnnnnnnnnnnnnnnnnnnnnnnnnnnnnnnnnnnnnnnnnnnnnnnnnnnnnnnnnnnnnnnnnnnnnnnnnnnnnnnnnnnnnnnnnnnnnnnnnnnnnnnnnnnnnnnnnnnnnnnnnnnnnnnnnnnnnnnnnnnnnnnnnnnnnnnnnnnnnnnnnnnnnnnnnnnnnnnnnnnnnnnnnnnnnnnnnnnnnnnnnnnnnnnnnnnnnnnnnnnnnnnnnnnaagaattcggcacgagggagaaggaaaaagtgatggttttttttgtcttgcaaatgttctatgttttgaaatgtggacacaacaaaggctgttattgcattaggtgtaagtaaactggagtttatgttaaattacattgattggaaaagaatgaaaatttcttatttttccattgctgttcaatttatagtttgaagtgggtttttgactgcttgtttaatgaagaaaaatgcttggggtggaagggactcttgagatttcaccagagactttttctttttaataaatcaaaccttttgatgatttgaggttttatctgcagttttggaagcagtcacaaatgagacctgttataaggtggtannnnnnnnnnncttctggacagtatttaaaggatcttattcttatttcccagggaaattctgggctcccnnnnnnnnnnnnnnntcatagaaaaagaatgagcaggaatagttcttattccagaattgtacagtattcaccttaagttgattttttttctccttctgcaattgaactgaatacatttttcatgcatgttttccagaaaatagaag

SEQ ID NO: 134636 - DNA, 679 bp, Homo Sapiens
ttttggtagtcaaagtaaaggtttatccttgcatcagaatggtttaaatcttgcaatttgcatatacaaagagttcagcaacattcactggcattataatcagagcaagatcaaattataaatgtaatcaaagaaaatatgatagttgaaactgtaataacatacatacattataaagactgcacataagttaaacacaacttagttaaacaaacaaacaaaaaagtatcagtaattatacacttaaaagaataacatggggatgtctccaaatgctgaaacacaggtgtcaggctcatttaaaaaagtgtttaaaaacacataaaaataccttttaaaacactggtatgcattcttcattcatatagcacatggagagaaaccgtaaaggcagtcacatagtgaccagatcacacacagatcagaatggtcgtcttctaatcactatttggcatttgaacccaactgcatgcaacaaaggaaagtgtgaaaggaacaatggtgtcggcactgggctgtttgggggctgttttgttatgtacaatggactttctttgactgaaggaaacaagagatgaactttccaggttgcacggagaagattctgagtccctcagggattgattcccccagcgtgaggtgctccaaggcccaggagatcccctcgtgccgaattctt

SEQ ID NO: 134637 - DNA, 1253 bp, Homo Sapiens
gaagagaattcatttttattaagaggtgaaacaaaatgtcactcatgtacaactaggctttatgggaaggtggcagagtggctgtggacacatttgcccaaagcaggctgaccccctcttccacggaagaggcatcttaaagcagtttcaccagggccctggcagggagccccagggcaggatcccacattcctatagccctcacaacaggtgccttcctgctgcttatctgcagggaggtcttcgtggggtggagatactggtggttatttgactgttacctgtggcctgtcctctgcctccttccgttgaagaaggccttgtcagccactctgtataactctcctcgaatatttaccatgtttattctttacctagatcctcagggctcttagtctaacgggaattcttgttccactgacatattgcaaggctctgactccgctttctgtgttcagcttcccctggcggggtccgcggtggcttcatgtgggttgctttcgagaccagctccttggtagtcgccactactacagtttgtgctctctgctgtttgtgatccttttcttctttgcagatgttggaatatcttgttcctggcttccccagggcatggctcaggcccgtttctcttccaatacctccactcaggctggcagaggccactctgtctcagaggcatctcaagaaagatgggatctgtgttgactgcactgttcaccatcagtctctggggagggcccatctccagatcattctccacaccgtcttgttcacaggaggaggatgaggaggaagaaccagccaggggagcgtgcattgctactttctcctcttttaggaccttccaggggcaaaagctgtgctgtgggctccaactctgggagttctctgggcatgacttctgaggtccctggttagaggccaccaggtcgtgccacatggcgggcagccacagaggcagccctggcacagtagctggcagcaggcatgatggtggcagagagggcacaggaatggagcatccggaggaagctcattagtgatgcgcccagtgattggccctagcagagagcagcaaggggcccagtgaaggggcctggggtgctccctggtgaaagacttgtgcagcctctccacagccttcttccagatggtcagggacaccgactggaccccacctaggggcactttagcagctttgccattccagaaatgaacagtgatttctttttcctttgttatgtagcatc

SEQ ID NO: 134638 - DNA, 468 bp, Homo Sapiens
ttttgaagagaattcatttttattaagaggtgaaacaaaatgtcactcatgtacaactaggctttatgggaaggtggcagagtggctgtggacacatttgcccaaagcaggctgaccccctcttccacggaagaggcatcttaaagcagtttcaccagggccctggcagggagccccagggcaggatcccacattcctatagccctcacaacaggtgccttcctgctgcttatctgcagggaggtcttcgtggggtggagatactggtggttatttgactgttacctgtggcctgtcctctgcctccttccgttgaagaaggccttgtcagccactctgtataactctcctcgaatatttaccatgtttattctttacctataaaagggggaaaaattccatacattgttatgctgactgcaattttaagaatcaaaagtcactgattttaaaaagtcattgattgtg

SEQ ID NO: 134639 - DNA, 1785 bp, Homo Sapiens
  misc_feature (106)..(106): n is a, c, g, or t
  misc_feature (112)..(121): n is a, c, g, or t
  misc_feature (123)..(130): n is a, c, g, or t
  misc_feature (132)..(142): n is a, c, g, or t
  misc_feature (144)..(185): n is a, c, g, or t
  misc_feature (187)..(190): n is a, c, g, or t
aaaccaggctatggccccatgtttcccttttcctatctggggcccgcgccgccccaacgaaatgggtctatgaaaagcttcttcgaggggccgaggccggcccgancaaggnnnnnnnnnntnnnnnnnntnnnnnnnnnnnannnnnnnnnnnnnnnnnnnnnnnnnnnnnnnnnnnnnnnnnntnnnnttcctcaaccaaatgttttgaatttattataatcgtgcttctctacaactaatgattcttgtggtttgcaaaccatgtctgcctttatttacctacacaaacacggaacagaatttccaataggagaggttcacacagctaacaaagcatagagtgtgtgacctcaataaggcattcaacaaagacacacgccgtatttccctctgactgcgttcccttaggatgctctgatgttggcgtcgcattcttctaaaagtagaatcaaatcttcaatcaggctgtgttctctgccatgtgtcactctcataatatcaaaagccagtctcagattcttcattgcttggggaaacatgccttgatgtagctgcagtttgccaactttcatcacttgaacccctctgacgggatggcttcctgggaaaaaaatcctgtatggctccatggtccgagtaccatagaacaaggcttcctccaacaggccgaggttgatgcaggcatccatggcgcagtcgagcaccttcagctggtagatgttgatatcgggaagccgttcagaattgctgcttatgatcgcctggcacatggccagaacctgctcccacttccagtgtgccttcagttcttcaatttttttcagggattcttgaacttccttccatacttgctcatcaccagttagcatatcagcatccttgtcctgggtttggcaacggaaacagtcacattcaaagcagtactggtccctcagctgcttccggcgctcctcactggtcatcagcatatccaggtagcagatggtgagctcctctcccacctcgatgtctcggactgctcgcagtaagaggtggggcccattgaacacaatcgaacagttggggtcacagctgtgattgagcaaagagatactgggatataggccaacaccaacttcctgcatctccgcattacagatggtgaaagagttgcagatcacttttgcaaaggcttcaaaaaggtcaaaggcaggtggcagctgagaggcatcctgtatttcttctctcatgaaatgttgaaatgtcattacgagttgcctgaggccctctttcttatcttcagtcagtttgttaatatttgactccagatcataaaatgagtaaagcttctctgattctgaaggtgctccatccataagtttgaagacaactctgccaagaagtcgaacggagtctggaggatatctgggtttgcagcttttaaggcatttgcattcccgcttgtggtctggccaagcttttttctgacacttagcactacagtatttggcgacgcggcactgagagcatcgcatcagcttttccttcccgagaaggcagcggtcgcagacgacgccacgactccccttgcacaccgtgtacgccaagggatccgagcggaagagtagctctccggggcgcagcggggtcacggcgcgcagcccgtttcccctgttggcggttgcgaacttttccaccttcagcggctccatcctcccgcagctccggcacctcagacggctacccgcgtccagcagcgggcgtctcacgggctgccgatcccgggaattccggaccggtcca

SEQ ID NO: 134640 - DNA, 1077 bp, Homo Sapiens
  misc_feature (75)..(97): n is a, c, g, or t
  misc_feature (631)..(631): n is a, c, g, or t
  misc_feature (772)..(772): n is a, c, g, or t
  misc_feature (856)..(856): n is a, c, g, or t
  misc_feature (899)..(899): n is a, c, g, or t
ggttttaacgacggccagtgccaagctaaaattaaccctctgtaaagggagaaagcttgcggccgcctgtcaggnnnnnnnnnnnnnnnnnnnnnnnagaaaagatatatatacttttattattcacccgttaactccattatatgccaatcacgagctagttttcagcagttacattcccttgatcacggctgcatgaggatgtaattaactggaaaacacggagaccagagacacgaccggaggtgacgtcacgcagcccacgccatcgcaatacaattgtcaagttcgctggcggtttggtaaagccggttcagttctgctccctttgctagggattctcacgtgtgtgaaaattggaccaacagtggtggggttccatttcctggttcgaattttcagtggctttatccagaatcgcactggtgactggttattgtagcaccagtccaaccttctctgcccccatgctggggcatttccaattgtaaaggtaatactgcaggttgccgtcccctatgccaaacttgagcttctccaggaaggttttgttctccatgagatccagtgcattgaacacatcaaaccctttcattttggcgaggacaagggcgtcgctcatgaggtctanaaaaggggtctgggtgtgaacgttgtaaaaagaataagcagctttgagactcttgtgggttggatggttcatgatggtggagggcagcgtataaaagctcaggaaatctgtcacctctccgtttgcgttctccaccacganagtgtcgatgatttctcctggggggtagacagtgctccactcctcctggctctgacgggcgtaggtgaatttgctcagtactgntgagagctgggactacggatgtctttgtttcatggcgcagcantgtctgggatcctggcatcgtaagctcatgtggctctgtcaattctgccacggggagactcctcatcactcggtgggttaggacgatgcatactgcagtgcacggcttggatacaccgggatgtactgtggggaagctccagtaccgcggggtcccggtaaatgggaactctggagag

SEQ ID NO: 134641 - DNA, 435 bp, Homo Sapiens
ttattttagtacttttttttatattaaaagaattctaatttgcatgtttgtagcctgttctggagagttggggggcctgatctgggatggctttccataagccaaggatgggaggaagcccttgccccccaggagtgctgagtgcactctgttgccagaaacaaaggatgccaggtgccacccaaatactccttcaaagggcttgaaacccttctgggcctctaagcaatctaaagaactaacttggtctgataatctcacccatcccccactcagagtctggtttgaactttgattccttaggaggcatggggggaaggtgggggtggtacagagagcaactttaaaatattaaaagtggctttctcaatggagcaaaaagaaaacctgtgggattacaaagttaactagacattgcagtgggaggagggtgca

SEQ ID NO: 134642 - DNA, 200 bp, Homo Sapiens
atattgtgtcaggaaccgatgggcggattatccttcccatcaactcctttgtatctcttcagcttagagaattcctgtcagcctcagaggatgcttcttgcaccacgaaaaagaggcatttggtatggaggagaatgtgaaatatgctctttgatttttatgagaaatttttttaggcaatggcctcgtgccgaattctt

SEQ ID NO: 134643 - DNA, 716 bp, Homo Sapiens
aggaatcagaagatttattttggctaagtcacaagctgacttattattcaaattattcatccaaataatgaggaccataacacacgtaatagtatattcgtgatcaactttgtaacaagctgtcaaagggagacctctaacatctgctcacgaaggaatcacttcagcatgtcctgctctgcagcagaaaacgcatggggatcactcagaactccggatttccaacagagcagcatttcccagagagtaagccagaggacaccatcctctgagatgctgtcaggaacacttgaaagataagcaaaatgtctcctatcgcttctttttaagatctgaagatcactgtgcaaaggactatcagggtcaacacatttaaatggccttgcctttcagtcttcctaattttctctaatattgcccagttttctttttcagttccttcatcctccaacttcttctcactagtaggctcttctttcatctcatagtgatctaagtcttctatatcttcatccatctcttcttcttcgtcttcttttgaagtcacttcttctgttgtcccattctgacccatgggtagtggttgatctggcatctcaacattcgggtgcttaggaaggttatataatctgcagagtccacatatcagccacttccattgctgatgaagctgctgcatccagggtacaatgtgcctttccagaagaagtgacttc

SEQ ID NO: 134644 - DNA, 1199 bp, Homo Sapiens
  misc_feature (660)..(1093): n is a, c, g, or t
  misc_feature (1114)..(1114): n is a, c, g, or t
caattacaaggagaatttcccctttcttaaatgtaagatctccaacttgctgagcagtaaaatctccaacagcgatgtattcttcaccggttgaccatttgtgagattcattttcctctttctcttcctcttcctcctctgcatcttcttcctccccaccactgtcttcactatcttcactttcactttcttcctcttcttcagtaggtgccccaacttcagttatattttctctgcttattgtcacagcaaggccctgcagttgttgggtaagcttgtccaaaagagtatgctcctcttcttttctctgattatagtttgccacaggtgcagattcatcagctttgcttaatttttgaagagcatttttattttcatctattgcctgctttaactggatacatctttgataaatatgttgtcttttattgggttctagagcttctttcagttggctctcagaaagcaaactatcaacctagtgatagagccagtcatcacaggcctgactcagaggggctgttgattacttgtcctacagacaccgaatagaaaatctgttccatattcagcttcaggtgtcctctgttgcttcagctcctgattgcggcgccgcagggcctggagaggatctcgctgtcgcctcgtgccgaattcttnnnnnnnnnnnnnnnnnnnnnnnnnnnnnnnnnnnnnnnnnnnnnnnnnnnnnnnnnnnnnnnnnnnnnnnnnnnnnnnnnnnnnnnnnnnnnnnnnnnnnnnnnnnnnnnnnnnnnnnnnnnnnnnnnnnnnnnnnnnnnnnnnnnnnnnnnnnnnnnnnnnnnnnnnnnnnnnnnnnnnnnnnnnnnnnnnnnnnnnnnnnnnnnnnnnnnnnnnnnnnnnnnnnnnnnnnnnnnnnnnnnnnnnnnnnnnnnnnnnnnnnnnnnnnnnnnnnnnnnnnnnnnnnnnnnnnnnnnnnnnnnnnnnnnnnnnnnnnnnnnnnnnnnnnnnnnnnnnnnnnnnnnnnnnnnnnnnnnnnnnnnnnnnnnnnnnnnnnnnnnnnnnnnnnnnnnnnnnnnnnnnnnnnnnnnnnnnnnnnnnnnnnnnnnnnnnngcgtgctggcgtttttcatanggtccgccccctgacgagcacacaaaatcgacgctaatcagaggtggggaaccgacagactataagatacagcgttcccctggaa

SEQ ID NO: 134645 - DNA, 607 bp, Homo Sapiens
  misc_feature (94)..(130): n is a, c, g, or t
  misc_feature (134)..(236): n is a, c, g, or t
ttttttttgagtgccacagattgtttttattggtcatggtgatatcctggggcctagaatggaaatggactcattttcatgcctagtaaaaccnnnnnnnnnnnnnnnnnnnnnnnnnnnnnnnnnnnnngcannnnnnnnnnnnnnnnnnnnnnnnnnnnnnnnnnnnnnnnnnnnnnnnnnnnnnnnnnnnnnnnnnnnnnnnnnnnnnnnnnnnnnnnnnnnnnnnnnnnnnnatcacatccagccaaaatctatcttttatctcaccgcaagcttttaattcatttccaactattaggaattagtttgtttcataagcctgagatatgtgcaggatttttgaaagatgatttctgtcagtgtggaagcatgttgcctccagcagtcgttaaaactttcaccagcttgtctaagagtttgattcaatgtctcatcgtcctccgacatgctactcttgctagtaaacaagccaaaggaaactgctagggctcagggtttgggtgctactgagtgtttacaaatactcgagctgtagacaagcaaatgttccctgacacagaaggaagaagtgtgcaggatattcctctttatcctcagctctgct

SEQ ID NO: 134646 - DNA, 993 bp, Homo Sapiens
ttctgtttttgaaaaatttattttatactcttagaagctaagaactttgccacacatgaaccaaatttagaattaaggttcttccctagtgtatctacttccttttgaaattttataaacaagattttatacacaagaggtagcagaggaaaattccagtctgcttgttccaagctcagaaggtaactgcacacacctcgatgttagcagggaaggtggggcaggacagggtaagtctgatgatacggcactctagttcctaaaactgactgtagttgtcagtgaccgtgtgaggactccaggagaagtcgtggtgagatgcccgctgggatgcttgttttctttcccaggatgccttcaacgggcagaatcggccatcttaagatcggcctcactaagggagcttcttgagaacacacagcattattgagttaattgtgcaattcctgctctgtttgcagaccattttgaaaggtttataaaaacatcttcatccaaaaaattggcagtaaaaatgacaactcttccaaggtaagcctgtcataactgtcactgttgtactacattaaaaaaagtcatcagcaggttcattgactgtagctgtcagcaatcaagtggttaccagcaaagtgaaaacgatggtcattgcagcaacaatataagcaacatgatctgaagcgtataatatacacggtggacgatcctgatgaagctttacagtgaggacggcaggtgctaggggtgcggaaggcgttgtttccataggaaataaggggactagaagtggcaatttcactcctgattttgggctcctgagagtgcagtcgccagcgatgatatcccagtgtggatcatcgccagcatttcaaggtcatgtcccacacaatctcttggtgaggatgtgggcggagagaaggtgagaatagggtaggggaaacagtaggacaggaagtattcacgtactcaaaaccaatggtagaacatcacatttca

SEQ ID NO: 134647 - DNA, 999 bp, Homo Sapiens
  misc_feature (835)..(835): n is a, c, g, or t
  misc_feature (861)..(861): n is a, c, g, or t
  misc_feature (868)..(868): n is a, c, g, or t
  misc_feature (917)..(917): n is a, c, g, or t
  misc_feature (919)..(919): n is a, c, g, or t
  misc_feature (938)..(938): n is a, c, g, or t
tgaggttgaaaaccacaccaatttattatcttacagttctagaggtcaggagtccaaaatggttttcaccaggctgaagtcttgtcagtgcggctttgtttctccacggaggctctggggcagaatccaatgccttttccagctcctccaggggccacctcatcgcctggccccaggccttcttgccatcttcacagccagaagcttccttgcttcatgcgcagaccctcgtgactccccttcccttataagggcccccatgattactcagggcccacctcaaccatccacggtcatctccccaccacgaaatcctgaactgaagcacaggcgccgggtcccttttgccacgcaaggtaacactttcccacgtcctggggttccaaacctggacatctctgggggctgttattccacccaccgtcatcagtgaggcgccttcaggaggggctgtgaggtcacgtgaggtcggcttcagaagggctaggtttgagtgcctggaggacactggcaggaggcgcccctgggctccatccatttaccacgcacgcactcagcacccctgagaccatccctggggcctacaggagaaccctgtacctcagcagccctgaaacctgctttccacttccggacctttctgaaatcaagacgcatctttagatcaatggcatcttactgtgtcaccggcaggcctcttctttcttagtgacgtttaaaggaaagtatcttacccctgatggcttcttggagtgaatgaattccggtgtgagcaagactagaaggggctcacagagtgtcaggtgacccactccgcctggccccaagtcttccntagtgctcactggcctttctgactgngatccangtgtctgcagctcatgcctcgtgcgaatcttggctcgaggcaatcctanangagtcgataattcgttcangtaactgtcctggtgaatgtatcgtcacatcaacacaacagcggacatagtgtagctgggg

SEQ ID NO: 134648 - DNA, 1252 bp, Homo Sapiens
  misc_feature (906)..(1009): n is a, c, g, or t
  misc_feature (1031)..(1031): n is a, c, g, or t
cgctcttccgtcgctgcgttgtggcttcgtcctgtcccggccgccgttcccgccgcggcttgttcccgtgccccgccctgcgtttgggccttccccttgtttcgcgtgtctccacaggtgttttgtgtggttggcatgctgtgtgtgctgtcccgttggtgttgcgcgacgtcggtggttatctgcgtcgcctgtgcttgtctgctctgtgtcccctttttccccgcagttcattacaaccacggggttaaacccgggggctttatccggaattttaatgccggcttgcccttataggggaacccggcagatctaccccgtgtgggacaagaaagcttgggtctaggaacagcgtatgacccatgggcccagttccagtgaccctgctgttttcccgccacccggcatatgatgtcctcggaagtttttttgttgttttgtgcttttacactgttaaaaacatttattctgatacattctatcataagttagtacaagttccactctgctacagatgcgtctgtgaagagccttgtgccatccaactagtgactgaatgatgtcccatctcttatccgagccagagcacacatcttccatgctgtccgctgattgcctccaaatccagaagaccaaataatcctttatccccaaagtaggctcaaaacagttggttcaggcattccgggatctgcacccctcttaaatcccaggtaaatcacaagagggataaagccccagcgaatggcaaactggctccccttgaagagctgctgtagtctctgcttggcctctttgctcagcttcaccatggcgacggccgtgtggcgcagggaggaccccttacagcaaccacagcgtcgggaatccgaaagggagaagttatttttatttttacttatctannnnnnnnnnnnnnnnnnnnnnnnnnnnnnnnnnnnnnnnnnnnnnnnnnnnnnnnnnnnnnnnnnnnnnnnnnnnnnnnnnnnnnnnnnnnnnnnnnnnnnnnggcatgagccactgcgcccggncagcatagtttcttttcaaaactcatccaagtagtagcatgtgtcagaatttccttcctttttacggctgaatagtattccattgtacatatgtatcacattttctgtatccattcatccatcagtggatgcttagatggcttccaccttttggttattgagtggacagtgctgctacaaatatcgagggtgtgaatatccattcgtgtatctgctcggcg

SEQ ID NO: 134649 - DNA, 547 bp, Homo Sapiens
ttttcattgttccaaagttgttttttattttatatttgttgaaagaaataaaattatatttaaaaaaaatagagaaatctcacaaactgatgaaagccaggaacaaaaagaacaagttagtactttttcctgagaggcagatctaacagctgcagaatggacttcttccttcccagcttttgtgaaacaaaacaattctcctaaggcatcagaaagcactgagtgcaaaatgggttgttcaggtacaaggtctcaagccctctaatggggactgggaaacgtgaaaagctgctacaatttcctctcctttaataccaaatgttaaactgtctatacttctactttttatgtaaatttgagaatttcacactcatgacctgcatttcggacctggtcgtgtttgattaaaatcttactacttagtgatctgcactggcatcccaacaactgattgcaggggccagcagcaggaagagctgctctgatctcaccatccgcagccaaaaccagccaaagagcacccatcccagcctcgtgccgaattctt

SEQ ID NO: 134650 - DNA, 1679 bp, Homo Sapiens
gtctaatattgttaagaatgcatggtcctagtactgtatagatactgaaatttgagggctaaagtccagtcaatctttcgtgtgatctatgattaatgtgccagcaaacagtgtcagatcagctggcagcagggaaaagcattacatcttcagatattattttggtcaactcctcgttttcaaaaatccccttttggtaatgcagttgtgatggtgaactagccagatgaaatggtggtatattctttccacaaggaggagtgcttaagtgctttcaaatattttggttgtcattatgtgtcactaagttactggtaccaaatttaaagaggaagtccttacacatattaagcactacagtgtgccttatacatgtatatgtactgaagtatgagttcagtgactttttggacagaacacaaacttctttcattagaaatttttaaaaaatgacttgggcatttgttgcaggagaaggacttgataatctgtggaatttaaatgttattcatgcttcttattttaaaagtgcttcaaatccttcaataaggttctgaaagcttgtccgattggatggttggaattcccagcatttcctcataagttgataaacctcatctggacagttaggtgggcacggcaggcgttttccttcttttaacgtattcacaagtcttgtgactgtcatctggccatgggttgggcctatcattttcaggaacaaagccatgggactagaatctgaatcacagtaagtcagcagctcatgcagagtgactccaaaagaccagacgtcagaggcaatataaaatttagattgcattaaacattctggagcataccaaaacacagggctgtcccggtcatccttgacggtgtaatactccttatcggtttcaattgctttggttaaaccgaagtctccaattttcacttggtgttcactctcaacaaggacatttcttgctgccaagtcccggtgaacgtattgccgagaacccaaatagtccatccccttacaaatctgaacggcatattttagctgctgtttgaggtttattttgttcttattctttggaagatattccttaaggcttcccgaaggcagaaattccatgatgagcttaataccatttcctccgtcttctgtgcagattcctttgtacttcacaatgttctcatgatagaggttccttaagatctcgatttcctttttcagatcagctatgtggttacctccactctcaggcttcagagatttaacagccacctgctcccctgtattgtccccttcggggtcatacctgcagagctcaaccttcccaaagtggccctctcccaagtcacggatcctctttaggaagcgcttttcaaaatgtgtggggtccacttcagttgctggttttttttctgaaacaatatctggattctgctcttcaagcttattaatgtctctcatgatggctcggaagaaaggcctctgattggggtcatagttcatgcagcgggtcatgaggtcagccagctccttacatgatggtgtcactggcctgcaccggctttcatagaatctctctttctcaatcagcgtcttgtctttcaaggggatctcgccattgtagcagatttccctgagtgtggctgctccaacatcagaatggtcctcgtgccgaattctt

SEQ ID NO: 134651 - DNA, 1141 bp, Homo Sapiens
  misc_feature (330)..(345): n is a, c, g, or t
  misc_feature (1003)..(1003): n is a, c, g, or t
  misc_feature (1027)..(1027): n is a, c, g, or t
tttactatgttagaaagagcaccctgagatattaaactactacccaaaacatctttttcaaaaagtgaaaaaaggaaaagggaggcactccatcatggatttgcactaaaacaaatatcttctatatatttgaagttgaatgctcttaactaccaactgaatggcacgttcacatatgaagacttcttgtgattcctgcaagacagtgagagtgtgaatgacccctgctgtggccaatttaagaaggaaaaatattaaaggtatgcaaagggtgaggaagagctgctgttctatgtatagttccattaaatttattaagaggctttgacnnnnnnnnnnnnnnnnggctttagagaggcattaagaagtagggcatgaaggcacaaaaagggaacctgaaatccaattgcaataattactcatgcaattggcctctttctatgtggcattatagaaacctcctgagtaacacagtttatggttttacaaaagagaactcctacatcattgcatggcatggctaccgcttccttagaccattcagagaatgatccccaagtatttttcataaaccccatagggtttcctacattaaaataaagtgacagagatcacgccttgaataatttcacaattccagcaatgagttgtactacttccaaatgacgaattttctgctccaaataatgggacaaagggcatcatcacatggacacagtcaatttcacagtgatggactcacacaggtggatgatctgaggcacaagctgtgattggtcttaagaaaatgaaaggtagagttgggttcaaaatccacatctcacgatttctggtccttattcatccaaaaagttgaactgcttcatatcagtgtattagacacattttaaatctttctcaagagttgctctgggtgcagcatgataaggaaaaccaggtatttggcttgatagccgatattcaaggtataggtgccaagcttatggtaagcttctcaccgtangatatctgagatctgttgccacanagaggactatggtcctatgatgactactatagttcagttttcaacattttgggaataatttgattcatacctttccttctcgttacattataagacctcgtgccgaattcttgg

SEQ ID NO: 134652 - DNA, 610 bp, Homo Sapiens
ttttatttagtaaacccagtttatttacataatacatattttgtcatgcagcttactgaattgcagttagtgtaataacaaaaaaagacaagcactgtcttgctatttgaaaatggcttaatatagaaagataattgtttcttaaatgagttaaccacaaccatataaattgctagacaatttaaaacagccatagataattttaaaatgtaaaatctgtaggcaaaaagcttttatagttcacacattggtaaaattaaaaccagtcttttttagtaataaaactggatagtataatcttactttaatctataaaaacaaaaataacttaaatatacatcattacaaggctcagatttgtagacaactttaaaatattttttaatgttaacaatgtcttcaaaattttaccagtagtgctgtgcacacagtaggtggtcattaaatgctgactgacatacagaagtgtttctagttaacagcaatccatattcattcattcattccctattttataataaatatatcatagcagtgaaaaaatgagaggataactttcttacaatatttaacattttcatacagagttgaaacctcgtgccgaattctt

SEQ ID NO: 134653 - DNA, 580 bp, Homo Sapiens
tttttgaaattcagagggggttattaataatatttagtttagggcttttgaatataacgactttaactttttctcttcttttttgttaatggttactctgtctgaaatgggacatgaaaggagtaagaggatgggggtgaagggaagggaaggggataaggaaaggctaggtggccacatctctctgctgtgacctcgccatctggaaaatgttctcttttctccacttgagctcgcagaacaccctctcgaagcactcatgcatgtaattgaaatatggcgtgaagattttaacccatcggggcttcttctctcctcgtgcatattcgaaacagaaggccatcccttcttcatctgtgtcccatcgctgcatctcatcccattcaaatgcaattacctggttctccagctgtccttcttcagtgcaggcatgcagtttaaagtgcgtgatgctgatggctgtgataacgtgccccttcctcctggagtcacaggcacagtggggaaagatgatttcattgtagccctcacaagtccttagcatgttgaggtacatgaccatttttctttgttcgtatag

SEQ ID NO: 134654 - DNA, 1031 bp, Homo Sapiens
  misc_feature (37)..(37): n is a, c, g, or t
  misc_feature (50)..(50): n is a, c, g, or t
  misc_feature (128)..(128): n is a, c, g, or t
  misc_feature (150)..(150): n is a, c, g, or t
  misc_feature (154)..(154): n is a, c, g, or t
  misc_feature (179)..(179): n is a, c, g, or t
  misc_feature (201)..(201): n is a, c, g, or t
  misc_feature (208)..(208): n is a, c, g, or t
  misc_feature (284)..(284): n is a, c, g, or t
  misc_feature (360)..(360): n is a, c, g, or t
  misc_feature (667)..(729): n is a, c, g, or t
gattgagcgatacatcacacagaacgttgactgatcngattatagactcnttagggattgcctcgagccagatcgcaccgagtgatccaatgaacatagaccatgttacattctaactctaaccaacntcacacactatctaaacatatntgtnagcaactggatgactgataaatgtntgctgtaataaaaaatacaaanttccaantatagccttatagctagctaaacagctttcaaaaacatgtacagctagccaacaattctctaaaatatgtatgtancactaaagaatctctgctaaaaatctactgtatgtaaatggtcttactgaaataggactttcatgatactgtgtcntaaaaagtgagtatgatagggctacaacaacattactattaataaaggttacagaagagattattgctgtacttttcctcataaacaccatcaaactttgttgcagttacaaaaagtacaaccaagttacttttcctcttactgaatttcattatgtttcacatatttgcagtttttattcagcagagaataattcttaaaatcttttctgtaagaattctaagtatttaaatgtgtagcttcacattatactaccatgtttcacccttcgtttcccaaatacacaaaaaacatatacattttttcnnnnnnnnnnnnnnnnnnnnnnnnnnnnnnnnnnnnnnnnnnnnnnnnnnnnnnnnnnnnnnnagattattcatatggcacaaagtgatctcctactagtccaaagttcaaaaacattttaatgaagtccatttatatatattttgtttgcttttcaatgaaatactacatttattgaggcgaaatcacattatttttagttcttggagtcaacaagtgtacacaaatgtttttcaacagttattgaaaataggagaccaagttgaacgtgccaaagagataccattcagttggattttctagggtcaacatgaagaaaattagagaagggatttacttggttggtttccatagcttgatagacc

SEQ ID NO: 134655 - DNA, 1353 bp, Homo Sapiens
  misc_feature (1220)..(1254): n is a, c, g, or t
cttttattacaatttttattgtgataaaaacacataaaatttaccctttcacatactttgtgtgtaccgaagagtattgttaactataggcatatttttatacaacaaatctcaaaaagcttttccatcttgcgtggctgacactcaatacccattgaacaactcattttctcctccaccagcttgtggcaaataccgcagtactttgttcttctgagtttgacgttagataccccatataagtggaaatgggtgtatttgtcctttcggaactggtttatttcacttagcataacgtccatgttgtagcatatggcagaattttgtttttaaggctaaatgatattgcattgtatgtatataatgcattttgtttaccaattcatctgtcaatggacatttactttgcttccacctcttggctcttctgaataatgctgcaatgaacacaggtaggcattcacacattgagatgctttcttcagttcctttggacatgtacctagaagtggattgctgctgaccaagtaagttttaaacctagtgcttttatattacgccctgagctaaagataagaactgtgaataaaaactgaattctggcttagttgatttttaaacaaagagtggtatgagttatcaattctgagagtagcttatattttaatcttaggattgagcacgtgctatttttgcaagtgatgaaagatagctacagacaagggaatttggaaagcaaagaaattaaccccagcagtgctgcagtggaattaaaagtgttggcttgtggtcatgtttttaatatagaaatagagttattaatgtgtggatacgtatatataattttgtatgtctttgccatatcctccatagagaagacctaaaagccagggcactattacctaggaacacctccctacacagagactgcagcttctaaatagtattctccattaaaataaattacatttttctgagtctagggctggagacaaatgtaccatgaacaaactgttgcccagaaaataattatatacccatgaaataaggagaatacatttttaaagattcagaagatagcttgatggggatcctacttattgaatctggaaaaatatgtgcatcaaatttacagtagctaactacaccccatagattaagaatttatgcccggccgtaatggccgaattcccgggcatatgtccggtaccgtcgactgnnnnnnnnnnnnnnnnnnnnnnnnnnnnnnnnnnncgccgcttcctcgctaccagctcgctgcgctcgtcgttcgaaagacgactgccggccccaacttaattgtgattgcgttcagttaatttaacgtttttt

SEQ ID NO: 134656 - DNA, 1013 bp, Homo Sapiens
  misc_feature (729)..(729): n is a, c, g, or t
  misc_feature (759)..(760): n is a, c, g, or t
  misc_feature (764)..(764): n is a, c, g, or t
  misc_feature (772)..(772): n is a, c, g, or t
  misc_feature (790)..(790): n is a, c, g, or t
  misc_feature (796)..(797): n is a, c, g, or t
  misc_feature (805)..(805): n is a, c, g, or t
  misc_feature (808)..(808): n is a, c, g, or t
  misc_feature (813)..(813): n is a, c, g, or t
  misc_feature (816)..(816): n is a, c, g, or t
  misc_feature (941)..(941): n is a, c, g, or t
  misc_feature (959)..(959): n is a, c, g, or t
gttggtttggtttttggattcatgcagtctttattaatctgacaaatacagaaaatctgcaatcagctatcaaaattatatcttaccaagaatttgaaaggtatttataaaaaaggtgtattcacagtctgtctgaattaagtacaaagcagtgtccacagaagcagaaggcagacaacatgtgagagtaaatgatcccactgaaaccctcaccccagcacctccaaggacaccaaaaacaagacagtcctgtacttgctactatatgcagctgactttgaaactgcctagtctcaacaattacgtatttcaaaaggaaaattgctttctgggaaatcgtccctgctacacagacacacagaccaactggcaatgctgccaccacatgtcagggctcagggtggacccagcacatccactaagaggcaccctgctgcccaaggctgtgggagacagctttgatgttcaagaaaggggttcatttcagcaccagggtgcttttttatatgcaaatctgaggtgtttcccgttagaggagaggactatgcagatgatcacatgcagatgtctctgagctgtgagcccgatgacagctttgttggtacactctggccagccatttcacaacgcactatgaagagctgaaacctctgtttttaatctcttgtgttgtgggaatttaaagaggtgagaagatcacaaggatcacttctaggctcaaacttatgnatatatgatagtttccagcccaagggcaannacanatgtcaanttttcacgtctccttcanattcanntgttggangangtgangangtgaggaaaaggcaagtcaactgttcttatagacatacagcaatttagagaagagtacttactgaatggatgatttctgatcagtcactttatacacaaatgtatagctcagtatggtactgtanagtggtattgctcgtgcngatctggctcaggccaatcctaatgatcgataatcgtacagtcaatgtctgtgg

SEQ ID NO: 134657 - DNA, 1012 bp, Homo Sapiens
  misc_feature (153)..(163): n is a, c, g, or t
  misc_feature (426)..(445): n is a, c, g, or t
  misc_feature (484)..(951): n is a, c, g, or t
cattgggtattgactttttattattagtcactgttcataatttgtttcaaccaaaagacagtacacacagcagaattctaatgcatcccatgtaaatgtttacatccattttattcctcactcgcctctaagacttatcatttaactttaaannnnnnnnnnnacatctcaaaaatatgtctgcaataattagagcttcattagctgtcccacttggaaacagctttttaatatttttacagtaaagaagatgtgatggggcataatgaaaatgtaacttacaacactaagaaagaaaagggcctttataggaacacagtgggagttcataaaggaaagagttcagaagctctttcccatggggcccccaaatggaaaacaaaaacaaaacacacaaagcgcaaccgcaggttctttgagggaagnnnnnnnnnnnnnnnnnnnngcctacagccgcggccgctcccctcgtgccgaattcttnnnnnnnnnnnnnnnnnnnnnnnnnnnnnnnnnnnnnnnnnnnnnnnnnnnnnnnnnnnnnnnnnnnnnnnnnnnnnnnnnnnnnnnnnnnnnnnnnnnnnnnnnnnnnnnnnnnnnnnnnnnnnnnnnnnnnnnnnnnnnnnnnnnnnnnnnnnnnnnnnnnnnnnnnnnnnnnnnnnnnnnnnnnnnnnnnnnnnnnnnnnnnnnnnnnnnnnnnnnnnnnnnnnnnnnnnnnnnnnnnnnnnnnnnnnnnnnnnnnnnnnnnnnnnnnnnnnnnnnnnnnnnnnnnnnnnnnnnnnnnnnnnnnnnnnnnnnnnnnnnnnnnnnnnnnnnnnnnnnnnnnnnnnnnnnnnnnnnnnnnnnnnnnnnnnnnnnnnnnnnnnnnnnnnnnnnnnnnnnnnnnnnnnnnnnnnnnnnnnnnnnnnnnnnnnnnnnnnnnnnnnnnnnnnnnnnnnnnnnnnnnnnnnntgacgagatcaataatcgagctcagtcagaggtgggaaccgacagactataagatacagcg

SEQ ID NO: 134658 - DNA, 558 bp, Homo Sapiens
attgtgcaattactccttttgtagaagaggccaaaatcctcctcctccttcctttctcctatattcactcctccaggatcataaagcctccctcttgtttatctgtgtctgtctgtctgattggttagatttggctgcccttccaagctaatggtgtcaggtggagaacagagcaaccttccctcggaaggagacaattcgaggtgctggtacatttcccttgttttctatgttcttctttctagtgggtctcatgtagagatagagatatttttttgttttagagattccaaagtatatatttttagtgtaagaaatgtaccctctccacactccatgatgtaaatagaaccaggaataaatgtgtcattgtgataatcccatagcaatttatggtaagaacaagacccctttccctcaccaccgagtctcgtggtctgtgtctgtgaaccagggcaggtaattgtgacactgcatctcatagaactctgcctgcccagatttttgtgtgctcacctcaatgggtgaaaaataaagtctgtgtaaactgttaaaaaa

SEQ ID NO: 134659 - DNA, 694 bp, Homo Sapiens
  misc_feature (484)..(484): n is a, c, g, or t
  misc_feature (537)..(547): n is a, c, g, or t
ggaagggaatggtttctgatccttctgaagagaaaaggaatagcatttttcttaaacctaacccagtttcagcattggagaatacagaactttttcttctagctgatggcattaatatttcttgagagagagaactcacccatggcacttttctgagcccagcagaaatcagcggagcttgggcttcgcttagcaggtttgcaattgacttcaacatgcaggcttttcacatgtgcaataatgctggaaacagaagcaccaaactgattgtgcaattactccttttgtagaagaggccaaaatcctcctcctccttcctttctcctatattcactcctccaggatcataaagcctccctcttgtttatctgtgtctgtctgtctgattggttagatttggctccccttccaagctaatggtgtcaggtggagaacagagcaaccttccctcggaaggagacaattcgaggtgctggtacatttnccttgttttctatgttcttctttttagtgggtcctatgtagagatagagatannnnnnnnnnnagagattccaaagtatatattttttagtgaaggaatgtaccctctccacactccaatgtgtaaatagaaccacggaattaatgtgtcatgtgattatcccattagcattttatggtagaacaagaacccttttcctcaccccccgcg

SEQ ID NO: 134660 - DNA, 632 bp, Homo Sapiens
tgttctttatgataatgatctttgtagattggttatttctgtacttcatctgtaataaactttgtagatcctgtgaaccgttacttggcctaaatcacttgagacttgagtctttaataacaaagcatcaatattcactaaagtcaatctcttttgagtttctgtgacttggctagaagctcttgacactaagggattagtgttaattttccctgggggtgttccactagggcattactgtataatgacttgatgttgccacatagacttcaagatatataatattttgaggattttgttgattggcctatgttttattgcatagtgtgaaacgtgtaaagcttggttaacctgtatatagatagcttattgttgactagttatagtgtatttagggttgcctgtaatatttaagcttctttactgatgtgtgtgctggtaggaacatataatttttgtacattatatttactgagatgttgccttttttattttacaaatactttggaattccaatgtgttttttgcttccgtgaggattaatttggaaaggtttttaatgacattccactgatttcagattttgcttgagattgacttcaataaattgtcctgtatgttccaaattaaaa

SEQ ID NO: 134661 - DNA, 1000 bp, Homo Sapiens
  misc_feature (132)..(358): n is a, c, g, or t
  misc_feature (459)..(459): n is a, c, g, or t
  misc_feature (480)..(480): n is a, c, g, or t
  misc_feature (767)..(851): n is a, c, g, or t
caatttgttctggtatccccgatttgtgatacctattccgcattgatgagtgaacgctcccgcaccgacgccgagccaggaatcatgagcgagaagcgaagacgccaatacgcaaccgcctctcccgggcgnnnnnnnnnnnnnnnnnnnnnnnnnnnnnnnnnnnnnnnnnnnnnnnnnnnnnnnnnnnnnnnnnnnnnnnnnnnnnnnnnnnnnnnnnnnnnnnnnnnnnnnnnnnnnnnnnnnnnnnnnnnnnnnnnnnnnnnnnnnnnnnnnnnnnnnnnnnnnnnnnnnnnnnnnnnnnnnnnnnnnnnnnnnnnnnnnnnnnnnnnnnnnnnnnnnnnnnnnnnnnnnnnnncccaagaattcggcacgaggagagtgtctgtgacccatatgccacctaatgttactacaagatttgcaagaaccggtcacttatcagtaaccatttttatntaaaaagataaaatagagctntgcaggaaagtgctgcaggctcccacgttgccgggcagacgacaacctgggcgcctcgcccagctcctccccacagccattggcatccactgtcaggtttcaatgttcttggacctcagggccttcgtcctctccaatctaaatgcagggagacatttgatatggactctctcaggtgttttgcaaaatgcaacacattctcattgactctggtcactctgctgtgcactagatgtcaaaagctcttcctcctgtctgagactttggtcctttaactgacaaccccnnnnnnnnnnnnnnnnnnnnnnnnnnnnnnnnnnnnnnnnnnnnnnnnnnnnnnnnnnnnnnnnnnnnnnnnnnnnnnnnnnnnncaacacttctgggacctcacgtggaattggtctctctgaggtagtggagatgctaagtagtgggatttcctcattccacattgtaccccatgaatgaatacaagcatgatttgccaattgaagcaatacaataaagacagaagaaatgt

SEQ ID NO: 134662 - DNA, 431 bp, Homo Sapiens
  misc_feature (159)..(258): n is a, c, g, or t
ttgcattttacatttcttctgtctttattgtattgcttcaattggcaaatcatgcttgtattcattcatggggtacaatgtggaatgaggaaatcccactacttagcatctccactacctcagagagaccaattccacgtgaggtcccagaagtgttgnnnnnnnnnnnnnnnnnnnnnnnnnnnnnnnnnnnnnnnnnnnnnnnnnnnnnnnnnnnnnnnnnnnnnnnnnnnnnnnnnnnnnnnnnnnnnnnnnnnnaggaccaaagtctcagggaggaggaagaggttttgacatgtagtgcacagcagagtgaccagagtcaatgagaatgtgttgcattttgcagaacacctgagagagtccatgtcaaatgtctctctgcatttagattggagaggacgaaggcctgaggtccaagaacattgaaa

SEQ ID NO: 134663 - DNA, 1247 bp, Homo Sapiens
  misc_feature (1042)..(1042): n is a, c, g, or t
  misc_feature (1057)..(1057): n is a, c, g, or t
  misc_feature (1084)..(1084): n is a, c, g, or t
ggaaaatcaacatcaatggtgtccgaaataaggaataagggcccagtaattaaaaggccgaagtacaggagattagccaagaagaaacagatgggtgaaatacacctgggtcttaattggcacagtaacctagctgtattttgacacactcaagaacaaatgcctatactgaagtatgtggtacatttaaccacttgtacttatgtaagaaaatgaaatggtaaaacgataggcttataaaacaaattaaatttagagaaaggaaaaataaaaggaatgtaaagaaaaatcaagtttattgtggcatcaaaatattgacagagctgttatcagtcaagagcagtcttcttgttgctaaaacgaagaggcagcctgagcctggctccatccaaccacctcttctaatgctctttaactggcagtgcttcctataaatgacaccaagcaatagagatgattattgtttccactgaatagagtaagttccttgattggtttaacatatatagactgcctgagagaataaaaacatcaccatacaataggttaacggtaaatcaaggtcttcgtagttgtgatgggagaaaagggttggctgctggaaacagtatggtgccctggaggctgcgtacgtacacaccctaagaattcacatcaccattagcagaagattagaagtcaatggatatggatgcttgtgcagaatcttctcgccccctgacataaatttcacagggaatctcctccattactcggtcttccagggcctgctcagggcactcatgtccctgtttgaaagtgtaactacttttcttgaaggtgctattaaatgttttcattggctgtggttgtgcaaagtcatttcggaaaggaagttccatggaactgaggttggtcctgctttgtttgacgctggaggcctgcgacccacagtggtggtcgtggatgcagcgggaggcggtggaggagcccgcatcttctggtagttgtccattcttccgacaagtctgccaggtctgcagaatctcttgtccttagtganacagtcatatgaggnggtcaacactcttggaccggtttatanagggtttgcagcatgacttttcgagtgttactgtctaatagatatggaggcagcatcctgatatgcatatgtcagatctaggatgtaaacctgctttcttctctcggcgatctggctcagcaatctaagggcgatatcgacagcatgtctgggatgttcgcat

SEQ ID NO: 134664 - DNA, 583 bp, Homo Sapiens
actgaatagagtaagttccttgattggtttaacatatatagactgcctgagagaataaaaacatcaccatacaataggttaacggtaaatcaaggtcttcgtagttgtgatgggagaaaagggttggctgctggaaacagtatggtgccctggaggctgcgtacgtacacaccctaagaattcacatcaccattagcagaagattagaagtcaatggatatggatgcttgtgcagaatcttctcgccccctgacataaatttcacagggaatctcctccattactcggtcttccagggcctgctcagggcactcatgtccctgtttgaaagtgtaactacttttcttgaaggtgctattaaatgttttcattggctgtggttgtgcaaagtcatttcggaaaggaagttccatggaactgaggttggtcctgctttgtttgacgctggaggcctgcgacccacagtggtggtcgtggatgcagcgggaggcggtggaggatcaaacacttcttggaacccggttttattaaaagcggttttgcaagccatgaccttttttcgaggctgtttcacttgtactaa

SEQ ID NO: 134665 - DNA, 1025 bp, Homo Sapiens
  misc_feature (624)..(624): n is a, c, g, or t
  misc_feature (701)..(701): n is a, c, g, or t
  misc_feature (876)..(876): n is a, c, g, or t
  misc_feature (880)..(880): n is a, c, g, or t
  misc_feature (882)..(882): n is a, c, g, or t
  misc_feature (884)..(884): n is a, c, g, or t
  misc_feature (889)..(890): n is a, c, g, or t
  misc_feature (899)..(899): n is a, c, g, or t
  misc_feature (915)..(915): n is a, c, g, or t
  misc_feature (921)..(922): n is a, c, g, or t
  misc_feature (930)..(930): n is a, c, g, or t
  misc_feature (938)..(938): n is a, c, g, or t
  misc_feature (963)..(963): n is a, c, g, or t
ctttaaccgtgtggtctttatttcagtgccagtgttacagatacaacacaaatgttccagttagaaggaattcaaacggaatgccaaggtccaagccaggctcaagaaataaaaagggaggtttggagtaatagataagatgactccaatactcactcttcctaagggcaaaggtacttttgatacagagtctgatctttgaaactggtgaactcctcttccacccattaccatagttcaaacaggcaagttatgggcttaggagcactttaaaatttgtggtgggaatagggtcattaataactatgaatatatcttttagaaggtgaccattttgcactttaaagggaatcaattttgaaaatcatggagactattcatgactacagctaaagaatggcgagaaaggggagctggaagagccttggaagtttctattacaaatagagcaccatatccttcatgccaaatctcaacaaaagctctttttaactccatctgtccagtgtttacaaataaactcgcaaggtctgaccagttcttggtaacaaacatacatgtgtgtgtctgtgtgtatacagcaatgcacagaaaaggctaccaggagcctaatgcctctttcanacattgggggaaccagtagaaaaaggcagggctccctaatgtccattattacatttccattccgaatgccagatgtntaaagtgcctgaagatggtaacccagctagtgaggaataatacccaccttgcccagtccacagagaaacaacagtagaaagaaggggcaactctttgctgcagagacaaagtgagtgttttttcgcccatggatgcagtcctctcctcccagacagctgcttatttcctcaaggngccnangngatgnntgatctggnctgtaatgtgggaggngtggannagtgcggnaaaagganaagaggagagtgcaagtagctcaanagcagcagctcacagtggaggagagacatatctttacatgctcaggtcagcagtacttagaa

SEQ ID NO: 134666 - DNA, 1002 bp, Homo Sapiens
  misc_feature (665)..(665): n is a, c, g, or t
  misc_feature (689)..(895): n is a, c, g, or t
tttgctgttttattcgtaagtttatttgttaaaaaaaatactgtatttgaaaagtaccttccttctgggattttcaaataatttgtacactacattttattcatctacacattggaaatgagtaaactggtgaacatatagctttttatacatttaacacaaccagtgcaaattctcctgcctctgagaaggcagagaagccctttactcagaaggtcttcaattctagcattactccaactcctagggaaatttcgggtgggtgcctatggctgtatgaccatctgattcctcagggacaggacaggaattcagcaagggagcttaaaatattttaagtaattgtcaacattccatggtgactctccccaaaaatctagtggtaggaaaataatctgtacttattcctctttctgcacacaaagccctcatttaaatttgtgagcctgcttgggatccattacctagccattcagagatcctgtcaaatgcacagcagattggatactcaccatcccaaaggggttcctcccacctggatggggccaatctctagttgacagtgcccctcagagtgcaccatggagatggaatgtcccttccagagagacttttacacagggaaaagcatttgttggctgggctccaactctcatttggtacanaaagctcctcgtgccgaattcttnnnnnnnnnnnnnnnnnnnnnnnnnnnnnnnnnnnnnnnnnnnnnnnnnnnnnnnnnnnnnnnnnnnnnnnnnnnnnnnnnnnnnnnnnnnnnnnnnnnnnnnnnnnnnnnnnnnnnnnnnnnnnnnnnnnnnnnnnnnnnnnnnnnnnnnnnnnnnnnnnnnnnnnnnnnnnnnnnnnnnnnnnnnnnnnnnnnnnnnnnnnnnnnagctgcattatgaatcggcacgcgcgggagaggcggtttgcgtatggcgctctcgcttctcgctcatgaccgctgcgctcgtcgtcggtgcgggagcgtacactcac

SEQ ID NO: 134667 - DNA, 777 bp, Homo Sapiens
gaggttttcggtgtagcagacatttaattcttatttgccaactcctgagctaggacctgggaacacaaagttaaataggacacgattctagtcctctaggcaccaacggtcttggaaaggaaggcagacaagtaaactggccatttcaatactatgtggtcgttacaatgctagaggtaggcacagggggcgcaatgcaagggaggaagggcgttaacatctgccacctacttccaggtgccaagcactgttatcaacattattccactttattccctggtgattatgaaaggcaggtattgatattcacacttaacagacgaggaaacagcctcagggagataagcttacttgacccagtctctctcctagtccatatcagaaccaagattcaaacaggttttgtttagaaaatctaggatttttcagccataccaaaataaagtagcctcagggaatcaaaacattcacgaaagaaggtgacttctgaactgagtcttgcaagaattctggaaattaacctggcagttgtatcaggggtggtaaggggacggaacagcttgagcaagagtgagagttccttggggtttggggagggaggaggaaaaatgattttttacttaagaacaaatagcaaggaaggtttgtgagctatgattgggggctggaggggaaagcctgaattctatccagtaatccttgaagggttttcatccaagtggcctgatgggatttgcattttactcggaagatcacttggggatggcaggaagtaag

SEQ ID NO: 134668 - DNA, 1031 bp, Homo Sapiens
  misc_feature (540)..(976): n is a, c, g, or t
ccttgaccaatgccagaaaacctttatttccaccgagacctctcatccaattctcttctttccgggaactttttcccttccctactccaggtcgtaccctggccactcctttccttttggctggccaatgtctcctctgtaggctccagaaggctctcagggatgcaggcggcctcccgcagggttgagttgcaatgggaacaaagacagctgtggtcccatagcaccctcatctggtgacatcctgctactgacagtcaaaagaagccttcccagatgaaattttagtcctctgcgcagccatgctcttcttccagcaaaagagccatgtgcagtcgggtctgctccccatgggggctttgatgtgggcccagcagtggatcagccttccagacacgctcaactctgcacactcttcctgccgcctcaggctttccaggaccctcccgagccttatcagagtccttaccctcagggctactgataccttgctgggtgaccttggacagattcacttacctgcctcttgccgaattcttnnnnnnnnnnnnnnnnnnnnnnnnnnnnnnnnnnnnnnnnnnnnnnnnnnnnnnnnnnnnnnnnnnnnnnnnnnnnnnnnnnnnnnnnnnnnnnnnnnnnnnnnnnnnnnnnnnnnnnnnnnnnnnnnnnnnnnnnnnnnnnnnnnnnnnnnnnnnnnnnnnnnnnnnnnnnnnnnnnnnnnnnnnnnnnnnnnnnnnnnnnnnnnnnnnnnnnnnnnnnnnnnnnnnnnnnnnnnnnnnnnnnnnnnnnnnnnnnnnnnnnnnnnnnnnnnnnnnnnnnnnnnnnnnnnnnnnnnnnnnnnnnnnnnnnnnnnnnnnnnnnnnnnnnnnnnnnnnnnnnnnnnnnnnnnnnnnnnnnnnnnnnnnnnnnnnnnnnnnnnnnnnnnnnnnnnnnnnnnnnnnnnnnnnnnnnnnnnnnnnnnnnnnnnnnnnnnnnngcgtgcttgcgtttttcaataggtccgcccccttgagagcatcaaaaatcgagcc

SEQ ID NO: 134669 - DNA, 557 bp, Homo Sapiens
  misc_feature (424)..(481): n is a, c, g, or t
tggttttgtgggggaaagtaagcaataatgacaggtttattgaaaatttccagtagagaaaacccactagttttggaataaaagtactcaatgtacgagagcataagtgaatacaaaagattaacagaaggaaaataaaaccaaacatagtacaaaaaaatttaaaaagtttgaaatgaattcaaactgggatgttctttaaatcctccaaatatttaacagagttactaagtttggcaaaaaattcacttgaaaattaaagcctatttctgtactgtaaactccgtaaaaactgcttattaaattcaagcactccatataactggtattgaaacatgtaggcaatttcagaatagcaggaattattcatttgctctcacagttacatgaattaaccagctgcagaactgctttttgaagagtnnnnnnnnnnnnnnnnnnnnnnnnnnnnnnnnnnnnnnnnnnnnnnnnnnnnnnnnnncacagcaaaattcaggtatcagtttgtttctttaaagcaacaaactgaatttttacagtatagtctacatttgcag

SEQ ID NO: 134670 - DNA, 696 bp, Homo Sapiens
  misc_feature (613)..(632): n is a, c, g, or t
tattagtgacataaatatgaagttaatggcatctttatagggcacaacaaaagaaacaaacgtattagaaggtatttgcataatcagaccattttgagcctggtatgttttccccagtaattggagcatccttagatgccttaacaacaaggacagtttctccatcctttgctgcatacatactttctaatactatctctctccttccactcccaattcctaataaaaatctctgattcacattaaaaacttattctggcaagtctccctcttccacctctactgctttctatgttagtgacaagtgctattcatataaaatatacaaaggcaagaaacataaagttaaaaggaaacagtatgtactattcttcatactcaatacatcatacataaaatacggagtttcataagtaaaacaaaatactgcatactgtatgtctattatttttaatggtgtgcctgtgttaccagtctatgactggactatcaatacttaccctcacagaggaaataaacaaatgaaataacatatgtaaaaaaactattacaaaaagagttgatcctcattgttcatatcacatacagcaggtcctcaactaatgtaatttcnnnnnnnnnnnnnnnnnnnngagacgaagtcttgctctgttgtcaggctagagtgcagtgggtgacagagcaagactctgtctc

SEQ ID NO: 134671 - DNA, 1479 bp, Homo Sapiens
  misc_feature (949)..(973): n is a, c, g, or t
  misc_feature (1028)..(1425): n is a, c, g, or t
agaaaaaaaccagtttattaagtaatatcatataaataacttgttacaaaaattgatttgcaaaaggcatatttactctttgtgagaaatcactttttaaattgcattcttttcaaatttataagtctaagaaaacaaaaccaaataaaagaagccatttcaaggagtgcgtatttgccatttgactgcaacaaaaggcccggccacactgagctaaaaggtaatactctcgaccccattcttctaacacagaaaactttctcaggtaaactgtggggttatgagaatccccctaactagaaatgttgatgggaactgagcattgcttgctttcatcaggtgttcttgttgccaaagacatgaacgatactgaggaaaacgacaagagtgagcattcccgccagtaaatcttcaagggtggcatccgtttcaatttatacttggaagtatttttaattaaaaacaatcaataccaaaaagcttttattttgtgggtttaaaagtcacaaatcacagtgggagaatgccaaattgctttagcttggaactactgaagacgcacatagcatttattataaggcctactcttaggcagttcactctcaaagcaatgaaaataatctcaaaccaaacattacagtgggtttgaagcgttcctacgtttcttccgagcaggtcagttttacatttgctacacagcattccccacgaatgcctggtaattctatacatttgattctttaataaacactaaactaatagatcatagaaaactaaaagcttagagaaggtgcctccagacatatttacataaataacgtagcctcacaagaaagaccaagatctcattagcgtggaatgctttttccacaaggctgggtccatgcctcatttgtcagattaaccccatttgaggagaaatttgagtttgtggttcatgggtttttgnnnnnnnnnnnnnnnnnnnnnnnnngcctacagccgcggccgctccaacatcagaatggtaacctcgtgccgaattcttnnnnnnnnnnnnnnnnnnnnnnnnnnnnnnnnnnnnnnnnnnnnnnnnnnnnnnnnnnnnnnnnnnnnnnnnnnnnnnnnnnnnnnnnnnnnnnnnnnnnnnnnnnnnnnnnnnnnnnnnnnnnnnnnnnnnnnnnnnnnnnnnnnnnnnnnnnnnnnnnnnnnnnnnnnnnnnnnnnnnnnnnnnnnnnnnnnnnnnnnnnnnnnnnnnnnnnnnnnnnnnnnnnnnnnnnnnnnnnnnnnnnnnnnnnnnnnnnnnnnnnnnnnnnnnnnnnnnnnnnnnnnnnnnnnnnnnnnnnnnnnnnnnnnnnnnnnnnnnnnnnnnnnnnnnnnnnnnnnnnnnnnnnnnnnnnnnnnnnnnnnnnnnnnnnnnnnnnnnnnnnnnnnnnnnnnnnnnnnatgcaaagggccacaaaagggcatgtacccgtaaaaggccgcgttgctggcgtt

SEQ ID NO: 134672 - DNA, 1012 bp, Homo Sapiens
  misc_feature (81)..(81): n is a, c, g, or t
  misc_feature (182)..(253): n is a, c, g, or t
ccacgatctgtgcgggagggaggaccccatgccaaccccttcccggcgtgtgcgttcatatgcagtgcaagcagctcccgntgaaagcgccataggcgcacgaattatgtgagtagtcactcataggccacccagctttacacttatggtcccgctcgtatgtgtgtgaattgtggcggttnnnnnnnnnnnnnnnnnnnnnnnnnnnnnnnnnnnnnnnnnnnnnnnnnnnnnnnnnnnnnnnnnnnnnnnncccaagaattcggcacgaggtcaactgtgatgagtgctccaaggagaatacacagggagatgtaacaaagagaaaccagtaaggacgccaggctctctgaggaagtgacagtggagctggcacttgcaaattcggaagagccagccgtgggtcacaagtgtcgccagcagataggaggccaagtggctgaggagccaaggggagaggggtggggaatgagttggccggtgctcaggcaccgggaagccatggggttctaaaacagggcaggtgatctggtttgcatctcagaaagaccagttgactgctgggatgagtggactatggggggatggcaagggctgcaaggaggccaggagggagttctgtcctgagacagtgcctgacctgtccctagctctcccttcccctccgcttctctaggtcagacacagtgaagccagtattcacaagtgtacctgtgacaatgcctgccagatctcagtgaccccattcagaaaattctagaattattacaacttatccttttactcccagaggaatgaaggcccagagcacggctttgatgaagttgcttttgtgtcacttgtttcttatttcatttgtttatcatttttatttctgacgtttcgatgaaatgagaactgggcccacaaccaaggtctgcacctgcacaatttgttgaaaagtcatagatgaaatctctctgccatctgatcattggcaggggcaggggtgggggaaggggagtggaatgag

SEQ ID NO: 134673 - DNA, 1045 bp, Homo Sapiens
  misc_feature (250)..(266): n is a, c, g, or t
  misc_feature (310)..(327): n is a, c, g, or t
  misc_feature (928)..(962): n is a, c, g, or t
  misc_feature (1006)..(1006): n is a, c, g, or t
gtatataaactcgacagagaaatagctcgctgcaaaggacccccacatttggaggtgatgttataagcaagcaaacctgttgtgttccccccgcgcgggttgtttgtttattttgggggaaagagcaaaagccgctgttttagtatcctcaggggtgttttgtgggggagcatgaaaatggcaccctcatgtcctttcctagggtggggcccgcgcgcccccaacaagatggtttgtaaaaaagtttctnnnnnnnnnnnnnnnnnccgaacaacaacttgtcggtgtggcggtggggatatggaaggannnnnnnnnnnnnnnnnncgcgcaccatgtaagggcgttcgttcttcattttgatttatgtggggtggggggatgttttatggtgttgggggtattttgggttgtttgagttgtgtggtttcaagggcaattcacatttatttcctgagcatgctgactaaacatacttcaaacacagcagaaggtaaagagtctgttttgtaagtaaagccgtttcttgccaacagcgaatggtggtccatgaagagtaccttgagcatcatcttcaagctgaggctccagctctgggcaaacagctgctgggtggacctggtccttctggcctggatgggggcctccaaggaactacttgttctcatacttgtgcttgatgtgtttccacagcttcccctcgttgatgtggtcgtagatagcgtccgcgccttgatcgaaggcgcgctcgaagaacatgacgcccacgatgatggtgagggcgaaggtggaggtcctgcggaacagcagggagtacaatttcgaagtcaacgtcgcggccgccatgtttcttcacagtccaactcgcgccaccgcccccggccgtaatggccgaattcccgggcatatgtccggtaccgtcgactgnnnnnnnnnnnnnnnnnnnnnnnnnnnnnnnnnnncggccgcttcctcgctcacatgactcgctgcgctcgtcgttcgnctgagacgagcagcgccctatagtgagtctatacgtctg

SEQ ID NO: 134674 - DNA, 740 bp, Homo Sapiens
  misc_feature (83)..(83): n is a, c, g, or t
  misc_feature (184)..(191): n is a, c, g, or t
  misc_feature (194)..(228): n is a, c, g, or t
atttgtgtggagggaaattcccaaaggcccttaggttcattgggcccaggggatccttccttagggaaaaccaggctatgggncccatgtttccaccttaccctaccgggggcccccggcgcccaaaacgaattggtcttagaaaagctttctcggaggggccggaggcgggccggacatgttnnnnnnnnttnnnnnnnnnnnnnnnnnnnnnnnnnnnnnnnnnnncaagggcaattcacatttatttcctgagcatgctgactaaacatacttcaaacacagcagaaggtaaagagtctgttttgtaagtaaagccgtttcttgccaacagcgaatggtggtccatgaagagtaccttgagcatcatcttcaagctgaggctccagctctgggcaaacagctgctgggtggacctggtccttctggcctggatgggggcctccaaggaactacttgttctcatacttgtgcttgatgtgtttccacagcttctctactccactgtcacccctcaggcgggtccaaggtcagggatggcacaggccctcaccccctcgttgatgtggtcgtagatagcgtccgcgccttgatcgaaggcgcgctcgaagaacatgacgcccacgatgatggtgagggcgaaggtggaggtcctgcggaacagcagggagtacaatttcgaagtcaacgtcgcggccgccatgtttcttcacagtccaactcgcgccaccgcgcctccc

SEQ ID NO: 134675 - DNA, 1008 bp, Homo Sapiens
  misc_feature (23)..(23): n is a, c, g, or t
gtagaaaaaccccccctaggggngattttcacaggggttccatcaaaaaaccccgtttttggggaaaaggggttcttccacaatgttccggcacaaaaaaatgttttaaaagggaaattttcccacccagctttttttggcaaaataaaatgtggcacaggggccggggggcggtaaaattttgaaaaattcgagggctttcgctttgggagcttcccctgtgtgggaaaaggatttccccaggtaaattggccccctcaagagaaactccccattttgggggaaattttgtttccaagaaaacgccctcccggtttttgtccccccccggggggggtttttttattaattggggggaaggaaattcccaaagccccctttagttccattggccccagggatatcttccctaagggaaaaccaggctattggacccaaggtttccctttaccttactgggggccccgcgcgcccaaaacggaattggttttagaaaaagtttttcgaggggccgaaggcggccgaacaaggattttatacaatcgggtgctaaagtaccaaggggcaattcacatttatttcctgagcatgctgactaaacatacttcaaacacagcagaaggtaaagagtctgttttgtaagtaaagccgtttcttgccaacagcgaatggtggtccatgaagagtaccttgagcatcatcttcaagctgaggctccagctctgggcaaacagctgctgggtggacctggtccttctggcctggatgggggcctccaaggaactacttgttctcatacttgtgcttgatgtgtttccacagcttcccctcgttgatgtggtcgtagatagcgtccgcgccttgatcgaaggcgcgctcgaagaacatgacgcccacgatgatggtgagggcgaaggtggaggtcctgcggaacagcagggagtacaatttcgaagtcaacgtcgcggccgccatgtttcttcacagtccaactcgcgccaccgcccc

SEQ ID NO: 134676 - DNA, 1006 bp, Homo Sapiens
  misc_feature (62)..(92): n is a, c, g, or t
agtgccaagctaaaattaaccctcaactaaagggaataagcttgcggccgcatacgcggtcnnnnnnnnnnnnnnnnnnnnnnnnnnnnnnncaaattcttcaactttattaaaacattatgagatttttgcacaaaccattgttttttgttttagctcatcagctatggttactgtattttatgtgtggcccaagacaattcttccaacatggcccagggaagccaaaggattggatacccctgaactataccctagggtggggagtggctaagacccctaggccagggtctttcccccagctgaggccatagtgcttccccatggccaagacagtgaggtatttaagaatggaattactggcttagaagccaaagttgactgtaatatctccaactctggctcctgttttgaaaaccagaattctttggaagttaatggaaaactcaaaatagcagattctgcctttggggtgtttgcagagggctttgaagtggtctcaaattactgacaagtgaagatcaggtagagttaacaaagcaaccaatgtagaagcaggtctcaagggcaattcacatttatttcctgagcatgctgactaaacatacttcaaacacagcagaaggtaaagagtctgttttgtaagtaaagccgtttcttgccaacagcgaatggtggtccatgaagagtaccttgagcatcatcttcaagctgaggctccagctctgggcaaacagctgctgggtggacctggtccttctggcctggatgggggcctccaaggaactacttgttctcatacttgtgcttgatgtgtttccacagcttcccctcgttgatgtggtcgtagatagcgtccgcgccttgatcgaaggcgcgctcgaagaacatgacgcccacgatgatggtgagggcgaaggtggaggtcctgcggaacagcagggagtacaatttcgaagtcaacgtcgcggccgccatgtttcttcacagtccaactcgcgccccc

SEQ ID NO: 134677 - DNA, 1019 bp, Homo Sapiens
  misc_feature (764)..(765): n is a, c, g, or t
  misc_feature (851)..(851): n is a, c, g, or t
  misc_feature (949)..(949): n is a, c, g, or t
  misc_feature (957)..(958): n is a, c, g, or t
  misc_feature (970)..(970): n is a, c, g, or t
tgacatctgtaactttaatttaatacaaattgatcataactcataaaatgggcaacattttaaataaaaatactgctggggtggcccagattctggtagttgaagggttggggtagggctgacaattccttttgcccaagggaggcccgggtggcgggggcagccattttaagaaccccctgtgtttagctcttccggctactttgggatggtgtgttgtgtcagagaccccaagtgcagaatctaggccccaggactagaaagaaaagtcaaggccggggagacatttaggctcagtcttgcagcccactcctccagttcccacctctgggcagggatagagccaaggggcaggacaaccctagatgtggactccaccctctcccgagttcttcacgattggatgctgtggcagaaaaacgcaggtggggcttgctccacccaccctaacttccttctagggaaatgacatttcccagactcccttgcagccaaggttctggatctgacttaagttcccccaaacagaatctcttgtaaaaatttagatttgggaactgagtgaagtgggagaggggcaggcctcaggacatctattggctggcacggaccgtggcagagggagcctagttctgcagtcagcagctttctggcatagtggcttcctgcagatgggggcagctttcctggtcacaacagacatgatgaatctggcgctgggagttcctggaaatcagcagagtctgcttctccagctcttccanncattttgcaagcaccaggggccaggtagtaatccttgtctaattaaacagctacaagtggctcttgttttctgcagcaagattctnactgagatagatgcaagtctgacaagggtctagccacagccctcccagtgcttgggtcctaattacacactgcttctggaagctcctgcaccctacangtcacaannagctggctgaanagggttgggctgactcttgttcaaagctactggggacctcgatcatcca

SEQ ID NO: 134678 - DNA, 1392 bp, Homo Sapiens
  misc_feature (420)..(465): n is a, c, g, or t
gttcaaaagcgtggttccgcgccacccttcggtgggttgccccatcgcgctaacccgcgtccttgcttcccccccctccctggcggatagcaggcacaccaggtggccccctccgtttccgtggacttgcgaaaccagtggcttcccacccccgaatctttaggaagacttccaggctcctgcaccaaggttctggatctgactaagttccccaacagaatctcgtgtaaaatttagatttggaactgagtgaatgggagagggccaggcctcaggacatctattgctggcacggaccgtggcagagggagcctagttctccagtcagcagctttctggcatagtggcttcctgcagatggggcagctttcctggtcacaacagacatgatgaatctggcgctgggagttcctggaaatnnnnnnnnnnnnnnnnnnnnnnnnnnnnnnnnnnnnnnnnnnnnnncaggggccaggtagtaaatccttgtctaattaaaccagctacaagtggctcttgttttctgcagcaggatcctaactgagatagatgccaagtctgacaaggggtctagccaacagcccctcccagtgcttgggtcctaattacaacaactgcttctggaagcctcctgcaccctagcaggtcacagaggcctggctgaagagggttggctggactcttgttcagagctactggggacctcgatcatccagggaggcttgtcctgcagttgcttttaggctaatgggctctgcatcagctttgggtataccctcaccctgtccctcggcctgtgggcaggaaggtggtggcacatgactataatgtgtggactcaactaccaggtgccttccacaggccacagcatcatcactgaccagcagatcagtgggagaagtaggaaccatatagttcttggtgtgggggtggcaggagaggttggctctcaggcaaccctaggaccaggtactacctgtgaccactgtggactggggtcaagggtaaatggcccatcactagcttggtcaggggtaagtcttaggccatgggacataagagggtgctgtgtgtctttcgggctgccaactactggccatgctctgacacttcctgaggtcagggctgggctggagggagacactggaaggtagtcccctgcccctgagaagatggggatgagggttgggcaggggttgccctgaggagaagccatgtcacatccttggatcaaagctgtatccctatcaaggtcagagctacagaacatcgatgctggaagagagtttaggaagtagggaatgcaacctccattttacagactggaggctggagggtaaacaactggcctgaggtctccagtggccacggtggaatggagtccaggtcttc

SEQ ID NO: 134679 - DNA, 1656 bp, Homo Sapiens
tctctataaagatttaatttatttaaatcacataagattattcaaagccataggcatgattaagtctctatagaatcaagaagattttctgtgtggagaatatctcgtggagatttgaaatgtgtcgcctctcctgagcagccaggattaactctgcttaggacgtttcagataagggtcaggctggcgtccttctttctgcctccatgggttgccaccttttgctatgtcaggggggtcgcttgcttaagacgttgcaaggagcaccccaaatgccaggcttcccaccatagctggcccgctgcagggttcaccagccttgcactgaggtcagcacctcagtcactctccattttgtcctttccccatgaaattgtggcttttaatgtaggccaaatgctatgacaccaatatcaagtcacgaaagcagcctgtcacctgttgaagctgagaggcagtggtggctgggccagaggggaaggtgggctcctgggcgctgcccgtgggcctcactcctctgcctccactcacactggctcgtgtgaccagacaggttttctcttctggaggaaggccgtgatgccctcctgcccgtcccgcagggccaggttgtccaccatggcctgggaggtgaggtagtaagccgtccccaggtcctggggcagctgcttgtagaaggtggctttgcccagggacaccaccggacggctcagcgatgcgatcttcctagcgatccgcatggtctcctcctgcagctccgcctctggcaccaccttgctaagcagcccgtggagcagggcctcctgggcagaaatgggctcaccagtaaagagcatctccaaggccacctttctaggcactgctcttgccaaggcaaccccaggggtagaacagaagagcccgacgttcaccccaggagtggcaaaagaggacttgtcgctcgccacggcaatgtcgcagctggcaaccagttgacagccggcagccgtggccaggccattgaccatggcaatgacggggacggggtggttccggatgtgcatcatgaccttggaacaggtctgaaatacttcggcatggtaatcacggccttgctcctctgtcagctcctttaagtcatgcccagaagaaaacacaggcccctcagccgagatgataatgactttcagatcgttgctgtcagcgtcatgaagaatgtcactttggagagatttcagcattgcaagtgacaacgtgttcctcttcttgggattgctcaagacgatgttccttatgccgtccagctgccgcgcgctggtgggccgcggctccgactcccgccgccccgccccggccgggtcccggctgcagaagcgggcggggagctgggcccaggggccgcagccggagacacatgggcccacttgccccgaaggcccgcaagacggcgacggcggccatagcattcgggatggccagacgccgcaggatcgcgctgcctggccggccgcaggtgctgggcgctccgagggcgctgctgtgagcagggccgggacggaactcgacggaactcgacggtggccgagacccggacggaaccgcctgacaggcccaggcttcgcggggacgcccggacgcgtggtcgacgatatcccgggaattccggaccggtccagc

SEQ ID NO: 134680 - DNA, 1031 bp, Homo Sapiens
  misc_feature (597)..(597): n is a, c, g, or t
  misc_feature (667)..(667): n is a, c, g, or t
  misc_feature (724)..(724): n is a, c, g, or t
  misc_feature (833)..(833): n is a, c, g, or t
  misc_feature (946)..(946): n is a, c, g, or t
ctttcaaatcctaggtttggtcctttattttattcagcagtgaaagccatgaatacagaacgaataacagctgttacaattctcaaccatgacttctaacgtcagagaattcaaagtatgaacatagtacacagtaatgaaaagtatcaaaaattagtttacctcaaaaaagataaataaaacaggtatattccaccaatacataaacagatgtttgtgctacagtttaaaatttgctgtatacaaaagatcatagtccccataatcagcttatgatagaagcaagaatacatgagccatttaaattgtcagacattatgctttataaggtatgcacagaagttcaagcaataaatacatacattagttcaaagccttacaatagctacgcaaagcagatgcagaaaagcagatttgctattactagcgagcaatgatataagagtaaaaattcatgaaatgcattaaagcaacatttttcttagaaaaagtctggtcatttatgggtccaccaacatttttacataatatgcacaattatcaaaatacagaccaagcatttcaggaaactccaaaaaacctaaaatctattttcanagcaattgcagttttggaggtttttctggtataatgtgcaagcagctattttttacaattgtattcatantaaacccatgcaaaactctacaggtatatgcattctgtggctgagacttcctttcanaagttttctaactgaggtatgcatactttagcattgtagtcttaggccacccttctgatggtacaactctcgcagttacttccagtccatcaaagctttttgacatgcnacttgaagaccatttttcctttcagatatccctacagtatgatctagatgactgaaacatcttcaccataccactttcttttagacatattgtaacttcggtcgttgtcatgnccaagacatcatatgaatagattattgtacgtctacgttcagcatctgcaaatggttcaggtgtctttttttctgtttttgtccg

SEQ ID NO: 134681 - DNA, 1131 bp, Homo Sapiens
  misc_feature (1029)..(1029): n is a, c, g, or t
gaggtgctatcagtgcttctcttctctcatcctgccatttgggtgctcaagccaacctttcacctcctgaattccccaggggggaagaactcatctattcattcaacaaatattcatcaagcacttgtatttgccaaacactatttaccagtctctgtgttcccagtgcccaccctcatcccaaactccagcaaacactcatcaagctcttccaagaattctcaagccacaccacatctgctgcactgaacctgtgtgctcctgttactctgcaagctttcagtcttggagtgggatgccaggctaccttctaccatgctgagtccctcacacttgtctgcaagaaattcaaagcaatctccctatggcctagaacctccgcttaatgactctttaatcatgcttttgactctagtcttctagagatggataatacggactgggagtcattggtctctttctgctcttttgataagtccagactggctgtgtctagtatcatgttggtgcagttactgtctttcgtcagctttgagcctttagccagaattctaagacaaccagaaaagtcccattcaatatccagctgcaaataaatttggccgagttttcttggaaagcaggtggatccacgtctttcacctcaacagcttatgattaagtccatatatccctttacatacatacactatcaagtcatgagtcctcattggttaattacatatttgtgtagcaggataaaaaattaaataagctattacacatatgtgaaacaaagacttttttatatgccgtagctgatctaattttttccccacgtcccagacttgattagattgatgacactgatccattgccattgtgattcaagggtactctgaggacttgtgcatatgatgctgaagttgactggtcccttgctgtcatgaagccaatttaactcttgctcacatatactcatttgggaatcatattgcaatgagctgataactgtcattttctcctagagacgtttcacttgaatatatngattaacaaataaattggctgtcctactggaggttattaccgcttactattcccagagaaattgttttgtattcttcgaaggatggtatggggactccgcgt

SEQ ID NO: 134682 - DNA, 1041 bp, Homo Sapiens
  misc_feature (615)..(817): n is a, c, g, or t
tttttctattttctaaattaactataatttataaataatctataaactatcatttccttaaaataggggtttaaacacattttccctaaaaatagagtgaaaggacttgagaccagagataaccgaccattgagacccgtaatatcctaacaatatgaaagctggttaataattggtaactatttcctatttagaaacagagggcctggtgtggatctctatttcctttcattctattttcactgctgctgctactaaggttcagatcctcaccacatctggaccactgcaccacattactgactcattgccagtcctctaatcctacatgtcactaccacctgactcctaaaacacattccacaccatgtcactccttttcaaaatatttaatggctcctagagggagatattcttttggctggaaaagaacaatggtatttttctaattcacaggaaagaaaattaatagatggatttttcataagtttctctaccataattttttcttacctacttagtctactgctagcactacagaaacttgaacacatagtagcacaattaagagggaaaaaaatcaaagcagtcaattggcctcgttccgaattcttnnnnnnnnnnnnnnnnnnnnnnnnnnnnnnnnnnnnnnnnnnnnnnnnnnnnnnnnnnnnnnnnnnnnnnnnnnnnnnnnnnnnnnnnnnnnnnnnnnnnnnnnnnnnnnnnnnnnnnnnnnnnnnnnnnnnnnnnnnnnnnnnnnnnnnnnnnnnnnnnnnnnnnnnnnnnnnnnnnnnnnnnnnnnnnnnnnnnnnnnnnntcttgtggtgccattgtattattgaatcctcaacgcgcggtgatagccgtttgcgtatgggcgcccttcgcttctcgctcacagactctctctgtcgtcctccgttgctggaccgtacagtcactcaagggggagacggtatcacaattaggtgatatcttgagcacattatgcatggcatatagcacaacttagatgccggtgctgggtttctaagtctgctc

SEQ ID NO: 134683 - DNA, 1028 bp, Homo Sapiens
  misc_feature (350)..(368): n is a, c, g, or t
  misc_feature (399)..(802): n is a, c, g, or t
  misc_feature (820)..(880): n is a, c, g, or t
gagcttgtcccatgtcgttacatgaagagtttcttgattcttggtctataattgcagatgttattgtatgaatgtaccataatatatttgagcagtccctgctgacatttttttcctaaccttttgctattataaataatgattcattttataaccttttatataggtcacattgcacatgagtgagtttactgtaagctggaaatctaaagttagaattactaggttaagatatgtgcatttttacttttgatagatattggcaagttgccatctataaggattgtgccagtttacagtcccacccacaatgcatgagagtgcctattaaatctttgtaagtgttatcnnnnnnnnnnnnnnnnnnngcctacagccgcgcctcgtgccgaattcttnnnnnnnnnnnnnnnnnnnnnnnnnnnnnnnnnnnnnnnnnnnnnnnnnnnnnnnnnnnnnnnnnnnnnnnnnnnnnnnnnnnnnnnnnnnnnnnnnnnnnnnnnnnnnnnnnnnnnnnnnnnnnnnnnnnnnnnnnnnnnnnnnnnnnnnnnnnnnnnnnnnnnnnnnnnnnnnnnnnnnnnnnnnnnnnnnnnnnnnnnnnnnnnnnnnnnnnnnnnnnnnnnnnnnnnnnnnnnnnnnnnnnnnnnnnnnnnnnnnnnnnnnnnnnnnnnnnnnnnnnnnnnnnnnnnnnnnnnnnnnnnnnnnnnnnnnnnnnnnnnnnnnnnnnnnnnnnnnnnnnnnnnnnnnnnnnnnnnnnnnnnnnnnnnnnnnnnnnnnnnnnnnnnnnnnnnnnnnnnnnnnngggcatcaaatgtcatgnnnnnnnnnnnnnnnnnnnnnnnnnnnnnnnnnnnnnnnnnnnnnnnnnnnnnnnnnnnnntaatctaagttcagtcataggtggtgaaaccgacacgatcataaggatacaagcgtctcccctgggagctcctcgtggctctcttggtcggacctgccgcttacggatactgtccgccttctctttccggaacgtggggcttccatac

SEQ ID NO: 134684 - DNA, 457 bp, Homo Sapiens
  misc_feature (283)..(402): n is a, c, g, or t
ttttttgcatttgcaaaggacactttatttcttgttaagggtgacagcctgcaaggtagccatccagcagcctgggaagagcagcctctggttaacaccagagacagacatttaggagcaggaggggtttgggcaggagctttatgctgaagaggttggctaaacatacatattcaacaggctacaggaggagctatgaatattcatgtaggtggttgcagtccatgcttattgaacaaacatgtgtggaacatatgatcccagccgggcatagtggctgatnnnnnnnnnnnnnnnnnnnnnnnnnnnnnnnnnnnnnnnnnnnnnnnnnnnnnnnnnnnnnnnnnnnnnnnnnnnnnnnnnnnnnnnnnnnnnnnnnnnnnnnnnnnnnnnnnnnnnnnngtgtggtgatgcatgccttttactcgggaggctgaagcagaagaatcgcccaaac

SEQ ID NO: 134685 - DNA, 1052 bp, Homo Sapiens
  misc_feature (859)..(859): n is a, c, g, or t
  misc_feature (953)..(953): n is a, c, g, or t
  misc_feature (1033)..(1033): n is a, c, g, or t
tttgagggtgagtggtatttttttatttattgttgctcttcgcattccatgaaatttgtaatcactatgacagtaccaagcaaacacagttcaagctgtgattataaatcatttcacaccacctaaacatacagtgtagctatgatcatgtacttttattaaaggcagagctcattattaatgaaatctggaagctggccaaccccaaaagattaagaaaaattcgatgtatattcttgggggaaaggcattaaagcctgctcacccaacctttttctattttcaagaatattaccttctgcacttcataagtgctacaaatcagttcactgtggtaaaacaccaaaaatatccataggaaaaattttcctatatacagattacaattaagacacattatttgaatgtttctagttgtggtggaatgctatcctaataatgcctgttctctttaatcagtgagattcatttttaaaggccaaggtatagtctagtaacataaaaagaactggtacccttaattaaatgtacaagtttggtctcattaccatcattgacacaagttaatcattactgcatgtttctaaaacaataggagtccagctcataaatcaacacaatctctgtggctctcaagtcaattatatacaactagattccatatattcctgaatcctaagaaatgtaaaacttgttcatttacacttcattaggacagtgtactaatttttattctcgtgtcgaattcttggtctcgagggccatttctctatatgagtcgtactacatcgcatcatgtcatagctgtttcctgtgtgaattgtttaccgctcaaagttcacacatatacgatctggantatatatgtatagctggggggcttatgtatgtcctattcacattatcttgtctggctcactgtcgctttcagtcagtatctggtgtgtcttcgnataatgatctgcctatgttgtgatacgtgttgcgtttgggcggtcttcgttctcgtcatgattctgttctcgtctttctngtggagactgttcatacat

SEQ ID NO: 134686 - DNA, 1103 bp, Homo Sapiens
  misc_feature (1012)..(1030): n is a, c, g, or t
acgacgaaagagaaagacaccggaatacagaggtgacgagattcctgtgaaggggagagaaacaaggaagcacagacttgaccagagacatgtagggacctggagtatacgcaggaaacaggaagtggaggaagacaagggagtgagtaagaagatacaggatatgtgacgacaatacaatccttcaaaccagtagaagagataacgagtgaaggtacgatacatgaatgagatgggtatgagacaacactatggagtgacgtactgataatggataaaagacatatgttgtggaaagcattgtccagtgtaacttggcagatgtgtatttagataaatgtcacgaatcataagagttgaggtaagtgcaagtagctgttgatcatagtgtagcccatttaatggtccttttacatagaatgttcttaagcagttaatgacaatgtggaatacacagataacttgtagcttaagatactattttcatataagtctcctgtggagaatattgctctattttttactagtttcaggtcagttattaaaataaacatggaggttttaatgaatgttgtataatattttatagtgaaggaaaattgtggaaagggcaaagactttctctttcccttatgtatttaactgtgccaatctaaatacatactgttttatacaatgagatgcattacaagacttttctgttggagtgctctcgacattttggttttcatacctgaatgatcattgcattttctgtattttctaaaatggctccaattttgtgttttaagcttcagcttaagaggaagtttatgttctaattcttgactgagaatacagtattgagattctctgttttacagataacaactggtttttattactcattaagttcatttgcatcccgtagccctctgtaaatgtttcccctagttgtatgtacgtaaatgcacgcttatccagtgtatattagacatttttgtgctaaaatatattaagtgggatttttgtnnnnnnnnnnnnnnnnnnncctgagcaggcggccgcaagcgtattccctttagtgagggttaattcgtagcattggcacgtggcccgtcgtt

SEQ ID NO: 134687 - DNA, 458 bp, Homo Sapiens
  misc_feature (221)..(232): n is a, c, g, or t
cctccatgtttattttaataactgacctgaagctagtaagaaataaagcaatattctccacaggagaattaaatgaaaatagtatcttaagctacgagttatctgtgtattccaaattgtcattaactgcttaagaacattctaggtaaaaggaccattaaatgggctaaactatgatcaaaagccactgcaacttactccaaaccttatgaaaagtgacnnnnnnnnnnnncacacatctgcaaatttacactggaatatgctttccacaacatagttcctttaaccaaaagcagcactttcaatccaaagtgttgcctcagaagcagtaccattcaggtactgtatcactcatctgtttaactttactactggctgaaaggaatgtgactgtatagcactaataaatgctatgttttaaaattcaactcgtttgttttcacatccactacagttat

SEQ ID NO: 134688 - DNA, 1019 bp, Homo Sapiens
  misc_feature (668)..(668): n is a, c, g, or t
  misc_feature (691)..(691): n is a, c, g, or t
  misc_feature (766)..(766): n is a, c, g, or t
  misc_feature (770)..(770): n is a, c, g, or t
  misc_feature (885)..(885): n is a, c, g, or t
ttttctctgataaatacatgtcattttaataatcagtactggatagtggatgaaaacatgcattagactaaaaatgccacaaatttgtttttatatccattcactataaaacttccttttttaaaatttaaagtcttgtttcctattttagaatacgcaataatcgggaggatacatgatggggagccagttttcagtaaaagatgcacaatgggtccatccaagtaacttcatcagttgaatacaatttttccagttttcttttgttggtttttcttccacaagtttagttgcaaatttaaggcctctcccatacattttatttactaatgcatgtttatatgcaaatgtcaaaaccttattgtcaaagagatcagtccatttagtagtttcccaaaatgtttctgccagagaatccaaaggactttctccttcctcctcctttccttctgcatcagtggaaatggctccgtcttgagcctgggtgtgaagaagatggtctgccagggcacaacctttcctacaaagggcatctacgagggtggatttttgtttgtccatgtcattttttatagtagctgcatcaggcctgggatcagtcttcattgcaatataaactgctagggctgtttgatctatatgagaaataacagcatttgccgcatcancaatttcattaagtcttttcaantcgtccttttcagcatccaattgatgaagtcgtgcaacgtacagaggacgataattaggatatgtttccttcaantcgntatacatgtcactagaatccagctttgtcatcacctcgtgccgattcttggctcgatggcaattcctaagtgagtctattaattcgaatctgtcaagctgttcctggtgaattgnatcggtcacattcacacacaagagcggatgataatgtaagctgtgtgctatgagtgacatcacatatggtgcgtcaggcgttcatctgaactgttgcagtgatatatcgcactcgggaacggttggttgggctc

SEQ ID NO: 134689 - DNA, 661 bp, Homo Sapiens
  misc_feature (152)..(164): n is a, c, g, or t
tttttcagagtattgcaacactttattaagagtattggctttgaatcagtagctgaagtaacaattgcatgaagccagattaggtgcactgcataatacccatactcgatttattgacattacttagcaatttactggacaaaagtcaaacnnnnnnnnnnnnnattaagcacattccacagtacaaagctgtcatgaataatatctgtacaatttaacagtttcaatagctgttcagacacaaatttatttcaaacagataattggcaaacataattaattacaagttagaattagactatcccagtgctttaaaacattaatatagcagtaatttacatttgctcagttatggttagcaaaataaagtccagagtatggctgggaattactattataatcccagaaagtcagaactccttgggtgccaaagtcccctgctataatttagtaggcacaattcaaaggttgtctgcatattcaaaggccatcatctcccaaggaacgaggggaacttctatattaaacatgcaaaaacaacaaaaaatccattcattcattcagaattgcctcctcccctgccccctcccttccccctgggctttcctaaccagtttgatattgaagctgtaggatgaaaagtggtcaaagctaaatcacc

SEQ ID NO: 134690 - DNA, 614 bp, Homo Sapiens
tattgagacaattttattcactatggatatatatacatgatcaacattttatcttcattcttcagaagacttaattagagtagctttcttctcatacttatctctaatctctttaatattttccgagagatcttctgacatgcattcttcatattctctatcaactttagcaatctgctcctcaagatgtttctctacagacccaacatgtgtagcaaccatctctaacagacgttgcaagttatttcccacttttcgtctttcttcagtcgtggtttgcacaactagttggtattcccgctgaacagcatctaattcattcatagcttcactgagcccctggttaacagtactttctagcaggtgcttgtgtttctccaaggactcaagctcactggcacatttttcatcctcttcctctgcttccttaattttttgttggtaaagatcattcagcttttgaacttcttctgtcagagttctcacgcttctcttgacttcctgttatcattgcattccattgttctaaaggtatgctccaaacccatttgtttaattaggggctaattaaattccttctcaggttcattcaagagttcctctagaggtaaata

SEQ ID NO: 134691 - DNA, 1432 bp, Homo Sapiens
  misc_feature (293)..(293): n is a, c, g, or t
  misc_feature (1028)..(1028): n is a, c, g, or t
  misc_feature (1254)..(1254): n is a, c, g, or t
  misc_feature (1267)..(1268): n is a, c, g, or t
  misc_feature (1286)..(1286): n is a, c, g, or t
  misc_feature (1288)..(1288): n is a, c, g, or t
  misc_feature (1304)..(1304): n is a, c, g, or t
  misc_feature (1382)..(1382): n is a, c, g, or t
  misc_feature (1409)..(1410): n is a, c, g, or t
tgatccagtcaaattttggattaattcctcccattatatttgctcctttccaagccttaatgtgaaattcatcagggtctgccatgtggcaggtgtccctacactctttcattcagagaaggacagctgtgaatacaccactgcagtatttctaatgacatcttgagccataaacgacataactgcactaccatatatccaggcagtaggagtgttcaacgttttctagtgtttctgtgaaacactaaatattggattagtttgaaatgcattgaccccaggagtaggctcantaaggtcattctgacttaatgaaaatgtgaacaaaaggtgacatgtacaaggaaacactgctgttcatattcttgaaatagacttttctttaagacaaaagtaatgacatttggttcattttcacaaattgcacactgggtgagatcatacaattactgcagggaactgtaggcaagcaatttggtcataggaatttgtttctttgtcttgttttaaatgaaaaagctatatgaaatgcatagctttgattaacctaaagatacagtttccttctttgtaaaactccagatttaggatgctggcaaaggcagtgctggcaaagtatttaatgcacatggaaatgctattctattttggcttccagaagtagccctagtaaattctatgcaccaatgcattggctaataataatttcagttttactataaattatctaaatgtcacttaagtacttaagaagtagcgctcgctcctttctagaagctgtctaaggcagctgatgcgtaaagcacctcatctagacctccaactagttcagcagttcaatctgtgcccctcagccacaggactgccctcagtatccctcactacacagctcccctctcctggggacttttcatgttcatttctgccttgtcaaaggcagtccaggcaaggaagagaaacgtcagaaacacgatcgtcaaggactgctccgtgtagcaatctcaattctaagaataattacatgggtngtgaggaacacaaaaatcccacctcacagaagatacatgagttgcactcacactgccaactcttcagggattattcccactatctcctcagaaagcatgctttctttgttatatcatctactgctctgttgggcagactttcattcacactatgttaactttcatctcaatcatctcagccttcatgtgatttgctactgtgttctccagtttcactgacacacangtgcaacaagcanngactgagcatcatttcananacagagtcaactacancaccatgagcacacaatgaacgtagcttctctgtctttatctgggaggagatctctcaacactctcaactcacatgangaaagggtccgctcggactcgacattnnagcgactgtgctgtactgttgg

SEQ ID NO: 134692 - DNA, 819 bp, Homo Sapiens
ctgatggtgagaggtttgcagtgggcacattaggcactggggttgttatccgacatatattgtgtacgggggggtagtgctaagttataaaatggggacggaggtggtcgatgagagtgtggacgtaggcaaagatactttattcagggagtgaaagaaaagtgacaattgcacaggtggtagaagctcatgcccaggtgacagacagacacagaacacatcaacagaattttctgatggttcccagggacagagctgctgctctttcttccgaagctctgggaactggcacagctgaggacttccttttctcagtctccacctggacagtggcagtatggcagcctcagaaaggaaaccttttgctgtcagggatcatcatgggcagatcactggttaaggggaaagaagctccctgtgtatccatggtaggctttgatgagaagatgcaggtggagctgtggaacgaggtgagccaattatccttatcctttcatgctcctgatgaattctgaagctgttacttgctcttgggtggacactttggctggcagggtggggaaggtgtcacaggaggacatttctgctggcactgctgaggtgggcagggctgtggacactttggtggtgggcagggctcagggcacttcgggggtggacatggctctgggcactttggcgtggggcacacaggaggtggctggcagggctgcttgcactgctgctgttgataagacatcctgctggagtctcagaatatgaaaaataaacagcccctttgaaaagtgaacaaaagacaagaacagacactttcccccg

SEQ ID NO: 134693 - DNA, 283 bp, Homo Sapiens
  misc_feature (106)..(122): n is a, c, g, or t
caattttaaaatgatctctttttaatttcttaaaaagcacattcacagcacactccaagaatgccacacagcagtggtttgctgctctttgtcagaatatgtcagnnnnnnnnnnnnnnnnngttttaaatgctaaagattttaaaaattagttctctgaaatttctgtaaagccagtatcaccagtcatataaatctttattttggaatcataaacctttcaaaaatgtaatgagcatctacccaaaattacacctctctgaaatgtaattaaaagctatcc

SEQ ID NO: 134694 - DNA, 1336 bp, Homo Sapiens
  misc_feature (137)..(137): n is a, c, g, or t
  misc_feature (192)..(192): n is a, c, g, or t
  misc_feature (196)..(196): n is a, c, g, or t
  misc_feature (210)..(210): n is a, c, g, or t
  misc_feature (229)..(229): n is a, c, g, or t
acaaagtgttcataggtttattacttatcacctctatgtattttaacaacttcaaaagtgcagttggattatatgggaaaagatttttcttttgcaaacggcagatggcatcttgtagttcctggaagcattttacntattctgtaaaatattcccacttcagagacgacatcatttggggctacttcacanatcnaaaggagaaggcangtatcaaattctttcagancccagaggacttgatggaggctcaaggctaaattcttttttatccctgcttgtcccagctgcatcctgaatctccttagttgcttgctggtgtaaaagatgtctgtttactgtttagctaaacactggtctgtggattccacgtcagaatcatcagagctgtcgtaatctaccagactttgagaggcccggggggaagacagactataagcacacatggtgtgagcacccttggacatcacaggtttcagtggttcagagggagcatcggaagcccaggagtgccgagcacacacatctctgtgactatgaggagcagtcaaacgatggggtattgtttggttggagctttggtcttggacaagtgaggggacacagccacaaatacttatgtcatatttagattcagttgcatcaaagttattgcaaatggtgaaaaaattatcccagtccttttgcagtaattttaaatatctaacaaaatattcaagaaaacaggtttctgatgaaatcaaaaagtcaagaagaactgtggaatcaaatcctatatttttcaagaagaacaagaaaatacagtgaggattatagccattttcatgtgtgtgatggtcccacatttcttttccctgagtcaagctttcagtggcttcacatcctctggtcagtgttaagtagatgcccagtgatgccttggcagcctccagcatgtcatcgtcttgttctatgaaaacccgagacagccatttgcacggattgtgtaattgcagagagggctgaagatgaggctttaagaaggtcagtaactcagacatgaacctctgtaagtcaacttcaaaaaatgaaaatttcaaagtgtaggcaatagtttatgaatgaatgaatatcttgcctatatataaactcatagtgtctaaagtaccttaagatgcaattatcctaattcactttcaaaaagtcatcaggaatcagttaggaagcatctttatttggcaaatgaggacactgaggctcagggaaaaaaagtgactcattccagagcatacatttacaatgtacagctacatcatctatttgcaacaactgcctaacaactgtctcttagaaataa

SEQ ID NO: 134695 - DNA, 1200 bp, Homo Sapiens
  misc_feature (87)..(171): n is a, c, g, or t
  misc_feature (177)..(185): n is a, c, g, or t
cacatgctgatgactttatttttcacagactgaaaaaacagagcctggcatggtgactcaagccttgagtcccaactacttaggaannnnnnnnnnnnnnnnnnnnnnnnnnnnnnnnnnnnnnnnnnnnnnnnnnnnnnnnnnnnnnnnnnnnnnnnnnnnnnnnnnnnntgaagnnnnnnnnngtcgaagcataaaatgttcacagcagccttttctgtgtgtggctgcacgtcaggggccgtcgtcttgcttccaccaccaggggatgactacgttgaagggaggcctgtgtgaaccgctgggcttccgcagctcccgcgtgtggtcagcgccgacgctccccatcaacgctttccagcacaggagccgggacctggacgtccatcgccggcggtgcctccagtgctctttgacttgcgcccttcccgggggctctggggtccgcaggacaccgccatggaccggctgacgtaaccaacaaggcttgggcttttctcttccccagtgagatttccccacgaccggcacagcgtcggccccatcctgtgcgcttccatgaacggaagcaacaaagcctggcctgggacctcggcagggctgagcatgcacagctgtggctctgcataaagggacttgtttagagctggcactcaacaagaggccttcagtcagcggattcccaggcctgagcaaatccgggggcggaagcagctattcttatgatggcacagagaggttatgtggagaagatcgtttgatatacgcttgcctttgggctcaagtcactcaaaaaggtggtctctatcttcagtgcaaaaggcaaccccagcagagcgaatgaccctccattgccctccgtgaccctgtgggctcggtgagacaggagcaggcgggggtctttcctctgagcttcctcatggtcccctgggagggtagctggtcaagagaggcaccatccatttctaccagaagctggttgagcgtctgctcctcctccagtgttggagaagccggacatggtggtggagcgcttcttgcccaccgcgtcgatctcatcgatgtagacgatgcagggggcccgggctcgggcttccttaaagaggctccgcacacgggcagcgccgaggcctccaatgacctccacgaactctgggccggcctcgtgccgaattcaccacccagcctcgtacctaccga

SEQ ID NO: 134696 - DNA, 1960 bp, Homo Sapiens
tttcactttctttggcaaggcattttttatttctgttggacgagcgtctactcttaggtaaatctgtgatattttaaactaaggaaaagtacaaggtatcataaagacatgagttacgcagaactgaaacgcaacgtgtgttccttcctgtgtgatggttccatccacctcacctctcaatacctgcctgggtatttctggggttcaagccctgctaaggagggccttcacccagggcgcgccccctgtacctgcgaggacgcgctccacggcgtactcgaagttgagagtgtgcacggaagtgtgtccctcccgcgccgcgtgcagcgcagcctcattgcagatgttggcgatgtcagccccactgaatcctggtgtcagctctgccagacgctgggagtaaaaggtgctggactgggtcagcttcaggctcttcaggtgctgctcaaaaatctcccgcctctcctgcagcgtggggagatcaatgaagacgtgccggtccagtcggcctggcctcatcagagccccgtccaaaatgtcagcttggttcgtggacgccaggacgatgacatggtctgtggtacccattccatccatttctaccagaagctggttgagcgtctgctcctcctccgtgttggagaagccggacatggtggtggagcgcttcttgcccaccgcgtcgatctcatcgatgtagacgatgcagggggcccgggctcgggcttccttaaagaggctccgcacacgggcagcgccgaggcctccaatgacttccacgaactctgggccggccatcgccaggaagggcacctgagcctccgtggccaccgccttggccagcagcgtcttcccacagccgggggggccgagcagcagtgcgccctttgggaccttggcgccaagctggaggaagcgttctgggctcttcagataatccacaaactcgcggacttccagtttggcttcgtgcattcctgccacgtctttgaagctgactcctttccccatcttcccatccacaatggtgaaacgagccattttaagctgattaaaagcactgaatccaccttcccttccagtcatcccggccagacggaaaacataccacaggatggccaggcccactgccgtcatccccacagagtacagggcatttccaaagaatcctgttcgcttgtaggaaactgggatcctgtccttggcctcgatattcagctcatcttcagctgctcgaagcttctcttcaaacttgtcaatatttgcaacctgcattcggtacatcaaggctagccgaggccgcccaaacaccacggctccagggtgcaggtagacttccaccacgtcgctctcaggcaccacctggacgcgctgcacctcgcccttggccagcatctcgtggacaaagtcgttccaggaaatgctgcctccgctggtgctgagagcattcaggaggctcatgacaaccgcgatgaccagcaaggtgcgcagccgctctcggtacatctggtcgtcccgctcacggcgtctcctctcctcttcgtcctcttcaggcgccttccccttcgacttatccttctccttattcttctgcttcaaccttgaggtgttaaaatagaaagtaccacctaaaagttgccagagtctgactggattctgaactaaatgttgtttcaacaacaatccgttgatcccttcaaaggtaggggttagcagtctcaattgtaagctctgcagagctcggcctccagcctcggcgaggtcccccggaggcctgctggccatgtacggccgccccctcccgggcctggcggggaaccctggactccaggccgggcctgggccccacagcggccgaggacccgggcctggaccccggcggagggcacggagcagcagcagcagcacggcccctcgtgccgaattcggcgcgccgtcgacttcatactcttcgccccta

SEQ ID NO: 134697 - DNA, 796 bp, Homo Sapiens
ttttttttaacatgttaaatactttattcacattgtttacaaactatatccacctggaaaacacatgaatccaaaatagattattttacagtaattcacattttttaaaacaagttactttgaagttcaactctaataaggaggtcttcagcctgtacagcgattcagtgcctcaccacttgattcctgctctggtgaaacagaagtcctaggggcagtccacctagctgtcagtcactgataacttacataccagtgattgatgagaaaatgtcagtgcagactttaacctatgaacatttattagtgtgaattcactgtcactatttttgtcaaggaaatacgtgttatagcgcttgaatacacatcaggtagaaagacaaaacaaaaaagacacacaatttaatttgccattacagagttgttaggacatttccggttttataaacgtttaacatctggaccagagatggaatcaatgaatttcgattttattgtgttgacagcttgaatcacagaaacagcagtgattttgtaattgatgccagtgtctgttgactaactctgcatatcagatgccagccatcagttagaagggggaataaactcagcaacaattaataatgtggttaatgttaagtgtttaagtccagaaggatgtctgtggaagttttgctgagtggtcacaaagatgctctggttaggaaactttctgtgaacctatgttaaatccaattaagtcccagcttgatggcttagctctttcattaattaagatacttttctgcccaggtgc

SEQ ID NO: 134698 - DNA, 603 bp, Homo Sapiens
tttttgtaattgatgtttcatgagacatttattgtaaaagaacactttattattaatattaaaaaggaagtttttatgtaacaataattaatgcttactgtaaaataattcaagcagtactaaaaaaacctaaagaaaaagtaaaggtcccttcctcatcgctcactcttctcatttctctctgttttgatatctgacttttccagacttttttctatgcctatacaaatatatagttttctagacttttttctatgcctatacaaatatatagtcattcatcacttaatgacaaggattcattctgaaaactacattgttaggcgatttcattgtgtttgaacatcagagtgtacttgcacaaacctagatggtatagcctactacacacctaggctatatggtatagcctgttgctcctaggctacaaatctgtacagcgtgttactgtgcctgtagacaacagtaacacagtggtatttgtgtatctaaacacagaagaggtacagtaaaaataatgtattataatcttatgggaccactgttgtatatgtggtccatgactgaccaaaacattatgcagtgcatgattgtatattaaga

SEQ ID NO: 134699 - DNA, 1184 bp, Homo Sapiens
  misc_feature (410)..(419): n is a, c, g, or t
  misc_feature (624)..(649): n is a, c, g, or t
ttttttttacataaagatattaaaacttttattttagaattttagtcatgatatagtaaaacacgtaaattcaccagtttataaaaatgattagatgcaaattatttttctgacaaaatgggctaaggataagctttaagcttttttaataggcaatcttataaaggctgtaaatcaaatttgggataaagcagtttgagtcactcaccagtgcactaaattgaacaaaaaatagttaactgtgaaagtgtgctgaattatgtgagtaggaccaaaagacaagagtgatttttaacaaggtttatacagtattttcttggactcaattctttgtcattgaagataaaaatgctgctattcttttttgtatagggaggaaggttttacatgggaatttaatctttgctttnnnnnnnnnncagtaggaaggtcaaaatgactttgttttatatctgctggttttcaagtgtttttatttaagtagtatgttagaatagctgtttagagaaggataaagaggggatactgtaagaaggggaggggaaaggtcctagaaaagaaaggtttcagccacctttgagacagtatttctttaacaaggcaatatttgtatcctgaatgtgnnnnnnnnnnnnnnnnnnnnnnnnnnagcctcaagatatcaatgaaatatgcatatcttatttggagtgtatgattttatagcctccatcttttagttcagttttaagaaaaacagactaaatgatccctgtaatgtttgaatatgttactagctggagttccagaaaatattctggcatgcctttgaactttgagagctcatttcgtgggtgctctgatttaatgtcaactatgcaaaagccaagtaaatgcaagcactgaatacacaaaggccaaataaatacaagacaggacagaaaataaaatacatgcttaccagtaagaatgataagccttctccaaagaaagggaaaaattccctcatccaagcctcaaggtccaaacctcgcagctgaggtcaacagggggaaaataattctacccaacagatctaccaaacaagagggggaaagacctctccctaatcatatcccaaataaaacagaactcgaaccatatctgagagttctgtccaagagatacttactggagggagaaaggattacctgtgaaagtggtgg

SEQ ID NO: 134700 - DNA, 1090 bp, Homo Sapiens
  misc_feature (610)..(711): n is a, c, g, or t
  misc_feature (807)..(807): n is a, c, g, or t
  misc_feature (844)..(844): n is a, c, g, or t
  misc_feature (868)..(868): n is a, c, g, or t
  misc_feature (871)..(871): n is a, c, g, or t
  misc_feature (883)..(883): n is a, c, g, or t
  misc_feature (922)..(923): n is a, c, g, or t
ccaaaagaaagttaacatgagcttcatgtacaatttttaatctttttgcagaaaaataaactgagaaaggctaaaattgttttatttaagccactataccaagacatattgatttcaccaatataaaaattgagatagtttacattttttggtacatctttaaaatctggtatgtattttatactgacagcacatctcaatttggacaagctacatttccagggctcaatagtcacatgaatctcaattgtaatcaaagaggttggcctgcatccttccattgtctagcacatctacttgtagacaattgtgaacatctgccactctgccaattctatatcccatcattgtaagttcagatcaacatataccactagcagaatttattcattaccaaatattaagctgtgagaccagcactatgtctggtactaaataaatggcaacaaaaatgctgacatgggagttcaaccattcatgcatttgcaggatactaacacaggtaacagtgagtgaacaatcctccccctttttttcataccacttaatacaattattaattttcttatttattgtgtgtatatgcacatctgtttctcttatgacatgnnnnnnnnnnnnnnnnnnnnnnnnnnnnnnnnnnnnnnnnnnnnnnnnnnnnnnnnnnnnnnnnnnnnnnnnnnnnnnnnnnnnnnnnnnnnnnnnnnnnnnaaatatggccatgcattgattaccagcttcaaccagcttgtcatttcattacactttgtcaattagtcaagagacattccacattttctcaatganagcagtgaacagaccaactgttttctcttcagcacantatcttatagcccattccaatcantanaagtaatctganatttccactagtcagatcacattatcctgtctccctcgnngcgatttctggctcgagggcaattcctatagtgatcgtataaatcgtatcagtcatactgttcctgtgtgaattgtatcgctcaaattcaaccacatcgagtcgaagaaaatgtaagctgggtgctatgatgagtactcacatatgcgtggctcatgcgctcatcgg

SEQ ID NO: 134701 - DNA, 424 bp, Homo Sapiens
ttttggggattttttcctttttattttaaaggcaggggattttacagaaaacatacatagagttacagcagacgtgcttgtaggatcttctagaactaagtgcctaggatcaaggtttattttgaaactaattccagttctgccttgaagctaaggttggaaatgaccagctcaacctctccattcctgtttaaggagggtcctcattcacatccagggatgcttttctgaatgagtccaggctgaacatttctggccaggagggaaagctggaatccttataaaagcaatgacagtctcagattttgtaggcttttgaactggagctgaattctctccttgctattcctcatcacgaggctgggcctcctcctgttgttacagatgtgaaacaagcctctgtgcaccgcgcatgagccgcggc

SEQ ID NO: 134702 - DNA, 1015 bp, Homo Sapiens
gctattatttagcaaagcaatttatatttttgggacatgacaaggattggtacagcaagatttagaacttgtttgtccatatttgatacaatttctatttgatgagagttcatataatccatggccaaagatctcgaagtggaaagtgacaaaccataaggcactgtagtcatactcatttaaaggaaatccccttgagtcctagatagagcgtgggaatcatgctggttcaggacaagaagtcggtaacatctatggtcccttcttctagctcttcctcctcgtcatcattttcttcccggcctaaagagcgggataggcccccaggtccccctggtcgaatactctctggattcagctgccgccaggaagtagggggcatggtgggttccggacgccaccagctgtcggcaggggagccaaagcgatcagctagcactcggtatttggctgcgtcaaacaactcattccggggacctagcagaccccaacccttgaacagctggcaggctgcagctgcagcctgccgctcagcatcgatcttcttgctgccatagccttctacctccacgctcttgggccattttatgtgcagtgtgactttctttttcttcggtccatttgtgtgcacgtagactagtttgtcttttgcatgtgagatgccgagggctcttccaatcacactgttgagaagatttttgggctgtgggaactcttttaataggtccctagaagctcgagagatggtccctcctggggtagggttgacacacatgggtggaaggcggggtgggggaagtttgcactgacgctgcctgtgctgggcccgatcttttctgaatgagtccaggctgaacatttctggccaggagggaaagctggaatccttataaaagcaatgacagtctcagattttgtaggcttttgaactggagctgaattctctccttgctattcctcatcacaaggctgggcctcctcctgttgttacagatgtgaaacaagcctctgtccc

SEQ ID NO: 134703 - DNA, 1481 bp, Homo Sapiens
  misc_feature (1156)..(1156): n is a, c, g, or t
  misc_feature (1168)..(1336): n is a, c, g, or t
  misc_feature (1447)..(1447): n is a, c, g, or t
tccatatgggtgccagtctgatgggtcaagcccgggtgctctcctctctttcctctgtctcttcagtgtactcttctgcttgtaggagtgagatgactgggagaagaggaggaggatctggacctgtctctgctctccgatgcttcttctgtttctttgatcctttatgagttttctctgttttttcagctgacctttcccttgagtgactggagtctcgggaatccactgattctctcgatttagctcgtttaagatctctctccttatgttttttacgacgttcaatattattgcggagatcaacaggatcatctttgtattttccctcagccttgtagccaggttcccggggacttttcatttcatcatgagccaaaccatgttttctgaatgtactgggggaaatgtctattctcctgtgtatctctgggcttttcttgtttttggctgcctcctgctcagttcctctctttaggtatttagtaaagcgttcatgtaatgtcattcctgaggacccaaagtgatgctctttaacatggtgaacaatggtcactatatgttgggcaaacagttctgaggggctacgctgagactgagctgattgtatgtgctggaaaatggaacgaaactcctgttcctttttgttgctatggactagatctcggcaaagcttgcgttcctgagccaataagccactgggtcgtgcgaggtcctcatcaaaagagtccatccggacattgacctgtgcctttcgagttatggaaatggaagactttcctgtgggagaatctcctttcgctcccagcttgtctcggctctcagaggtctttctttggggaggtgatgagcttttctcctggactgctttataagcagtcactcggaaattcttctcaggcacaaagcccctgtgcccaccttcgcttcttgccccgatcttcctttttggatctctctgggaaagactcctcctccagctcctctgtttttctctgcttttccttccctggaggtgcatataccaggccctcccatttgcctgacttctcctcctcctggtttttgtttgcacctatgactttagacataaatttgggttcatcatcaaactcagattcctttcttcccttagccctcgtgccgaattcttggnctcgagggccannnnnnnnnnnnnnnnnnnnnnnnnnnnnnnnnnnnnnnnnnnnnnnnnnnnnnnnnnnnnnnnnnnnnnnnnnnnnnnnnnnnnnnnnnnnnnnnnnnnnnnnnnnnnnnnnnnnnnnnnnnnnnnnnnnnnnnnnnnnnnnnnnnnnnnnnnnnnnnnnnnnnnnnngctttcagtcgggacactgtcgtgcagctgcattatgaatcggcacgcgcgggaaaggcgtttgctatgggcgtcttcgcttctcctcatgatcgctcgctcgtcgtcggntgcggacgtacactcatcaaggcgtatacgtacc

SEQ ID NO: 134704 - DNA, 988 bp, Homo Sapiens
  misc_feature (168)..(177): n is a, c, g, or t
  misc_feature (396)..(410): n is a, c, g, or t
  misc_feature (420)..(500): n is a, c, g, or t
ccccccccggttttttgcccccggggcgaaattatttttggcacaggggggcaaaagggtggtgatgccgccgggggagttcagggttcaacaaggccggtttgggaggggtttcaagttcgggggaaaggctttaagaatttccccacttcttcccataaggccaannnnnnnnnnaaaattgatattgggctcgcttggggtcccgttgagaggtcccggaaaggccccaaagccccctttggatttgttagaacccttgggtcgccccggggggtttttatttgggggaaatccaacccttgttcttgcccgggttttcttgggaacaacttaggccaaggtccctttccttagggggccgggcggccaaagaaaggttttgaaaaatttttnnnnnnnnnnnnnnncggcaaggannnnnnnnnnnnnnnnnnnnnnnnnnnnnnnnnnnnnnnnnnnnnnnnnnnnnnnnnnnnnnnnnnnnnnnnnnnnnnnnngtttgttaattttaaagaatagtattttattgaatacgttttattcacagaaaaataagctttaatctacaatgaatgccagattatacagcagaaagcaattttcttagttttccacacagaaaggttctaagtgaaaaaaaccataaaattatattcacaaatatagtactctgtctcaaaacatttcacatgattattcacaatactaatacaattagatcagtcagtcaggttaaaatataacagtaatgaaaaaaatgcaaaatctaacataaattacattaaaacccttgttacatcgaaccaaaactgcaaatttcttactaaatccagaaaaatggtagcatatatagtaatttaaaatattacattaatgatacagaataagaaagtggtaaactccaaaaatctataggcatatctgcaaacttcagattcaaagtagaatctgaccacccaaacattaatgtagcatttgtctaacc

SEQ ID NO: 134705 - DNA, 1061 bp, Homo Sapiens
  misc_feature (715)..(715): n is a, c, g, or t
  misc_feature (744)..(744): n is a, c, g, or t
  misc_feature (896)..(896): n is a, c, g, or t
  misc_feature (931)..(931): n is a, c, g, or t
  misc_feature (949)..(949): n is a, c, g, or t
  misc_feature (961)..(961): n is a, c, g, or t
  misc_feature (966)..(966): n is a, c, g, or t
  misc_feature (972)..(972): n is a, c, g, or t
  misc_feature (974)..(974): n is a, c, g, or t
  misc_feature (987)..(987): n is a, c, g, or t
  misc_feature (1013)..(1013): n is a, c, g, or t
  misc_feature (1024)..(1024): n is a, c, g, or t
  misc_feature (1030)..(1030): n is a, c, g, or t
tttttttgttggttcttaatggactgacctttattaactttaatatctcatctgcccggccctgaggcaaggtactttgatctctggtcattcggtgaccttgaaggatgctggaagactcagagtccccagagttcagaggtcttggggtcaagtctggcttccacgccttggggctcttactcctgcgtgaagggcacagcagaagcagagaggaagcgcaggcggtagagcagccgcacccactggccgaactctcggtctcgggtcttgagtggggcccgcagctgcaagtagaaggtgcggctggtgttcaacttgacctcgagctgacaccggcttttgtcgtggacaaagagctggacgaacttcaaggggaacagcccgaagagttgcaggtgtccgttctccttggcagggccggccagaagcaataggtccgggagctccagggctggactggaggctgccacccccatggtgacctcgttggcaacttctcccaaccgagtcacctggggccagaggtcagaggtcggggcaggatagatgtcggggcagaactgtacgaagttgctctcaaagatggggaagtcccgaaactggtcgaattcgccgctctggaggtagcgttggagccgtctgggacggcccgtgggagaggctgccatcccacctggtttcacctcgccagctccacccagggccggcttanggccgcgattccgcctcattgcaatgtcnccgtccgacgggagcggacggaggagcaaagggagaaagcgagggggcgggactacgcgcactgtgacgtcatgatgcggagcgggctttatgacgtcacacaagagcgggctcctgatttgtgatgacgtcctggagggggcggctcctgnagatcagggcaaggggcggccatctgctgacgtanggcccaagtgcggacggntgcaatgcgcangtgcngggccnancgcaagcgacggncgtcaggatgcggctgttctcccggngtgctcgcggntctggntcacagcgtccttcgctggtggggagaagcg

SEQ ID NO: 134706 - DNA, 452 bp, Homo Sapiens
tttgttggttcttaatggactgacctttattaactttaatatctcatctgcccggccctgaggcaaggtactttgatctctggtcattcggtgaccttgaaggatgctggaagactcagagtccccagagttcagaggtcttggggtcaagtctggcttccacgccttggggctcttactcctgcgtgaagggcacagcagaagcagagaggaagcgcaggcggtagagcagccgcacccactggccgaactctcggtctcgggtcttgagtggggcccgcagccgaagagttgcaggtgtccgttctccttggcagggccggccagaagcaataggtccgggagctccagggctggactggaggctgccacccccatggtgacctcgttggcaacttctcccaaccgagtcacctgtacgaagttgctctcaaagatggggaagtcccgaa

SEQ ID NO: 134707 - DNA, 1026 bp, Homo Sapiens
  misc_feature (687)..(868): n is a, c, g, or t
  misc_feature (894)..(894): n is a, c, g, or t
  misc_feature (972)..(972): n is a, c, g, or t
ctcctttagaggtaaactcctgtttttaataatattttctgaaagttctgcaattgcagcttgagaggtagaaactttttgctcatcaaactcctgagcactaatctgcttacagtatgagtaagttggcaaaggagcatatagtccatctccaggattttcactatgtcccttttttacgtagtcaagatgtttttccactgcagtctgtaagtaagagggtacttgaagaatttcctgatgatgatccattaagaaagaaactaatcttccagcaagaagctcatcaagatccacttcttcagcacagcataacacacatcgagaaaaggtatgtatcatcagtgacctcgtacccattgcatcatgaagtttgggcatatcaacattttgactcattcgggaaatcatacgcattaagagttgaagctttctacgatttggtgggggaagtaacaaacaacataactgtagagcatcgatggcaaccctctctaaatgaggttgcagcaagctttgtgtgccagtcaacatagaagaagctggaagtaaagaattttctgaaagttctattgtacttttgcagagtcttttattgattgtgggactagactctccgagttcactttccatagctgtttgcacacttgcctcgtgccgaattcttggcctcgacggccatattannnnnnnnnnnnnnnnnnnnnnnnnnnnnnnnnnnnnnnnnnnnnnnnnnnnnnnnnnnnnnnnnnnnnnnnnnnnnnnnnnnnnnnnnnnnnnnnnnnnnnnnnnnnnnnnnnnnnnnnnnnnnnnnnnnnnnnnnnnnnnnnnnnnnnnnnnnnnnnnnnnnnnnnnnnnnnnnnnnnnnctgtcatgcagctgcattatgaatcngacactcgcggtgacaggcagtttgcgtatgggcgtcatcgctcctcgtcactgatcgctggctcgtcgttcgtgcgnggcggtacagtcatcaaggggtatacggtatcaagatcatggataccatgaaga

SEQ ID NO: 134708 - DNA, 909 bp, Homo Sapiens
aaaagggtattgtatccatccagtggaccttcgtaccccatttgcatccatgaaggtttggggcatatcaaccatttttgactcattcgggaaaatcatacgcattaaaagttgaagctttctacgatttggtgggggaagtaacaaacaacataactgtagagcatcgatggcaaccctctctaaatgaggttgcagcaagcccaaaatgtttacaaataattcgtaatattcaaaagtaagtagaggttcagggagatctagaaaataatctgcgattgttctgaatacatctcgttcaaatccaacataagttggattattcatatcattgcttcttggccaatttgctaggcacttcatggcagataatacccagtgagggaggtcatctgatttgttttgtagtataactactccacgtttacttgtattggccatgttgtacattatatattggggaattacttgttttggatttatgacttcttctagggatggcacacctaaaatggtttgcaggtagatcagaataacatatctccaaacttcttcaacatcttcctggcttagttctctattatcaattgcattttcttgatcttcattgattatttcatgctttattttctcgccattttcctgagataaatgtaatccatgccttttaggagttctacgagataagtttcgtaatttaaaaatgctatctttatctttggaaaagttctctatgttgttttttctcaattctggataccttcgtggtagagttttaagtggcgaagttgcaggaaatcagcttggtggcccgataaggcccgggaggcacaccctgactctccataggtctgtcagtgcccggtggcgtccatggcggcgaaggcgacactcaggcccagcggccgc

SEQ ID NO: 134709 - DNA, 557 bp, Homo Sapiens
cttttgcttaaagaggtgacatctgcctacaataaatcatgttttttaagaatctgtatgcgaataaacattctgagagtacctaaacttcacctcattttaatttcgctgtgccttgagatgggattttatctctgaaaaaaaccatcaggtttctttaggaaagtgaaaagattttgtctacaattcaccatggatatcagtcatcacaaacatcaagatgtgaagtagatgctattagaattgttaaagaacaagcatcaagcatacgctactcaccccctactcccctgaaaggcaccaccttacttcacagaggtcttttgagtggctgagagtaagtgtaccgatctaaaggtcagcagacactaagttctggctttaccatttaataactgattagccacatgatcatagaaaaatctctctctcaaactcactttcttgaaccagaaaatgggagtaacgctctacctgcttcaatcttgttatataaattaaaaacttttgtcaacgtgggctgtgaactgaggtactgcataatgtcatatacacat

SEQ ID NO: 134710 - DNA, 295 bp, Homo Sapiens
cattaagtgtgcttgtgcccaaaatatttacttgtataatatctgtaacttgcttaaatacttcagcaaagtcagcatatttactcattcaacaaatatttgagccaggcattattttagacacagcagtgaacaaaacaaaaaggcattcttgccttcatggagcttacattcttattgttatttaaatctaaatgttataaaacaagaatttatattctagggttgatcagctagtatttaatcaaaaaggccacactcccatagcagctactctaagctgtagtagctaata

SEQ ID NO: 134711 - DNA, 1031 bp, Homo Sapiens
  misc_feature (138)..(179): n is a, c, g, or t
  misc_feature (270)..(304): n is a, c, g, or t
  misc_feature (318)..(354): n is a, c, g, or t
  misc_feature (410)..(811): n is a, c, g, or t
  misc_feature (833)..(943): n is a, c, g, or t
  misc_feature (953)..(953): n is a, c, g, or t
  misc_feature (964)..(964): n is a, c, g, or t
ccttaatctcaaaaggcggggggcgtcggcgggcagaggcaggtagcagcaacagctagtagcaaagatgcttctctctctctcctgggcccggcaggctggggggcactgcagacgggggctccggcccggccaccnnnnnnnnnnnnnnnnnnnnnnnnnnnnnnnnnnnnnnnnnnagcctggacctcactcccgctctcttgcacacacgcacacacgcgtccacgcaacttcaccatgagaatggaaataacaatttcgcattgnnnnnnnnnnnnnnnnnnnnnnnnnnnnnnnnnnngtaccaggcagttnnnnnnnnnnnnnnnnnnnnnnnnnnnnnnnnnnnnngcctacagccgcggccgctccaacatcagaatggtaaccctcgtgccgaattcttnnnnnnnnnnnnnnnnnnnnnnnnnnnnnnnnnnnnnnnnnnnnnnnnnnnnnnnnnnnnnnnnnnnnnnnnnnnnnnnnnnnnnnnnnnnnnnnnnnnnnnnnnnnnnnnnnnnnnnnnnnnnnnnnnnnnnnnnnnnnnnnnnnnnnnnnnnnnnnnnnnnnnnnnnnnnnnnnnnnnnnnnnnnnnnnnnnnnnnnnnnnnnnnnnnnnnnnnnnnnnnnnnnnnnnnnnnnnnnnnnnnnnnnnnnnnnnnnnnnnnnnnnnnnnnnnnnnnnnnnnnnnnnnnnnnnnnnnnnnnnnnnnnnnnnnnnnnnnnnnnnnnnnnnnnnnnnnnnnnnnnnnnnnnnnnnnnnnnnnnnnnnnnnnnnnnnnnnnnnnnnnnnnnnnnnnnnnnnnnnnncagggcagcaaagggcaagaannnnnnnnnnnnnnnnnnnnnnnnnnnnnnnnnnnnnnnnnnnnnnnnnnnnnnnnnnnnnnnnnnnnnnnnnnnnnnnnnnnnnnnnnnnnnnnnnnnnnnnnnnnnnnnttcccctggnagctcctcggngctctctgttcgacctgcgctacgggtactgtcggcttctccttcggagcggggcttccatagtacc

SEQ ID NO: 134712 - DNA, 1011 bp, Homo Sapiens
  misc_feature (737)..(737): n is a, c, g, or t
  misc_feature (778)..(778): n is a, c, g, or t
  misc_feature (831)..(831): n is a, c, g, or t
  misc_feature (844)..(844): n is a, c, g, or t
  misc_feature (998)..(998): n is a, c, g, or t
ttttttatggtttgtggtcatgattattattacagtttattacaccctctttgacaacaggtatggtctctgcggtctttagcaagagagcacacaaaacagcatgacttaacttttggtattatgagtagatgagaaattactatgaagataaaagttgaaactatataagcatgaaaagtaaaatttacatgaggaggaaaaaattccttaagttgtatgcacatggttaacgctgacttcacagtgtctcaacaatttgccaaaattataaacttgatgtaatccaagactgaagacagttaataaactgttttgaagaaacatgtacagaagtcttgtttgaataaaaaatacatattagtcacatataatcaaacaactgaaaatgaactgaggcattacattgagctacgaataacaggaaacacttgaaatttcctgatagaggaaagtgctcattctcacatcaaagtcctgggtgaggccagtcactgcacactacagcagaagaacaagctcccctctggttggttttgacagcagcatggtagctatcaggctgaatcaagaatacagtcactactagtatgaacaaaggtgcttactacacaaattagaccgtatgccaattccgtctacagactaggggagtcagagcatcacagaatattcccaaccaggacagtctgaattagttgcctagtacagacataataatgtctgaaggaaaacanagtgtggatggatatcaatgcaggcttctggagcctgtgtnggagctatcactccgagaaattaagtcagtcgtttgaggaactctgattggancccaagagcaganatggatggagcagtgtcatcagctgtatcacacagtgtctcctgtatgtgctccaacatgatatgcttctacttactcgatccagtagatagtactgtgactgttctgatcaaatgatgatctggaatcagtctactacacatgaataaatcangatcatcactcag

SEQ ID NO: 134713 - DNA, 1007 bp, Homo Sapiens
  misc_feature (393)..(728): n is a, c, g, or t
  misc_feature (730)..(730): n is a, c, g, or t
  misc_feature (782)..(782): n is a, c, g, or t
  misc_feature (784)..(784): n is a, c, g, or t
  misc_feature (961)..(961): n is a, c, g, or t
ttttaaaattaaaaatgttttattggctattgcctttaatagatttactacaataaaggaaaggaatatttttctcaaatgtgctaataagaaaaagacccaggaaactgaacgatattggacacagttttcagtgttttagacataaataaactcatgaatttcatatggattctggaatatttaccactactcccctaacgatgcatttagcatagaacaaaaatatgaacatttgaacaagtccaatctaacacatttcaaaacaatcagatctttggaaaactgttttccataagtaccccttgccattcatggaagagttatgaggatgcccatgaatttattcatggacactcccatactaagaaaaagaaaaccatgtagatgggnnnnnnnnnnnnnnnnnnnnnnnnnnnnnnnnnnnnnnnnnnnnnnnnnnnnnnnnnnnnnnnnnnnnnnnnnnnnnnnnnnnnnnnnnnnnnnnnnnnnnnnnnnnnnnnnnnnnnnnnnnnnnnnnnnnnnnnnnnnnnnnnnnnnnnnnnnnnnnnnnnnnnnnnnnnnnnnnnnnnnnnnnnnnnnnnnnnnnnnnnnnnnnnnnnnnnnnnnnnnnnnnnnnnnnnnnnnnnnnnnnnnnnnnnnnnnnnnnnnnnnnnnnnnnnnnnnnnnnnnnnnnnnnnnnnnnnnnnnnnnnnnnnnnnnnnnnnnnnnnnnnnnnnnnnnnnnnnanatgaggcaggagatcgagacatcctggtcaacggtgaacccatctctactananaaaaaaactgagcagcggctcgtgcgaattctggctcgaggcaatccctaaggagcgtataattcgatcagtcaactgttctggtgaatgtatcgccacatcaacacaacagcggagcaaatgtagctggggcaagatgacatcaatatggtcgcacgcgctcatcggaacgtcgcntgatatatcgacccgggaaggttgcatggctcctcccaccaccccc

SEQ ID NO: 134714 - DNA, 609 bp, Homo Sapiens
  misc_feature (554)..(554): n is a, c, g, or t
tttataaattaaattttttattcatttttttgcatcaaaatagtgcttaaaattggaatttatactcacaagacatagctaacatccaaagtagacaattaaaaaatattatttgaaaattatgtacttagtactgaagacttcctaaatttgcacattagctagattgccattagcaccattagagagttgatctttggctaatgattattcaggaaaatttcaaccattacaatcagtgagtataattttatatttcagcaacgatagtggtcatgttcagcaacagcttcacttacaaattaaagtaagctcacttcagtgttgcactctgatgctgtttttttaccccttctcttgcaaataaccagtgaaataaaaattgcttctaactggcaatcgaaacaagggaggaattatggctagccaactagttgctaatgtttgtgttttttttatttaagaaacattttaaataatagagatggggtctcaccatggtgcccaggctggtttaaactcctaggctcaggcaatcctcccactcggcctcncaacatgctgggatcacaggcttcagccaccatgcccggactgctaatgtttgtg

SEQ ID NO: 134715 - DNA, 1325 bp, Homo Sapiens
  misc_feature (1268)..(1268): n is a, c, g, or t
gaagacaacagattgaaggcaaaagaacacagagctttcacaagctcaaagaaaaatatttgctggctgatcgctgatttgtatgcactataaaacaattccataaataaaaccaatatatcatttcttaatcatgaccctatcaaaaccaagttatttcctaactattctttcaatgtcaaatgtaccctagagttgacgtttcatttttaagggttacagctacctcataggaactgaactagatgtactcttaccctttctctgaagtataacagtacaccactgcacaacagtatccaatttgaagactaatggtaaagaaaattcttcaggaaaaactgaaaatccatcaagctgaaaatctaaaattagttctactttctaatgaaaaatacataaaagtgcatcatcagaataagtaattcttatgccagtttgtattgcaaattttccaaacaatgcatcaaacataaacccaatccagatgtcaattatgaatacaaatatagcttgaggttgttttttttaaaggcagtaatttttgaaatagttaatgcaactgttgctaacacgataataatagtactcctggcttcacatactaacctggacttccgatcaagtgctgattagcgcagtaagggaggtcaccataaaaccccaatccatttcagtcatgtctagtcttgtaccctccattctccttttttagcatttgaagacaacaggttgagttggcagatattgtttatggacccctgaggttgtttttaccgattcaatctcagttttattgaattcttgataacaggaataggatttgcagggagagcagggatatcagaaaggtctgtactggatgttttctgagaggccaacagagaagccgctgtctgaatagtttctgattgagttgtacttgtctctgtatcaagttgttcctttgcttctgttttatcatgtccactcaaagcaagacagttagcatcttcacttgtttcatcctcttctgttttggttttcttgggactctcttctttatgaggtgaggatgtcctcttgactcctactataggagtaggtatttttgttgctgcatttcctgaagttgctgcatttcctgaagatctaggtggtgggtttaccagacgtgttgaagaaacaactctggagaccgtaggctttggtggtggagaaatggctggttgtggtgcagtttgaggaatgctttcactcgatgtaccccctgagctttcactggaatntacttgtggcacagaaacttcagtagcctgtatgttgtcacagatgctgctggtcag

SEQ ID NO: 134716 - DNA, 1259 bp, Homo Sapiens
  misc_feature (450)..(450): n is a, c, g, or t
  misc_feature (969)..(982): n is a, c, g, or t
tagattgctgagcagaacgcagagcagctcatacttgagatgatgatggtgagacttgatgatgcccagactgtactatggcaaacgactcagatcattgatagattcttatagagagtgccattagagtgagttaaacagtaaatagtttgctataaacaatccagcttgcttcagcaagaaatgctatagatatagtatcacttactaagtaaacatattagaaatagcctaagacttgagtcttaacactatgctgtatattgcagtactacaaagaaaatttaccttctctttggctttccacaccatggacaaagtctcagaagtcaaataaagctagtcgtctcctcattatgagtgcatttttgtgacttgcaggttaaagctagtcatagagcacaaggcaggatggttccttagacacctaacaaggtaccctgccagccntacaccacccttttctataccagtgctattagtcaccgggataatgggacactttcatattggtaataataatagttttagcaaattactggagtggtctatttgggaaatactctttagtctgttaatctacattacaataatctgttaagatttttttagatcctacctttaatactgtgttaatttaaaactgtactcatatactatctatctagcagtcaaggtgtggtgtgttctaatggtggtaattccacaccaaacacaaagcagacatggttaattgatgggacagtaggaaaggatgtctttccagctataaggcattttcttttagacccaacaaactgaattaatatttaacaggaatatatttgagggaagatagcattttaagaatctttttcagaaggtttttaatgtctacactgttttttaacattgtcctttcaaacaggagctttttgttattatgtggattgactgcacataccaatccttcacagaccaggagaattnnnnnnnnnnnnnngaatatgatatcacagggtaggaagacagattttcctattattatacctaataataaataaaagtaaaatacagatagaagttgcgtacaatcaatcagattcaattaaagaatgaagcaagagctacctcttcattgactggacacggccttgttagattaggtgttttaagaatggaagtaatctcatgccaactagtgttttcccaaaataacttaataatttccttatagcagtgttgtaggttgaagagtattccccaaaccttgaattaaa

SEQ ID NO: 134717 - DNA, 1051 bp, Homo Sapiens
  misc_feature (696)..(837): n is a, c, g, or t
  misc_feature (865)..(865): n is a, c, g, or t
  misc_feature (925)..(925): n is a, c, g, or t
  misc_feature (990)..(990): n is a, c, g, or t
tttacagggagaggaaattctgttaattccacgtttattaatcacacagctctctgcagactagacactaaaacacacaattgtcaaaaactagaaaaatgagttatgtccacgttttaaaagcaaaactttataaatttcttaccacactcattcccaagttttatcccacaaagtatagcatgaaacaatgacaacatacatattattcaagtaaaatgctatttaaaatagctgcacacaggtaattaaaacactaggatccagtttttagaggaaaaagtcatgtggcacaatttcaagttcataattgaagttaacagtaaaacagatttgctcacatttgcttctgatctttatttctgctgtctctctttagtagaataaagaaatggcacttcacataaaatcatatttaaaagctactaaaatggataaacagatgcagatcagctctttaatgagaatccctgcatagctggaggaagttcaaggataattgttttttcaaggcaaatagactcttgttacgtggctaatttcatgtacattatcatcgctgggaagttcctgctgagaactcacggtagctatgccagaaaagtactttcttcacaggaggtgttgaaataatgccggataaatgcaagtaaggtcaatcctcgtgccgaattcttgggctcgagggcccattcnnnnnnnnnnnnnnnnnnnnnnnnnnnnnnnnnnnnnnnnnnnnnnnnnnnnnnnnnnnnnnnnnnnnnnnnnnnnnnnnnnnnnnnnnnnnnnnnnnnnnnnnnnnnnnnnnnnnnnnnnnnnnnnnnnnnnnnnnnnnnnttacttgcgtgcgctcactgccgctttnccagtcgggaactgtcgtgcagctgcatttatgatcggcacgcgcgggagaggcgttgcngtatggcgtctccgctctcgtcatgatcgctggctcgtcgtcggtgcgcgacgtatagtcatcanggcgtatcggtatcaagatcggggaacgcagaagaatgtagcaagcagcaagcagacgtaa

SEQ ID NO: 134718 - DNA, 1521 bp, Homo Sapiens
  misc_feature (74)..(83): n is a, c, g, or t
  misc_feature (232)..(241): n is a, c, g, or t
  misc_feature (1256)..(1265): n is a, c, g, or t
tagttatcaaactttaatcgattgactaatcttacaggataaacaataagacagctattcaaggttacactttnnnnnnnnnntccagcagtgcaaatctaatagactaaatacgttcatctcctcccaaacaggcatttgatttgaaaacagaaaccagaacagagcatacaccacaaggaaacatggtacttacaaatattgtcaaataattcagcagaactctttaagnnnnnnnnnnggttcttagaaattgagaaagcagtagaaccacccagcctggcagatcaatctaccagatgttctgcatgcgagagggctcccaaccacctgtaacttcagaaaggccgccaggcactattacgaaggaaacaggtgcagatcctaactggagatgactttatcacaaagccttaagacaaagggaccatcctcttccaagacaacaggtgtgaacagaggcaaggagcgagaggagagggctccctcagcagatgggtggaaagcaagcctgcccttgcacggcccttggcacactcaatctaccccctttcccttctctgcccctggcaaagaaaggctgggcaagtgcaagagcccagaatggctcctccaggcacatggttaaagtaagagtaagaggaaaacgagccccttctgggtgaaatatggcaacttttctgagacatggcaacgaggcagagttaatctctttggccctcatcaggtaaagcagcaactaaggagcctactcagggccttacgtgggccccttctatgtccacaagaaagtgcatccttagctcagttcaacatttaaaaagagctaacgctacttgcaaaaggcccaccatggattcaaacacttaataccaaagaggtccagcaactcgcgagtctgtctgtgttctgtgatctgaagcagagctaaggggggcctggctcacagggtcacgctcttctgccaaggcgcctcagggagggaaaaaaaggcatgatgatgtctgtgagccagaacctgcaggaggaccaccggtagagattctagaagacaaagaagccctcaggaggctctgagaggtgtccaatgtctaagagacggccaccccctccatctctagcttcgagtcaacgctgttacagtcactctccggaaaccagctcttcctttatccacctgcacggcccctgccacagtgagggaaagatctggtccctctgacagtaaggaaattgtatagaaattatcctgaggnnnnnnnnnnccactgtgacgctacctaaaagaaagagtatttcaatttgcttacacagatttagtcagtacactccagactgtaagaaatgtgtgaagagactgcttacggaactcaaagactaaacagtgaatactactgtggcccagacacggatcgaaaacacttctcccagtggcttctggtgctatgtctgctctcccgagagcgtccagcaggtcttccacctcgtgccgattcaccacccagcctcgtacctagcctt

SEQ ID NO: 134719 - DNA, 997 bp, Homo Sapiens
  misc_feature (887)..(887): n is a, c, g, or t
  misc_feature (906)..(906): n is a, c, g, or t
  misc_feature (921)..(921): n is a, c, g, or t
  misc_feature (925)..(925): n is a, c, g, or t
  misc_feature (974)..(974): n is a, c, g, or t
gtcctgtttgttaaatccctgctgtaactctgatttatccttaattttcacattggcaaaaattaagataaaagtaaggcaccaaaaatcgccctgtataacacctctctaaaagcctcatcacccatcacaggcaagccagaaacttgcagggaataccctctctgtgtaagactgttgattgccgcccctagacaggtgtgtttcattatgttacatcctattttcatctgtcacacaagactgttaggtacaaatacttaacagcaccattaagccatttcatctagctccctgtctttagtcttttatttaaaaaaaatattgtatcatatagaagaagcaggtatctttgctggttatattgatttgcttaccaaataactccctaattaactggcaaacatgtagaaatttcttagctagtgacaggctccttggggggcaatggaaatattgcaagggcacattgtcccccaatctcatctactgatcttttccgtaagaaaactatgatatacttttaagcattaagtcaatcgtttccttggtaaaaatcaccacatttataagaagctcgctgatgcctgctatacagatgttttacgcaatctgctctccaggcattaaaacgacatggcatgttcatggcataattttatctgttgtacaaaactacaaaatccattcaaaataaaatttacgagagctaactgatcatgctgtgcatgcttcaaagttcggtgagaagatggctcatattttacttcctttgctgcagcacagtttgttacttggtggtgaagcctcctttttccgtaaggactttttccaagattcatttacattgtttctttcattatatccggtctcaaaataatcataanatttggctttgcactcaanagcaggtcatttccnacangttcgtggctgagggggcaccactctgtggtgtatcaattgcttcccancattaatttggctttcctgaaca

SEQ ID NO: 134720 - DNA, 2397 bp, Homo Sapiens
acagctgcccttcctggcttggagagctcgcgtgcactcgcctccagctcctgtgctgggtcgtgaggtcgacctcacacagcagagacaggcccatggggtgccacatgggccaggtgctgtagggcagaggccattctggagaggaatgtggggctgaaaaaagtactgatcataagcctcattttgaatgcggcgagaccaggcaatctatggcctccctagacacctcccggaggctgcagtaagaacctcttcggcctctgggctgctccaggcgggccgtgacaggggtgtgggagacagagatcccatggcccctggaggggccaaggggcaaggagcctcagctctggctctcctccttattctagcatcgcctgctacagggagtggccccaggctttggagggctggaggcctgggtttcactcactgccaggctgcccgctgcactcccggctgctgggtgcatggtgggggcagggccaagagggtctccttgctgagtggttccctggtccttcccagcagggctgggagccccgcgcagcactgccaccaggctttattcggttgtaccaaagagatttccgtcagccatgtacaaacagaacagagtccataaggagagtggcgaagctgccgggaaggaaggcaagcgtgttttcctggagccaggcgctgggtggcaggacaccgtgttggggggtgcccagtgggaggtggtgtggtctacacccagagaactaaaggggtgaccgcagtcactgctccctaaagccctctgctctgcacctcccgccacagctgggtgggcagtcagtgtggcctctgtccaggtggtgggggcatccggggaccaggtgggggcgcacgcaggagcggtgcgtttcaggctgcaggtgccgtctgcccgtctcacttccggcctctccactgtgctggacaccctctctgagcagctttgctggaaagagcggagagcctgctgcaaaccaggcaccttgtaggcaggcaaggaggcagagtcctcaccagcccttccagagccaggccagttagagagggcggccctgcagagtcctatgtccaaacgcagaaggcgcagaagcagagcagggggagggccggccagggcctctgccaggttagaagtcaccatcgcgctcccccaggggctgtgccgcctgctgcctggcaccctccaggaaggccagctccttggcttccttcttctggtttcgcgcctcatactccaacctgttggtgatgatccgctggacgatgaggtctgtggtgaggttgctgccactgtcaatctgacggaagatgccccttctcttgggctcctggtatgggtcggagccatccctgtcagggataatttctgtcttgccgtgacacaccaggtccaccttgaagtgacttaggagctctgctgtgaccgcgtacggggctccaatcaccacttctgacacgtaccggcaggccagcacgctcagagtccgttcatgcagattcatgatggggtagttcttccccttgtagtgattgacctcctggtcaaagtgtaagcccgcgatgatgtagggcctctctgccagcctgtgcaccttctccaggaagtccacatgcccgatgtggaacaggtcgaaggcaccagccacatagatgactgtctcccctggctggggctccttcccagaagcaaactggatgatcttctgagatgtctgcaggaactgggataccccggtccaggggttccgcccaccagggcacttgccaaaactgtctgcatactcccggtactcagaggacatctcctggctgctgtgatgggctttggttaccagcagcatgcggcccacgaggtctgtggtggacaccccttgcgtgcgcttgcattctctgtacctcccagcctgctttacttcctcataggtgtcccggccatctacagtcagggtgatgtcattgccgtgaacacagaagtcacagttgtatttgtccagggtctctagtgtagtgacgtagggagccgctggcaccacctcgtccacccatttgatggcctgcaccatcttgtatctctcctcctgagtgaacaccgggggccccttgtgcttggcgatctcctcatcggtgtgcacgcctacgatgaggtagtcacccatggcccgtgcctggcgcagctggttggagtggccgtaatgcaccatgtcatagcagccatcgcaccacaccctcacggcgcgcctgccccccgggcccggctgctctgcgccgcctgcagccccgcgcccgttccggatcatggccccgcagcggcgtcgacccacgcgtccgcggacgcgtgggtcgacgatatcccgggaattccggaccggtcca

SEQ ID NO: 134721 - DNA, 1050 bp, Homo Sapiens
  misc_feature (783)..(783): n is a, c, g, or t
  misc_feature (786)..(786): n is a, c, g, or t
  misc_feature (855)..(855): n is a, c, g, or t
  misc_feature (907)..(907): n is a, c, g, or t
  misc_feature (920)..(920): n is a, c, g, or t
  misc_feature (1026)..(1026): n is a, c, g, or t
tttttgtataaagaaaagagtttaattggctcatatttctgaaggcttaaatgaaaacatggtgctggcatctgatcaccctctagggaagcctcaggaaggttaaaatcatggtggaaggcaaagcgggtgtcggtatttcacatggtgagaatgagggcaagcgacagggaagtgctatgcacttctaaacagccagacctcaagagaagtcactattgccaggacagcaccaaggggatgacgctacatctttctcagtttgagaaatccacttccatgattcaatcacctcccaatgggccccacctccaatactggagattacaattccacagggatttcaagagaaggggtaaatatacaaggtatatcagtaagtaggaattattcggtgattccagaaactaggacaacgtctaaggccttgtcacattgagtttagttgtaaggctctctccagtatgtcttattcgatgtttagtgaggcctgagcgacaaataaaagatttcccacactcattacatttataaggttttttgccagaatgaattctttggtgtttgctgagggaaaacaaccgcccaaaggctttgccacattcaatacatttgtatcttttctcttcagtgtggattctctggtgacttacaagatgtgaactatggctgaataccttgccacattcatcacatttatatggtttctttcctgcatgaatatctgatgtgcagtgaggtttgagctccgtttaaaggttttgccacactcattacatttgntangtctgtctccagtatgaacagtctgatgaagtctaagatggacacgctgactaaaggaatcccacactngatgcatttgtaaggtttctctcggtatgaatctctgatgtctattgagtgntgagcctgataanggctttgcacatcatgacattgtatggttctctcagtatgaccctcgatgcctacagagtgatactgacgtaacctgcgcatcatgcatggtaggttcctccatanatctcccctctgcgattctgcctc

SEQ ID NO: 134722 - DNA, 1038 bp, Homo Sapiens
  misc_feature (595)..(595): n is a, c, g, or t
  misc_feature (653)..(653): n is a, c, g, or t
  misc_feature (696)..(696): n is a, c, g, or t
  misc_feature (789)..(790): n is a, c, g, or t
  misc_feature (823)..(823): n is a, c, g, or t
  misc_feature (851)..(851): n is a, c, g, or t
  misc_feature (857)..(857): n is a, c, g, or t
  misc_feature (859)..(859): n is a, c, g, or t
  misc_feature (873)..(873): n is a, c, g, or t
  misc_feature (894)..(894): n is a, c, g, or t
  misc_feature (898)..(898): n is a, c, g, or t
  misc_feature (960)..(961): n is a, c, g, or t
  misc_feature (967)..(967): n is a, c, g, or t
  misc_feature (977)..(977): n is a, c, g, or t
  misc_feature (980)..(980): n is a, c, g, or t
  misc_feature (987)..(987): n is a, c, g, or t
  misc_feature (997)..(997): n is a, c, g, or t
ccaaaatctaaaactacctttattgtggttggctcgacataagatgccgccatcagcagaattataaaactgtacaggaggcacaaaaataggctgtttaacttagataatgaccctcatgtcttcaagctttaaaaatgcacataaaagttgtacaatctggcagtttataaaatataaagctaaaaagaggattttgggttccacaaagaagactgtatcacacaattaacacgtactaattaaacaattaaccatccacacagaagacataatggcacagaattcttaaaaatcacctaaaaattaacattttaccccgaccaaattaatcaccctttaataataagactactgtaaagcatccatcccatggaaggatacagtatcacttttccagttttaaaatggtcaagggtgttgtccaaaacaaatctgatgtgctttaagcaagtacaattgtaactggatacatttcagagtaaaaattaaataaatataaataggttaaataaataggtcattgcaaaaagaacactacacaaggtttacatctgagaatgcagagtaggtgactggtaatgctttctaggtnagtggggactccccatcacagctttagggacactgaaaaggaatactgtatccaccanacacacacacagtacacaggggaggtgggggggctttggccanagtgttggttaaggctgctccagtgggaggctcactgcagtcacgttctttgtggctttcaacgtctacagaaagacttaagcgccggtacannaatcagaacagagtactcacgggaatcactgtnttcataagaagaggggagtagacaatgngttaananatgatgtcaactgngacggtggattcggtcactgnagangtgctgatactcctgcaggagagcaagcagactatcacaaatactcagtggtaggaaggaanngaaganactggatcangangatccancctaagacanaaaacgctgggactagagtctccaggctgtcctcaacaaag

SEQ ID NO: 134723 - DNA, 1416 bp, Homo Sapiens
  misc_feature (1302)..(1336): n is a, c, g, or t
atagttaaaataatcatgtgatgatttatttatattctgggaaaatatttattttcaaatactcatatgcaaagaaaggaatcagtttgagaaatcctgacctcaaacaattcgaaatcttgtttgaaagcggggggttcagggtgtcctccacacactcatgagcggggaatgacacagagtttgtaacgtggtgggatacagccaaacccaatatgtatagggctgaggtcgatatcctttgggtcaacgagaggcttcaaattaaaatgctgcaaaatggcacacaacaaaagaaacaactccatgcgagccaggccttctccagcacacactcgttttcctgtggaaaatggcttgaaatagtcactgtacttgaactttccattttcattcaggaagtgttctggcttaaacttttctggatcaggaaattcttggttgtcatacaaaacagagtccagagttggcactacgactgtgcccttggggatgaggtatcctctgaaaatggtgtctcgggttgcttcatggggcaggttggagggcacgagggtgatgaaccgctgaatctcatgcaccacagcatccatgtagggcatctcttgcctatccttgatggcagggattcggcttggcccaatcaccctgtcaatttcttcatggagcttctcttcgatctcagggtattttcatgagaatcaggagcccatatctcagagttgtgctggtggtctctgtccccgcaaagaacagtcggccacagtcacggtggataccgtccattgtgtacaagcgctctgcactgtgcttttccttctccatttccacgagcaggcagtcggtgagtcccggggacagttggggtccagagattgatggtgctccttcaccctttcagacacatactcttttacttcagccacattttttatgacttttctgtggcttccaggcaagtagtgtagaaagctgggaaaattattgtaaagctggagccagggagtgctgagtaggtggaagttctcattaaacaaatacatcagccttagaaacttctcatcattgtagtcaaaatgcttgcggaagaggatgtcggctatgacgttgcagggcgcgcagccgatgaggaaggtggggtcaaaaggctggccttgggtcttcctgagtgcttccagcaggaagtgggcctccctctggatccggctctcattgccctgtttccccatcccatagttccggagggtggtccccggccgtaatggccgaattcccgggcatatgtccggtaccgtcgactgnnnnnnnnnnnnnnnnnnnnnnnnnnnnnnnnnnncggccgcttcctcgctcactacttcgctgcgctcggtcgttcgctgcgcaagagctaggccctatagtgattatagactt

SEQ ID NO: 134724 - DNA, 1075 bp, Homo Sapiens
  misc_feature (472)..(488): n is a, c, g, or t
  misc_feature (526)..(953): n is a, c, g, or t
  misc_feature (989)..(989): n is a, c, g, or t
  misc_feature (991)..(991): n is a, c, g, or t
  misc_feature (1002)..(1002): n is a, c, g, or t
  misc_feature (1018)..(1018): n is a, c, g, or t
tttttttgaatttaatcaacgtgttcacacacagcatttattttgtaagattaatttttacaaaccatccacaacttgttcaaacctttggctttatcctatctaatttcaaacaaatgcccagccttaatttattacaattatgattcgtagactttcactcaattacataaattcactctcggttgaggaaaagagagaggtggcagaggattaatccaaaggatcctggtgtccactacccttcaaagccagaccctggtggggcaagtcctgccaagtcatcaggtgctgattaaatgcagggcactgggtgggaagcaaattcctaaaatgtggttctttcccagaagcatcttataatctagctcaggggcttgcagctccaactcactccggaatcacctgggagcttctgaaaccattctgatcctgaactccaccctaaataaatcaaaactcttggtccatnnnnnnnnnnnnnnnnncctgagcaggcggccgtccacctcgtgccgaattcttnnnnnnnnnnnnnnnnnnnnnnnnnnnnnnnnnnnnnnnnnnnnnnnnnnnnnnnnnnnnnnnnnnnnnnnnnnnnnnnnnnnnnnnnnnnnnnnnnnnnnnnnnnnnnnnnnnnnnnnnnnnnnnnnnnnnnnnnnnnnnnnnnnnnnnnnnnnnnnnnnnnnnnnnnnnnnnnnnnnnnnnnnnnnnnnnnnnnnnnnnnnnnnnnnnnnnnnnnnnnnnnnnnnnnnnnnnnnnnnnnnnnnnnnnnnnnnnnnnnnnnnnnnnnnnnnnnnnnnnnnnnnnnnnnnnnnnnnnnnnnnnnnnnnnnnnnnnnnnnnnnnnnnnnnnnnnnnnnnnnnnnnnnnnnnnnnnnnnnnnnnnnnnnnnnnnnnnnnnnnnnnnnnnnnnnnnnnnnnnnnnnnnnnnnnnnnnnnnnnnnnnnnnnngcgcgttgcggggtttcccaaagctcggcccccgananatcacaaatcnacccagtcagagtggngacccgcagactatagaacaaggtttcccgtagtcctcttgcgccctgttcgaccgc

SEQ ID NO: 134725 - DNA, 1387 bp, Homo Sapiens
  misc_feature (65)..(65): n is a, c, g, or t
aaaccatggaatccttatatttttaaggggaatataaaaaagggcctggaaaaatttaccacttntccagtgggccaaactttctgaaaaacatccatgaaaggccttttataagggcagtgaggtccccaaatgggagtatttttgccaagaccagcctttaaaatgtagctctctggtggctaagtccagggtctgggagttctagatgtggggctggctcagatggtcttggcccttgtttgctgccctgatccctcactgaggcagatgtgagatggagtacgtcactgtgcccagccgagtgtgtttccttctcagagcctagctttggggcccctgcccaggcggggtcccgaggctgcagctgtcaccaggattctgcttgccgctctcagagtcttctgcaatgacacttagcttgtcaaaaacatcattctcatccgacaatggaaaggagaaaaacagaagtgtgttatgatgaggatggcccaaaaactctttcaggtgctgtggaagagaattcctaggggagaaggcgtactttgtcttcttgtaaacgcaccacagcaaggcgaagcagccgaggagtgccaggcagaccatgaagaccgaggccatgaggatgacggccaccatccaggaggggaccgtttcgtcatgggttgtttgctcacagacaggctcactccattccccagctttgttccgatcaggaagaaaccctcgaacttgaacacaataagttgtccatggctccaggtttctgaggacctcaaagtcatactggggagtaatttgaaacttttcatcagtaccgtttttccagtattgcacattataagtccatgagttatacacattcttcatagtccaagtttcgtattcattctcaattttaggggctaagaaacgcatatgtaaagaatcagcaagtacttctacttgcattccagggggtccaataatggtgtcatccacaggacagaaggtgatgtttacccagtctgaatgctcatctgcaaattcagccctgactctcaaggtgtggtcaccatacttggaaagacttgagaaatcacattccgtcaaggtagtattcatgcatttatcttggaatatcctataacttaggtactgagctgtgaaagtcaggttccctttggcaaaagcaggtgactcccactgtagaatgttcttgaaattaacagaattcattctgacattttcgggaggtggtaccattcccaatgctgacaccagcaggcagccacccagccagctcccaaggctccacgccatggacggacgctgggggttccgcggcttcctccaagcacacgacccccgcccgcgcccgggagagcttgtccgcggcggcttccgg

SEQ ID NO: 134726 - DNA, 997 bp, Homo Sapiens
  misc_feature (30)..(30): n is a, c, g, or t
  misc_feature (120)..(120): n is a, c, g, or t
  misc_feature (139)..(542): n is a, c, g, or t
  misc_feature (572)..(596): n is a, c, g, or t
cccgaggactccaagggaaccttgttcttntatccttccgttccccacctcgacttacgtcgatttttgatctcgtcaggggccgagctattgaaaacgccagcacgcgcctttttacgntctgcccttttgctgcccnnnnnnnnnnnnnnnnnnnnnnnnnnnnnnnnnnnnnnnnnnnnnnnnnnnnnnnnnnnnnnnnnnnnnnnnnnnnnnnnnnnnnnnnnnnnnnnnnnnnnnnnnnnnnnnnnnnnnnnnnnnnnnnnnnnnnnnnnnnnnnnnnnnnnnnnnnnnnnnnnnnnnnnnnnnnnnnnnnnnnnnnnnnnnnnnnnnnnnnnnnnnnnnnnnnnnnnnnnnnnnnnnnnnnnnnnnnnnnnnnnnnnnnnnnnnnnnnnnnnnnnnnnnnnnnnnnnnnnnnnnnnnnnnnnnnnnnnnnnnnnnnnnnnnnnnnnnnnnnnnnnnnnnnnnnnnnnnnnnnnnnnnnnnnnnnnnnnnnnnnnnnnnnnnnnnnnnnnnnnnnnnnnnnnnnnnnnnnnnnnnnnaagaattcggcacgagggcggctgtaggcnnnnnnnnnnnnnnnnnnnnnnnnntaaatttaaaccttccaaatttattttaaatgttaagagtccaggagttggcagcaaagtgcagaaaacagaatatttttacatcttagagatgactatacaggaaatgacattcattcactctattattccacaattatgtatcaatatgtgtgggcaagagggcagatggcaatacagtaaactgaaattgaaaaagggacagcattctcatggcacactaaactactctacctgtttagctggaggtaacatttatagttataactgagcactcatgaatggttttggattgaggctaaatctctataaaatggggttatttcatttggaaaaagcactagacaatcaggtctgggttcaaaccctatctgacttgactctttcatattacacttacc

SEQ ID NO: 134727 - DNA, 1378 bp, Homo Sapiens
  misc_feature (868)..(1297): n is a, c, g, or t
gggcgagagagtatgaagtcgacggcgcgccgaattcggcacgaggcgagcaaggacgggcgcgggcggggatactcaaagccaacagctggagtcagccctcgtgtcccgggctcacagtggcacgactgaatcctcagagtcggctggcttttgagctctcacgattggggaggagggggcgtttctggttcgcagctccagaggattgcgttccttcccccatacctgtcccccacagtcacgctctgccctgacgtgccgcatttgacaagttaccccctcgccacatacaacttccacccacgtccgagttaactttgttcttaaccttcctgagactaccctcggcctccaggtcttttttcgccagttcatttttgcccataagattgagtttcgagtttcagatatcatgcagatcgtttacctttaagactgagcactcttctgatactcttcttccctaaaaagttcatgctcacgagagagtttgtgggaaaagtgaaagccagtacacgcaggaaactatggctgagcacggggctcacttcacagctgcttctgtggccgatgaccagccatccatctttgaggtggtagcacaggacagtttaatgacagcagtgagacccgctcttcagcatgtggtcaaggttcttgcagaatcaaatcccacccactatggcttcttgtggaggtggtttgatgaaatctttactctgctagatcttctgctccagcaacattatctgtctagaaccagtgcctcattttctgaaaacttttacggcttaaagagaattgtaatgggggacactcacaagtctcagagattggctagtgctggcctcgtgccgaattcttnnnnnnnnnnnnnnnnnnnnnnnnnnnnnnnnnnnnnnnnnnnnnnnnnnnnnnnnnnnnnnnnnnnnnnnnnnnnnnnnnnnnnnnnnnnnnnnnnnnnnnnnnnnnnnnnnnnnnnnnnnnnnnnnnnnnnnnnnnnnnnnnnnnnnnnnnnnnnnnnnnnnnnnnnnnnnnnnnnnnnnnnnnnnnnnnnnnnnnnnnnnnnnnnnnnnnnnnnnnnnnnnnnnnnnnnnnnnnnnnnnnnnnnnnnnnnnnnnnnnnnnnnnnnnnnnnnnnnnnnnnnnnnnnnnnnnnnnnnnnnnnnnnnnnnnnnnnnnnnnnnnnnnnnnnnnnnnnnnnnnnnnnnnnnnnnnnnnnnnnnnnnnnnnnnnnnnnnnnnnnnnnnnnnnnnnnnnnnnnnnnnnnnnnnnnnnnnnnnnnnnnnnnnnnnggcgcgttgctgggttttcattagtccgccccctgacgagatcacaaatcgacgtaagtcaaaggtgggaaccgacagaca

SEQ ID NO: 134728 - DNA, 970 bp, Homo Sapiens
  misc_feature (595)..(595): n is a, c, g, or t
  misc_feature (668)..(668): n is a, c, g, or t
  misc_feature (673)..(673): n is a, c, g, or t
  misc_feature (701)..(701): n is a, c, g, or t
  misc_feature (758)..(758): n is a, c, g, or t
tttggctttgaataatttttactcattatatcatttatcatagcataacagcgtacattccaaaaaggaaggcccaacataaactgagaaattgaatagatacatccataatccctttctattctaatccatacacaaatattttatcataatggttttagaagtgaatattatttctatattcttttcccacacttttcactatatatcatagacactttcctaaaatttataaaatcttcacatgtaacaacagcaagtgctgtaaggaacagattacaagctatctaattggaagatcatgtagtaaaatgatgcactaaaatatggttttccagcctaagttctaaacactacagcaacctttaaattttctcaataagcccactagtgttagcattccatttactctttatggaaaaagaggtctaacactggcagttggctttggcatatgattttctctgattcaggtctgagtgctttctgcaaggaaaagtgccagtatttattattttcataggaatatgtcataagatcaagtttaacattgtatatggaattgccaggttgaaaagtcgttcatagactttcnccctttcttttccagaacaaatttgagacacacaattaacagagggctggaagttttcccacatatatggttnttatnagtagtcttccaactacatgtactaccnttaaataattttttaaaagaaatgaaataaaaggaagaatcccagctgatttacaanactagtacattcatagagttctcttcagtatgagttgctgatgctaaatagttatagctataatgaagctttcacactgataatgtaagggtctctcagtagagtcttgatgacatagtcagatcagctatgtttcacacgataatcaatggtcctcagtagatcctgagttataggatgatcgctgaggatccaatgatgatcatagtttc

SEQ ID NO: 134729 - DNA, 2193 bp, Homo Sapiens
  misc_feature (132)..(576): n is a, c, g, or t
  misc_feature (594)..(602): n is a, c, g, or t
  misc_feature (658)..(744): n is a, c, g, or t
tacggcaggtcgaacagggggcccggaggaattccagggaaacccctgtatcttatagtctgtcggtttcccccccttgactttagcgtcgattttgtgtgctctccaggggccggagcttatgaaaacccnnnnnnnnnnnnnnnnnnnnnnnnnnnnnnnnnnnnnnnnnnnnnnnnnnnnnnnnnnnnnnnnnnnnnnnnnnnnnnnnnnnnnnnnnnnnnnnnnnnnnnnnnnnnnnnnnnnnnnnnnnnnnnnnnnnnnnnnnnnnnnnnnnnnnnnnnnnnnnnnnnnnnnnnnnnnnnnnnnnnnnnnnnnnnnnnnnnnnnnnnnnnnnnnnnnnnnnnnnnnnnnnnnnnnnnnnnnnnnnnnnnnnnnnnnnnnnnnnnnnnnnnnnnnnnnnnnnnnnnnnnnnnnnnnnnnnnnnnnnnnnnnnnnnnnnnnnnnnnnnnnnnnnnnnnnnnnnnnnnnnnnnnnnnnnnnnnnnnnnnnnnnnnnnnnnnnnnnnnnnnnnnnnnnnnnnnnnnnnnnnnnnnnnnnnnnnnnnnnnnnnnnnnnnnnnnnnnnnnnnnnnnnaagaattcggcacgaggnnnnnnnnnaagaagaaagcatagaggttgattggggtggggggcttgctagaagcttccatttnnnnnnnnnnnnnnnnnnnnnnnnnnnnnnnnnnnnnnnnnnnnnnnnnnnnnnnnnnnnnnnnnnnnnnnnnnnnnnnnnnnnnnngtgtcatgtacagaaaagggtcctttggggaaagggcaagggttgggatttttctggtcactgacttgaaatacatttttgagagttttgtccttcttgttttatggaataaaaagtttggcctttttattgcatgaaactaaaattgggaaaggtagggggcgtggatggggtgggagggggttgaggggagcagggagatgccctccccaccagctcctggataatgacacctcacttcttgcataatttctggcatcttcccgcctgcaatgcctgctctctcagcgtctcggagaaggggggatcacacactcatcgtcatgcttggagaataattgtcgttctgaaaggagtggaggaagttccctcctagctcgccgtcatctcgaggggtgcctggaggattgctaatgccacttatgttgttaggagaattttttggaagtccgtctatgtcgcctgaccctaatgatccattcatgtggtgtggctccatgccacccatgccgcccatcggaccgtccgagccgggacccatcgggaagttggaccggctgcctccaggcggcactggattaatcattgtgtagatgttgtcactggaatttgttgaatctgcgggactgggcataatgggtgttccttgaggaccgccaccaccagggggtcccacataggtaccaggtgatgaggaggagtatggaattgagttagcactgttaaggattgggccagggtctgccagctcccgggcccatgttaaatcccgggcatggcgggccgagggagtttggtggtggtctcatgccgctgccgtaattctgtgggcggggaccccatgggccccattgcctcggggagggttcattctctgcattgatcctcccatgttggggtggccttgttgtcgtgtgggatccatagaattgggcagcaatggctgtgtcccaggaactcctcccggaggctggtttcccattctgatcgggggcctggggccgcctgcgtatcgcggtgacataaaaggctgactgtggggtcccatcatgctgctaggattgtgaggtggaggctgtgcgtgcggcgagggctgtgaccccggaggaccctgaaagaaacctggcgggatggggcctcccggcatcccatcgttggggggaatgttgccaagcacggggctcggggcagctgctgcactataatcatgaaaggcttttgcttcacttgaatgttcacaagtgtctctcctttcaggagctgcacagtaaaggtcccaaaatacacaccaccacgagtgcaaaacccaggcggttctcccagcgtgatgtttttttcccatcgaatctccgataagaaggtctgtgcagatttctgtgctcctacgtgcagtaaatattcgtagacgtataaagctaacttttcccgagcctgcctcgccatcacccc

SEQ ID NO: 134730 - DNA, 693 bp, Homo Sapiens
tctttttaaaatgtgagttccaataaaatttaaaaattagattccaacctgtagattaaaatgaattaaaaaatacaaaatcatatacaacgctctcttcacagggatgttacatgccatgagaacaggtttctctgtcatgtgatatgaaacagggaagcagatgcctttaagtcaggatggggacaggcccttgggcctttcaagattattacagacaactccaagtagctagaggcctggccttaccccccctgggtaaggaggagcttgagtcacaccatagatccagactatctggctgacccgaggagaaggtctctgggacagtctcctctctttccctgactctcttaggcctgaggagaaaggctggggtctggagatgctggtcttgctggggtcaggcccaaagctgatctcacccatttgattcctatgggccggtactttgcaaagctgttacatctgttctccttaggaaggaaaatccccctgctatcagtggctggaatgggtagaggacctctaccacagcaaggatatccagggactatccatgtggccatagggaagcaagtgctgttttgtccctttctctgttcagtctctcctcaaacactcatattcagagaggcctttcctaacatcctatctagaatttgagtgtttgaggagagtctccgtcgaact

SEQ ID NO: 134731 - DNA, 904 bp, Homo Sapiens
  misc_feature (476)..(514): n is a, c, g, or t
  misc_feature (642)..(695): n is a, c, g, or t
  misc_feature (758)..(771): n is a, c, g, or t
caatttagagtaaatgtattatttggccatcttaacaacaagggaagatagggtattgaaaagggaggaaaggggagcaaggcaggcagtgggaggtggggtagagtggtagatagtgtgctggccaaggaccctctacctctgctgtgtggccctgggccaagttatcacttctctggacccttggccctgtagttctctgctctgtccagctctcaggggcctagggatctacagttcttgggatgctataaaccaatgtaaccatgcccactaagtggcccaccaaaccctatttgggtttcctaggctgcagctcggcctgtgactcaaaaaagggggagcaaaaaataaatcacttggctgaggtgacagagattcttcttttttaatgagttggactcaaagaaaacatggtgcctggacagcctcacccaagaggtgctggaccactaatgctacgataaatactgtcnnnnnnnnnnnnnnnnnnnnnnnnnnnnnnnnnnnnnnnatctcatttgttttttacttatgaaaataataagctatcaccaacttggataggcttcatcactaaattagcagaaaccagctcagcacaaactctccagagataaatactggtggctcagtcaggannnnnnnnnnnnnnnnnnnnnnnnnnnnnnnnnnnnnnnnnnnnnnnnnnnnnntagaaggcgctacatgagagtaaccagccaatactgtgttacaggccgctgcacgtgaagggnnnnnnnnnnnnnnctgagcggggtggtgggcagagaaaggaaggaaggaaggaaagggagagggggaaaggccaggcaggaggagtggactctgtctatggtttcccagtccctgcaccagttgcctatggagggcagggcagctc

SEQ ID NO: 134732 - DNA, 1054 bp, Homo Sapiens
gttaaggaggaaaaaaaagtagatgactccctcaaggtaaagagttgtgctattcaacaaataaacttcctcttccgtttcttctctctcctcatctgtgagattcagttgaacattattgaagcggggtcttggtttgccgtctgggccatatgccggaggatatctttttttgttataatgccaaggaggcgcccattgtgagttacaaggcactgcctcagtcccagctttcggaaaatatccaccacgatctccattggggtgtggtctgtcactgtaaaagggctcatgtcaagaatgcttcgaagcttcaatggccgaggactttctgctggaagagatggggtgtgctgtgcaaaacacacccgagaactgccaacgataccttcttgttttttcctggcactttctattgcaattgtcaggtctcttctgagggcaaatcccactaatctctgagattcttttgacattatgacaggaaatccattgtagctggtttcattaatcatgttttctatatcatccactgtcatattgtcctgtgtcaggacagctaagggaggatcattccttcgaggtctcataacgtcagcagccagggtggtatgagtgaattcttcttttgcatccaagaaagggtatccatttaatcggatgtgtgcttcataaatgccttccctgccaaaggcatctccaacccatttactggtcatgactgcagccataaggggaacaatatattccaagcctccagtaagctcaaaaacaataaccaccagggagacagtcattcttgtcacaccacctaagcatgcagcagcaccaaccatggcataaaggccaggtgtaatgcaatcagccccgacctcacaccactccttaaagataaaccagtcgtggtgatagtaggcaagctgctccaccgcagtccccacactccttcctgcgatcgctccaatggccatgccggacgcgtgggtcgacgatatcccgggattccgaccgtaccagcctgctttttttacaacctgttcatagttccatgccg

SEQ ID NO: 134733 - DNA, 1084 bp, Homo Sapiens
  misc_feature (187)..(187): n is a, c, g, or t
  misc_feature (214)..(214): n is a, c, g, or t
  misc_feature (232)..(233): n is a, c, g, or t
  misc_feature (305)..(305): n is a, c, g, or t
  misc_feature (326)..(326): n is a, c, g, or t
  misc_feature (985)..(999): n is a, c, g, or t
tagcccccagcttacatttgctccgctgttgtgttgaatgtgacgatacaatcacacagaaacagtatgcatgttccgaattatacgctcctataggaattgccctcgagccaagaatcgcaccgagggagatcataagaaactcctggaaaaaagtagaaccagtcagatagaaattgacatcgtnccaaagcaaccttagagatcactggcnccaagtggcatctcctgnnccacaaagaaaaaaaacgtgactaccagcgtctgggatgccccagcccggacgaatgcctcaaaaaacatgnacatcacagaacacatagatnttccacccctatacagcagccagcaatggagcctctttgcaatggcaatctccccacgagtatgcataccctggaccacttgcatggggtttccaaccgagccagcctgcactacacaggggagagtcagttaacagaggtattacaaaatctcggcaaagaccaatatccacaacagtcgcttgaacagattggcacccgaattgccaaagttttggaaaagaaccagacgtcctgggtcctctccagcatggcagccctctactggagggtgaaaggccaaggaaagaaggcaatcgactgcctccgccaggctctgcactatgcgccacaccagatgaaggatgtgcccctgattagcctggccaacatcttgcacaatgccaagctctggaatgacgccgtcatagtagccaccatggcagtagagatcgcaccacactttgctgtgaaccacttcactctgggcaatgtctacgtggcaatggaagaatttgaaaaagcactggtgtggtatgaatccacattgaagcttcagcccgagtttgtcccagccaagaaccgaatccagaccatccagtgtcacttaatgctgaagaagggacggcgctctccttagtgcacttcttccttctctctttctctttactcatgctctnnnnnnnnnnnnnnnggcgccgctctagagtatccctcgagggcccagcttacgcgacccgctttctgtacaagtgtcgctatagtgatgtagtagtccc

SEQ ID NO: 134734 - DNA, 741 bp, Homo Sapiens
  misc_feature (699)..(699): n is a, c, g, or t
atcggcacgaggatagatatgagatatagtctgctattcagtagttgagtgaacttggcaaagacacttaagctctctgagtcatagttttctcatttatagaagggctgtaatagtagtatcaagctcacaggattgttctaaggattaatgaaggacaggtggaacagaaagtgctgagcagagtgccagcacttagtaaatactcagttgaatggtcatgacttgtgttactgaacttaatcttggtaataaatgagtatgttcttgaaaggacaccagccttggctaacattcctttgcagaaccagacgtcctgggtcctctccagcatggcagccctctactggagggtgaaaggccaaggaaagaaggcaatcgactgcctccgccaggctctgcactatgcgccacaccagatgaaggatgtgcccctgattagcctggccaacatcttgcacaatgccaagctctggaatgacgccgtcatagtagccaccatggcagtagagatcgcaccacactttgctgtgaaccacttcactctgggctatgtctacgtggcaatggaagaatttgaaaaagcactggtgtggtatgaatccacattgaagcttcagcccgagtttgtcccagccaagaaccgaatccagaccatccagtgtcacttaatgctgaagaagggacggcgctctcctntagtgcacttcttccttctctctttctctttactcatgctct

SEQ ID NO: 134735 - DNA, 1092 bp, Homo Sapiens
tgattcatcccaccccaggctttttcaatttttccattcccagtagaccatgcccagagtgaaatggttcacagcaaatgtgtcgaatctgtactcccattgtggcctactatgacggcgtcattccagaccttggcattgtgcaagatgttgccaggctaaaatcaggggcacatcgttcatctggttggcgcatattcagacctgcggaggcatcgattgccttctttccttggcctttcaccctcagtagaggctgccatgctggagaggacccaggacgtctggttcgttttccgaaactttggcaattcgggtgccaatctgttcaagcgactgttgtggatattggtctttgccaagattttgtaataacctctgttaactgactctgcccctgtgtagtgcaggctggctcggttggaaaccccatgcaagtggtccagggtatgcatactcgtggggagattgccattgcaaagaggctccattgctggctgctgtataggggtggcaaaatctatgtgttctgtgatgtcaatgttttttgaagaaactgcaagccaggtactcacgatggcagtcagctctacccagcggagtttgaggcattcgtccgggctgggccatcccagacgctggtagtcacgtttttttccttgtggcccaggagatgccaccttggggccagtgatctctaggtttgcttggtaacgatgtccattttctatcttgagcctgtttctttatttttttccgacggagttttcttatgatctcttttgtggtttctcttggtcgatttgagttggaatgtaatccattctgttgcttcatcatcttcacttctgcagtttccattgcttgatgttttggccgctctagcagcaagtgtttctttctttttcttggttgaaactttcttcattacattgcgatagaaatagggttctccttgatcattttcaacttcctcggttagatatttgtaaagactggaaatgtgctgataatagttcgatagacacaggctcaagatgggtaacaccatttctttcatgttgtgggtttctgctgcccagaggcacgcca

SEQ ID NO: 134736 - DNA, 771 bp, Homo Sapiens
gaaacatctacactttattttccaactcaacttttttctgttaaaagccaaccatgtaaaaactgatgacaggtcacactggatggcagaaaatacagtactgcttttaactactctgtacaagggataaatgactaagggcactgtacctcctttcctccccttctctgagatcagtggtctgagcactttaggagcttaaaatgcaggtgcagggagctaggaatcagaggtgtggcttgcatttcaacctttaaggtcaattggttagcttgcttttaccacaaataaagctcttcttaatttctctagtacagtcttaacttgatatgaagcacttacacgaggaatggtgcagacaaggcagctttattgtactttgggggagaaaaacatgattccatttacggggaaaaaagccattgacactcagtaagcaacactgccatctagtggaatggtgacacaccaccaagaatttcaagacccgataggaaatgtgagtggatttggtttcaattttcaccacaaaacagcacttttaataagctggttttcagagaacttcagattttttttgagaaactactttttatctttaaaatgcataaatgtatgtgttttctctgttttggggggtggttaagaatgagttgatttttcttattagagcataaagttctctacttgaaagttagaaaacactttggggcaacctgcctccttgaacatccatcacttctgcttgacagtctaacagcaacccctgat

SEQ ID NO: 134737 - DNA, 1028 bp, Homo Sapiens
  misc_feature (134)..(857): n is a, c, g, or t
gttaacaaatagcccccgctaagaactttgcccgcctacatcctgggtggtatcctttcccagtgctggtccatggcgttagtctgtttaccggttgatacagacgtaataaccgataagcgaagcgttcggtnnnnnnnnnnnnnnnnnnnnnnnnnnnnnnnnnnnnnnnnnnnnnnnnnnnnnnnnnnnnnnnnnnnnnnnnnnnnnnnnnnnnnnnnnnnnnnnnnnnnnnnnnnnnnnnnnnnnnnnnnnnnnnnnnnnnnnnnnnnnnnnnnnnnnnnnnnnnnnnnnnnnnnnnnnnnnnnnnnnnnnnnnnnnnnnnnnnnnnnnnnnnnnnnnnnnnnnnnnnnnnnnnnnnnnnnnnnnnnnnnnnnnnnnnnnnnnnnnnnnnnnnnnnnnnnnnnnnnnnnnnnnnnnnnnnnnnnnnnnnnnnnnnnnnnnnnnnnnnnnnnnnnnnnnnnnnnnnnnnnnnnnnnnnnnnnnnnnnnnnnnnnnnnnnnnnnnnnnnnnnnnnnnnnnnnnnnnnnnnnnnnnnnnnnnnnnnnnnnnnnnnnnnnnnnnnnnnnnnnnnnnnnnnnnnnnnnnnnnnnnnnnnnnnnnnnnnnnnnnnnnnnnnnnnnnnnnnnnnnnnnnnnnnnnnnnnnnnnnnnnnnnnnnnnnnnnnnnnnnnnnnnnnnnnnnnnnnnnnnnnnnnnnnnnnnnnnnnnnnnnnnnnnnnnnnnnnnnnnnnnnnnnnnnnnnnnnnnnnnnnnnnnnnnnnnnnnnnnnnnnnnnnnnnnnnnnnnnnnnnnnnnnnnnnnnnnnnnnnnnnnnnnnnnnnnnnnnnnnnnnnnnnnnnnnnnnnnnnnnnnnnnaagaattcggcacgaggtagaaaatgatttttatccaatgctgaaggtgtagtgaacatagaacagttgcaagatttgttttattgagcaacgtctttaaagatacaagaaacaggccatacactacaatgcaatgtgactgaaacagtatgtttaagtttcttttgccac

SEQ ID NO: 134738 - DNA, 985 bp, Homo Sapiens
  misc_feature (886)..(886): n is a, c, g, or t
tttgtgaacgaaattttttatttacacactgtatctagaagcagatacataaattcttatacaattaatttccaaaaatgtgcaagaaattactataatttgtttacaaaccaaaacacgtattaaaatcaatggactttggataattcattctgtggtgttctcagtacaaatggtacacacctgatttgaaacatacagaaaaagtgtaaactaccgcaatctgaattgcaagtattaatttcatggcactccaacgactatgaaatttctttcacccaacatgtaaatacttgttacaaaattctataagaatttttcataatctctggatgtagagtttggatcacttttcagaaacagcaactacacacttcgccatgttatgactgattaataaaaagaatgtttataaaaacccttctttacaggattaaaaaagtattaaaagaaaccatatttgtgattgctagtgtaccaacacttttagaattttaaagttatttacggaactggctattgttccttattagagttttcaagaaaactgtctattgctggtagtgtgatttcattttgaaattaagacttcgcatttaatgaaaagcaattaagatttaaatgaaaatgtattattccgattcattcataaagcagtatctctcatatacaatgtgaaatgttattaaaactggcatttctgtaagcattgttacaaagatattttagacttgtagcagtagcagagacattgcattaacctatgttagattttataacttttatcctgtttcaagtaatactggctcaagaattacaacgcatactttgggttttgtttcctttatgccaatgatatagccttttggactgttttctcacagangatggtgggtgcccgtgtactggttccttaaaacattttaggcatgatattcctgtgacaatttgacttctaattcagatacctcggcggatctggctc

SEQ ID NO: 134739 - DNA, 1002 bp, Homo Sapiens
  misc_feature (737)..(738): n is a, c, g, or t
  misc_feature (777)..(777): n is a, c, g, or t
  misc_feature (791)..(791): n is a, c, g, or t
  misc_feature (918)..(918): n is a, c, g, or t
gcaaaaatgggcctttattgccaggggcaggacaacatgtgtagaggctgctgttctgactgtgaggagaaggggtatctgggaaggtccttctggtgggactcaggctttcacgctggttaggtggtggcagcagcttcctggagggagatgctataagggggtggggcaagccactgggaaccaatctggaatgagaccaagggggttaggacatttgctgctaggctgcccttacacccagctgtcagtcatccactgggcacttgatgggacccaagttgacctggctccagtgtcccagctctttcccacaataccccatgcggtttaagtcctgggaagaagaaactggcacctgtggtttggggtctttcattagcacctggcactgactcatcttcattcccctcaccctccttcagaacaatggtagatgtgaaaagattgattgaggccactactggagccaggttcagggcccaatatgtgatcagaatcatggatatccatttgagaccaaggttggggctcattctgtgaccaagactaaggctcagtcaataactggcatcaaagctcagtctgtgactaggatccaggctcagtctggggccagaatcagagttcagtgattaaggctcagtgttcagaatgtgaccagaatcagggcctagcctgggatgggggccagggctcaatctatgactgagatgaaggacagtcttcctacacannaaatagggaagcacgcttgacttttactttcacataggnccctgtgcattggngacagagactggctctcacagcatgcacacagtgggctcctcaatcgtctcttcagatgaggtttgcagctgggtttgtgctgaggatatcgacgactgctgatgacatcacatcaggagtggtganatgcgatcatggcatatctctctgcagcaggagatacatgctttcacgtgtgtcacctcgggcgattctgcctcggggcaattc

SEQ ID NO: 134740 - DNA, 1013 bp, Homo Sapiens
  misc_feature (688)..(688): n is a, c, g, or t
  misc_feature (790)..(790): n is a, c, g, or t
  misc_feature (807)..(807): n is a, c, g, or t
  misc_feature (820)..(820): n is a, c, g, or t
  misc_feature (911)..(911): n is a, c, g, or t
  misc_feature (914)..(915): n is a, c, g, or t
  misc_feature (940)..(940): n is a, c, g, or t
  misc_feature (987)..(987): n is a, c, g, or t
gagatgaaatcttttttattttcaatttgttaaataaggtatattttcaatttgacattttccatgaaatgatgtttaaagaggcatttgagaataatctcaaaataatcgataccgaaaaaaatgctttggttttgtttaaaagggtaaaatcctttgggatacttagctatccaaagtgtctctttctggaggtttttcctcttgaagagtctgtctgcagggatgatgaagacaaggcaaggaagagaaaagaaggtgatttcccataggtaagttctagtgggggaaaagaagtggcattacttagtagaagccttcaaaatttatcaagggttgaaagtagatgcctcggattgtgggtttctgagagagatgcgtctagttgtttataaccccttaaggagagggggaagagcctaagagcagggaagacttgggatgaatgttctcgaagcttaggtgccccatcctaagctttggatctgatgagaagctgcggcaatggaaagagaagggcagagcacaccggatgtgaggtgtgaagagtgaaaagatgttattgggggccagaacccaaaacaatcagactggcagctgatggtgatggtgtgctagtcaccctggctattagctctagcatcagaatgctcagtgacatttctgagtggggcttagtttgggaggngtttgctgctgacaaagctggatggagtcagaattagggggagctgatgagattaagaatattgtccgggatgagaacagactgcattgcttttcctgcttncgtctccttcaacctgngactgtcagctgngcagtgcctgtcaagcttagcttctactttggctgcccaactcaagggtcatctgtgtgtggccacacaacttttctagtacatcttttcntannagtttacaatgagtacattacaganatttgtcaataaatttatgagtctctcgtgcgaatcttggccgaggncaatccctaaggagcggataatcgga

SEQ ID NO: 134741 - DNA, 693 bp, Homo Sapiens
  misc_feature (115)..(181): n is a, c, g, or t
gttttgtacatactttttatttgttgaataaatgaatatttgtcaatatgtacataaccacatagagcgagcattagatttagagagcaaaatatttgggttctaatatgcaaannnnnnnnnnnnnnnnnnnnnnnnnnnnnnnnnnnnnnnnnnnnnnnnnnnnnnnnnnnnnnnnnnnctaggttattcggacctatgtggcctaccacacaggcttattgcaaggttcaaatgcagaaacatatgaaagtgctattatgaatacaacttagagcaatacaaacaaaacaaggaacagcaatggaatttcaagctgaaattcacaccctcggattgtacccatgtactgatggagtcaacaagaaagtgacaaaatagctgattactaatgagaacgaatatgccattcttctgagtgggaagaattctgcaacaccctgtagcttgtcgctgcaattaattacttcccaaacttcacaaagatgtcagagacccaccatcaataattctctcacagaagcacaagggccaaatgtcccacgtttatttacatatgaaatgtgtttcatacagttatgatggatggagtgcataacacctgacagcagcaagaccttttgaggaaccgaacattgactacagtatatcatgcaagtatctatatatacacaaaagaattccttttcttaa

SEQ ID NO: 134742 - DNA, 1298 bp, Homo Sapiens
  misc_feature (1216)..(1238): n is a, c, g, or t
ctcaagggtagatttttgagagcattccaaatgaatggtctctggtcaaatgaatgaatggtcaaatgaataaatctgccctcacagagatacaaaaggaaaaggaatataattcataccatttggtttaagcctcacattcatgaagtacctcaagggtagatttttgagatcattccaaatgaagtcgaatctgccctcacagagacacaagaaaggaatataattcatacactattgcatttttaataaatcttttgaaatttgcagaattagattgtattgtgtattttcggttaaatgataattgaatgtaaatatttagatgcagcaccatattttataacccagctttagcatttcttcatattttaaggaaaccccccacctccttcttttaagggcgcttcttgctctctgaaatgccctgctaaatgcttctcttaattatttgaataaggtagtttggaataaagaaagaaaagatctctgtacatacagcatagtaaacttaatttgtgatcctctatatgaggcagtttaaaactacagataagttttagaaagactcaaagcaatatgtaaatgactgatgtttgcgttattaaggaaaacttgggatgttgggtcaagaggggaaagtgttagtcaatccactttggagcaatatcatgaaggtcagttataattccatatacctttctttgatgccacagtcagagatagaatacagtttgggtggccatggatgtgccccaatacagtacacattttttggttaaatttgttttcagatcatttcatggaatctttgaagtatctttgactctaactttgacttggtggtggaccttccttggtttttataacacctaagagatatcctttagaattacatgtattttagcataaggaaattgaaaaagtaaaacatactggtttttttcaacaagaccatatgtaaattaaatagtgaaatgtgtatgagtttcagtagaactgtaccatcaacaatgtttccataaatatgcagagttctttcttttgtattgttatttacaatattgttaaattgaatgcatttgcaatttctaggattctaaagaattgagtacagaaagtagcaattttattatttgatgataatatgagaattactgtgccaatactgttttgataaataaatagatttttaaaaataaatgtattgtacttnnnnnnnnnnnnnnnnnnnnnnngcctacagccgcggccgcaagcttattccctttagttgagggttaattcgagcatggcac

SEQ ID NO: 134743 - DNA, 1068 bp, Homo Sapiens
  misc_feature (63)..(82): n is a, c, g, or t
  misc_feature (962)..(962): n is a, c, g, or t
cgggcagtgccatgctcaaataaccctcactaaagggaataagcttgcggccgcctgctcggnnnnnnnnnnnnnnnnnnnncagtagggatttagtgcttttattatttacaacagaagttgttaaaaaccaaaattataacaaattttaaaatcttacttggcttttatgtatgattcagtaattggacagccctcagaacccagaacaggttcaaagaacttcagggctgcagtgtactcagagagaatttagggacagaaaacagcaagtgggatatacagtttaactggattgccttatctgaatctattgaccacctacaattgactaaagctcagaggctgtaactgacacttagccacttgttatatgaatatactcctaactagtttcatttagcatgaatgactccatattggtttggtctgttggttacatcataggagcctaggccaaatcagtggcctcctacaaattttattgaatgggctttaggatcctttaatcctatttattttccttgctatttttgccttccaaaagaaatattttattacaaacattcgaaaacatatttaagtgaaagccaggactagggcgaggctactgagacactcactgtcaggggctctgcagttgtgggcccctgaggtcaggtgtctccttaacttttgcatcctgggacctcacttgccttgctctagtccgagccctgacttaagtccatcctaatgttgctttctaaatataactgctattcacagttcagtgtgtatttttctagagcttttctagacacacgttagcatatatataacaataggaccttatgtttaaaaaaatgtgtctttcgtgggacattttatcaggtcattaagtgcagcctagctcattcttaaatggggtgttgcagagagtcacagcctttgtcaatttacggaaatattcccagtttgangatggggcttacttatttttagtttattgttacccggcgaatctggctcaggcattcctaacggtcggtgatcgtacaggaagggtccgtggattagcgccaatca

SEQ ID NO: 134744 - DNA, 2003 bp, Homo Sapiens
  misc_feature (126)..(126): n is a, c, g, or t
  misc_feature (256)..(256): n is a, c, g, or t
  misc_feature (368)..(368): n is a, c, g, or t
  misc_feature (372)..(372): n is a, c, g, or t
  misc_feature (385)..(385): n is a, c, g, or t
  misc_feature (614)..(670): n is a, c, g, or t
gggaagtaccgggcgcggggtacgggcgcgaaaatagtgggcgggaaataaatagcggtgccggcgcgagaacagatatcgcgcggcgccataactgagcgtgtgtactggcgcgtatctcatgcnccgcatagtgcataaatagtggacaataatcgcggtatatattctgcgcgcggcgcggatgaataataggcgcgaatgcgcggatctaggcgcgcgtccgcgcccggtataatatagggcgtgatccaancgagtgatggcgaacagcgtggacaacacgggtgggtataagagaacggcggcggcataacggacacactagagtctccgcgcgaggagtacgaggggggcctacgcggtanaganagcgcggaacganacggcgcgcgcgccttaaacgcgcacgcggcgcggctgtccacgaatcggcgggcgaccagcgcggcgacccgcaatacgcgcgcaatcataggtggaaaaatggagaggtggggtggtacggcaaacggggcgggcgacggccggttagcggtatcgggacgcggaataaaacgacgtgagatcggcgcgtgcggggaaaggtcttccaaatgaaggtaacggcggannnnnnnnnnnnnnnnnnnnnnnnnnnnnnnnnnnnnnnnnnnnnnnnnnnnnnnnncgacgaaggcggaatgcaggaggggccggcggaacaggggtggttggagagggcacacggttgggggcggtggttcgcagaggacgggacgggcgctcggtgttctcgcctgatcactcggcaaggctttcgagtggtgtgggagcgggagtccgcgtgcttcttgttttttggtaggtttctggcagagttttgggatgggtatgtgcaccggtggtttgcgcgcactcttcgtttggagtaaatacatttattgatacccatttcatatatagttcaatgaaataatctataaatataaaaagcatttttcttttggatatcaccatggtccatgtaaatactcaagtcagaatcatctgcaggaagcactccaagtcacactgttagctttacagacctgaatatacatattgcattaaacagtggcacttatgtactcaagtggtccagtggctttggaatatatgtctactgggcatgtggaatagaaataatgtgttaggtttaaatcaatggaaagggtatcaaccatcaacaaaagcaacaattatgaattcatatcctaggcaaagaaagtaccacagttgacacttggtgtcagaatactggagacaaagtatgtaaaacaatgcctgttgcagcaccacgtgctcactccaactcccagtggacagtcccccaatgccttagggtcactcgtggtcaaccaaatgcaatcaagaagctcgatagcttagaataaaaggtctgtagaggctgatatcaagattaaagtaagctaaacatttcagtgacacaatgagtttctctcctagaaggggactgtgggaaaacttttaattccctttgttacactgagcatgatcatttatctaatgcagaagaaagaacccagacatctggtactcagaacataggtgcaaaaattttcttccatttcaaagttttttcaatacttccgagggaactaatgcaaccaccgttgagctttgctctccacgtgatgcagcataaaattttctctcatttcttcaatataggaatgtcttgctgcagactatgtgtcttccgagttagcaagcaaatgcgtttaaaaggtcttagttgtgcaatgtccaaaactgaaatctgagaggcagtgttagaacttaagcaaggcagaatttttagagtctactcaaatgaaagcctaagtgaagcatataaaaattcagtcttttctattattttcaactggaattgatggcaacattccctggtaaggatgggtaactggtgttatctccaggtccaaaatatcccaactacttaaagggacccaaaagaggag

SEQ ID NO: 134745 - DNA, 1079 bp, Homo Sapiens
  misc_feature (112)..(112): n is a, c, g, or t
  misc_feature (127)..(128): n is a, c, g, or t
  misc_feature (192)..(192): n is a, c, g, or t
  misc_feature (203)..(203): n is a, c, g, or t
  misc_feature (268)..(268): n is a, c, g, or t
  misc_feature (334)..(335): n is a, c, g, or t
  misc_feature (337)..(337): n is a, c, g, or t
  misc_feature (1000)..(1019): n is a, c, g, or t
attttccagatccatatggctcgactcagtaccacttgatttgagatttagattgatgaccgcatcagtgcttccacctcagaagtagcatgtagctcccgagcattgcaanccagagagttcaacnntggaaaggatggtttcctcttctcacatttatgacatactgcaagtgcagacaaatcgatcaancaatgtgctancacaactggaagctagctttcacactgatatccagccctccatcatccacctggggtcagcttcntcactgcataaagcaaacagtcacaggggtgattcagaaattgtagatgggtttaatgtgtccaannanctaaagaaaaataatcctcaggcattccagattttgtcctctacctttgtggactttacagacattggagtggattactgtgatttttctgtacaatcaaaacataaaattatagagttagatgataaaggccaagtggttcgcatcaacttcaataacgcaactagggacacaatatttgatgtgcctgttgaaagagttcagcctttttatgctgctctgaaggagtttgttgacctcatgaacagcaaagaatccaagtttaccttcaagatgaatccaggtgatgtgattacttttgataactggcgcttacttcatggccgacgtagctatgaagcaggaactgagatatcccgccatctagaaggagcttatgctgactgggatgtggtcatgtcaaggcttcgtatcttaaggcagagggtggagaatggaaactgaagtcacctgtagataattttaataagattccaatgaccatattttgtgagatatggcacattattcacagaccatgatctttgtgatttacatataatttccttaacaatgaacatgtaacttctctcacaagagtactctttactttgtaatcatatacaatgtcaactttttagatgtttcaccactcttttgcaaataaagcatcctttctgctcnnnnnnnnnnnnnnnnnnnncctgagcaggcggccgcaagcttattccctttagttgagggttaattttagcttggcact

SEQ ID NO: 134746 - DNA, 809 bp, Homo Sapiens
  misc_feature (180)..(180): n is a, c, g, or t
attgtggtggaggaatcccaaggccacttggttcaagtgcccagggatcctcccttgggaaaaccaggctatgacgcccaggtttcacccttaccctaactggggcccggccgcgcccaaaacggaatgggttctagaaaagcttctcgagggggccgagggcgggccggacatgttcantttattttaaatttcagaggctgtttttacgttcttcccatttcttttcttttttctagttgttgatttaattcctctagagctttcagttgcagccggtcacgttcttctttttctttgccaataaaccacacctcccatggtgtcaggcggctttctggtaagcgcacctgtttctgttcttcttggttattttctgattcaacctgagtgctggcgcacccctgtaactccattcctctcaggctcgccactttggcctctgaatcatgggcatcttcatccacgtcttcctcatcatccacgtcttcctcatcctccccgtcaccgtcgtcctcgtcaaactggaagctctggtggccaaggggagacaacagcgacctggtggaattgctgcagctcagcggcagcggcggcgacggcgagcgcaccacctccagcccctgcccacgtgcgcccgtcatagggactgagcaggagtccgaggagggccgagacctgggtctgcagtcagcagagaaaccggcgtaggaagagggaaaagtaggcccccagcgccccgccgcccacatctggcccgccaagttcaaactggcggagccgcggcggggacgcgctttcccagcccc

SEQ ID NO: 134747 - DNA, 1380 bp, Homo Sapiens
  misc_feature (59)..(84): n is a, c, g, or t
gtgccaagctaaaattaaccctcaactaaagggaataagcttgcggccgctgctcaggnnnnnnnnnnnnnnnnnnnnnnnnnnaaggccatctgcagaattttaaactcgcctcttgcaatatttcacaagaatttctacaccatattttacatcgttcaaacttaaataataaatgctcaaggaagggccttggtagaaccaattgcactatctctttgaggacttgtccaatttgctggcaggtgatttcctctggggcgtggggatttttgaaggcttcgctgtggatggccgagaacctgctcggggtgtaggtctgtgtgtctgggggacagtttccacatctgagcacacggactggatttctgaaatgtcaaagtctgatgcatcactgcctcggcggctgctggccctgctgccagctttgcttccagctcgacttcctggtcggctgggagtcttcttggaatcagcaaactgtgttcggactctggcagctgcagttgttatcaagccactgtcctccccagagtggaagcctttccctgataaatatcctggaagtcgaagcttgcttccttgtattggcgttccctctgcagatggcacgggaaagtctgagcactctgctgctttacaaggagttgacattttgctgtttgtcaaccatggtttaccataattgcgtgttaaaggatggagaatcttgggtgtggtggtggcagggacctgtggggaggccgcctgcgcagcctgactggacacagaagtggatctgttgggtgaagcgcctcgtgatgatggccgggatcttcggcctcggggtcggaaagcagccataccctggctggcaccatctgctaaaatgaacttctcacgcagttccatgtttgtccttcctttggccctgcaaggatcatttttcactaagaactcatcaagtgccatccatccacctccaacacgaaccatcacagtactccgcaggatccggaccagtcgcagttgctgggagtctccaaactgatttcccaggaagaacctgtatttattatcaccaatctgctcaacttgaaatcgctttgcacatttacacttagctacctgccttgtcacctcatcttcgattcttcgtcggcatctgtgataggtttatatgcatctttatttgggtgaagggctgctacaaattcatagtagtcaccatatccatcgccatctctgtcaaagatgtctgcaactgcgctcatctccaagcgactggttggaaactttgaggaaagaattccatcaataaattcctgccgcgttattttcccatcctggtctttatcaattctcctgaagaagtccagcactcgagatttcttgaattca

SEQ ID NO: 134748 - DNA, 1446 bp, Homo Sapiens
gcttccgggtctccttgctggaacccaagggggtgctattgccagtgggtgagggaagggatggatgcagtccctcagcagtgaccacaggccctggggcaggcccagcactggctctgcggacggggggcggcggggacggggcccctccagctgcccgggagcttcggctcttgaggccagggaggctgaggaggctgggggaggggcccaggggtggctgttgccgccggcgctcctcgtggatggcccgggacccatgcagtcgccgtgagggccgatactgcagctccccccgcgtttcccgccacttcttgagctgggctgcattctcccgctcaatcagtgcttctgtcaccggcagattggtcacctcatgcaccaggaagtcttcctgcatgcactgctggggcaggttacgcagctgctccatggtctcatacatgccttggcaggagcgcagcttctccactgagcccagcgtgtggcgcagcaggaccagggccacccggaagatgatcttaacgccttcacagaaaaacatgtcccagacacgcagcaccgacgcccagggcagggtgcgggcgaagatgcacatgaaccactccgtcatgtagagcacagggtcaatgcgctgccgccgcaggtggcgatgcgccagcggggaggcccggcgcaggagtgcaaaaaagatctccccgtccagctgaatggcctccagccctgcactgtagtaacctgggaggtacttgtcgcagatctgcaccaggcaccaaaaggcttgctccgcaggcatgtgcatgagcaggaccgcagccacgggggcctgggcctggcagtaaccctcgtcaggccggtagatggtgtaggccttcaggattcggtacaggtcctgttgcccatgcccccctcgagcagcaaacatctcgtggaaagggaactggcggtgcaggtccttctcaatcacatccagccacttggggtccccaggagcccgttccagctcctcaaactttcctgggttctgctccagaagttccttgctattagacaggtactgccaggccttggctctgagagaggaggggatccccttccggcagcgcagcttcaccttctggaatcgccgtgacagccacttatcccagttactgaacatgtcctcgtgccgatttaacacccagcatcgtacctagcgatttcttcgggcctgttgttttcttgtcctttgcccgagtactggctgcccccaaggaagccatacttgtccgtcttgcgcagggccagcccgtttatctctgaatctgagcccatggagctcacatcatccgccaaggactccaaggtcccagacatgaggctcacggagtccaagtaactcagcgtgtccggggcctgccctcgaggcccagagatgccaggtcccaggctggacgtggagcccag

SEQ ID NO: 134749 - DNA, 1333 bp, Homo Sapiens
  misc_feature (141)..(366): n is a, c, g, or t
  misc_feature (1190)..(1237): n is a, c, g, or t
gtctgctgtctgcttgcacatgtgatctgctatccggatcttgaaccgattccgcgtggtgactgtaccgtcccgcacgaacgacgagccagcgatcatgacgagaagcggagagcgccaatacgcaaccccctctccccnnnnnnnnnnnnnnnnnnnnnnnnnnnnnnnnnnnnnnnnnnnnnnnnnnnnnnnnnnnnnnnnnnnnnnnnnnnnnnnnnnnnnnnnnnnnnnnnnnnnnnnnnnnnnnnnnnnnnnnnnnnnnnnnnnnnnnnnnnnnnnnnnnnnnnnnnnnnnnnnnnnnnnnnnnnnnnnnnnnnnnnnnnnnnnnnnnnnnnnnnnnnnnnnnnnnnnnnnnnnnnnnnncccaagaattcggcacgaggtcaaggcaaatccttgcttgactttgtttatttgttcattgtactgtgtcctgaggaatgcaatcttgtttctaacatctgccacaatggcattccaactgtctaccgcagcctttaattgaagtgattctaggttgcttgctgccatgtgagtcaccctggcaagctgattgagacattccttttcagtctgctctagatgaagcaaaccaaaatccctacgacactgtaagaaatacacctcggctgttaaagctctgctagtttctgcgttcagtttgcttacgtatgttttcattgtgctttccagattatgtttttccatttcccactgagatcttttcatagaaagttgctctttaaggttcttgatttcattatctttagcatggatttgacgctgtaatttggaaaccttattgattccaaaagcaacttgttgattaagagatgcgataattttgtctttctttttaatctgcatttggttttcttgccaccgaaaagtcactgttctcaactgtcttttgaaatcttcacactgatagtgcaatttataaagctgcctttgacgagcaagcctttccttttcagtttctccatagtctgtagttactttgccagctgagccctgctctatcatgtccagaatatgcaattcatccaggctatagaacttgtcttccattgcagaatcctcttgaacatcacttgcatcatcttttataagtctactgactgagtgtggatttgcttgttctttcctcaactgctcttccttttctaccacatatgggacttggnnnnnnnnnnnnnnnnnnnnnnnnnnnnnnnnnnnnnnnnnnnnnnnnctttgtttactcttaacttcctggagatctttaagagattctgttgaagattcactgggtattgaggtcccatctttattaatttctgcaaactgt

SEQ ID NO: 134750 - DNA, 489 bp, Homo Sapiens
  misc_feature (48)..(90): n is a, c, g, or t
agcaaaattcacaaattttatcttagaataaattttatcttttcttgnnnnnnnnnnnnnnnnnnnnnnnnnnnnnnnnnnnnnnnnnnnaaccataactctaactctaaatctaaccaggtgactgaatccttcatggcatattacttgtcaccctctacatcagcatccccccttcccaggagaaattgcatcttccctttcactttccttagcagaggattcctggtaactccatacagaaagattctcctggtgttcttcagacttgaggaaaagcagattcctctcacaagggtgcttgttggttcaaattagcatcatgacgttcacgaattccattatactgttaaatcagaattctgctttcagaagcccaaattcacaatatcctgaagcaccactgatttcctcaagttcacctgcattgcatttcccagaagatagaaatcaatgatgcattttgaagatcatgctgctagagacaga

SEQ ID NO: 134751 - DNA, 1063 bp, Homo Sapiens
  misc_feature (59)..(73): n is a, c, g, or t
  misc_feature (451)..(745): n is a, c, g, or t
gtgcctagccgaaattaccctcactaaagggaataagcttgcggccgcggctgtaggcnnnnnnnnnnnnnnngttattattttattaagtatttagttggaaatttcacactggcattaacaggtctagcataagtggcctaggcagtcatcccaggctccaaaatgaagatgtgcaaaagagatgccactgggaatagaaacactgagttggttcagttaggtcatcccctgcagacgtgtcatcgagcaggctgactcccacccctcagccatgccatgggtatgagaagccccttataatgaaagctgccagccctttcgtccttgtttcagagggtgggtcaggtggttggggtgagaacttgctcacggtgcacccaacaagacctgcaggtgcatataagtttagtcccaactgcagggccagacccctcgtgccgaattcttnnnnnnnnnnnnnnnnnnnnnnnnnnnnnnnnnnnnnnnnnnnnnnnnnnnnnnnnnnnnnnnnnnnnnnnnnnnnnnnnnnnnnnnnnnnnnnnnnnnnnnnnnnnnnnnnnnnnnnnnnnnnnnnnnnnnnnnnnnnnnnnnnnnnnnnnnnnnnnnnnnnnnnnnnnnnnnnnnnnnnnnnnnnnnnnnnnnnnnnnnnnnnnnnnnnnnnnnnnnnnnnnnnnnnnnnnnnnnnnnnnnnnnnnnnnnnnnnnnnnnnnnnnnnnnnnnnnnnnnnnnnnnnnnnnnnnnngcttgtcgcccgggtcgttctggtgcggtgaggggttcagctcactcacgggggggatatgtgctccaatgatcagggatttgtgagaataatttttatcataggcctgacatgcaggctccttaatggtctgtttggctttttcactcgtccgtccccgtgcagatacatggtgttgtgagtcattgggggatcccgtaggtttgacgttcattccttccctgggtgtctccagttttcctgttcgctgctgtacctctcgtgagttttcctcggagactggctgccatttatgggggttggtttgtttgtgggcgc

SEQ ID NO: 134752 - DNA, 881 bp, Homo Sapiens
  misc_feature (52)..(60): n is a, c, g, or t
ttccatttcttcttgaatacgcctcagcctttctgcttcctcttcctgctgnnnnnnnnnctgtaatgcactgaggagttcctctgagcttttaaccagtgcatcatattctttctggatttgttcctgcgtcatcatagtggacttaattttggccatcaaagtatcaatagaaatttccagattcttgatctgtttattcatctcgggttttccatctttcaacacactgactacctcattaaatttatcaagtcgttttttcagtgtgcccaccttaaccagaccatcaatgcgaggtttgtgtctcctcttgcaaagccacattcgaatagttttttgcattttaatgcaggcttcagctcgatattttattttgtttttcaatttgatgactgagagtgagcaccactgaactttcttccatcgactgcatgtgagccagtgattgactcttttaaccaactctgcttagtggtcagggtcagacttcatggatctgattaaattcttgcaaacttgccaggtctaaaaaaatactttgggtaacccaatcttgtggtcattttcatttaggctcaaagcttgaattgaaccttataagataggcttgggtccaatcttgcagtttatcgggccatactttttgttatggtggtgagtcatgaggaaggcgtgttggcataacctgattatgtcaatagaatctcgctgcacgatgtggacaattttggacttcagtggggctgtatcttaatttggtggtggatgagagcttgttcttcttcgagttgctaagagttgatggtttatttgtccacctacgctagtttccgtgttgttagcttgtcgtctgtgagttaggatgcctcggcgagttg

SEQ ID NO: 134753 - DNA, 1033 bp, Homo Sapiens
  misc_feature (194)..(733): n is a, c, g, or t
  misc_feature (751)..(767): n is a, c, g, or t
  misc_feature (908)..(954): n is a, c, g, or t
  misc_feature (977)..(991): n is a, c, g, or t
ccctctctttatcttccagtgtcaggcgtatgtttacgtgatcagcgtataccgtagccacgcgctgacggtgtcaccaccagtgacgacgctacccgatggtactacgctagttgagaagccccgctcccgaggagaagcgacagttccgtaagcgcaggtcgaacagagagccacgaggagctccaggggannnnnnnnnnnnnnnnnnnnnnnnnnnnnnnnnnnnnnnnnnnnnnnnnnnnnnnnnnnnnnnnnnnnnnnnnnnnnnnnnnnnnnnnnnnnnnnnnnnnnnnnnnnnnnnnnnnnnnnnnnnnnnnnnnnnnnnnnnnnnnnnnnnnnnnnnnnnnnnnnnnnnnnnnnnnnnnnnnnnnnnnnnnnnnnnnnnnnnnnnnnnnnnnnnnnnnnnnnnnnnnnnnnnnnnnnnnnnnnnnnnnnnnnnnnnnnnnnnnnnnnnnnnnnnnnnnnnnnnnnnnnnnnnnnnnnnnnnnnnnnnnnnnnnnnnnnnnnnnnnnnnnnnnnnnnnnnnnnnnnnnnnnnnnnnnnnnnnnnnnnnnnnnnnnnnnnnnnnnnnnnnnnnnnnnnnnnnnnnnnnnnnnnnnnnnnnnnnnnnnnnnnnnnnnnnnnnnnnnnnnnnnnnnnnnnnnnnnnnnnnnnnnnnnnnnnnnnnnnnnnnnnnnnnnnnnnnnnnnnnnnnnnnnnnnnnnnnnnnnnnnnnnnnnnnnnnnnnnnnaagaattcggcacgaggnnnnnnnnnnnnnnnnncataattacatactagaatgtaaaattataattttgccatgacttaaagagcacagttgatatcccaaaggttttgatgctaagaagctacagttattctaaatgcactaaaatgtttgaggcaattctaccttagaggcnnnnnnnnnnnnnnnnnnnnnnnnnnnnnnnnnnnnnnnnnnnnnnncctgtgagttattctgtatttgnnnnnnnnnnnnnnngcctacagccgcggccgcaagcttattccctttagttgaggg

SEQ ID NO: 134754 - DNA, 988 bp, Homo Sapiens
cctttgtaagaaggatttattagattatatggaaatggacacggtacagaaggtctgtggcacagtcagggttctgcaggaccccagagcatcagtagaaatgctggtgttccaccttccccagggccgcctttgcctgggcttcagagatgcagctgaggcctggcctccaaatgctgtgggcagtcctgcaggccatcctctgggcagactggcctgactcacggtgactattgtagtttctgtgaacctctgggttttggtcccactgttgtcgagagccttgaccaagtgtaaacgaatccattacggatgaaagttgcagccttggagggtgtcacagcagagaagaaagagcgggagcggagtttggcaggcgaacataagcgtggaccagtagctgcaagctgggaactgtcaggacagcatcttagtttggacagcaggtttccttctaaactggaggccaggagctcacagcagtggcttggctatgacaagcaggttttctagactgattgcagcacagatgtccctagatatgctcctgacccagatgagatacctgcctcgtgccgtaatcttggtctcgaggggcatttctctatttgagtcttattatttcgtggacatgtcaaagttgtttcctgtgtgtaattgttatccgcccacagttctaaacgctatttgttctgggttcataactgttatcctggtgtgcccaagagtgtctatccacataatttgcttttcctcacggccgcttccactcgggtaccggctggtctctggcatatttgtggcgcagcgcgggagagggtgttgggttggggcggccatcgcgtcttggtcactagtcatttcgtttgtctatctgtgttgcttcgttgcactctcttattgtggtttctgtgttcatatcccgtcgttctcggcttctgtgcgcacgcgtcctcgctgttgtattgtctgctgtcgtctcgccctc

SEQ ID NO: 134755 - DNA, 1444 bp, Homo Sapiens
tatctttaagaacacaaaaacaatttttataaggcaggagttcccacccatggcttagtaccctgactgccaaatcacattccttcctcagagactctgactttaatatattctaagaaagggagacatgtcgtggggggagctacttgtccccttaaattttgggcagactgcctgctggtgccagaatgatgccaaagacatagaaaagtcccagcaggaggttgagcttggcagtcctctggggcagtttgttgaaggcctggcttcgaaactgtctctcaagggagaaggccatgggaatggtaagcagggggagtgccaggctgatggtgcagtgtgtggccaggatgctgaagaccaggtagggcaggaagagcagtgtgttgtatagaatgtaggagaacgtggggccgatgaggatggtcagcgtgacgataccagcctcccggtcggactccatgtccctggtgttgttggaatggagaatggcctcggtgctgagggcgagggggatggcatagaccagtgggaagatggccagggaccccacctggatggcgtaggcgaacatcacagccagcgggccaaaagtgatgaggatgatgaggtctcccagagccacgtacttgaatccaattcctcctgtgtagagaaaggagccagacaggcctccaaagtagataagagccaagtgctccagtttcagaggggacaggtagtagaggcaagcggcacagacgcagcccaacgtgtagaggaagactccgaaccggacgacatcctgcggctccaagattcggtccacaagtgtcctgtcatcactctttttgtggtcaatgcccttggaaaagtcatagtaagtgttgaccaaattaccggccccgtgcacagccaggacagccacggcacaacccaccaagagcctgggatccaggacaccgtgggatctgtaggcaagggcactgcccagggccaccggtgtgagtgaggcactgaagctccagggcctcagggccaacacgtaggaggcacacttctgcctccaggagcgctgggggagcctatcttgctcgggacagtcgttccccagcgggtccctgtccccagctttgacagtctctcccgacaggatgttaatcttctcccccaggacctgagaggccgccatggaagctccacgtggttgaagtaaactctaaaagtgagccacgcacagtgaccgcccgggaaggaggaaggacggggcggggcagcagggcccgaccttccttcggttccgccccaggacagggctggtgtggcggcaaggtccgggggcaacagcaagtgggtcttacaccccacgaggccaagcggcgccgcccctactacccgtcacctgggcgaagtctgtctccggcccccagccccgcgttagagcccacggctgagccgcggccgc

SEQ ID NO: 134756 - DNA, 1073 bp, Homo Sapiens
  misc_feature (50)..(75): n is a, c, g, or t
  misc_feature (802)..(802): n is a, c, g, or t
  misc_feature (873)..(873): n is a, c, g, or t
  misc_feature (880)..(880): n is a, c, g, or t
  misc_feature (1009)..(1009): n is a, c, g, or t
taaaattaaccctcacctaaagggaataagcttgcggccgctgctcaggnnnnnnnnnnnnnnnnnnnnnnnnnnccaaaaaagtacagttttattattattcatcatctgagctgttacacaggagcaagcagggtgtggatggggaacattgacagcgggggcttctgggattttcacagggcaagtactgagctcatactagacacgaagctgtttaacagattggggaggcaagtgggtgtgagcagctttcatttttatctggaacaatatgcagggatgtcttgctgccgtgtcttagaccaagtgttgtctttctcctccaacttgactaaagatgctgcaggtatcgatgtgggtggccccagtggtttggtggtgtaagtgagtatttcccatgtgtctttaactctgaaagagtttcatttggaaggctggtactggcagatccacgagatacatttagtttcttatagtgtacttagccgggaggcaggttgaatagcaaccctgtgcttccagctatttggcctgggttgccattctccctggcggcagattcctgaggacgggctaggcatctgtcttgctggaggagacttaggagaggctcacgtttcccatcaggctggggctctggaaccaggtgccgagcggggaagggatgagagtagccaggctctaaggagctggtgcccgccaggggaggagaaatgccacagctccccaggccgaacagaggcctcctagccagggacggtgagaactgattcacagccatgggaccaggcacatgcangttgcagttggcggcacggtttgtgacaggtactctggttgtggctttgtcatggagacgagtacgcactnatttggngacatgtatatcgttttcagcacacactcactcgactcaggggtcattctgggggctctgaatgtcaagtctgagagggtatcacacctctattccctggattagtaaaggcacggatcatcgcttaangtcgttgcttggcccgtggatctctcctttcatgggggggaaggaatccattcggcaccgtcgg

SEQ ID NO: 134757 - DNA, 1103 bp, Homo Sapiens
  misc_feature (24)..(24): n is a, c, g, or t
  misc_feature (31)..(31): n is a, c, g, or t
  misc_feature (65)..(65): n is a, c, g, or t
  misc_feature (78)..(78): n is a, c, g, or t
  misc_feature (86)..(86): n is a, c, g, or t
  misc_feature (122)..(122): n is a, c, g, or t
  misc_feature (156)..(156): n is a, c, g, or t
  misc_feature (168)..(168): n is a, c, g, or t
  misc_feature (238)..(238): n is a, c, g, or t
  misc_feature (1011)..(1037): n is a, c, g, or t
  misc_feature (1069)..(1069): n is a, c, g, or t
ggcatcgaccgaccctgatgagtnacatgcntgagagcagacttgtgcccgggacccccaacacncctaggtatgatntgtgtccntccccgacacgcgatgagaccatcagagatgagacntctggctgtcgtgcttggctgaccagtagagtcnccgacccagacncaggggctgctcagcgagctgtctgcccgaagaacacgtcgcgccatcgagcgcaaaagcactgcgaccntacctgagctgagctggctgagaacaacagcggatgagagcagagccagaggcctcccgggtccgcgaagagatttcgccaaaggccagcccgtggccccctacaacaccacccagttcctgatgaatgacagggacccggaggagcccaacttggatgtgccccatgggatctcccacccaggttccagtggggagagtgaggccggggacagtgatgggcggggccgagcgcacggtgagttccagcggaaggacttctctgagacttacgaacgcttccacaccgagagcctgcagggccgcagcaagcaggagctggtgcgagactacctggagctggagaagcggctgtcgcaggcggaggaggagactaggaggctgcagcagctgcaggcgtgcaccggccagcagtcctgccgccaggtggaggagctggctgccgaggtccagaggctccggaccgaaaaccagcggcttcgtcaggagaaccagatgtggaaccgagagggctgccgctgtgatgaggagccgggtacctaggggtgcctcccagcctggtggacccaaggagaaggtcccatttcgtgcacactcaggccagctgggtctcaaggaggcaggtggcagatgaaaaccaccgtcaacaccctgtgcgccctgagaacagctaaatcggttcagactcccacctcaccgtttccatagttggctcttttgtgtcatcttaccctttacagagaaattaaatggccttggtgggaccaaatgggnnnnnnnnnnnnnnnnnnnnnnnnnnnacctgagcaggcggccgcaagcttattccctnttagtgagggttaattttagcttggcactgcccg

SEQ ID NO: 134758 - DNA, 1159 bp, Homo Sapiens
tttcatagtcttttgactttattttctgagataaaaaagtataggcataggtgtttttaatagtcttcttgatgatatcctttagaataatctatcaaatggcttctttcatgtttcctgattatcagcattcatcagtgttactgtcagccttgattaagtggttgaaaatttcagagaagaataagcaacttctgtgaacctttccccaatccctgagaatcataatcattacagaaatattttatcctttcatcaaatatctctggaaagtagccgtgttcgttcattgttaatagggcaaggtgcagtgtcatagagggttaatccatgtaaattggcttccacccgtaaagaaattttctgaaaatcacgaatgtaagtcaggaaaaaaccaaagaaggaaaatgacatagaccattctgctgcagtagtgatcatgtgaagcacataacctttgtcctcggggttccaatggagtttctgttctaaatcagtcccaaaattgccactgtgcaaaactgatgagcaagtcagcatgctaagtgcacttactccacaccagataaccaacaacagtctgatccagaagacttgtttgccatggattttgggctgcatttggtaggaaaggatggtctgaacaaacatatataatgagcccataccaaaggtaagcacagctccacttacatgtgcagcaaaaagggttgttttctggaagtttgccacaatagaaagtcctaaacaactcagtattccaagtacaaggccagccttgtttaatttgatgatagcgttctcttcaggactcagagcatgaacttgcttataacgaacataaatggtagcaatgcataaaactgccgcaatatttagcattgccccaaataagcatttttctggagctactgtaccagtgtcactgatataaggtaaagccgggtctatatggtggagtgttactgcagtaatgtatgaaaatatgaaagcagcagatgtccaaattacaagggctgaaggaaggaaactgaggccttgctgaaaccaccacatttctaacaggttttctgttttacaacttcacaaaatgttagtcttcagacctgctcatacctgcaccttttgtaaatccttaccagaccgactagcgctcccc

SEQ ID NO: 134759 - DNA, 870 bp, Homo Sapiens
  misc_feature (728)..(728): n is a, c, g, or t
  misc_feature (765)..(765): n is a, c, g, or t
  misc_feature (777)..(777): n is a, c, g, or t
  misc_feature (780)..(780): n is a, c, g, or t
  misc_feature (785)..(785): n is a, c, g, or t
  misc_feature (831)..(831): n is a, c, g, or t
  misc_feature (835)..(835): n is a, c, g, or t
caatacactcatatatttttactttgtaatacaatatagctgtcacatacaatggctctagtaggcttaaattaaattgcaatgggcaaggaaagccaaagaagggtttacacaatattcaataagcaacagtatctgttcagtgtgcaataaaataaaaaagttctaacctagaaacacagaaaaagaatttattgtttttaagtttcagaaataaaagtaacagaatagtgtataatctgtaacaagctggtcctgtaatttctaaactacagtccaattaaaacatttaagtaatagaaacaatctacatgtttttctaccaggtaaatatacctgagagggttacctataaagaaataggctttaaaacttttaaccacaaagaaccttctgctgcgacattatgaagatgggctatgcatgtggccagactaagtcatttcccggagattctgctcactgcttagctgcaggtagtggtccatcaatgacagagtattttacatcaataccagctcattcaaccaaagaagcacagtaatattttaaaatcacctgtttatattcattagtatgtaaaaatcacaatacacagatttggaaacatataacgtgtccataaaaaagagtatattatgtaagcataagcttttttaaaaggccttagcaatgcaataatgagggaagcagactctacatgttgactacagtgaagatatgttaanatttatattattgtcattgccaagagcttagaaatanaaacaaatttanaanattangacattctgggtagcaaaattacagctactggtacaacagctccangcanaaatcaattcagagctttgatgcaatttgtgcttt

SEQ ID NO: 134760 - DNA, 954 bp, Homo Sapiens
  misc_feature (453)..(453): n is a, c, g, or t
  misc_feature (754)..(754): n is a, c, g, or t
  misc_feature (759)..(759): n is a, c, g, or t
  misc_feature (766)..(766): n is a, c, g, or t
  misc_feature (770)..(770): n is a, c, g, or t
  misc_feature (774)..(775): n is a, c, g, or t
  misc_feature (791)..(791): n is a, c, g, or t
  misc_feature (804)..(804): n is a, c, g, or t
  misc_feature (813)..(813): n is a, c, g, or t
aagcaagtcagtattttattttactcttaaataacaggtcaaaggagagcagttcaagactggcaggccaacttctccttcctcaacacatcacttccatctcttgagatgccaggtcactactgaagctcccattggcctcccagccagcaagaaaggggaatgtcaaggagagtgcataccctgcttctttaaagggccaattgggaagtttaaaacttagtcatatggccacaattaactataagagaggctgagaagtagtcttaagctgagcagccagacgtccaggtaaaactcaaaaattttattagtaaaggaagaatgggaaaatgacattatagcagcagtctgtgtcatgtgattctctaaatgcatggagaatacacaccaaacctagggctgtacttagctttggaacaggtgcaaaatggtgtgggggtggggaggcanactattgcttgaacatttttaatggtgatagtattaacatttaattttttgacaaaattttaaaatcctttatttgtgctgataaagcatgttaaatacattaaatctatttacactgtacaaagcttttaaagttctaaaaatcagatttttatctaaatgaataaatttctctgtattgttaaaaccattctacttaactgcattgttctccaagtccctccagccaggaggcacggtaacaatgtgtcagatctccacactgagacaccacctcccaagatcatggtacatcctcgtngcgantcttggnctcnaggnncaatccctaatgagtncgataaatcgtanccagtcaancttttctggggtgaattgtttcggccacattcacacacaacgagcggagcataatgtaagctgggggctatgatgactaccacatatgcgttcccactgccgcttccatcggaaacttctgtcagtgataatatcgcaact

SEQ ID NO: 134761 - DNA, 663 bp, Homo Sapiens
tttttttatagaaatataagttatttattaatcaatccacttacaaagcaggtggcttaatgcaagcttattgacatcttcacatatgatccatgggaacatgtcctccacatacagacagtgatattactgactggatgcatttgcaatctggggcatattaagcatatttaaacaaataaaattaggctatcctgtatatgaaagtatcttgataataatatgcatcctgaagtagattaaaacttcctccaaaggagaaatgttagtatgttaacttaactttatattctatattatgcagtaaatcttaactatagaaattaaaaattttaaatcagtgatcgactcttggtaatgtatgaagtgggagtatataaccatagcaacagtaggttgacagtataatttgtgcctcacagtatctgcagatttactgttttcaagtttagagagaaataaaacaagagacatgtagattcagctgactttatttacctttaaactaataaaaatcccttaaaagtgatcctgggacctttataagttctatgaatgcacagatacctgccagtgacttaaattccaaatcttgacttaatgtgtctacaaaatcaatgtaagcagatatcttaactttttcgtgcttagcaaaagacaaca

SEQ ID NO: 134762 - DNA, 757 bp, Homo Sapiens
  misc_feature (220)..(282): n is a, c, g, or t
gcatatttagaatctcattattatttgtacttggaacattagtatttgaatcttgtgttaatgataccatcacactcctaaagtttgtaactcacacaagtgtataatctgactacagtttataaaccaatgagaaagataaatattcttatattttaacaacagaaaagttacgaactctaaatttagaaatggtatagtaagagatattgtttcactnnnnnnnnnnnnnnnnnnnnnnnnnnnnnnnnnnnnnnnnnnnnnnnnnnnnnnnnnnnnnnncatagaaccataatttattttaagccctaaaatgaaattgtgaaccattaaaaatatgttgtaaaactatttaatgtcataaagagaactaactctgtttttatggtccatctaccaatgtcttccgagcagttctctctcctcaaacctcctctacctctttactcaccctcactcagcctaaccttgcttccgattttattaaggaaatccaatcaatcagaagaggtttctacaatttactatcacatttacccaccagccatcacctctgccatatatgctcctctcctattccaatggctggaatgtctcagggaagaccaagcccttcacttgtacattagattccagctctctgtcccatccattatggaagctgcacatcaccccagtcacacaagagggcactctgaatgaggaatcttgtaaactactccaaatcaccagtcttgaacagtcttgaacacgcatg

SEQ ID NO: 134763 - DNA, 1001 bp, Homo Sapiens
  misc_feature (512)..(512): n is a, c, g, or t
  misc_feature (642)..(642): n is a, c, g, or t
  misc_feature (700)..(700): n is a, c, g, or t
  misc_feature (708)..(708): n is a, c, g, or t
  misc_feature (775)..(775): n is a, c, g, or t
  misc_feature (788)..(788): n is a, c, g, or t
  misc_feature (848)..(849): n is a, c, g, or t
  misc_feature (956)..(956): n is a, c, g, or t
ttttcactgtgttaatttatttaataactgacaattttattattatcaccgttttaaagatgagacaattatagcatagaaaattcaagtaaatgccccataacaccaacccctcaaccctgtttcttcttatttcctggacccttggccatatgcgtggaatctgagaatggcatctagttggctttaaactcacactaatgaagctgcaatctggaggtcaggaagtttctggaaattgttgctggtgatgaattcacttagatgcgtacatctactggtctagacatcactccactgctgaaaaaaggcatctacctcccttctttatccaaatcttatttgaaagcatatctttggcagtaaccagactgtctttaggtgacttttagcaagttgtctaggaagtgaaattgttaggtttccagcccctgtgatatgcggagcactgcgctaggtggtattcaaggcaggcctgtagtgaatgctgttggacccagccaccacccctngagcaatcatatgcagaccgctggcttcttaactgcagacacctacagactcagcctaagactttcccacgaggcaggctcgaagtgctggagctttaacacctctggagtggccctccaattacagctntgagaaacccagaatcctgttcactggaaggttgccgggtggcggctgacagcctcanagtcgcanttgagtctgcgcaccggccattcaggatgggacgacttataccgcggtgaggcggcgtggcaggacnacaatttcagatncagggcgcggatgcagaataatgggaaggacggtttgagaacggtcaacctgggctcgtnngcgattcttgggctcgagggcaatccctatgtgagtcgtataaatcgtatcatgtctagctgttctgtgtgaaattgtatcgctcacatcacacacatcgagcggancataagtgtagctgggtgctatgatgagtatcacatatgcgtgcc

SEQ ID NO: 134764 - DNA, 546 bp, Homo Sapiens
ttttttttcactgggttaatttatttaataactgacaattttattattatcaccgttttaaagatgagacaattatagcatagaaaattcaagtaaatgccccataacaccaacccctcaaccctgtttcttcttatttcctggacccttggccatatgcgtggaatctgagaatggcatctagttggctttaaactcacactaatgaagctgcaatctggaggtcaggaagtttctggaaattgttgctggtgatgaattcacttagatgcgtacatctactggtctagacatcactccactgctgaaaaaaggcatctacctcccttctttatccaaatcttatttgaaagcatatctttggcagtaaccagactgtctttaggtgacttttagcaagttgtctaggaagtgaaattgttaggtttccagcccagactcagcctaagactttcccacgaggcaggctcgaagtgctggagctttaacacctctggagtggcccaggctgccggagacaaagaaagctcagctttgatgtctggg

SEQ ID NO: 134765 - DNA, 601 bp, Homo Sapiens
cttttggtagaaagtcatgttaatagtacaacaaagaatcaaagaataacaacataatgtttaagaacattatttataagcagtcattgtctttgtgctttaaatgtttcccttttaccttagagttattttttaaaagttgaaagtactttaaaaatttgtttaaatgagtacccattgacaattatcatttaatagtgcagttaagttcaccgaaaaatttcaatatctcaaaaaaattagagaaaaatattggtaaatgtatttgattcacaaatgtattcatagccgattgtgagctgctctaccacattttcctgtttttattgtttctgtggagcttgattagactaacttgcttaaggtctctttcccctcaaggattctgtgattctaatgtaacaaggtacacacgctctctctgaccacttaaagtatcagagttcaaatctgttacaatcactccatttccttttggaaagttgtgcctctcataaagctgcttggacattttaagtgttttgtaatatgcattgaagtgttgagttttgtttgctgtaagaggcatttcactatgttgattaaacttatcttttctccc

SEQ ID NO: 134766 - DNA, 788 bp, Homo Sapiens
  misc_feature (209)..(239): n is a, c, g, or t
gaagcttgatagtcatttcattttatggtgggacagagactggattttgcttgctttccataattacttcactgtctccctccatttcaaaattgacattcacaaatgagctggatatcactgtctctggttgatctgtctgaacaatggaatcagtctgcaatttattctgttgatattgtttttctgcttcttcagacatcctgttnnnnnnnnnnnnnnnnnnnnnnnnnnnnnnnatccgataatattcatcaatggcatattggtactttggggtgctgatacccaaaacagatgcaatcttctctccaaggaagtcacacactgagagagttgatgtagcagcccgaagcatgtaaaaccataagtagggaccccaggtaagttttgtcggatcaacagtaggcaaaacatctttcttctccaggccatcaacttcgtcttcatctgtgctatattcttccattgtttcaccactaacaaagtggatgactctccttgggactttcttcttttttcctatgactcccagttctacattttcaaagcctctttcgttactcatctgccctgcagattccccgaatgccgcggcggccgcagctcccgaggctgcgacggcttctcctcgttccacaccgcccactggctcctggtccatcgtcgtcgccaccacagggctgctggcgctggtgagaaagagggtaatggccggtaagcccacttccatccttccccggccgtaatggccgaattcccgggcatatgtccggtaccgtcgactg

SEQ ID NO: 134767 - DNA, 822 bp, Homo Sapiens
agttaacgttcattttataaaatactttaaaagaacagataaagtacttgaggttacataataaccagaattgaaaaggaatgaataaaatataaattaattgaacatatgactattttgccacatcacacaagttttaaaaaggcattttaaaaaacaataaaatagtaattggggaaaaaacccttcactctattggtgtctttgtctggaaaactttcccagaatcactaaaattccaggtcaacaggtagtacctgaattattcaagtatactgtaatttgcttccaaatctgttagctgaagagagaaactaaaattttatccaagttaattcagtgcaaatcaaagcttcaagttgaaaatctgagagaaaaaataacgttcgaactgcaggaaatgcttctggaactgaaaaattaaaaaatcacattatgaagaaatctttgcaagtgttcttggtatatgaaatgctgagttaagaaatgggacccttttaatttgcagtgagggttctattatgaagactatttgcaatgtgggcaaaagggaaacagagagggaagagctgaaggttgtatttgtggaaggaaattcaagttaagcaaaaactgcttttattcaattctagaaaaatttggtgagatatatcatacattaggggataaaacagattatggagataaatttactggaatataattgaggataagtccttctatctccagaacatgtttgggttgggtgagaagggttgatattggccacatatcagtaagttaatttgtcttaattttatgtattatatgaaatgctgactt

SEQ ID NO: 134768 - DNA, 1038 bp, Homo Sapiens
  misc_feature (679)..(679): n is a, c, g, or t
  misc_feature (724)..(724): n is a, c, g, or t
  misc_feature (889)..(889): n is a, c, g, or t
  misc_feature (961)..(961): n is a, c, g, or t
  misc_feature (991)..(991): n is a, c, g, or t
tgacaagcgcaaattacagttctttcaaatcatataagaaaatggttttattcctaatttttagttcccatacagtttacaaatacacttttactctgataatacagctttgcaactagcaaagcagttgcgctaacacccataaatataggtggggagacaattaacatccactaatgtttctctacataaactattcttttaatgtcatttttttaagaacagttgcaaatagactacataatatacgtgggcaaaaaggcaattaagtgaatctcttgaaacactaaatgtataataaacagcatattatcaacatttacatgattcacatcaaaatgatgacatcctaaaacgtattccttttaaaggatagatttatcaataaaatattacatatcttttaatactctggtacaatacttcatatactgcaggaaaattaattgtaggtctagtcatcagcttaatcagggatccttttcccattagcttttattaataaaagaatcacaattaggtcataaataaacaggcaaattattaattacatgatttgaggcttaggatgaaaacttgtcaaaattagtttgatatacagcaaagttatacaacacactaaaaccaactgttcaatagtttttgccttgtgtgaactgcccatagtgaaaaaggaacnatttttagtgatgaaagaacaataactatattttggacttttcangaggaagaggaaaaagattcaacaaattaagggcaatacagatcctaacaaaggatcctgacacagggaggcatgtgctgctatgtgtgaaagtgatcccccacacatacagaaacaaagtgcacggcttgtagtatgtcatagttaagttccctatggatctanctacacaaacacttgacatgcaaccttccacatcccctgataaatactcaagatgtatagtcttaaatcccnataatactccaaaatatctgacatttcctnctgttcccgacactggtctttagatgaacacacagaagctacgtgtc

SEQ ID NO: 134769 - DNA, 619 bp, Homo Sapiens
actgtattttgtcatgtttattaagcatgaacccctatcagtactcctaaactgtaaacagtaaggaactaaggtgtcaaaagaaacacattagggatcatattcacagacaaaaacctttacattttcttattgcatttatacaatcaacacacaataagcaaaactgaatcctttctaagcaaacatttttgcatatactgccttctctttatctttctgtgcctttatcttttgtttgactttcagcaattctgcctggatagctttatcttctggtgctatcccctgagctttcttaagatcagccaatgcttgatcatattcttttaatccttgccatccttgagctctgcggtacaatgctttggtatttgatgggtctatttcaagagcctctaaacaactgtcaattgctccctgccaatttgacatcttcagtttacaagcaccaatattcagtacacagcttaaagctataggttgcagcttggctctatctgctgtctcaataacagccctttgaactgtccacgtatcttaaaacttctgcatattttttaatagccccatctccagtctgggaattgaaaaaagtatttccaaatgtttttaagtc

SEQ ID NO: 134770 - DNA, 752 bp, Homo Sapiens
  misc_feature (156)..(156): n is a, c, g, or t
aagaattcggcacgagggaacagccagtgcaaacatgggagatgcgagtgcagtgagaaggagcagaggagaccaggagttgaggtgactgcagagcgattgcagagctcatagacgtgatgaagaccagctgggcactgcagcggctctggcttntgctgtgagggacggggagctgtggagactccctctgtttggtcccatttccatattgctgagcacctgctgcatgctctctgtcctgctcagagccagtacctggatggaggctgtgtgttctgggtggactgggggagaatgcattctttgcagaagagacaaccaggtgctgaggcctgaagtcataaccagacctggggcactcagacaaggactggtggccaggccagaggagcagagctcagggtgtgcacagaactcagaagtcagaccactgaacagtgacagaacctttcagcccattggcaatgaggctgcccaggcagccagaggcctggtcaaatttgaggtctgcagagatggagctgtcattctgtgtttcctttggcagtcccaacaccagcctcgttgcaccctccttttagcttccctgggttttccagccctaagggtggtagcagcttcctgcaagtatccaactttgagattttgcaacatccacttttgctttttgagccttgcaaaacctgcacaatcagtccctaacttatatcccctctgtttgaaatacctagtgtggtttttatttcctg

SEQ ID NO: 134771 - DNA, 958 bp, Homo Sapiens
gcagcctgggtgtcaatcggcacgaggggacatctgtcattccacccggggaggtcctggtccccaccctgggtgtccagcctagctccgctacgagtgtgagggcccaggcaaccgcctagccctcatctgccccctgcactgcatcctccccactcattcattccacaggcatttattgagcatctactgtgtgccagatgcaaagaagacagtgggataactgggcaaggagcattccaggcagagggaacagccagtgcaaacatgggagatgcgggtgcagtgagaaggagcagaggagaccaggagttgaggcgactgcagagcgattgcagagctcatagacgtgatgaagaccagctgggcactgcagcggctctggcttctgctgtgagggacggggagctgtggagactccctctgtttggtcccatttccatattgctgagcacctgctgcatgctctctgtcctgctcagagccagtacctggatggaggctgtgtgttctggggtggacctgggggagaatgcattctttgcagaagagacaaccaggtgctgaaggcctgaagtcataaccagacctggggcactccagacaaaggactgttggcccaggccaagaggagcaagagctcagggttgtgcaccagaactcagaagtcagacacttgaacagtggacagaacctttcaggcccattgggcaaatggaggctggccccaggcagccagaggcctggtgtcaaatctgagcgtctcgcggagattggacgctgtccattccttgtgtttcccttgtgggaagtcccaaaaaccaaggcctcgttgggacccttccttcttaaatcttccctggggttctcccagtcctaagggtgggtaagcaacgttcctgcaaattttccaggtctgtagattcggcactccacatttgggtctctggaccttgaa

SEQ ID NO: 134772 - DNA, 954 bp, Homo Sapiens
acgccactaggaggcgcgcgcaagtcgctgccgctagccggggtgaggcacggccccacaatacgccgtacaaaggggcggcaaatcgacttcgcgcccggagatccggtgaacgccagacctcctggcctggtcagtcaagaacagcaggccatccagacaggcgggcccggcagagcctcgggaccgggaccctcgtgtccataaaccaccgggcgcaccatctttccttcatgctacccaccacttcagtgctgaggtcaaggcagctttgttgttccctctggcttgtggggcacggctgtgctccatgtggcaaggtggaaggcatggacgtgtggaggaggcgctggagctgaaggaatggacgagccctgggaggagggcagaaggctacgcagggctgaggatgaagatgcagcccctggatggtcccagactctcaggacatgcccagctcaggggcttcgagccacaggcctggcctcatatggcatgagggggagctggcataggagccccctccctgctgtggtcctgccctctgtcctgcagactgctcttagccccctggctttgtgccaggcctggaggagggcagtcccccatggggtgccgagccaacgcctcaggaatcaggaggccagcctggtaccaaaaggagtacccagggcctggtacccaggcccactccagaatggcctctggactcaccttgagaagggggagctgctgggcctaaagcccactcctgggggtctcctgctgcttaggtccttttgggacccccacccatccaggccctttctttgcacacttcttcccccacctctatgcatcttccccccactgcggtgttcggcctgaaggtggtgggggtgagggggggtttggccattagcatttcatgtctttccccaaatgaagatgccctgcaaagggcagtaaccacaa

SEQ ID NO: 134773 - DNA, 455 bp, Homo Sapiens
  misc_feature (125)..(154): n is a, c, g, or t
caattgtcttgttcattgacaaaagtaacaagtttggaactaagagatatgttacaagctgcacttaacaccacctgaaaacccaagaatcatctgaaggttttgtcagtagtaaggtaggtttnnnnnnnnnnnnnnnnnnnnnnnnnnnnnnaagatggaatagggtgaaggtgaagaaacagcttgacttgtgcctgttttcagataaaggagtaaagtgatctacaaactgtaactatcttgaaagagaaattgatcattagatggtcgagtactcttggaatgtctctttgctgtttactgtggcctctttacaatggtgagacttatttctaccctctactttccactattatttttttcccctattggataatactagtctgagcagccctaatactagatgtacctaaacagagatacaagccaagtcattgttcagtgtagtcatt

SEQ ID NO: 134774 - DNA, 978 bp, Homo Sapiens
  misc_feature (494)..(494): n is a, c, g, or t
  misc_feature (679)..(679): n is a, c, g, or t
  misc_feature (716)..(716): n is a, c, g, or t
  misc_feature (820)..(820): n is a, c, g, or t
  misc_feature (942)..(942): n is a, c, g, or t
gtcaagcacagagcctttattttacattttctcaaagaggacattgtttaagtgagcagctgacagaatttataagagagaaagtgacagcaaaggtaactggctcaagtccctctgtgtacggtacgccatgtacatttcatgtctgagcaccttgtgtgtgtggtttaagtgaaggtaaggcagtgtagattgtgcgaacaagagatctgtgttctgtcatcaggaaaggctactacatgcatcacacaaaatgcacaacctgaaatgcttcaatctgcaaccgaagtttcctcaagcaagaattcgcatgaacactgacgaacacatacagagcaacttgggcagagagaatggatgatgccatgaggcagtgaggttagcacactgatcaagagccccaaaagcaggagccgtcccagtggcagagcaggctaggagggtgagcagcagccatctccagccaccttgagttccttcctgccttcactctnagttgagcagctccacgtcaaagatgagggtggcattgggagggatgacaccggggtggcccgtggctccatatgccacatcaggggtgcaggtcagcttcgccctctgccccaagctcatctgggctgcacctcttcaaaactttgatgactcctgtttgcaattctgaactgaaagtttgttnctgtctctggataatcaactcttccaatttcctcgtngcgatcctggctcggaggcaattcctatatgagtcgtataattcgtatcatgcaagctgttcctgtgtgaatgtttccgctacatcacacacaacagcggaganaatgtaagctgggtgctaagatgactatcacatatgcgttgcaacgccgctcatcgggacgtctgcactgatatgatcgcacccgggaagggttgggatggggctccctcccccataacctnccggcgtggggggaggtcatcacaagggtaggtcca

SEQ ID NO: 134775 - DNA, 195 bp, Homo Sapiens
gagctcggtactggcactctagtcaagctattatcatctttcacctgaactcctgcactaatgtctgctgtccttgcatccactcctgccctcctacaatcactgacggcagccgcagggatctttataaaacgaaaatcagataatgtcacttccctgcttaaagccctttgagtggcttcccattgcacttag

SEQ ID NO: 134776 - DNA, 1114 bp, Homo Sapiens
ggaatcttgcctattgggcaatttattagaaaacctacagcagtagcaaaaactatttactatccagattgatggaaaggtcacattatccatccctctggctctgagtaggacaacacactttgtccagctgtccattgtattaaaaacaagtcaacacagaaaacctctccaaaatgtgagtctatagctcttggcattgaatgatccatctggctaggagttcttcctgatgtctgcttacattcccctggctgcttggggttccaggtgagctggttgcaacctgaagagcagcgtccatgtgggggccttctgtaggccagaaggtgtcccctcacttacccacttgagttccgcatgcgaagctcctggctgttttctgtgatttcaacaacatccagatcctggtctgggccaatctccacagctctgaaagtgggtttgctgctgtagcccatctgcctacaggctgtctcagcgagagcttctgtgaagttgtcgaaacaggcagagaaccagttccctgtggccgagtccagcacctgcagtgtggatcggtccttggagaggcggactgccactgcaggcccttcggggaagctcttgacacagtgctcctcgtcctcccccaagggacagtccagctctccgtcacacagctgcttcctcgggatgaagtggagaggctgcccgcagaggaagtagtatttatccagaatcaccttgatgaggacaaccacaatgatgatactcgccaggctcagtagtgctatgatgatggggatccccacctttctgaaggtctccatggggatacggggtttgcgcaggggtttgacatcgaggctgttcataggttgatcactgtcaggatcctgtacatgctggctctgtgatcctcccggtctccctgtagcctggagctgagattgtcaccccaaggcagcaggagggcctccccacacaggtcctggctggccagcaggtcagaagtccctggtcagcactggctggaggaggcccgagtgcagggcaggccttggtccctcacgcccagcatccttgtccgctgagcaagctgctgcctctctctgcgattccaggagtgatt

SEQ ID NO: 134777 - DNA, 1377 bp, Homo Sapiens
  misc_feature (691)..(691): n is a, c, g, or t
  misc_feature (733)..(733): n is a, c, g, or t
  misc_feature (950)..(950): n is a, c, g, or t
  misc_feature (1066)..(1066): n is a, c, g, or t
  misc_feature (1077)..(1077): n is a, c, g, or t
  misc_feature (1109)..(1109): n is a, c, g, or t
  misc_feature (1121)..(1121): n is a, c, g, or t
  misc_feature (1232)..(1232): n is a, c, g, or t
  misc_feature (1243)..(1243): n is a, c, g, or t
  misc_feature (1248)..(1248): n is a, c, g, or t
  misc_feature (1277)..(1277): n is a, c, g, or t
  misc_feature (1308)..(1308): n is a, c, g, or t
  misc_feature (1335)..(1336): n is a, c, g, or t
tttcaaagcgttttctggaaaggccagtcctttaattcagctcacaggcacacttccctgacattcccttcagggacagtgggcctagtatccaagcaggtgttggaggaaatccaggggaggggccctccaagctcacaccccaccccctgctgtttaccctgtccccttgcactgtgataagctgcccctcaggcgtccaggcagcagccctagctgaggcttggcccaaatgaccattacacactctcaggttcaaacaaccttattggctcagttctgggctatggtttcttaccagcagagagtgtgtgtctatgggcttgaccttcaactgaatgattattaatgatgcaagcattgctaatacctttgcggcttaaacatgtggcaaatgttgctttaataaagtcacggaaggacagagccctggtctggcccaggccccctggctggcagccggagaggctcaaatcggaggctgtgcccatggcagctgatccattcctggggatcagcttcaccctcctgaaactgacctcagctgcagaaacagctaaagggttcctcttagactcaagatctccccctctccttctctgtctctgaggctaggtacctttggtttcaaaaatgcattagggtggggagggatgaaggcagcaccttcggtctgagaactgcaggtctngcgagtgtctccatttggggtgactggtgagggacgtgtgtntgagtggccacttttctggtcctgccggaacacttgcatagggctgccctgctctcctggagatagacgttgctggaggcttcaaggcttgcagggggggagctgggaacctgggaactccagggacagatcagcgctgcataaggcatacaaagagcattgagtcctccctaggtgggggcatcacaacactgagtacggtgccacctcagggtcncctgatatgtatacaccccaatgaaagggcagacctgctcagtcttggggcaagtcccatccacacaccatgtcaaacaagagcctcagtgtcctacagaattggctgagaagatnatatctgctanagatggaaggggagcagtgccttatgccccanacacaccagcanagcttttgcatcacagggttccatctcctcgagggtggcagcatgggccctggcacgtggacaggtgcctctactctggacagggtgggtgtggcctctatctacatctgngtttcacagtnaggangcatgagtcaaccagccttttctcctctngaggtagacatgccccagacagaactctcgntgcgatcttggccgagggcaatcctannggagtctataattcgaacatgtccactgtcctggtgaatgt

SEQ ID NO: 134778 - DNA, 968 bp, Homo Sapiens
  misc_feature (49)..(49): n is a, c, g, or t
  misc_feature (742)..(742): n is a, c, g, or t
aggagacgtacctttaccacatagacaaatggactccaacgacagcctntacggggagactccaagttcctggcagaaaacaacaagctgtgtgagacggtgatggctcagatcctagagcatctgaaaaccctggccaaggacgaggccctgaagcgccagagctcgttgggcctttccttctttaacagcatcttggcccatggggacctacgcaacaacaagctcaaccagctctccgtcaacctgtggcacctggcacagaggcacggctgtgcagacaccaggaccatggtgaaaacgctagaatacatcaagaagcaaagcaaacaaccagacatgactcatctgacggagctggccctcagactccctctgcaaacaaggacctgacccccgggcccatccccaggctcagggactctggtgccaaatccagaaagatctgctctgctgccctgaactcttacggcaatttaggtttctcatttttcttttctttttacatatgtacaaattgttttaagctttggcctctatccaggttattctgacaatgaagaaatgggagttgtcagagcattaaaatgcaatcttcactaagaagcagtctctgtgttgtctttgcacaagtggccttcggtctactcagcccgatctgatgggcctttttagcaagagagaaacaagaatggaagtaacatctttcctcctcgggaaagggggttggttttttcacaancttaacaaatacggggcttttcaccagtggcgcggcccccttccaagtggcgccgggttccccacccgattctcttgccccaagcctgggcacttgaaaagggtaaggcccgccccccaaagtcgtgggacaggggcgtcccggaaccctccgcagggggggacggtggatttaagcggcggaaaataggcccgcgcccggcccaaagctgagtgtgcgtcacaca

SEQ ID NO: 134779 - DNA, 679 bp, Homo Sapiens
ttttttttccaggttcataatttattgtacaaattgaattatcacatgatgagttggcattagcttctccaggcatgggaacttaacagatgaggttaagaaccgtagacagtttaaaatccatttatgttgctttcacagctggagtttttttggaccttaacttgaaatataagacaatcaatgcaatgcttccatatgtggccagtacacagttcattctacctgtgagagtataagagttgaaatattttttaataccagtgaactggtattgcgcatcactttctggacctgccatgatttcaatctggaatggtgagatcacgaggtaaggaaggcaaagatgagtgagaaccactcaggtaacagaagcagcctcttgcattcacggagtttacagctctctgttctggttacctcctaggaaaggccttcccactgatcgtctatagactgaaatctaacccttttacagcgggcctggcgaactgtaggggccgggccacattcactcgctttgaaaaaggctgcagcgcacctaaaggaggcccggctggccagcttcctaaagcacagctcggtgggaacaaacagctgccaaagccgcaaattccgcagctggtgtccttcaacgatgcctcgtgccgattcacacacccagcttcgtactaaccta

SEQ ID NO: 134780 - DNA, 814 bp, Homo Sapiens
  misc_feature (183)..(185): n is a, c, g, or t
  misc_feature (190)..(196): n is a, c, g, or t
  misc_feature (198)..(204): n is a, c, g, or t
  misc_feature (206)..(206): n is a, c, g, or t
  misc_feature (210)..(210): n is a, c, g, or t
aaattccccaaaaggccccttttggttcacaggacccccgggatttttcccctaggggaaaacccagtttattgggccccatgtttccccttaaccctaactgggggccccgccggcgcccaaaaaggaatgggttctagaaaagctttctcgaggggcccgagggcgggccgaccaaggttnnnttttnnnnnnntnnnnnnntntttngggttcataatttattgtacaaattgaattatcacatgatgagttggcattagcttctccaggcatgggaacttaacagatgaggttaagaaccgtagacagtttaaaatccatttatgttgctttcacagctggagtttttttggaccttaacttgaaatataagacaatcaatgcaatgcttccatatgtggccagtacacagttcattctacctgtgagagtataagagttgaaatattttttaataccagtgaactggtattgcgcatcactttctggacctgccatgatttcaatctgtgtattttacaaaggcatgaatttcttttatagacaagacgtattcaaaaggtcaccagaacaagagctgaaaattcgtatgcatgaccgcctatctaccacgaccgacgccacgccgagtcgattggcagcacagacgagccggtcgaggtccggtcgagattggtaggcagtgacagtgactcagctgggtctgccaaagccgcaaattccgcagctggtgtccttcaacgaatgtaaccacctctcggcccggccgtaatggccgaattcccgggcatatgtccggtaccgtcgactg

SEQ ID NO: 134781 - DNA, 1099 bp, Homo Sapiens
  misc_feature (240)..(268): n is a, c, g, or t
  misc_feature (377)..(386): n is a, c, g, or t
  misc_feature (417)..(427): n is a, c, g, or t
  misc_feature (465)..(474): n is a, c, g, or t
  misc_feature (476)..(488): n is a, c, g, or t
ggggtgaccctggtgatattgcccccctccccctctgggggaggggagatttttgccgcgagaggggttttctcaatttaaacaggggcgccgcgggcttattatgtggtagaaagagggggtgtttttccccccactagtttctccggcgccacaggggaaattgttctcttttatcaattggaagtaggtttgcccgccgccccgcgatttctccttttgctcgtaatttgggagttnnnnnnnnnnnnnnnnnnnnnnnnnnnnnccctataatattttcggtagtaatttccggaaaaggctcgcggcccttgtgggggacctctcccctcggctttggaataaaagaactcccccccaggtaaaaatggggnnnnnnnnnnaagggaccgttcccccatttgtggggggagnnnnnnnnnnnccaaggaaaccgcgcttccgggttttattccccccccnnnnnnnnnntnnnnnnnnnnnnngggttggaggaaattcccaaagccggctatgttccatgggcccaggggttcttccttagggaaaaccagcctatggcccaattgttcactttaccctaggggggggcccgccgccgcgcaaacggaatggttctaggaaaggcttctcgaggggccgagggcggccggacaaggttgttttggggttcttggtgttttttgccaggttcataatttattgtacaaattgaattatcacatgatgagttggcattagcttctccaggcatgggaacttaacagatgaggttaagaaccgtagacagtttaaaatccatttatgttgctttcacagctggagtttttttggaccttaacttgaaatataagacaatcaatgcaatgcttccatatgtggccagtacacagttcattctacctgtgagagtataagagttgaaatattttttaataccagtgaactggtattgcgcatcactttctggacctgccatgatttcaatctgccaaagccgcaaattccgcagctggtgtccttcaacgaatgtaaccacctctcggcccggccgtaatggccgaattcccgggcatatgtccggtaccgtcgactg

SEQ ID NO: 134782 - DNA, 973 bp, Homo Sapiens
  misc_feature (730)..(730): n is a, c, g, or t
  misc_feature (756)..(756): n is a, c, g, or t
  misc_feature (787)..(787): n is a, c, g, or t
  misc_feature (791)..(791): n is a, c, g, or t
  misc_feature (813)..(813): n is a, c, g, or t
  misc_feature (837)..(837): n is a, c, g, or t
  misc_feature (854)..(854): n is a, c, g, or t
  misc_feature (932)..(932): n is a, c, g, or t
ttttttttgagtttgcacaactcctttattgaaacaaaatggactttaacttgtcacttatttcctatatcattaaataccttcattaattttctcttcagaaaatacttattgtgtatctttattttcaacactccacaatacttttaaataaacaacattttcagtatgaactatggtaagatttcatcattctataaggcatattatttaggaggtattccttcctatgcatttcctattttacagtaaactcagtatcaggtaaaaattaactgctaatgttcctatcaacaattcatccattcctttttatgacacttttatcttgtatacaaaaaaatacacaattttcccaaaccttgaggagttgaattttgtgtgtgtgtgacaataattaaaagccagtcaagttggtactggaaaatcattttgatacttatcagaaaagtaaaagcagtgcttttcgatccatcccagcaataaatgatactatgatattacacatacagatgcctaaaaagcatactataaaaggaaaattcctgaaatgcctccaaaatcctattatgcatactagactttatcatcagtacttatattcttcagaatgtacctaatacagtcacatgctcattaaaagagttgatacagttttgatggcaggctacagttccctgctgtctttccatgatgcatcagcagaaccattcaaggccacacacaccanacctattaagaaaaaagcattcatanttcccagctgtgtcctctaattttcaaacantatnatttccatgtattttcaatatnaatatttagtgggaattacattanatcacatattgttcttnaagtatcagactaataaacatgagtcaaacaatctactctgcgaaaactcaatcactctgtgtgaaaattattttaanacataagctataaatttctctattttaaatccagataaatc

SEQ ID NO: 134783 - DNA, 1260 bp, Homo Sapiens
catacctcacagaccacttatcacctcgatcagccgatctcaaggccctaccgccaggtgagcttcccggacgacgacgaggagatcgtgcgcatcaacccccgggagaagatctggatgacggggtacgaggattaccggcacgcacccgtcaggggcaagtacccggacccctcggaggacgcggactcctcctacgtgcgcttcgccaagggcgaggtccccaagcatgactacaactacccctacgtggactcctcagactttggcctaggcgaggaccccaaaggccgcgggggcagcgtgatcaagacgcagccttcccggggcaagtcgcggcggcggaaggaggacggagagcgctcgcggtgcgtgtactgcagggacatgttcaaccacgaggagaaccgccggggccactgccaggacgcgcccgactccgtgagaacttgcatccgccgggtgagctgcatgtggtgcgcggacagcatgctctatcactgtatgtcggaccccgagggagactatacagacccttgctcgtgcgatactagcgacgagaagttttgcctccggtggatggctcttattgccttgtctttcctggccccctgtatgtgctgttacctgccccttcgggcctgctaccactgcggagtgatgtgcaggtgctgtggcgggaagcacaaagcggccgcgtgactcagtttccctccctttctccctccatccgcagccacaggggaactcgtctcttacatactctcatcttctcccccgctcccttccactccaaggagcgaggagggcaagcggcctcccagctccctggtacctcgaggcaccattccagccagggacgctgccgggtagactctccactccccctgccgcccacactgcagcagccacatccatacacacacgctcgcacagtgttctgaggaaggaaccttcgccacagactcctgtactattaacaatctgtaaccaagctaactgtctcatccatgtgttgatttcctgtttcctcctcccccgcctcttccagttcaaaggagtctgcaattggaactgctgattttcggtgggttttgtagttgatttttccaagagcgtcgaagactctctttctcttggttcaccttgcctgtcgctagcaagcatctggttcagcggaaatgggatgtgagaatgatgaaacccgacagaaggttacagtgtattatgtagcatgcaatgtgttatgtagtgcttaat

SEQ ID NO: 134784 - DNA, 975 bp, Homo Sapiens
  misc_feature (458)..(826): n is a, c, g, or t
  misc_feature (830)..(830): n is a, c, g, or t
  misc_feature (842)..(843): n is a, c, g, or t
  misc_feature (863)..(863): n is a, c, g, or t
  misc_feature (872)..(873): n is a, c, g, or t
  misc_feature (880)..(881): n is a, c, g, or t
  misc_feature (890)..(890): n is a, c, g, or t
  misc_feature (893)..(893): n is a, c, g, or t
  misc_feature (922)..(922): n is a, c, g, or t
  misc_feature (938)..(938): n is a, c, g, or t
aataggcatgagccactgcgcccggccctcatgtagctttaaatgtatgatctgacttctgctccccgatctctgtttctctggaggaagccaaggacaagagcagttgctgtggctgggactctgccttttaggggagcccgtgtatctctttgggatcctgaaagggggcaggaaaggctggggtcccagtccaccctaatggtatctgagtgtcctagggcttcagttttcccacctgtccaatgggaccctttctgtcctcaccctacaaggggcacaaagggatgacaccaaacctggcaggaacttttcacgcaatcaagggaaggaaaggcattcctggcagagggaacagcatgccaagcgtgagaaggctcagagtaaggaggttaagagcccaagtattggagcctacagttttgccccttccatgcagtcctcgtgccgaattcttnnnnnnnnnnnnnnnnnnnnnnnnnnnnnnnnnnnnnnnnnnnnnnnnnnnnnnnnnnnnnnnnnnnnnnnnnnnnnnnnnnnnnnnnnnnnnnnnnnnnnnnnnnnnnnnnnnnnnnnnnnnnnnnnnnnnnnnnnnnnnnnnnnnnnnnnnnnnnnnnnnnnnnnnnnnnnnnnnnnnnnnnnnnnnnnnnnnnnnnnnnnnnnnnnnnnnnnnnnnnnnnnnnnnnnnnnnnnnnnnnnnnnnnnnnnnnnnnnnnnnnnnnnnnnnnnnnnnnnnnnnnnnnnnnnnnnnnnnnnnnnnnnnnnnnnnnnnnnnnnnnnnnnnnnnnnnnnnnnnnnnnnnnnnnnnnnnnnnnnnnnnnnnnnntcanggggatacgcannggaagacatgtggagcaaangggcagcannagggcanngacccgtanaangggcgcgttgctgggcgttttttcaatanggtcccgccccccttnacgagatcaaaaaaatcggcgctcaagtccaagggtg

SEQ ID NO: 134785 - DNA, 967 bp, Homo Sapiens
  misc_feature (52)..(52): n is a, c, g, or t
  misc_feature (68)..(68): n is a, c, g, or t
  misc_feature (97)..(97): n is a, c, g, or t
cgcctccagaaattgatttatctaattaaattaaataaaataaatttaaatntcagaagtcccatttncccagggatcccccaaaaatagcattttntagccataaattacgtaaagagtcaaccatcaggaccagcccatgtccaacaaattcgtgtggaaaaacccccagtttatattcaattgaaagttctaaaattatatcctttttactctgaaaaatctaaaaatgtggaagagaatcacttctgagtagtataaacaaaaaagtaataagcaatcattttaataccagggatttaataagttgtcttaatatttctgataaatattcagatgattactttgaagtattttgaaataaagatactttccatatttcataaagctacttttaatatattaacatttattgctcttgagttcaaagtatatcttattctagccaccaaaacatttagaaaatagaaaaaaaggtaaaaactaatttttttatctcttatatttcagacacttaatacccttaccccattcactgaatccaatttcattgctatttccttgttttgtccttttgagtggttcgggatctgcttcaaatgacaaagagatgtgagtaatagggttcaacgtctttcttattttcagatttaaagctcttcaatgatgtagctcaaaatgaaagttctttcaatccaacaactttgcagagatgctgatccctctcccaggtgaatcctggccaggcctttctgacaatcctgggataccctggggccagtatagagttcaagggcagaccagactgggggaggggttcctgagggacctggaaccagcatcaccagcacagtcagaattgcaaccccatgtgaatccttgtcagaggaactggagccatgatactggtttagagcactcgtctatttcctcgtgccgagaatcgccaccccaggcctcgcgtcct

SEQ ID NO: 134786 - DNA, 980 bp, Homo Sapiens
  misc_feature (507)..(507): n is a, c, g, or t
  misc_feature (606)..(606): n is a, c, g, or t
  misc_feature (647)..(709): n is a, c, g, or t
  misc_feature (721)..(721): n is a, c, g, or t
  misc_feature (738)..(738): n is a, c, g, or t
  misc_feature (748)..(748): n is a, c, g, or t
  misc_feature (793)..(793): n is a, c, g, or t
  misc_feature (796)..(796): n is a, c, g, or t
  misc_feature (961)..(961): n is a, c, g, or t
ttacaatggtccttatgctggactcatttatcttgaaatggtgggcaaccacagaccccaatctatggtatcaagcaactcaactttttcttgtaatgtcatgactcttctgtgcttcttgggagcacttctatgactggtggtgcttcatatgggtcctgcagtttttatgtcctcaaggtttacagtattgcactaaccatgaaaaatatgcaagaaccgcaagggatcactttttactgtgatccacggtttatggagagatgaactgctcacacagagatgattagcatcacatggtgttttaaacagatcttttgacacttgagttcaccacaatagcaacaggaggtaactacaaaataattatagtagctcagtatgtactacagttaattttatgcagttatgatttaatactgtatctttgtttacatttctctcaaccatgaatggtgccatgtacagtttgtttgtatgtttttataaattttaactttttataanagatttgtgtgtattttatagtaaatgataaaataggctagtatctatataactttttaatttttctatatttctaggctacatggtttgttttttcanattgccacaaatctcaaaaaaattttccaatatacttacannnnnnnnnnnnnnnnnnnnnnnnnnnnnnnnnnnnnnnnnnnnnnnnnnnnnnnnnnnnnnntaatttcatggntctcccaccttcagtgnctcatttatnccctgtatatatttctaggaacttgggcttttgttttgatttcanaanaggaatgagattttggtgatattacttgttactgagaaattaaacaagatgtaaaaacatttagataggcattctacatttagttggatagtataacatagaagggtagaaaatactggtgacttattttatatctgcagttatatgggaaaatatctctctaangtgctgtggtgtatataaa

SEQ ID NO: 134787 - DNA, 1079 bp, Homo Sapiens
  misc_feature (364)..(422): n is a, c, g, or t
  misc_feature (474)..(504): n is a, c, g, or t
  misc_feature (562)..(985): n is a, c, g, or t
  misc_feature (989)..(990): n is a, c, g, or t
  misc_feature (1011)..(1011): n is a, c, g, or t
  misc_feature (1016)..(1016): n is a, c, g, or t
gtcataaatgaagtcacggtacacatccgtacaagtttgttaaacgaatgtttataaaagtcaatattttgattaaatcaaaaatggctcacagatgttctgtcctcagaagatatcagaaaagtggaaataaaggtgtatgaagtgggtagtgtccctccatgttgtcacctcctcacatatgtgctgcagtgcggtggtgcggtgcttctggctgtgtagcgctccgtgtgcgtgtctcctggtatgaggtgtgccagtggccccactacgctcgcgcttttggccttgggagcgcgcctggttacccggcagcaggtaactgtgtgcctctgagctgtttggctgtctggttttaggtctnnnnnnnnnnnnnnnnnnnnnnnnnnnnnnnnnnnnnnnnnnnnnnnnnnnnnnnnnnnggtttctgatctccagttggtgcagattatgttggcagccggtgactgcagnnnnnnnnnnnnnnnnnnnnnnnnnnnnnnncaaggcctacagccgcgggccgctccaacatcagaatggtcctcgtgccgaattcttnnnnnnnnnnnnnnnnnnnnnnnnnnnnnnnnnnnnnnnnnnnnnnnnnnnnnnnnnnnnnnnnnnnnnnnnnnnnnnnnnnnnnnnnnnnnnnnnnnnnnnnnnnnnnnnnnnnnnnnnnnnnnnnnnnnnnnnnnnnnnnnnnnnnnnnnnnnnnnnnnnnnnnnnnnnnnnnnnnnnnnnnnnnnnnnnnnnnnnnnnnnnnnnnnnnnnnnnnnnnnnnnnnnnnnnnnnnnnnnnnnnnnnnnnnnnnnnnnnnnnnnnnnnnnnnnnnnnnnnnnnnnnnnnnnnnnnnnnnnnnnnnnnnnnnnnnnnnnnnnnnnnnnnnnnnnnnnnnnnnnnnnnnnnnnnnnnnnnnnnnnnnnnnnnnnnnnnnnnnnnnnnnnnnnnnnnnnnnnnnnnnnnnnnnnnnnnnnnnnnnnnngtannagggcgcgtgctggcgttttncatangtccgccccctgacgagatacaaaatcgagctcagtcagaggtgcgaaccggacagactataa

SEQ ID NO: 134788 - DNA, 997 bp, Homo Sapiens
  misc_feature (680)..(680): n is a, c, g, or t
  misc_feature (718)..(719): n is a, c, g, or t
  misc_feature (769)..(769): n is a, c, g, or t
  misc_feature (837)..(837): n is a, c, g, or t
  misc_feature (897)..(897): n is a, c, g, or t
  misc_feature (899)..(899): n is a, c, g, or t
  misc_feature (974)..(974): n is a, c, g, or t
tttgcatgtaacttttttattgaggcacaacaaggcattgtaacttgcctggacttgaggcagtcagtttagtaagctgaacgttaatacagttaaggattaagtgcaaacaatatacattcacagcttgactagcgaggctacatcacaatttataaagtgccagattagtgctaattgtcattcagcttgatttttcacctcaggaaggaaaacaaaaaagtaaggacctcctccctctaggaacaaaaacattttcctaaaccaatcagtcatgagggcaaagactacttttccttcaatcccactaattagaacaccatccttttattgtcaatactgtactgactttcaatcttgataaagaagatagcctgaaaacgtagaatatttccagctacttccataaattgctcccctgtgcagacgtaaccatatctggtctccctggaagagctgaagaattgcatgattgctagcagtttcatggtctggagcaccatcattggcataggctgataccaagacctcttcattcttcatgaggttgacatacagtggcacattcactgccagctttagcatgtgaaaaatgaaaacgtaagtgccattcactgggcaattaaatctaccaagctgaagatcaaaagtttctcctaagttgttcagaagaagatcanacacaatagggtgggtctaaagttccaggggccagatnnagaggtctggctgctgagaaggcactcgcatctgctgaggcagagggtanacgtgtactggcagtatggtggctgctggatttgtcactggcacatccacaggggtcatgctacgggnagtctcctttgtcagagtcacactgttaaggttctggtgtctctttctgggctgccactnanaagatcactcacctgctctcgaatgctctggacacagatgtctctcgctatacactgctgaatatcctttggaanaggtgtcagatatcctacttgga

SEQ ID NO: 134789 - DNA, 663 bp, Homo Sapiens
gcctatttacatataaatagatatatatacatatacacgcatctataaattacattctatggagagttctctttcttcctcctatctttggccagggcctctggcttctcctgagaggtggctggtggtggctcctgtgagggaggaaaggcagctgggtgccccctcccccagcccttcccactgatatctgctgcgagttttacattctactttcgttgccatggtttctgtatcctaggagagaggcgatgcggagcctccgccagccctgcgagggagggaagcagccccatggcaggttttctgtctgtcctaagagctttctgcatttactgggtgagagagagggcagctgtgcagcgttcggcctccaattccattttaattttgtttctttgtttgtctttcctcaaatatacagtccatcaccttggctcagtgcatgtcaccaaaaattctccagggatttcatagtctggggaggagagtggcaacagttagctcggcattcaggcggcaccggctcctctagcttatgccacacaagtagccccccttgccactgcaccgctgcaccgtgctgcccgctcgacccccaccaaccccacttgcggcctgccctcctgcggcagcacagaggcaggcacaaatggcctccag

SEQ ID NO: 134790 - DNA, 2389 bp, Homo Sapiens
  misc_feature (76)..(76): n is a, c, g, or t
  misc_feature (238)..(238): n is a, c, g, or t
  misc_feature (248)..(248): n is a, c, g, or t
  misc_feature (512)..(512): n is a, c, g, or t
  misc_feature (535)..(535): n is a, c, g, or t
  misc_feature (594)..(594): n is a, c, g, or t
  misc_feature (670)..(670): n is a, c, g, or t
  misc_feature (767)..(767): n is a, c, g, or t
  misc_feature (919)..(919): n is a, c, g, or t
  misc_feature (926)..(926): n is a, c, g, or t
  misc_feature (1113)..(1130): n is a, c, g, or t
  misc_feature (1359)..(1374): n is a, c, g, or t
  misc_feature (1919)..(2211): n is a, c, g, or t
ccagggcgatggcatgtcttccagatttctagacatatccagtcttatggtgctgcgatcaggccgctgggcgtgntactcgttctccgcgctatggcataggcaacatactaggcgtccatctatactcctgcatctatattcctcggtgacacagctttagtatggtgactgttaggcgcatcagatgatggggcatatcgtggtatgatctgtgggtgatctgcacatcgatgancaccactcgngacacgcgtcctgcgcagcgtcgctgtactggcgggctggagtggtgtgcagcggggacatctcgagatcggtgaacgagagccgtgcttgcggcgtcctcaggtgtcgacgtcggtctgatgtgcagcgagacagatagcgtatagttatatattccggaggcagccggatagccacgacagtagcggacgatgatggtccgtcgacacctcgtcctcgatgtaacgtcggctcaacccgtatacatatctcacaatcctgancgtcacactatcacagactgagntttatgatacctacgctgtgtgcgatgtgaggggcggcgtgaggattcagcagccgttnagtacgctctgacgtgcgagcatagcaggtcatcgtagtcgtcgacgggaaggagtacgctatactgtgagatgtngcgtcgacagcggcagaggatagcgcgccgcagacaccgcgatatggtgtagcatagaatgcacgtacgatcatatatctgttctgaggcagggagngcgcgcgtacattaggcgtgcgagtgtgacgtggagagcgtgtgcgtgcagcgagtacgacacctctcacacacgacatgttctcccgacacacagttgtcctccgcccgacacaggcacggccgcgggccacgtcgcgcgatgctataacnctgtagnagcggtgagtgtgcgcggcgggccgcgtagggcggccggcgggtcgcgggcgcggttgggccgcctgtcggtgctcgcccctcgcatggtcccgtctgtctagaaccgtcgtcggtgcgattagttcgttggggcgggaattcattgtgatctcggtttgctttatgggaggtggggtatactagannnnnnnnnnnnnnnnnntcacgggtgaaaggtttgatgggggtcggctcgctcgttcctgttgtgtggcgggttaccgtcttttaaggggttttctgccggcttcgtgggggccgccggccgaacgtgacaaattctagatgttcgcctccgggctcggggaggggggaggtgttcttttccttgtttgttcgtgcttgttcttttgcgtttgtggtggacaaaaatggttggtttttctgtttgnnnnnnnnnnnnnnnngaatacaagacttagttctcatttatttgtgattttgcaggtgttcaaaccaatgaatgaaaatcaattatctcttcatatcaatgaaattcactatttcactattatcttcagaatcatagtgatcaaaaccctacctgaaaatggtaatacaaaagagaactattaatacaaggtttcagaagactgtgcaagttaaaataattggcattaaaacgacacacaacaaaccaccgaaggtttggtcccttttctctctgatatgtggcctctgatctctttcttagggcagtggttttcaacgtctgtgtagcagaatcacctgaaaagctaacagaacatatagaaacccaggatttgtatttgtatttaaatgtaaatacaaaaggtctgggtctctgtatctttacaaagttctccagcaatggtttccaaaccaggcttatcacaatcaccagggaagctctgaaaacaacaacacattcctaggcttcatccctagaaattctgattcagtaggtttgcctcgtgccgaattcttgggnnnnnnnnnnnnnnnnnnnnnnnnnnnnnnnnnnnnnnnnnnnnnnnnnnnnnnnnnnnnnnnnnnnnnnnnnnnnnnnnnnnnnnnnnnnnnnnnnnnnnnnnnnnnnnnnnnnnnnnnnnnnnnnnnnnnnnnnnnnnnnnnnnnnnnnnnnnnnnnnnnnnnnnnnnnnnnnnnnnnnnnnnnnnnnnnnnnnnnnnnnnnnnnnnnnnnnnnnnnnnnnnnnnnnnnnnnnnnnnnnnnnnnnnnnnnnnnnnnnnnnnnnnnnnnnnnnnnnnnnnnnnnnnnnnnnntcgccggtcgttcgggtgggggagcggtatcagtcacttcaaagcggtatacggttatcacacaatcacgggataagcaggaagaacatgtgtgcaaaggcagcaaaagcacgaacgttaaaagcgggtgctgggtttttcataggtcggcccctcaagagatacaaaatgagctaat

SEQ ID NO: 134791 - DNA, 1830 bp, Homo Sapiens
  misc_feature (407)..(407): n is a, c, g, or t
  misc_feature (1514)..(1690): n is a, c, g, or t
  misc_feature (1696)..(1696): n is a, c, g, or t
  misc_feature (1700)..(1700): n is a, c, g, or t
cagtcgacggtaccggacatatgcccgggaattcggccattacggccggggatctcagtaccccacaaatgattaagaatgatatgaaaaccagcagctaaggaacatcttattatttagttgtagcatattcataacaagtgtccttcaaggataaacatatattctctatttgtatttagcaagtaaaacttgtgttgacctttagtgcattatattcagcttttaacagtattatgtatgtactggaaagcaaagaaatcttagagtcttggacattgtttatttgtgcaacaactagaaaggagcaatgaagtttatttcagttgtatttttccctaagcacaatctgcaatagtttatgtatgacagagataattcaaaaaggaaaactatatataaaagtngtatataaagttgtctctgaaatatttctttgaagtttttaaaaaattgactcatgtttaaaaacaaaaacacatattcagagcatggacttttttaacttgttttcatctgtttatcatgacttttttatttctggtgtagagtccacattatttagtttgttgtacttttaaatttcaaagttcaaatctgaagaattagcgtttgtgatttcgggataccatgcagtggttttaatcccaggaaaaaaactatcaacaaaagttcgtttgattctcattatgtaactttgtagaaccatcctttctagatgggtccaccacagtgaatttgtaactttgaagtcaggatagaatatcattagattatctgtgagatagcattactatgttaggaccagcagagtttgggttggtaaaaataatgtttgctctattactgggttacagacatttcagcatttttaggttggttttaaatcactaaaaatatttattcggatttgaaggatttaagtgctaaaaatcaatccatttcttgcccttcaataattgtccatgcctgccttttgttgtttacatgctcttctgcccagactgttagtaatctagggaccccctttggagctgataagtacagttcagccttttctcctcaaatatataatgactttaacattcctaagaatataggtatttctgaatgatttaaatttgaggaattttaatacataaaatacaatgtacaaactttctgcccactcagatctcttctccatcatgtacttagtatttcccattaacctacacactgatttttatgctactccttgtagaaacaaaattctggtttgactcagtttttgtgtttataaacttttggaatgtgtaccccgtttatgtgaagaattatgacctatcagtcatagctaaatagtgaacctcaaaagtgttaacttttgactattcatgtgaggtttggtatcttgcatttatgtacatggctgtaaattatgtgcatttactctgtatttatgttatctagctgacttttacttgaattgttcaaattttaaaaattaaaataccctccgtgccgaattcttnnnnnnnnnnnnnnnnnnnnnnnnnnnnnnnnnnnnnnnnnnnnnnnnnnnnnnnnnnnnnnnnnnnnnnnnnnnnnnnnnnnnnnnnnnnnnnnnnnnnnnnnnnnnnnnnnnnnnnnnnnnnnnnnnnnnnnnnnnnnnnnnnnnnnnnnnnnnnnnnnnnnnnnnnnnnnnnnngctttncagntcggaaactgtcctgcagctgcataatgatcggcacgccggggaaagcggtgcgtatggcgccttcgcttctcctcactatcctcgctcgtcgtcggtggggagcgtatagtcatcaagggtaacggtat

SEQ ID NO: 134792 - DNA, 1206 bp, Homo Sapiens
  misc_feature (210)..(210): n is a, c, g, or t
  misc_feature (212)..(418): n is a, c, g, or t
  misc_feature (427)..(427): n is a, c, g, or t
  misc_feature (561)..(561): n is a, c, g, or t
  misc_feature (984)..(993): n is a, c, g, or t
tcggcgtccccttgatagtatttttttgtggggcgactatgaaaccacacccttttagtctgctttcgccttgccacttcttctgcttccggatttggatacctatcgccttgatgagtgtccgtccgcaccgacgccggcgagcatagtgagcgagagcgagagcgccatacgcaaacgcctctcccggcgtgccgatcattatgcagntnnnnnnnnnnnnnnnnnnnnnnnnnnnnnnnnnnnnnnnnnnnnnnnnnnnnnnnnnnnnnnnnnnnnnnnnnnnnnnnnnnnnnnnnnnnnnnnnnnnnnnnnnnnnnnnnnnnnnnnnnnnnnnnnnnnnnnnnnnnnnnnnnnnnnnnnnnnnnnnnnnnnnnnnnnnnnnnnnnnnnnnnnnnnnnnnnnnnnnnnnnnnnnnaagattcgngaacgaggatttctggaatgttgacgttcgcaatgactgggaaacaactatagaaaactttcatgtggtggaaacattagctgataatgcaatcatcatttatcaaacacacaagagggtgtggcctgcttctnagcgagacgtattatatctttctgtcattcgaaagataccagccttgactgaaaatgaccctgaaacttggatagtttgtaatttttctgtggatcatgacagtgctcctctaaacaaccgatgtgtccgtgccaaaataaatgttgctatgatttgtcaaaccttggtaagcccaccagagggaaaccaggaaattagcagggacaacattctatgcaagattacatatgtagctaatgtgaaccctggaggatgggcaccagcctcagtgttaagggcagtggcaaagcgagagtatcctaaatttctaaaacgttttacttcttacgtccaagaaaaaactgcaggaaagcctattttgttctagtattaacagtgactgaagcaaggctgtgtgacattccatgttggagaagaacagnnnnnnnnnngctgaatgctctaagctggaacgtaggatctatagccttgtctgtggcccaagaccttggccttgtgtacaaaaatgacaaaatattgcaatagcaaagctgaacatctaacactagctatctcttgctagatctccttgctcagcatataactataaatacatgtaaaattacatgtatatggctatatttttatttgcttgctcctagaag

SEQ ID NO: 134793 - DNA, 556 bp, Homo Sapiens
ttttgcagtgaatccaaagctcgctttatttcctcagtggtcattctgtggcaggcagccaacaaaacagtgatagttatattgcagctcatccttgggttgaaaatctgggataaaatccttgggcttgtttgtagtagtgttttatgactcagtttcctgtttcatcctctgagctgttaatactagaacaaaataggctttcctgcagttttttcttggacgtaagaagtaaaacgttttagaaatttaggatactctcgctttgccactgcccttaacactgaggctggtgcccatcctccagggttcacattagctacatatgtaatcttgcatagaatgttgtccctgctaatttcctggtttccctctggtgggcttaccaaggtttgacaaatcatagcaacatttattttggcacggacacatcggttgtttagaggagcactgtcatgatccacagaaaaattacaaactatccaagtttcagggtcattttcagtcaaggctggtatctttcgaatgacagaaagatataatacgtctcgctgat

SEQ ID NO: 134794 - DNA, 489 bp, Homo Sapiens
gtggtgggctttgacccgcacttcagctacatgaagctcaccaaggccctgcgctacctgcagcagcccggctgcctgctcgtgggcaccaacatggacaaccggcttccgcttgagaacggccgcttcatcgcgggtaccgggtgtctggtccgagccgtggagatggccgcccagcgccaggccgacatcatcgggaagcccagccgcttcattttcgactgcgtgtcccaggaatacggcatcaaccccgagcgcaccgtcatggtgggagaccgcctggacacagacatcctcctaggcgccacctgtggcctgaagaccatcctgaccctcaccggagtctccactctaggggatgtgaagaataatcaggaaagtgactgcgtgtctaagaagaaaatggtccctgacttctatgttgacagcatagccgaccttttgcctgcccttcaaggttaaagattgagtgtctttaatctgcagaat

SEQ ID NO: 134795 - DNA, 1064 bp, Homo Sapiens
  misc_feature (255)..(264): n is a, c, g, or t
taacaggaagaaatatgccttttattaggagttgcatatgtacagagaaagctgtttctcacagctcaggggaggctgtgagaaagagccactgtcatccaaggtcactgcgcgtacactggtaacaccacttagacaccgccgcacgtgattaagaaacagaaccatgacacagaaatgcagaagagacacgggtacgtgtgtggacacatcatttctaaaaacaagtcaacacaaaaatacaatgtgccaatnnnnnnnnnntagacatatccatacatgtctttttttctgtttttaaaagtaaatacatggtatggtgagctttccacttccagctttttccccatggggattcacaggcactttagcaccccagccatggtttacaatacaggatgttcagaacaatgaaggaagatgggagccaccgagatccccgagacccacacacacactctaatattgacgcgagagtgagcttcctgccaccaccgctgtgggacccgaaaatgttctctgtgtgatgtgtaacggcttttcctttgtcttttatgtttcatggcagaactacttaggagcgtggcatcgccagtcagacatgcagtgtgtggatgcattagacaagcatcaattgcctctgacttgaaaaaccgtagagagcagatcaaaatgactgtctggtttatctctgtcccattctgtgcccttcctgacaagctgtcagaacaaaaactaattaaaataattactaggatgtactgggccatgagctcttcctaggagaatttctttcttagctctcccctcatgatagacacagggccaatggcaggcccagcttcccccggcaggagccactcctgtctcccacgttccccacacagagctgtggtgactcaacccacgtgtcaggaacaggaccgaacaagcgtatgtataaacgcagaccaggatcatcactttattggtaatgttgagtcataaggcagttacaaaaggacccccatggtgaccaaacaatgttggactatggcttacttctgtcttaggatgaccgcttt

SEQ ID NO: 134796 - DNA, 1041 bp, Homo Sapiens
  misc_feature (63)..(75): n is a, c, g, or t
  misc_feature (319)..(343): n is a, c, g, or t
  misc_feature (427)..(449): n is a, c, g, or t
  misc_feature (467)..(952): n is a, c, g, or t
  misc_feature (961)..(961): n is a, c, g, or t
  misc_feature (1002)..(1002): n is a, c, g, or t
gttttgctaacctgttaataaaaatatgggaccattatccttttaacaaggctagaatgtcannnnnnnnnnnnncaaacatatacctgatattttgtggccgcacattttggatgcattattataattctgttgactgtaatgacatagaatttacaacattttttgttgttgtttaatttatacagaggacatttttttcagagcttgagagaagaaaataaatagcaaaatgataacctattgactccagtaatcagtgtttcccaatacttcataagagatagggagaccctgagtccttgaagccaagggtttnnnnnnnnnnnnnnnnnnnnnnnnnccaaagtaggttattcaagttgtttgcaacatacattttgtaatgaaatgtgagaaattaataaagaatttttttcacatgtgnnnnnnnnnnnnnnnnnnnnnnncctcgtgccgaattcttnnnnnnnnnnnnnnnnnnnnnnnnnnnnnnnnnnnnnnnnnnnnnnnnnnnnnnnnnnnnnnnnnnnnnnnnnnnnnnnnnnnnnnnnnnnnnnnnnnnnnnnnnnnnnnnnnnnnnnnnnnnnnnnnnnnnnnnnnnnnnnnnnnnnnnnnnnnnnnnnnnnnnnnnnnnnnnnnnnnnnnnnnnnnnnnnnnnnnnnnnnnnnnnnnnnnnnnnnnnnnnnnnnnnnnnnnnnnnnnnnnnnnnnnnnnnnnnnnnnnnnnnnnnnnnnnnnnnnnnnnnnnnnnnnnnnnnnnnnnnnnnnnnnnnnnnnnnnnnnnnnnnnnnnnnnnnnnnnnnnnnnnnnnnnnnnnnnnnnnnnnnnnnnnnnnnnnnnnnnnnnnnnnnnnnnnnnnnnnnnnnnnnnnnnnnnnnnnnnnnnnnnnnnnnnnnnnnnnnnnnnnnnnnnnnnnnnnnnnnnnnnnnnnnnnnnnnnnnnnnnnnnnnctcagtcanaggtgcgaacggacagactaaaaatacagggttcccctggnagtcctcggggcctctgttcgacctgcgctacggaactg

SEQ ID NO: 134797 - DNA, 1012 bp, Homo Sapiens
  misc_feature (700)..(700): n is a, c, g, or t
  misc_feature (707)..(707): n is a, c, g, or t
  misc_feature (719)..(720): n is a, c, g, or t
  misc_feature (751)..(751): n is a, c, g, or t
  misc_feature (983)..(984): n is a, c, g, or t
ttttacaacaaagaccacgccatttatttacaaaggccagtgtgggagctgggggaggcagggagggaaagccacacagacatcttctctggactgcttgggaccctttcccacttggagcaaactctgttcctcttgccgtcatattctcagccatggggtcggtcctccaagcagctgggccaagtaggagagggaagaggtgatatgagcctcctctgtgctctgacagagaaatgtccaattccagatcaaaggcatcattgccaccctctcctctccttcctcaaagaaaactttctggcctggagggaaatagttaagaactgaaaggccagggggtctggaggaaaaaaaccctctactattcccacaaggcagtgaggggtgataagggtgctagtcacagccctgacagcttcagaaagggtacccacattacctctgggttacccagcatccagagccccaagggacctagctctcccggatatatattcctgcaatggactgacctttttacccacttgtctctggtggtgggagagcactctgaaccagaaaccaacaaggaatccacttcccacccaacttaagagtgtatgcacacatgtggatacacatgcacctccccactactcacacagaccccaacccccttcatgtcttttgagggggggctcaaactactggtgcctgnggacacnaagcagacctgnngtcatggaatgtgtgtgtggtgtgcatatancacatatgcttgaggaaactaagccatatgaccccttgtggggccgtgcgctaactccatgggctcttttttcagtttaaatccattacactccagtccttctggcactcgggctggatctctgctaaaaactttagtgctctgtcccaatgttatccactttcaactttatcaggggttcccaatccttctccgaaatcaattccccctggattttgcccaggccattctnnggggccgtaatccaaccatgcacttccc

SEQ ID NO: 134798 - DNA, 1233 bp, Homo Sapiens
gttttgccgtggggcggattttgtcctaaaaggtatgaggtttggtcccccaggtaatccaagttccaagcctttatcaggcgtgttgtccgcgcatgcggtcgtccgataagtggtcattgcgggcttgtgttaacacgaatttcctctgggctgctccagcgttttgttaattcctgtcccagagagctggtctcatctccctcttcaagacagggagaaacaggcatcttcctccttaccctggaatttccaacagttcccaccaaaagtgctgaatgaaccagaatagggccgagaaggaaaattaccacctgtttcacctgctcctccttcagagcaggaatttttagccttggttgggctaggggttggggggtagggagaaaaaggaaggaagggagtttccaaaagtaaccattagccaaacccttagtggtatagatggaagactatgttccagtaaaccagagagctgtttcctccctggactctgcacagcccactgaaagtttaaagattgcaaaagtggtgtggggcaaggaggtagagtcaatcaatgaaactgtgaaaactgtttaagtagcactgctcaaggagaccaggagagaagagtctgttagagacgtagcagtaaaaccataattctcagacagagctaaggggttggagcccatgcctctaaagtcaccctgctgtttggaaaggatgagggagaagacggaagggaggacaagctgcagagggtaaggattgacagaagaaccgaatgctgacatcgagggaggggagaggcaggaggcatgggccgagggattaggagagctgggagcccagcagtctctcgatagctgcgttgatgtcccctcctgtggcaatcagggcctgcaggttagcctcacgattgatgaagcccatggagttgagctgctccagctgctgctgaaatctcacttctggcgtctgcacctgtgagtttccacttccagccaaaagctggatcatctgctgcatgagttgctgctgggcgctggaagcccctgttggagaagatgtggctggcgtggctggtgaggaagtgggggcctcgggcgtagaccctgcgttgctgcctgctgagggtgctggggtccgggacatcccaaaggagccaaggctgggtaccagcccaggggcctcggtctgcaaggtctcggacgcgtgggtcgacgatatcccgggaattccggaccg

SEQ ID NO: 134799 - DNA, 980 bp, Homo Sapiens
  misc_feature (676)..(676): n is a, c, g, or t
  misc_feature (722)..(722): n is a, c, g, or t
  misc_feature (734)..(734): n is a, c, g, or t
  misc_feature (742)..(742): n is a, c, g, or t
  misc_feature (757)..(758): n is a, c, g, or t
  misc_feature (805)..(805): n is a, c, g, or t
  misc_feature (812)..(812): n is a, c, g, or t
  misc_feature (827)..(827): n is a, c, g, or t
  misc_feature (832)..(832): n is a, c, g, or t
  misc_feature (900)..(900): n is a, c, g, or t
  misc_feature (931)..(931): n is a, c, g, or t
  misc_feature (946)..(946): n is a, c, g, or t
  misc_feature (948)..(948): n is a, c, g, or t
tttgtctttttacttcttttattgaactccataaatattttcataaggctttgtgtcattacaacattttttttgttaaacattttttaacacacaactttgacacttgtttgacagagtcagtcagataaaagaaacaaaagaataaactggcaaatgcagagcagcaagggtaatcaaagtcactgttgcccatccatccaccccagcccaccccatccccaaagcactaaaagatcactatttggcttcacactagaattgttagaactctcttgttgctgttcttatagatccattagaaatatacacatagagagggggggaaaaagagagaataattagatgtctgtcttaggactccccacagcaggtcccattgaacacactagcaaagccttttggagagcaaatcctggcctcactgagttgaggaaaagggagctcagggccatgcggaaattacaacattacagaattactggggttaccattgctgtcaggacataacaggttaggatactgaacccaggtatttaattgggctccccttggggctgttggccactggtctgctttgatgctataggctgagggaatactccaaccaatggggaaatgatttcttggttgttcacaaattagtggcatcaggtgatgccagtgggttcagtanaggagaagtgcgggttgagaagtatatccctgatcctggagcctgngcagaagcccanggagggangaatgagagggctanntcagaatgtaggcccagaacttgtccagcatccctcccggtgtgctngcacccntcgagaacatgtcanggcangcctataggaggagtgagaagtggaaaaagagtaactgagggaggctgcatactacaaacacctgcanacagaatttacctgggtgtggcacaagactntgcaaaagctactantnggcagtgcgacatggggcatcccacccggccc

SEQ ID NO: 134800 - DNA, 700 bp, Homo Sapiens
  misc_feature (584)..(584): n is a, c, g, or t
  misc_feature (634)..(650): n is a, c, g, or t
gtgttctaaatgtgtacatttatttaatcaaaacattcaaaaacatacatcttcagtcattttcttaagtatattttattgtaagcataacctgaaaatagtttgctctatttaattcctcaagaaaaattagggcagggttaaaaaagatgaatttttctgatcaagttcataaaaatgaaaaatcaagaatgttggttggattttataaaaggctttaatttctttacttgaaaactttcataattttaagtatttcagtgcaaagcagcattttctatgttgtcaactttttctattgtgaattaaaaatatatccaactcttattttgcaacttatttatgaatatcgaacttcaataaaaatattcattattgtgctttggtcttggcattgggggaaggggtaattgtggtagaagataggatttggtggtggttacacaggaggtaattttaaagagatctgttgaggattctaatataacctttatttttaaaatacctcactgtagaccagaagcctaacagaaactttaccaaaattttaaagtaatttgtaaaatgaaagtaatcacttttcntgtatgaagccaattctggactttctaaattagatcatatgtacaaatannnnnnnnnnnnnnnnnactagtctttcacttctgggctgacattttctttctgctttattgcacac

SEQ ID NO: 134801 - DNA, 1120 bp, Homo Sapiens
  misc_feature (231)..(231): n is a, c, g, or t
  misc_feature (612)..(629): n is a, c, g, or t
  misc_feature (671)..(1050): n is a, c, g, or t
  misc_feature (1059)..(1059): n is a, c, g, or t
tcattctgcgttctgtttaatgaaacttggatgttctgctgtttggatcattgtgctaacagactgagttatatgagcatcagattctgttcttctgtccagcctttctgatcgactatgtgacattcgttcccgtgcttgctccccacgctctctcaagcaagtgttcaacgttctctgtcttgcaacgcttgaaacgctgctgggacattctgagctgctttagcctgnctttgagggtttctgatttctttcctaaattcttccatttttctgattctctacagtcaggagttcttttgatttgttcagctcttccacatttttcaagttgttttctttaagtgtgtccaattcattctgtagttttgcatttgtttgcttggtgtcctccaaggaggccagagtctcagtcttctctttggtcatctgttccattatctgcatggcatcttccgctgtttgagcagctttggtctttgtcggcttgcatttctcagctccatccagctcctgcagcaagccactgttcatcctcccgtgcgcccttcagcttgtcactctgtgtccagcagcgtcttctggaggtatgagagagccacttctgagacnnnnnnnnnnnnnnnnnngcctacagccgcggccgctccaaccctcgtgccgaattcttnnnnnnnnnnnnnnnnnnnnnnnnnnnnnnnnnnnnnnnnnnnnnnnnnnnnnnnnnnnnnnnnnnnnnnnnnnnnnnnnnnnnnnnnnnnnnnnnnnnnnnnnnnnnnnnnnnnnnnnnnnnnnnnnnnnnnnnnnnnnnnnnnnnnnnnnnnnnnnnnnnnnnnnnnnnnnnnnnnnnnnnnnnnnnnnnnnnnnnnnnnnnnnnnnnnnnnnnnnnnnnnnnnnnnnnnnnnnnnnnnnnnnnnnnnnnnnnnnnnnnnnnnnnnnnnnnnnnnnnnnnnnnnnnnnnnnnnnnnnnnnnnnnnnnnnnnnnnnnnnnnnnnnnnnnnnnnnnnnnnnnnnnnnnnnnnnnnnnnnnnnnnnnnnnnnnnnnnnnnncgcaggaangacatgtgacaaagccagcaaaggcaggaacgtaaaaggcgcgtgctggcgttttcatagc

SEQ ID NO: 134802 - DNA, 985 bp, Homo Sapiens
ttgttttgctttggtgtccctcccaagggaggcccagagtttccagtcttctctttgggtcatctgttcccattatctgcatggcatcttccggctgtttgagcagctttggctttgtcggctgcttttctcagctcctccagctcctgcagcaagccactgttctcctcccgtgcgcccttcagcttgtcctctgtgtccagcagcgtcttctggaggttctgtaggatttcttcatgcttggtttttgtctcagaagtggctctctcatacctggctttcagctcctgacactggttgtggcttgtttccattttcttttccaggtccgacaatttcctctccaattctttcttttcttcctcatgctttttagctgcttcttgctggctctgttcagctttgacagtcatgtcctcaatacttttttgcagaaaacttgcattttcattagcctttgtaagttttagctgtaattcttctacatctctttctttcagacgtaattcatcgttcatttttgtcagctgagaagagttatctcctgacatcttcattatttctgcaatgtcattttccagtttttcctttgcctttatcagctgctcttctctctcatctttctctctaaattttgcctccatatctgctaagttttctctcagcttctccaagtcagaagacagcatgttaaactgttcctccttttggtgtaacttatttacagtttcttgcatacttctctgaacagagactgcctcctctgaagcttcagcaaacttttctttcaaaatctgaagttctttttccaaagtctctttcacttgactgacttcactcaaattttcctgaaggttagtaagctttagctctctcccctggagctctctggtaatgctactagccttgctactttcagcattcttttcaatctctaaatgtttaatctgtttctcagctgcctcaagctgctgtctaagtttct

SEQ ID NO: 134803 - DNA, 1117 bp, Homo Sapiens
  misc_feature (52)..(94): n is a, c, g, or t
  misc_feature (978)..(1054): n is a, c, g, or t
catgaggcttgtagcacatcaaattttgaatgtcttcttttaaagctatgtnnnnnnnnnnnnnnnnnnnnnnnnnnnnnnnnnnnnnnnnnnntcctccctctgaactgatggtgtttagtatcgataacattttctttcttggtaatacgaggtaaatgaggggggcaaaaacttatgacttctgagtaaaatgccatgtcttctatattccgtgagctgcacagtcttgcaggaatgctccacatttcagagtaaatctgaaactggcttaaaagctccaaatcctcccttgtatgtggtatgagtgtgccttcatctccagctgtcagagccaaatcgcccacctcctcatccaagtgatgcctaatcagacatttaaggattctgaacttgatcctgtctcttcacaatatgtagtaaatttaaacttacttaagaaagtcagtccctaactaaggacatttaaacttccttaggaaaggagagctcactgaatgatgtcaaagtaatgaactgatttcctctacaaggtcactgcaaccacaccagctagctctatctctacaggcatttagacttcgctatggggccacaccaccgggtggacagtaactcttggaagtctgtcttcccttttcttcattaataaaaacacagaacaatgactaagtgtccaagcatgttcttacagttcagtacctccccagatgcttacaaacagtgatagcatacctctaactcaccactggcctgggcgcaagagcatattttggtttgttttttcatagactaggggtaaaggtctgcactactaagaaaatatctgaattttcccattgtcatttccatgtaaaaactccccttgacaataaacgtaagtccaagccacagaggggagagcaatttcccacctgtgggagggctttccctaaactaaattttctacttcttaaccatctatcccagagcctcttnnnnnnnnnnnnnnnnnnnnnnnnnnnnnnnnnnnnnnnnnnnnnnnnnnnnnnnnnnnnnnnnnnnnnnnnnnnnntgaattggaggaaaagaaaattcacctacaactctaaattagatttccagatgcatgggcacg

SEQ ID NO: 134804 - DNA, 262 bp, Homo Sapiens
gtagagatgaggtcgcgctatgttgccccggctggaaatgtaaattttcttaatctcccatcttagacttatttggtcggcttggagttaggaaggaatttctcactgtagtgcccaacctgaaatggtaattgtgtttgagccagttccctgaacataagggggcgaggggaggaagaggaacgatccaggccattttagttgatacataatagttgcacatattttttcatgtgatgtttcgatatatgcatacaatgtg

SEQ ID NO: 134805 - DNA, 954 bp, Homo Sapiens
  misc_feature (240)..(240): n is a, c, g, or t
  misc_feature (242)..(242): n is a, c, g, or t
  misc_feature (244)..(244): n is a, c, g, or t
  misc_feature (248)..(248): n is a, c, g, or t
  misc_feature (268)..(269): n is a, c, g, or t
  misc_feature (271)..(272): n is a, c, g, or t
  misc_feature (277)..(277): n is a, c, g, or t
  misc_feature (347)..(347): n is a, c, g, or t
  misc_feature (357)..(357): n is a, c, g, or t
ccgagttcctgaaaaactttattgagctcatggagaaagtgactccagactccaagcagtgtgagtgcctggcagggcagctggctctgggcagtgcccaggcagcatggggccagcccagaggaacccagaggccgggcaggtgtggaaataagcaggcacaagctaagggctgggcctgggccagggccaggtcatggaggaggctcctggtggagccttaaggttggggtgtgaggntngncaangagctgcaagaagatgcccnnanncccanccctcccctcctgttccaggcaacaacttccttctgcacaacctggttcttggacacgggcatcacgcancagctggtanagcgtgtgtggagggaccaggatctcaacacgtaggcatcacccagccagtctgcctcttgggtgctccagggcagctgaggactggacagagaaccctgagcccttcaatgccagcttctaccgccgcagctctgtgtcctcattgatgatggaggattcctggtgctggcctggtggacctctgctgccgcctggtgagtcctgatcgggaggtgggtagagaaggtgctccctggccgggagggctcacaagagaattatggcatgggatcgtcctctgctgaccacctgcactcggttcccgtgcggtgcaggccctgtttcagcaggttctccggggctcatcaaccaaggggttccaacaggtaggagggctttggggggctcctcattccggttcccaaccgggctaagacgttccagggaggggggggctagacgagggagcccgtacttgcacggccgtgggggttgcgggctcgtgcccgcacccccgttgcatggagcccgacccttgagttgcgtgggaaagccaatattcgggggaacctcgggcatttggctggggcagtccattgggtgtattggtcgtcgt

SEQ ID NO: 134806 - DNA, 640 bp, Homo Sapiens
  misc_feature (524)..(524): n is a, c, g, or t
  misc_feature (553)..(553): n is a, c, g, or t
  misc_feature (627)..(627): n is a, c, g, or t
tttcatttgtgaatgctctcacctttatttctctcaatatacccgtgatacagatatttcatatgtaacaaagataaggacgtgtgcaggtataaaacagaggcagaatcatggctaaaacatctagcccagcaatgaactcattatccctgaggggtaggggcgggggaggagaggagtcacaggcagttcacccacacctggaaaatcgatgacttcatggagaatgaatgactcggggggattcagatcatgaagtcatgagaagaaggcctttcttcccagggatgatgtttctcagtatcaataatcagttgtgggtttttttcttctatttcttccagcagcttattgagttcatcattaaagtcatcgattttcaacctgagtgtccggagggtgccactggaacatgtcaaggtttcaaacagcatcttcactccactagaccccaagggattctgacccaggtccagagtgacgaggctctggttgcagctgagggcaaaccgaagtcttcacanctgagcggagggatgggacatccccacanccacagacatctcaagttgcaccagggttgcctcagagccttacacaggaacttgatccccttacgtccttggnagtcaccccccaa

SEQ ID NO: 134807 - DNA, 1067 bp, Homo Sapiens
tatgagtgtaattcttaatttattattaaataatccattgaatattgacaattttacacagtactcatcaaaaaatctagacccggaaaagagattattcagtgcttttcgaagaagtcaaaaaatccttaaaaccagagtaggcagggtacagcaaataaaatgcagacactttaacatgagaaacaaaatctccaaaattgttctcctacctacccaatctgccatattccactttttccaccaatttcaggagtttccgccacatggtttggctccagtgagccagtccttgcagcatccacagacacgaattggatctgtgtttttatatcaacagataagttcaattacttcatgatattcttttatgcacaggtaaagaactgatattgataatccaggaatttggttttatttttacacatgaactgtgaacatagaactgcatgccctagaagaaatgacagctggtgagaaaataggtttctgtgcgttatctggagccaagagtgctaggtgcagaaggatcagtagatgatacagtggccaccttggtacagttgccagtgagctatcaggaatcacaagtagatttgaggaaagcttcaatagaaggaatagaggtagtggaaactgattcatgaacccttctgagtaataacaaatactttaaaaaaccatatcatgagttctaatataattttcttgtctggaatcagctactttcaggatcacttgttcttttaggcttctgaacttttacactgaagactgtggcatcatcagaaaaaagatcacaacacttggaatccctgattacctaatcctccagcagttaaggcccaaggaaacagcctctaggataccaattcatcaaaaagtgttccaggttcattctaattcaataaattatgttgagattaagttatacataatagatgttaatactaccattattaatattgttattattttcaaacctcaaagtttatttttgaaatacagattgatttttttccctaaaatgctaaagcttttacatacatacaaaagtatgacctggg

SEQ ID NO: 134808 - DNA, 777 bp, Homo Sapiens
tttgctattggtgcatcctatttttaggttgctttcattattttattttttatacagatacatacacattgctagaatcaaagcaaaaatattaatgggcaggtactacagaactaaagtgaaacaaaacaaaacaacgaacaactgaaaaacaatagctataaactttcaaggccaaaagataagatttaagggcaatacctgttgaagaaggaaaaggagtataaagttcctagagaggtatttataatgcaaatctaatgccagctttttagtaataaaaaagagaagtgctttactatacactgactagcacataatacttaatttggaaagaaaaattaatgacgttccttgggccagcagcagatatggtgtgtccattgccggcaacagacacaacaccggaacagaaaaacccaaatcccagggctaaagtattcacagaagtaatggttgaaggtttcaggatttaacaggctaggtttaatcacaagtgctacactctgtacaatgttatggctctgcctgaaattttacagctataacagaaactaaataaacaagtcaatttaggtcatacatgtagtatagtatacaacctttctgacaggctttctatgtggagtgatgagcgcatatcacgatcctatcagtgtgagatagataaatcagcagataccgcatctgcagatcaagactatcacgactcgtatgccatcaaacgcagacgcaggacattccctccagacaaacggtcctctcgatgactttctg

SEQ ID NO: 134809 - DNA, 1011 bp, Homo Sapiens
  misc_feature (273)..(286): n is a, c, g, or t
  misc_feature (660)..(660): n is a, c, g, or t
  misc_feature (784)..(784): n is a, c, g, or t
  misc_feature (854)..(854): n is a, c, g, or t
  misc_feature (892)..(892): n is a, c, g, or t
  misc_feature (947)..(947): n is a, c, g, or t
  misc_feature (965)..(965): n is a, c, g, or t
atcatcgaaataatttatttaccactagagcaccacaaaaacagacatacatcgtgttaaaatacagcgtaattggtcatcaaaatacaaaacagctaatcttatattccattttttaaccatgccaacgatcaaattgtactgctgattaacacaaaaataattgctgcccacttgcatactagcacttcaccccttccttgccacctccacccccctcccatggcaatatttacttatgggaaataaagaccttacagaacccccaaattnnnnnnnnnnnnnncagattcaagagatcttaaaatagagcatttaaaatattatcagtgcattcatgaggaaagacaaaataatacaaaacaaaatgtcatcctatttgagaggaaaatgtctgcagaaataaaagtgatttacacataatagaaaagtggaagacaaaaaaataatcaacacacactcaaatctgggattgggttacatccaacacaagggctgtttactattatggcatcccatctcttgcttttccagttttcaaacttgcaaatccaattctttaattaatggtcaggaaattccaaaaaagaagtagaccatatcaaacaacttcactttggattcccgcctccttatgctgctctttaggtgaaactgcanatattccattgctttgcctattaatttttattttaaagctaaataagcgacaagtgataaactgacatattctattaaccccagcatgaggatactcttctgcatgatgtggcaatttattatntaagcagggtaactttagcctcagatatagatactctcactcagaggaaagaaagattttttgatcatangaaaatggcttgtgcttttcccctcaagacatttatanacctatactcagtgaataacaaatgactatgcgatctgactcgtgcgattctggnctcgaggcaatccctaangagtcgataatcgatcatgtcaactgtcctgtgtgaatgtatcgcc

SEQ ID NO: 134810 - DNA, 1036 bp, Homo Sapiens
  misc_feature (40)..(40): n is a, c, g, or t
  misc_feature (144)..(144): n is a, c, g, or t
  misc_feature (191)..(191): n is a, c, g, or t
  misc_feature (201)..(201): n is a, c, g, or t
  misc_feature (205)..(205): n is a, c, g, or t
  misc_feature (285)..(285): n is a, c, g, or t
  misc_feature (958)..(978): n is a, c, g, or t
ttaccaagatcgtcagatatgttgttttgttcacaatctntagactgttgattgggcgtcacacttctgtatttacgacgttgattattactcagacgcgtgaggccactcagtgccctcattcctctcagtattagaaagatntagaatactccttcaattgatcaacagtccaccctttctagttcacngctgcctctntgtntatggcacttttgtgtgatacttccccaacacagtcaaaggccagtatgacagaaccaatggcacatgatgcctctattntgcccatttggggaaatgttagtaaaagaaatagcatcttttaatggctgtcattatcatatccatattaaaatccatttaaagttcttaaatttggcggaataatgtatacaggctgtaaacttctacaaaaaatgtttgctgtctttaatatggtgtcaagttacttggtcctttgaaaacaaaacaaaacttccatacacagcactgcccagtaaagcagtgttggaatattggaaacctagacatttgaggatccttcttgctcacaagcattggaacagaatcctccactttaggactcagagaagctatggagtcccacaggctaggtatagcacacaacttagagaacggtagttaaagcacgtcaaccacaattgaatttaatgatctaaaaaatatttcttaactctgagggttaaactgaagatacgttttcaaataaaagcttttaaatttcttaggaaacaaactgtgacatcgcttttaaaaatgacattcaaatgtttataatgtgtgtttttgagttggcttggactagtgcaagttcactgctggcaatggttatgccagtagttaagttaaaataagttgttaccttcagattgatgtcttgtataaccagacaatcatcttcaagcaaaaaaattggccaggaaatgtctttttnnnnnnnnnnnnnnnnnnnnngcctacagccgcggccgcaagctaattccctttagtgagggtaattttagcatggcac

SEQ ID NO: 134811 - DNA, 1649 bp, Homo Sapiens
  misc_feature (319)..(603): n is a, c, g, or t
  misc_feature (645)..(690): n is a, c, g, or t
  misc_feature (1145)..(1145): n is a, c, g, or t
  misc_feature (1398)..(1398): n is a, c, g, or t
  misc_feature (1415)..(1415): n is a, c, g, or t
  misc_feature (1425)..(1425): n is a, c, g, or t
  misc_feature (1430)..(1430): n is a, c, g, or t
  misc_feature (1498)..(1498): n is a, c, g, or t
  misc_feature (1512)..(1512): n is a, c, g, or t
  misc_feature (1534)..(1534): n is a, c, g, or t
  misc_feature (1537)..(1538): n is a, c, g, or t
  misc_feature (1562)..(1562): n is a, c, g, or t
cttcaaaagggaaacgaacagttccgataaagcaggagaacaggagaacaggggagatcacggggaacctgagttaacatatcatacaggtatgccactttgaattggggacggttttgtatattattaggggggcggagccaataaaaaaacgcacaaaacacaaccgttgtgacggtccaagccattatggtggccgtgtgaacaagaaataatcatgacgtttcgcctgaatttttgaaaaaccgtgttgccgccattgagtgagatggtaacgatcacagcaaccgaaagaacgagcaaggcgtttcattaacannnnnnnnnnnnnnnnnnnnnnnnnnnnnnnnnnnnnnnnnnnnnnnnnnnnnnnnnnnnnnnnnnnnnnnnnnnnnnnnnnnnnnnnnnnnnnnnnnnnnnnnnnnnnnnnnnnnnnnnnnnnnnnnnnnnnnnnnnnnnnnnnnnnnnnnnnnnnnnnnnnnnnnnnnnnnnnnnnnnnnnnnnnnnnnnnnnnnnnnnnnnnnnnnnnnnnnnnnnnnnnnnnnnnnnnnnnnnnnnnnnnnnnnnnnnnnnnnnnnnnnnnnnnnnnnnnnnnnnnnnnnnaagaattcggcacgagggttggagcggccgcggctgtaggcnnnnnnnnnnnnnnnnnnnnnnnnnnnnnnnnnnnnnnnnnnnnnnatttatggaaaactctgactttctgtgttctttattggtgcacagcattgagacacggtattcaaatgctggttgacactgaggtcatttttatgacacattgcatccaacttgctgttggaatatcacatacaattttggaaccatattgtaacacatattgaaaatatccaacaagtaatcagaatggtaaataagggacattcactcaaagacatgtatccagggacagtatggcagagactgctatttgtcaaccaatatctgttttcccctttttccttgaaaaaggcctccaatattttcctgggcacagggatcaataaaagactgcatttcctaatcattctggaactaaatgtggccatatgaccaagttctggccaaagtaatataaatggaaatgttctgtgtgacttctgggaaatgtccttaaagagaaggaaatgatcttncttttccccttccttttttctgaccgcaggatagcagatgtaatgcctagagcttgaggagacatcttgcaccacagtgtggaaaccatgcactaggacaaagggacagcaaaagagaagggttctgggtccctgatgactcgtgaaacctctaccagctttagaaggacacctctggaccttagtatcccaattccaacagaaacaaatgaatttttaaagtattaagttgaggaccagtggctagggtganggtggactctctagcangttctcaggngatanaatcctgatgacaacgatgaactcacatctactctgacgttttcaattcttcctgatgtacttcaggntgaactttactcanagccagtacgtgggacaaggangannaatgtactattttgctgataacangcaagtggttggtctggatgcatgtcaaaggactctatccacagactctgatgtctaacacatctcacacatctgtgcaatctaacc

SEQ ID NO: 134812 - DNA, 936 bp, Homo Sapiens
acagtgttatagtttataaggttttaaaaggaggaaataaaataggatatatggttttattttcatttaaaaaaagtatatatctgtttaaaggcacagaaaaaagttcagaggtatacttacaccaaggcattaaaagtggttatttggggcatcagaattttggttgatttaaatttcttttctgcttattttgtattttcatatgacatgaggaatgttaatatgcataacatgtactcctcacaaaagagtagtaaagctaaaaagagaaagcagtgccaggtagacaaaatgtctctttcaacactggctgaccctggatattatactggtaacaagatgatagactctgtgttctaccatgttcctgctgtgacagctgcatggcataaagagacagagatgctctacttccaggattccttgaatgtacttagagtcttcttcctagtgggtctgaccaccttcttagtctgggctaagagctggccgacattcagcagcagcaggaaccccaggcagacaatggctgggatacaggtgcttagtgactctttcagagctgccaaggtgaagatagcccccatcatgagcagaatcaagaacaagttactgatctcttgcagcatcggtgggcccatgaccagcagcaacccagccagcagttccagaaagcccacagctatttggtagttcaggggatctggctggtagccaaataccttcagcgggaacacctcagcaaactgcacgaacagggcattcatccgctccgaaactggagccgagatctcctccgagagcttggccaaccccacgagcgcgaagaagccgcccagcagtacacgcagcaccgaaagcaggagcgccatggccgcgctcccccggccgtaatggccgaattcccgggcatatgtccggtcccgtcgactg

SEQ ID NO: 134813 - DNA, 1082 bp, Homo Sapiens
  misc_feature (818)..(818): n is a, c, g, or t
  misc_feature (824)..(824): n is a, c, g, or t
  misc_feature (896)..(896): n is a, c, g, or t
  misc_feature (939)..(939): n is a, c, g, or t
  misc_feature (995)..(995): n is a, c, g, or t
  misc_feature (998)..(998): n is a, c, g, or t
gacactttttactcttgagtttgccactaaagtaaaagagagaaacatcccaaactggtcatttatgaaaacgttaagttcagtgtgaaacttgctttaaaactacaaattatgtcagacaaaataaatatatatgctcacatttataaaattttccacagtactcatagaaacaagcttcataaaatttatactgaatacaataaaaatcagttctaataaagatttagctatcttcctaaataaaaatttctgtgtttgaggtatcactgtaagacatgccaatatggcacatttgtaaaacaacccaggagtctattctaaaaatcacaaccaactcagcatcatctctgcagacttactaacaggctgaactaatctctttatacaagaagtattttaattattacaaaaacaaaggaggcaggtactagaaattctgcatttcatagaagagtaaaactttgttagagatattttcatgatcatctacctgcagacaccattcatttaaaaagtcctagtcaagaccattaagcagctgcatcttctacaacattgaaaaaaaatccctagagatttaaaaaactgaagaatttcactatctttaaaagatattatattttagtacataaagctattaaatttctctgtgtcaagagcaaaacattaccccttaccttgcttcatcattggaaggtggacacctgattcagcaatactcattaactgctaggtagatgacccatgttgatggcagtaaagccattttacaatgaacttatgaagtagtacactagccaaaacacagagaccanataccnaaatgatgtgtttagtataacaaatagctatacttggggcatggtatcaagtacaagatgattatacttacnttacagcacatacaatatatgcagaggatatggtccaatacanaatgtcaatggaaagtgtgatatgcaagatataatacaatccaggaggcaaacgtntanacaatttaattacgctagcaatccatactctgaatcaacatagtgaaaagctctttcctcttttctttggagtcctttgccggc

SEQ ID NO: 134814 - DNA, 1055 bp, Homo Sapiens
  misc_feature (61)..(80): n is a, c, g, or t
  misc_feature (458)..(489): n is a, c, g, or t
  misc_feature (824)..(824): n is a, c, g, or t
  misc_feature (828)..(828): n is a, c, g, or t
  misc_feature (855)..(855): n is a, c, g, or t
  misc_feature (873)..(873): n is a, c, g, or t
  misc_feature (875)..(875): n is a, c, g, or t
  misc_feature (939)..(939): n is a, c, g, or t
gtgccaagctaaaattaaccctcaactaaagggaataagcttgcggccgcctgctcaggtnnnnnnnnnnnnnnnnnnnngttcgccgattcctttatttatttaggaggtgggggcaggacgcggagtaagtttcctatagggaaagagttgagaagagtctgcagggactgagctagaaagcagtgacactccgtagttggaaaaaagcagagcacatctttaagtacctggtgtgagttttgtaagaaaacctaccttatgaatgagtacagtggaatactacttagtacattcatacatgtttctaccatctcaagatttttatatatacagtatatgatctgtttttataaatgtacagcttgaaaaaagatccttcttgtagtaagtacagcatttaaacacaaaccaatatgggccagccacattctaattgaagacccagagaaagcaannnnnnnnnnnnnnnnnnnnnnnnnnnnnnnntgacctgcttggcggccctgatggtcccggcaaagtgtaaaccagtgcccctctgtcgccctgggctcagcaggccagcttacccttggcacgtacatgggaagtgcctgctcacgctaagcccagtctgcagagggcgggtcctccctgaaggaaggtggcagagaggaatgtgtctatcaggtatggacaagagagatgaaagaaatgtgctcttcaactaaaggcacttgtcagcggccacctacagccattctctaggcctggtgagcaagcagggtgctgttttgatagaagcctacaaggtctgagcagacctcacttgtctctcacangttnaatacataataatctaatgagggtgtnttgtctcctggtcctatnangagtactttaggatactatgggtgaatcctgtcccaccagctttcatgtctcatgggaagtcanatactcagcttggaacatgtcatgtggtgagggagcctatatctccctggcgtgctgagtccgccaggcaatccgactaattgcaaatttgggaagcgtgccttcactccacaaag

SEQ ID NO: 134815 - DNA, 662 bp, Homo Sapiens
  misc_feature (532)..(564): n is a, c, g, or t
ctaatgacttcattttaattagttttgtttgtttgctccataaagactctatttccaaataaggtcatattgtgaggtactggtggctgggactccaacatcttctttggaggcacacaattcaacccataacaaatgtcataaaagaagaaggtgttcgccgattcctttatttatttaggaggtgggggcaggacgcggagtaagtttcctatagggaaagagttgagaagagtctgcagggactgacctagaaagcagtgacactccgtagttggaaaaaagcagagcacatctttaagtacctggtgtgagttttgtaagaaaacctaccttatgaatgagtacagtggaatactacttagtacattcatacatgtttctaccatctcaagatttttatatatacagtatatgatctgtttttataaatgtacagcttgaaaaaagatccttcttgtagtaagtacagcatttaaacacaaaccaatatgggccagccacattctaattgaagacccagagaaagcannnnnnnnnnnnnnnnnnnnnnnnnnnnnnnnntgacctgcttggcggccctgatggtcccggcaaagtgtaaaccagtgcccctctgtcgccctgggctcagcaagccagcttacccttggcacgtaatg

SEQ ID NO: 134816 - DNA, 1154 bp, Homo Sapiens
  misc_feature (1046)..(1080): n is a, c, g, or t
tttctttttacaaaacagcagctggaaagagaaatgtaggtggcagacgagccaggcacgaggtttcagattggaagggaccaagatgaggaccaaggtgtggctgcctgactaggaacgctgtgggctggcccaggctctcgccacacatcctgggagaactgccataggccctagaaggagggatgaaaggcgtatgggagggaagacagcggtccccggatcagcagcagcaccaccatcctctgatggcccctgggcagtccgccagctcggaagcactcagggctggagcctgggctctaagcatgggccccaggagccagacaggagggaggcagcaggaagggctggcatggaagggctgagttctattggggtcccacgcgggcaagggaaccaggactcatccctgcttgtcagccaatcagcttcttcaggaaggcctccaactgatcctcatccttgatgcccacaaacttgtccaccacgtccccattcttcatggccagcacagtgggcaccgctgacacctcatactcaatggcgaggtctgtgtggtcatcaatatccaccttggccatcaccaccttcccgtgctgcttggccaccatcttctctaacctcggccccaggatcttgcagggtccacaccactgtgcgtggaaatccacaaccactggtgtctcactgttgaccactcggtcttgaaagtcaggtccatcctggatattaaaggttgtcaaggagatcctcgtggtgtatattgtccgggctgggttgggtgttacagtcaggccaccaggactgcattgtggggtctgcagggctctggaagtgaggggtggccactgaccctgagagggcttcctggagatgacagaggccaggaacctcctcagaagaagtcgctgagccatctccctgcatgcgagcggagggatgcacagcctagccctccctgcctgtcaagggcacgcctgtcgtcacttccccccggccgtaatggccgaattcccgggcatatgtccggtaccgtcgactgnnnnnnnnnnnnnnnnnnnnnnnnnnnnnnnnnnncggccgcttcctcgctcactactcgctgcgctcgtcgttcgctcacggctagcccctatagtgatcttcagttt

SEQ ID NO: 134817 - DNA, 1016 bp, Homo Sapiens
  misc_feature (768)..(768): n is a, c, g, or t
  misc_feature (794)..(794): n is a, c, g, or t
  misc_feature (875)..(875): n is a, c, g, or t
  misc_feature (928)..(928): n is a, c, g, or t
  misc_feature (944)..(944): n is a, c, g, or t
  misc_feature (946)..(946): n is a, c, g, or t
  misc_feature (969)..(969): n is a, c, g, or t
  misc_feature (989)..(989): n is a, c, g, or t
ttataacaatacaatacaaatatttacttaaaactcacaaaaacataagcacctttaatccatcgggaaggcacctgcagaatgacatttggcctctaaatggatcgtgttggaggttgttaaaaacggaggctttggtgatggtgggatgacctttacgaggcttaccttggaacattttttgaaggtcaggggaaatacacatcttcaagttgaatttagaaaaaaatatagtgtccaaatctggcagtccctcccccaacccctgagacctattcacgaacaggatgggtcgggcgagctggggggctggaggcatggccccgctcccggggcgcgtgggtgtggacagagcgtggggcgggcccaggcgctggggtgcagctaggtcatgtgattcagctccaggtgggggcgcggctccttccctctgttctctccgggctggggtcccacaccccgtggtgccgaggcgtagatgaagtcaggtgggaggggagggagaagccttcactgtccaggatcaggacgtgcacgggacactcacgaacgaatggcatgctgaggtcacgaggttgctctcgggagcccgggctcggcggctcctagcccatgaagcaagccggccccacttcaaatccaaatttctgtgacgcttcaccgaggtcattgaacatgatgtccacgatgggcacctgctccactttgggggtgtcgatctccagaaccgtcttctggtagctttcttggtagcacagcgtccacaangcgcggatgtaggggttgtgtcatangcatccctcgtcgttgggccaagaacggagggcttgtcgtactgccgtggtgcgtctgccagcactgacggtacatggtangtacgtctggtgggcaagcctaacaacgcagaaggcactgtacacacacaggntgcctcgcgtcaatangnagagttcccacgctgatcatgancagagcgggtttcttggcangatgatctgccctcgactctgcaggaa

SEQ ID NO: 134818 - DNA, 721 bp, Homo Sapiens
  misc_feature (61)..(78): n is a, c, g, or t
  misc_feature (559)..(568): n is a, c, g, or t
gtgccaagctaaaattaaccctcaactaaagggaataagcttgcggccgcggctgtaggcnnnnnnnnnnnnnnnnnncatgaacctcaaagtagcaatatatttatttacaaaatatacagtttcacagaaacagcttcgctttatacacataaactttaaaattacacagaaccatgtaaacgatgtgaagtgtctggcctggccaaagccaatgggagggcctacttttggggtgacatccctccctcccctcacttcattagccaccaaccaggaaccacagatgggtcgtgcctaatttgcatataaagaagctgattgcagctgcccagctcaatctaacacaaaaaccaaggtgtccgacttcttagacaccacccacagggacagatctgctaaaagaacaaaaatgcaatcaaggaaacaaaatggagatgagtatcacatgcattccagaggcatcgaaccttctagcacacgtgacagttgccagggccggcagttccattctaaagtcacatggattcttaaatgcacctttaaaagcttgtggaannnnnnnnnncaaagcagaaaaacacttttggagcgctggttattcacgtggtgaagacactggacaggcgttatctcagggtagatctttggcacattcctctccaatgcgtcctggctgtttgccctcgtcagtttctaaaccagcttactatttttctct

SEQ ID NO: 134819 - DNA, 1069 bp, Homo Sapiens
  misc_feature (32)..(32): n is a, c, g, or t
  misc_feature (34)..(34): n is a, c, g, or t
  misc_feature (83)..(571): n is a, c, g, or t
  misc_feature (610)..(632): n is a, c, g, or t
tcgtagcgcaggcgaacaggagccacgagagntncagggaacgcctgttcttatagtctgtcggttcgcactctgacatgagnnnnnnnnnnnnnnnnnnnnnnnnnnnnnnnnnnnnnnnnnnnnnnnnnnnnnnnnnnnnnnnnnnnnnnnnnnnnnnnnnnnnnnnnnnnnnnnnnnnnnnnnnnnnnnnnnnnnnnnnnnnnnnnnnnnnnnnnnnnnnnnnnnnnnnnnnnnnnnnnnnnnnnnnnnnnnnnnnnnnnnnnnnnnnnnnnnnnnnnnnnnnnnnnnnnnnnnnnnnnnnnnnnnnnnnnnnnnnnnnnnnnnnnnnnnnnnnnnnnnnnnnnnnnnnnnnnnnnnnnnnnnnnnnnnnnnnnnnnnnnnnnnnnnnnnnnnnnnnnnnnnnnnnnnnnnnnnnnnnnnnnnnnnnnnnnnnnnnnnnnnnnnnnnnnnnnnnnnnnnnnnnnnnnnnnnnnnnnnnnnnnnnnnnnnnnnnnnnnnnnnnnnnnnnnnnnnnnnnnnnnnnnnnnnnnnnnnnnnnnnnnnnnnnnnnnnnnnnnnnnnnnnnnnnaagaattcggcacgaggggagcggccgcggctgtaggcnnnnnnnnnnnnnnnnnnnnnnngacttaaagacaatgaaagtttatttatcaagtccaaaatgagcactacgcattggagttggctttcctccaaatgatgtatttggaggaaaatacatcaggaaaccggatgtattccatcttgtggtccttttatcttcaacacatggcttccaagtggctgggttcctctgcagcaagctgtgggaggggaaagagagggtggagaagatgcacccatttcttaattgctgttgcccggaaataacacatatcacttcctgtcatgttccattcattggcaagaacttgtcacatgacttgatctagaagagaggagtacaaatccatcaagggtcagcagagatctgtgctcctcgttgtcctcaatctgggacccaggctgatggagcttccaacatcacgtacgaggagaaggcggcggcggcggcggccgc

SEQ ID NO: 134820 - DNA, 809 bp, Homo Sapiens
  misc_feature (302)..(349): n is a, c, g, or t
  misc_feature (399)..(454): n is a, c, g, or t
ctctgtctatctcatcatcccgcactgctcttagcatcgaagtcactgtctgcatctggcttttcctcctactttcacatccagtttgaagaatgcatttctcttgtgtattctgttttttgaacttacttcattggagaagccccttgagtttttcttccctttaataccagatctggcttcacgaaagctgcatttaggtacttcctcttcaccaactgcttgatttaataggtgcctataaaatccactgagatctttctgcttggttacatccaaacatgcttccagtgcagcagccnnnnnnnnnnnnnnnnnnnnnnnnnnnnnnnnnnnnnnnnnnnnnnnntatgcagatgtcacaaatgcttctttatcatcaaactcccccttttccannnnnnnnnnnnnnnnnnnnnnnnnnnnnnnnnnnnnnnnnnnnnnnnnnnnnnnnatctcaactgcttttagcaagttgtgaatatacttgggctttctgtctttcccctaaagcaatttgggattattttcctccttttttttctgcatttcatcataaatactgtcatattcatacacagtagcatcttctgcaagggccttctggatttccagtttggtctgtttcatggcctgcttcttagcagcttccctctgaaggctttcactcacagaggtctcatcatcatcatcagaatcattcccaaacactgatggtttttgcaaaacagggtgcaactgctgtgttttctttggcaaaataagcccatactgcctgcccggaatcgccatcatgctcccgtgttcgc

SEQ ID NO: 134821 - DNA, 1021 bp, Homo Sapiens
  misc_feature (301)..(317): n is a, c, g, or t
  misc_feature (469)..(899): n is a, c, g, or t
  misc_feature (910)..(910): n is a, c, g, or t
  misc_feature (922)..(922): n is a, c, g, or t
  misc_feature (958)..(958): n is a, c, g, or t
tttttttcacttttgtcacctcttggcaaatccctcacccctcctctactttaccatctgttatgagtctctctcattcttcttttctctgtctcaggttttctactgctctatgtctgtctcctgatccctttggcccacagaattgtggtaaaggttaaaaagaaaaagaaacaagttttcttctgcttagcagctcacttcaaggaaagttataagataacgctgtccaaaaagctaaggctaaagtaatgggctctagacactttttaaattccagaacaaagtgaaggaaaaaaannnnnnnnnnnnnnnnnaagacaaattcttctactgttactcatttccctagtctcttaagcatgactatgttttacaaatgtctgtatttagccagttcttttttttgacacagctacaaggccaccagctatgtagaatccaacttctccctcgtgccgaattcttnnnnnnnnnnnnnnnnnnnnnnnnnnnnnnnnnnnnnnnnnnnnnnnnnnnnnnnnnnnnnnnnnnnnnnnnnnnnnnnnnnnnnnnnnnnnnnnnnnnnnnnnnnnnnnnnnnnnnnnnnnnnnnnnnnnnnnnnnnnnnnnnnnnnnnnnnnnnnnnnnnnnnnnnnnnnnnnnnnnnnnnnnnnnnnnnnnnnnnnnnnnnnnnnnnnnnnnnnnnnnnnnnnnnnnnnnnnnnnnnnnnnnnnnnnnnnnnnnnnnnnnnnnnnnnnnnnnnnnnnnnnnnnnnnnnnnnnnnnnnnnnnnnnnnnnnnnnnnnnnnnnnnnnnnnnnnnnnnnnnnnnnnnnnnnnnnnnnnnnnnnnnnnnnnnnnnnnnnnnnnnnnnnnnnnnnnnnnnnnnnnnnnnnnnnnnnnnnnnnnnnnnnnnnnnnggcgcgtgctngcgttttcatangctcgcccctgacagcatcaaaatcgagctaatcanagtgcgaaccgacagaataaatacaaggttcccctggagtcctctgctctctgttcgactgcg

SEQ ID NO: 134822 - DNA, 1021 bp, Homo Sapiens
  misc_feature (678)..(678): n is a, c, g, or t
  misc_feature (687)..(687): n is a, c, g, or t
  misc_feature (727)..(727): n is a, c, g, or t
  misc_feature (755)..(755): n is a, c, g, or t
  misc_feature (771)..(771): n is a, c, g, or t
  misc_feature (790)..(790): n is a, c, g, or t
  misc_feature (838)..(838): n is a, c, g, or t
  misc_feature (868)..(868): n is a, c, g, or t
  misc_feature (879)..(879): n is a, c, g, or t
  misc_feature (886)..(886): n is a, c, g, or t
  misc_feature (888)..(888): n is a, c, g, or t
  misc_feature (916)..(917): n is a, c, g, or t
  misc_feature (949)..(949): n is a, c, g, or t
  misc_feature (957)..(957): n is a, c, g, or t
  misc_feature (996)..(996): n is a, c, g, or t
atgtttttaaatctgattttcaattttattcaaagcaatagactgcattcctttcccaggacacattccaaccagaggttaaagctcagaaatgaatggatttctgagacaggaggcagctgtggaaatccttactttagagataacttctgcaaagctcctgttatacagtggactcgcccatacattggaaatgctgctgctgcctgaagcagagaattttcagcctgagatacttcttcctcaagattttccatcaagcatttgataaccattaatgtgttcctttccaccacagcagcaggcctatctccattatcacatgcaacttgctgagttaagtaggcagacaaggatgacggtagagcatcctgccagattaagaagttcagcaggtaggaagctgtcacacagtcgtatggtttggtgcttgtgctgagctccaatgctgcctgaaataagccttgcagtttccccgaatcctgaaaatgtacagctgtttttgataacttcatcagaagatcaaatgctaaaattttcacgtcttcaaaagtgctggtaaaacattccattagtgtttggaaacgaccaacatcaatatcatgactcagctgatatactgtataaattctgccttctgggacatgaaaaacttcagctattgaacctaaaatggtntaagctganaatctagtcgagtaggaagattcaggaaacaatgcttcanaaagactgttacaaatggatgacatganattcttatactgctgntaagaacagagggtgctgnttggttactcattctctggttcacgtttggattactctgctccatttnataagtactgagaacttcctgtatctacanacaacttttangaaagananatctgttgcgcactctggagactgctgnntagatgatgtataaagactgatcactgcattnctcatggnacattctgtgctcgatacttcaactcgtgcgattctggnctcgagggcaatcctatatgatcga

SEQ ID NO: 134823 - DNA, 1007 bp, Homo Sapiens
  misc_feature (665)..(873): n is a, c, g, or t
  misc_feature (875)..(875): n is a, c, g, or t
tttttttacaccaaagctaatttttaatgaaattggtttacagaagtaaaaaacaaaaattggaaagcaaagtaataaaacttagtttatataaacaggttgaatgatatatttatcaaatctcacagacatcaggcaaattatagcctggtgacaaaagtgttcatagtgaattagttactcttgtaatacttctataattagttcatcaggaatttcatccacttcactgttataactgagaagactgttctctgcagcttcagctaattcagcatcttcagtagcttctaaaaaataagcatcatcaatgccattatcccagacagcatcagcagatgcacctgttgacagcctgctaggtgatggtttatgaggattctgggtttcattgctcctagtttcatctgcttcatctgttgtaaactcttcttcctctttgaaaagaaacaggagacatacttcagcaggtaatgggaaacagtcagatttgaagttttctgctttacatacagggtcatgacatttttgataccaaacttcatttttcagatcaaccagaatcattatattattactcttatgggctcttccaatgttttcacaccaccgatatttacaaatatcataaaccagtaattcttctgcctcgtgccgaattcttnnnnnnnnnnnnnnnnnnnnnnnnnnnnnnnnnnnnnnnnnnnnnnnnnnnnnnnnnnnnnnnnnnnnnnnnnnnnnnnnnnnnnnnnnnnnnnnnnnnnnnnnnnnnnnnnnnnnnnnnnnnnnnnnnnnnnnnnnnnnnnnnnnnnnnnnnnnnnnnnnnnnnnnnnnnnnnnnnnnnnnnnnnnnnnnnnnnnnnnnnnnnnnnnnanctgcattatgatcggcaaccgcgggagaggcgtttgcgtatggcgctctcgctcctcctcatgatcgtgcgccggtcgtcggctggggagcgtacactcactcaagcgtataggtatcaagatcagggtacg

SEQ ID NO: 134824 - DNA, 1151 bp, Homo Sapiens
  misc_feature (171)..(179): n is a, c, g, or t
  misc_feature (181)..(181): n is a, c, g, or t
  misc_feature (183)..(183): n is a, c, g, or t
  misc_feature (196)..(196): n is a, c, g, or t
  misc_feature (205)..(205): n is a, c, g, or t
  misc_feature (207)..(207): n is a, c, g, or t
  misc_feature (270)..(270): n is a, c, g, or t
  misc_feature (505)..(519): n is a, c, g, or t
  misc_feature (722)..(751): n is a, c, g, or t
cgcgccaatagggggcggcgcaccaaagggggtgtttctttggagagtgagcccccggcgtggggggcgagaatctttcccaaggaggttttttcgtgggacaaatagcgcgcgcttttgttggggagaaatagagggggtttttcacaacatgagtctgggggggcccgnnnnnnnnngngncgcgatacctggntaggagaantngcacccacacccaaccttttctcctttccccagaatagataagatggggggccccagaggggngcgcggggaggggccggttaaaacatcttgtggaaatatatttccggagggggcctccgcggccgctgcgggggatactttccccctatatttggagatattgtgaattgcccccacagttaacaatggggcgcccctttccacaggagagcgatccccccactttcgtggggaaatttttgtgtttgcaaagaaaaacggcctttcggggttttggcaccggcccagggggggnnnnnnnnnnnnnnngggtggagggaatccccaaaggccacctaggttcatgggcccagggattcttccctagggaaaccagggtatgaggcatggttcaccttaccctacgtggggcccgccgcgcccaaaacgaatgggtttagagaaaccttctggagggggccgagggcggccgagcaggggtcgtttcatactattggtcgggagtgcggcgnnnnnnnnnnnnnnnnnnnnnnnnnnnnnncgtggcaactgtttttaatcttttttcaatccatgtttacgatttgctaaatactttaaaatttaaagcatgggtactaagtccattgtcaagatagcaaatttatcttctgatttgtcttcagctggactgtccacttgttaaaaaattaaatccacccttgctcttccgtcggggagtattgaaaagtatgtgcacagaactgtaggtaatttcaaatttggagtttcaagtgtgtctgagcttcagtgcagcaacgtttgaatcagtgcactcattcccacggtgagatatcggagacagcattcctcctgcatattcactttagtatctgtcacttaataccttacttcaacatagagtataaggttaaatcacatatcctgagtaaatattttcc

SEQ ID NO: 134825 - DNA, 945 bp, Homo Sapiens
  misc_feature (54)..(103): n is a, c, g, or t
  misc_feature (671)..(671): n is a, c, g, or t
  misc_feature (763)..(763): n is a, c, g, or t
  misc_feature (773)..(773): n is a, c, g, or t
  misc_feature (788)..(788): n is a, c, g, or t
  misc_feature (859)..(859): n is a, c, g, or t
ttttttaagtcttaagataatagcattatattaaagtgaaaccatcttcttttnnnnnnnnnnnnnnnnnnnnnnnnnnnnnnnnnnnnnnnnnnnnnnnnnnggtgcaagtgttggtttgaacaatgaggttatgagttctgggcagcagggctctgatgttggcccaatcggtgccttgcgtctgggccccgacaaggcaggcgggagagccccgaagcctccaggcggcaggagacagaagagaggacacagcattccaccattcaggagcagccagaagctctgacggaacagacttggggggagatgggaaaagcaggtttggacgcttccactcgagccagacgctgctttgtccccagggttagctgaacacggtgttgtgctgctgggtcacccggatgaatgttgccctcctgctgagctccttgagtttggcggcccccacgtaggtgcacgtggacctcagtcccccgagaatatccaggatagtgttttccacatctcctttgtaaggaacttccccagtcttaccctcagaggctctgtactcagcaactcctcctgcgtgcttgttcatggcggtgtcagagctcatcccgtagaagagcttgagcttccgtccgttcctctcaatcacttctccagcacactccgtatgacccganaacattcctcccagcatgacaaaatctgctccagctccaaaggctttggcgacatcccctggacacgtacagcctccatcagagatgatgtnggccttcaangcatgggcagagtcngacactcaatgacggcactcagctgggggtacccactccccgtctggtgcgggtggtgcacacagacctgntccactccactttgatgatactgctccggaagaatagctctctacattctctgtcacacgttccctgcatatgtgtgtcaagaatt

SEQ ID NO: 134826 - DNA, 1707 bp, Homo Sapiens
ttccccggtgtgttaaactcaagggcctttctgttttttgttcctttttgctccaggcacctgacgatttgttctgctcagtcagatgcagacaggtgtctccgaagtaccaccgctgggatatcctcgggccagcgcctaaactgaatccccacagtatcaaactcagccaggccaaagggaacacagtgacgcagcaacagggttttcatttcattttccctccccccgtttcccccaagttatttagtgctgttttaaaagtctggggccacaatgcagtctcttcccctcacaacagagtaaaagctccacagattgcgctgtctacctggtggtcagtggcagcaacagtggctgctgcttctggaaattaaacggagtcttacaacaagcaggatcttaggattgcttcaggcgtttgcgtgggggtcccagaaaagggcactgtgctgaagccagagagcggtatgcctcagccaccaagtggggatgtgacaccaccattgacttccacccagaggtctccaagacatccgaagcatgatagttgatgaaatccactgcctgagttttcaactgatctgcactgtggaggtcggccaggatgagaatttctgcagcgttctccacggacaggttactgcagagggcatcctcacacatgacctttaagcgctccagggcatacttgtcagcagctgccagcaaatcatcagccattttgtcgaggtttggagccttccccgtgtaaatgaagcacatcatttccttaaaaacttcaggctccacatcattgatttcaactcgattctttttgctctcctccatttcatgttcaaacatggcactaaaaaccggagaacgagctgctaagatagccttgtgagcctggaattcctggccggcaacacacaagcagcagtctgtgaaccgggaattctcccacagtcctcctaactcatctgccagccggcactcaggaacctttaccatgttcatggtattctggccagaaatgttgacagaatcttgcacaacactcacctcgcagaagagggtaagcttgtcatcagggagaagcccgttggcctcatccaaaagaaaatctctacggatgaatttcttgaatccccagtctttgccttgcacaaacctatatgcccgttgactctccatagctttggtttcttctcccttggcattcaggatggagaatttgaattttgcccgaacttcactctttggacagctgaccagtaacaggtaaagtgacaggtaatctttgctttcttcatctaaccctttggggtttactcgcaaacaccatttcagtttatcatttgctcctgatgaaaatgtagaacttttaatgacttcacccatttcctcccggcaaaagctaaagttattgatggtccacatgtaggagaatttcactaccttgatctgtgtgtagcaccaactctcagctacggggccactcgacatttctgccggaggtggaggacttggaacccttgacatcgccagtttgaaggttaaacgagatttccaaagtcagggggcaaagatttctgttccctcttcaccctgagagcggcggcgacagctgctggtccccgtccccctgcgcttgcctcatactgtccgcaacatccgggacctgcgggaccgccgatacccaaatacacacacactcggagc

SEQ ID NO: 134827 - DNA, 1011 bp, Homo Sapiens
ctgtcttgttcagggcattgtaacgtccgacaattacccctttgtggagttgggacctttccgcgttaatgtgagcactcatttccgtaaaactctcggctcaacatcgtgattcaaactggattctttggttctcccccatgtaaggtccaacacgtggcactaaaaccggagacggacctgttaagatacccttgtggagcctggaattccctggccggcaacacacaagcagcagtctgtgaaccggaattctcccacagtcctcctaactcatctgccagccggcactcaggaacctttaccatgttcatggtattctggccagaaatgttgacagaatcttgcacaacactcacctcgcagaagagggtaagcttgtcatcagggagaagcccgttggcctcatccaaaagaaaatctctacggatgaatttcttgaatccccagtctttgccttgcacaaacctatatgcccgttgactctccatagctttggtttcttctcccttggcattcaggatggagaatttgaattttgcccgaacttcactctttggacagctgaccagtaacaggtaaagtgacaggtaatctttgctttcttcatctaaccctttggggtttactcgcaaacaccatttcagtttatcatttgctcctgatgaaaatgtagaacttttaatgacttcacccatttcctcccggcaaaagctaaagttattgatggtccacatgtaggagaatttcactaccttgatctgtgtgtagcaccaactctcagctacggggccactcgacatttctgccggaggtggaggacttggaacccttgacatcgccagtttgaaggttaaacgagatttccaaagtcagggggcaaagatttctgttccctcttcaccctgagagcgcggcgacagctgctggtccccgtccacctgcgcttgcctcatactgtccgcctcgtgccgaattcaacacccagcctcgcacctagcctatagttta

SEQ ID NO: 134828 - DNA, 1095 bp, Homo Sapiens
gtgtatttatatgacttttattttaatatcattttaatatcgaatatgtcacaagatttaatgaccaaattagtcatttacatttttcaaagtatctaaatataaaattgctaaaaattcaaatacagatagcaagctacaaatatttcttttgtttttgggtggggggtaggaatggaagacattagaaaaggacgctcctgttggctgaacaaagatcagaatgaaagaagaattcatcagcatgaccccttgtgcaaagaaatacactcagctttaagatgctgttttagacacatctcttcctgtacaacaatttaaaaaatgtttctaatgcaggtcctcagtgaaacaccggtccccggccctggctggggacagtaaggacatcaccgcaggagggacactgaagaggctgtcgaggactgcagaggcatctggtgtggccagaggcgtggtgtcaggggcatctgatcccttgcctgttcccacccagggagccggacggcacggacacaggtctccctccgctcacccctctccctgaaacgtgagaaacagcagctttccgcctgcttgaaaaaggaggcaggcgctgtaaggagaagaggaatggggaatgtgggcccttccaaggcagcgaagcagagaacatgcaggtggaactgccagctgaaacctacacttgctacttaagaaacggaaagaccatgtctggctgggagtgcagcgtgcctgaggaccagccaccgcccctcctcctggcaccccacactgtccacgcagctcctgggctctgaggtcagaagctggggtgtgctgaaggggaaagtgacacggccttggacacaccactaggtctctgttcctaacttttagtaagacactaccctcgaagcaaatgcactcatttaaacaaatggcatagttaaaactattgactaagacctaaacatttcttctgagaaatcgaaccatagcttttccaatctgcctgttcaatatgggaacagattttaaagagagtaacataatcaatcctccgccccaaagaatggtccatcataccaaccatgataaagagtacacctgttt

SEQ ID NO: 134829 - DNA, 1298 bp, Homo Sapiens
  misc_feature (79)..(79): n is a, c, g, or t
  misc_feature (233)..(271): n is a, c, g, or t
  misc_feature (315)..(335): n is a, c, g, or t
  misc_feature (367)..(480): n is a, c, g, or t
  misc_feature (1076)..(1186): n is a, c, g, or t
cggtgggggtgtcgcgggtgtggagtccggccggcctgtaacgggggcccgcgtgggaggtgctgtgtggtagttgccngtgtggtggtgtcccagaggagaggccgtgtggcggtttgcgcgcgcgggtgggggttttgtgtttttgtgtggggtgaagagactggggggtccctttgtggttcttggcggggaggatgggttttctgatggggaccgagcggttttggacnnnnnnnnnnnnnnnnnnnnnnnnnnnnnnnnnnnnnnnagaagcgtaaggaggaggttgttgatggaggaagtttttttgannnnnnnnnnnnnnnnnnnnnccgacacgaggttgtttatggttttgcgctcnnnnnnnnnnnnnnnnnnnnnnnnnnnnnnnnnnnnnnnnnnnnnnnnnnnnnnnnnnnnnnnnnnnnnnnnnnnnnnnnnnnnnnnnnnnnnnnnnnnnnnnnnnnnnnnnnnaagttatagcacaggttattggctagaaatgaattttagcaggccctgtctcagtgtgaatgaggcaaatttaggcccacatcattaggtatttcacaacttaacacctaaaattttaacataaatttacaaaaataaggcttattttaaagtcatctggagaaactgttttacaggtatcttaactttatttagctctctgtagaattaacatctttgcaaatatattattcaaccaagcatttgccataaagataagcatcaactttcccattggacaagtgatagtgttcaagctacttgacttgtgaaaaacaaaaaaccaccatgacttctcaacaaatacattttaaaatgaaatatgctcaggctgataaacaaacaagatattaaaatggagactgacattgaactacatagtcaacttgaaaaacacaagaagacaatgctcctataaaataatatattattggctttacaaagacatactggtttatgtttacaactatgttttattttcaaatggtaaaggaaaggcttcatgttgctatttgaaagtacttctcaactagccgggcatggtggcataattcctnnnnnnnnnnnnnnnnnnnnnnnnnnnnnnnnnnnnnnnnnnnnnnnnnnnnnnnnnnnnnnnnnnnnnnnnnnnnnnnnnnnnnnnnnnnnnnnnnnnnnnnnnnnnnnnaaagaaagtacttctctgcaagtaaattttatggatataatctttattctgattaaataaatgattaccctaatcagctattatttattattttccctcgtgccgaattctt

SEQ ID NO: 134830 - DNA, 570 bp, Homo Sapiens
  misc_feature (300)..(355): n is a, c, g, or t
accaccatgacttctcaacagatacattttacaatgaaatatgctcaggctgataaacaaacaagatattagaatggagactgacattgaactacatagtcaacttgaaaaacacaagaagacaatgctcctataaaatgatatattattggctttacaaagacatactggtttatgtttacaactatgttttattttcaaatggtaaaggaaaggcttcatgttgctatttgaaagtacttctcaactagccgggcatggtggcataattcctgaagtaggaggatcatccccttgagnnnnnnnnnnnnnnnnnnnnnnnnnnnnnnnnnnnnnnnnnnnnnnnnnnnnnnnntgacagagtgagaccctgtctttaaaacaaaaagaaagtacttctctgcaagtaaattttatggatataatctttattctgattaaataaatgattaccctaatcagctattatttattattttctatttaacattcatttttgaagtgccagagacctgcctatgtcgcataaagtttggtcagatatatgcaaatgcagtgttggcggccgca

SEQ ID NO: 134831 - DNA, 926 bp, Homo Sapiens
  misc_feature (152)..(207): n is a, c, g, or t
  misc_feature (552)..(674): n is a, c, g, or t
  misc_feature (681)..(798): n is a, c, g, or t
  misc_feature (817)..(830): n is a, c, g, or t
ttttacaaaggacatactggtttatgttttacaactatgttttattttcaaaatggtaaaggaaaagccttcatgttgctattggaaagtacttctcaattagccgggcatggtggcataattcctgaagtaggaggatcatccccttgagnnnnnnnnnnnnnnnnnnnnnnnnnnnnnnnnnnnnnnnnnnnnnnnnnnnnnnnntgacagagtgagaccctgtctttaaaacaaaaagaaagtacttctctgcaagtaaattttatggatataatctttattctgattaaataaatgattaccctaatcagctattatttattattttctatttaacattcatttttgaagtgccagagacctgcctatgtcgcataaagtttggtcagatatatgcaaatgcagtgttggtgaagatcatctgaataatgatcactttcacatgccatattagttatattttagtatcactgctcattgtgcttcctctctttaataaagtataaatcaagcaattaaaagctgtgtaggccagtcgcggtggctcannnnnnnnnnnnnnnnnnnnnnnnnnnnnnnnnnnnnnnnnnnnnnnnnnnnnnnnnnnnnnnnnnnnnnnnnnnnnnnnnnnnnnnnnnnnnnnnnnnnnnnnnnnnnnnnnnnnnnnnnnncgtgatnnnnnnnnnnnnnnnnnnnnnnnnnnnnnnnnnnnnnnnnnnnnnnnnnnnnnnnnnnnnnnnnnnnnnnnnnnnnnnnnnnnnnnnnnnnnnnnnnnnnnnnnnnnnnnnnnnnnnnagagtgaaactctgtctcnnnnnnnnnnnnnnggctgttaaagggtcaaaaccatctcagcggctagcactatttagtggagtcactagctaagagaatggtgatcccgggaatccggaccggtccag

SEQ ID NO: 134832 - DNA, 1001 bp, Homo Sapiens
  misc_feature (222)..(222): n is a, c, g, or t
  misc_feature (641)..(641): n is a, c, g, or t
  misc_feature (761)..(761): n is a, c, g, or t
  misc_feature (781)..(781): n is a, c, g, or t
  misc_feature (787)..(787): n is a, c, g, or t
  misc_feature (798)..(798): n is a, c, g, or t
  misc_feature (806)..(806): n is a, c, g, or t
  misc_feature (814)..(814): n is a, c, g, or t
  misc_feature (828)..(828): n is a, c, g, or t
  misc_feature (831)..(831): n is a, c, g, or t
  misc_feature (848)..(848): n is a, c, g, or t
  misc_feature (887)..(887): n is a, c, g, or t
  misc_feature (920)..(921): n is a, c, g, or t
  misc_feature (924)..(924): n is a, c, g, or t
  misc_feature (955)..(955): n is a, c, g, or t
tttttttcatgggatgctcatttattattcaatatgtgcttaccagccaggcactgggtgcctggggcacagacaggcaaggcccctgctttcatgaaccttatattgggattggggaaacagctgataaataaaaaagccaacaaataagataattacaggtaatcataaaaaaatgaagaaaagcaaaggcaggttaatggggtacagactgaacagtanttggagaaggggaaggagaatggggaaatgacacgctggtacagcaggcagattgttctgtaggaattttgaactcaacattccctaattctgtgatctccttcaggcagaaaatgtcatttgacttgtacagcaacctctacacacacccacttgcccaaccaccctatcctgacgtaaggtgtgtcagtttaggcacaggctaagcattaaataagggaagatgttctccaaatgccagagcttctggagctcagctaggctgtcagcctccttgttcacctggcgcccggtgtaaatgcttcagaaacagtcccctgcaggctggctactggctgggtcagagggctcgatagcaattgttgaatctcagatctgagcgttttgcagaaagaagcctgtttgcactcacaactttngcagtagcacctgcttttagcaaatctccagttacaagccatgaagacccaaccctagtgggctgtggagttatagactgagagggtcctgagaggtcacccagctctgtctccagacanggaaatgtatagcatcctgngcccangctccattccntctctggntagaccangggcagagtcatantcntctgggcctgggcagcngcacttcacaccatcgtgctcagaggagtctttttgccnttgcactaatacttctgtgtcaagtgtctctgnnttnaggtaatcacacactgcctaaaaaatatctngactgggatctctctcctaaaagtcttagtgatccaggcccacata

SEQ ID NO: 134833 - DNA, 1007 bp, Homo Sapiens
  misc_feature (589)..(589): n is a, c, g, or t
  misc_feature (686)..(686): n is a, c, g, or t
  misc_feature (703)..(703): n is a, c, g, or t
  misc_feature (707)..(707): n is a, c, g, or t
  misc_feature (759)..(759): n is a, c, g, or t
  misc_feature (799)..(800): n is a, c, g, or t
  misc_feature (856)..(856): n is a, c, g, or t
ttttttcctttcttaagctttatttaagaaatcgagtactatatagttcaatatatataagacacatccagtattgtgttcctgatagcaagtgcatagattttgttaagatatcattttcactcaatagaaacgtttcatggtcacatgaagataatattcccagtgatttgcccaagcatgagaggagaaaacagaacacagcaaaaatagtgaactacaacagagatgaaaaacaacaacagcaaattagcagaacagtcgattcctgataagtgaataagctgattgtttggtcacaatgttttattcacttatcaggaacgattcacagtacattaatgttcactgtgtgtcctagcctgccagctaagagtccgagcccatcggctgcgtgcgactgctgtgggctgggcagcgtgtgtggcttccatcagcaaggcggatgttgatggtgctgcggtatcccaaggtggtccatgcatggcacacggattcaccttgctcacactgcagtggtgtcataccgactcaaaactatgggtatgaatttaagcagggaccaactttacagtcagtaagtgcttanaggaactagcattttcatccccttctttggagaattatttgttgctttagaaaagcaacaaaaactggctttgtctttctcttcctttgcttagcangagtattttgtcttgtngcanaatggtggaactatgtacttatagattttgaaaataacacttgcaccttggnaatgatatttaatcacccccaatgctcgcaaatcccctcnncactccgtataaaagaatcaaccttagcatctttccactacgtagcatgtgtttcnaggaactgcgacggtatgggaactgaagcaactgatgtaggagtgactcatcgtgcagctggactgtggatacatcactgagggcagccgggaggagctcctctcactcgcagcctctgtctgacaactaaacaatccgggcaatggtgcg

SEQ ID NO: 134834 - DNA, 1099 bp, Homo Sapiens
aaactcaaaaactaaaatgttttactatttcaacatattacttcctccagaactctcataacatgtacataaataagaatgtttctcatttcttaatttattaacaatgtatacatttgaaaaaatatatacaatatttcaaaacaagcccttcaagactatatttaagcaatgacatccaaggaagcagaactcaggtaccatgtaatatttggaaaatatggtaacttgaagattaagatttctcttccttgctggttactctgaagtctccaatatacaaaggttgctcctaacgtggttttcttattgagccaagcatcttgatgggtcaatcccagtttcattttctccagtactgggcaaacttgtgaatctgttccaccactgcagcaaaaagagcatggacactctcatcaatcagactctgcatgtaatgcacagcctcttcatccgacaggtctaagcggaatttatcctgaacctttttcacagttttatctggttcaagtgcaatatctggaatgtttgcatcaaccatcaaggaaaacaagttcaaaatcagattagaataccttcgcaggtggaggaaagccgtgtaacactgtttacggaactcttggtactgctcactctgtgtgccccccattccttctaccatttctttattcagcttcattggtggaggaagaggctttggatcccgacccaaaatatatccaaagtctatgtggaagagtttgcctgtttttgttagcaaaggttatccaggtgcctgtctccaactccaagtatataggtgatcacgcaatatccagcacagcttttaacgtaagtgtccatgacctcagcactaatcccatttggcccattctcacttggtgcatatttttctaaacagtttctgaatgcttccctctgtatcaagaactcagccacaggactgactggataactgcatgacgcatgttttgtctggtgctacacctataggtgcatttcagtcagattctttcgtacagctgtccagatgaatgattgagacacttgtcttgagtatcaccacgctactaactgaattgctcatctcgtctaaaaa

SEQ ID NO: 134835 - DNA, 661 bp, Homo Sapiens
  misc_feature (648)..(648): n is a, c, g, or t
gtcgaagccgttctctgccggttgacctctgtcgcccgattcggagcgggactatcagcaagacacgtccagtccttgactgtgactccatgtgatgtggtgcacgcacaggccggggttcgagcactgagtcgacttgtagagccggctccccatcagtactttccagggggatccccttaaacaaaatcaccatgaccaggtccagccgccacaccttgtcagcctggcgcaggcagtcaatccgccggatcttgcccttctggtcggggttggagagcacgcagcaggggggcttcttgcccgtgatggtcagcacgaagtcctcgcggaactcgggccggatgtccttgcgcagcttggccagcagccgggatgcccacttctgcttgatctcgggcttctcgcccagcagctcgtccttcaccgcccgctcctcgtccttcgacatccgcttttcatgcttcttgaagtacttgcgcttccgcgcctgcaggttgaaccaggtgtaggagaaagcgcggacgtgaggcagcagtgcctcgatgaacgggtggaactcatcctgggtgaggcagtacggggagtacatagctgggcgcccgggcgggagcgcggcggccggccgcggcgaggggaggcccggcnaggcggcggtcgc

SEQ ID NO: 134836 - DNA, 1184 bp, Homo Sapiens
  misc_feature (943)..(943): n is a, c, g, or t
  misc_feature (1072)..(1072): n is a, c, g, or t
aacgggtgatgcggttggacctggtcatggtgattttgtttaaggggatccccctggaaagtactgatggggagcggctctacaagtcgcctcagtgctcgaaccccggcctgtgcgtccagccacatcacattggagtcacaatcaaagaactggatctttatctggcttactttgtccacactccggaatccggacaatcagatagttcaaaccagcaaggagatgcggacatcaaaccactgcccaacgggcacttaagtttccaggactgttttgtgacttccggggtctggaatgtgacggagctggtgagagtatcacagactcctgttgcaacagcatcagggcccaacttctccctggcggacctggagagtcccagctactacaacatcaaccaggtgaccctggggcggcggtccatcacctcccctccttccaccagcaccaccaagcgccccaagtccatcgatgacagtgagatggagagccctgttgatgacgtgttctatcccgggacaggccgttccccagcagctggcagcagccagtccagcgggtggcccaacgatgtggatgcaggcccggcttctctaaagaagtcaggaaagctggacttctgcagtgccctctcctctcagggcagctccccgcgcatggctttcacccaccacccgctgcctgtgcttgctggagtcagaccagggagcccccgggccacagcatcagccctgcacttcccctccacgtccatcatccagcagtcgagcccgtatttcacgcacccgaccatccgctaccaccaccaccacgggcaggactcactgaaggagtttgtgcagtttgtgtgctcggatggctcgggccaggccaccggacagcattcgcaacgacaggcgcctcctctgccaaccgggtttgtcagcatcggaccccgggnacggcaacttttctgaacatcccacagcagtctcagtcctggttcctctgataagatcgacaaaagaaacaacaaaatgagaagaagaggttcctcgaaaggggggagaagaattttgagaatggaaantcccccagcccagcccagccccaccgaaaagcaaaattacacgtcgtcagccactcagcccttctctcctccagcccggggaccccgcgggccccagaagcagcccattctc

SEQ ID NO: 134837 - DNA, 1476 bp, Homo Sapiens
tttcttctgcctttgttttttcttttcctcctgagtgtgtgcgtctatgtgttttgtctttttggccgggctgggagtcggcaggggtgttcttgttcactctaattttccaccgaaaacgtgggccgggggccggctgtgctgccccctgggattcctgggacgatggagaaggggcgagggaagaagacctttgctatcccagataccaggacggtccaggttgctggctggctgggtcgcaggccagcgagacaagatctttgagcgggtcctgggggttgagatgaggtgggtagcggatggccgtgtgggggaagtaggtggaggccgtctggggtaggatggacgtcgtagggaaatgcagagcggaggacgggtgtgggctccgggtgatcccgctgtgcacggcgatgacgggccggtggtgctgggtgaagctggagaggcggggagagtcctggggggacgggctgttgaatggtgacttgtccatctctgtcttcttcaccggggacgagatgcctccttccatgtccttccgtccagttgcggctgctactcgtgggcgagctgggcgaagtgtagtaatcgccgccagggctcgtgtccacgtcttcctccatcgagcccgatttgtgccgcttgctcccactgaaggaggtgctgggcagcgttcttctgaggccagtgctggctgggttcaggtcgtatgccaggtgcccctgcagctcccccagggagaagttgggtcctgttccagtcaccacgggtgtccgggacacttggatgagctcagtgacgctgaacacgccggaggtgacaaagctctcctggaagtcggtcgtgtccagcgtgatgggcttgctgtcctcctggtcagagcccatccctgtccggggactgccgctttgctctgcatctcgctcacgcacgaagtaggccaggtagaggtccagctccttgacggccacgccaatgtggtgcggctgcacgcacaggaccgggtgaccgcactgcgcagccttgaccaggcgctcgccgtcggtgctctccagcgggatgcccttgaacaggatgaccatgaccaggtccagccgccacaccttgtccgcctgccggagacagtcgatgcgccgcatcttgcccttctggtcggggttggagagcacgcagcccggcgccttcttgccggtgatgctcagcacgaagtcctcgcggcactcgggccggatgtccttgcgcagcttggccagcagccgcgacgcccacttctgcttgacctcgggcttctcgcccagcagctcgtccttgaccgcacgctcctcgtccttcgacatccgcttctcgtgcttcttgaagtacttgcgcttccgcgcctgcaggttgaaccaggtgtaggcgaaggcgcggacgtgaggcagcagggcctcgatgaacgggtggaactcatcctcgtgccgaattcgccaccca

SEQ ID NO: 134838 - DNA, 1011 bp, Homo Sapiens
  misc_feature (48)..(48): n is a, c, g, or t
  misc_feature (431)..(431): n is a, c, g, or t
  misc_feature (677)..(677): n is a, c, g, or t
  misc_feature (811)..(811): n is a, c, g, or t
  misc_feature (819)..(819): n is a, c, g, or t
  misc_feature (833)..(833): n is a, c, g, or t
  misc_feature (896)..(916): n is a, c, g, or t
  misc_feature (959)..(959): n is a, c, g, or t
ccaatgctcaaaacctgttcttttgaagaaaatcaacagacaatgatnaagcggcaaacgggggtcccccacttctgagtccacactcagttcccatggctgcaccagcccctccagctgccctgccaagccccccagccaggagggtcctacagcgcagcccacgccagcacgaggccctcaagcccagggcttcagcagctgctgggtcccttgggcaccaggcagtgggcactgctcgttggaaaccccggatgaaaacactcagtagcagaagaaaaagtcgaatccgagctgatgggactgtaaggaagcgccctaggaggtgggctgggcacagcggcacggggcatggctgtcatgaaataagcacgtgggtctcatccaccgagggcccatcactgcaggtgtggtgagcacagagcacgcanagggtcccgaaagcctctaaaacctttaataacgaggcgtggatgctctccacgtggaaaaggatttctctaccccgtagggccaagctggagtgctaggcagtggaaggtgttctcggtggatgccccggccacccgaccagccagcccagggcctgtccgcagggtcgcccttaccgcagctccgggggggtgcaagggcgccacagaatctgcccctccgaccgacggcgtctcctccagtcnccagggagccccagatagggtgcagcgtggctgggcccgcatatgagctccccgcagaggggctgagggcctggaaggggggcacgcctctctgcagccttttgtctggtttcacgtccacgtgtccctctctnggaactcngggctgctccgcantgggcctcggctcaactctgctgtgctcccagctgggccacgaagttccgcctccagatagtnnnnnnnnnnnnnnnnnnnnntgatgtcaccatccccagtgctctgcccattggcccaagtcangcagtgggttgaactgggggtgtaactggggggaagtaggttggggacacca

SEQ ID NO: 134839 - DNA, 1048 bp, Homo Sapiens
  misc_feature (792)..(793): n is a, c, g, or t
  misc_feature (858)..(858): n is a, c, g, or t
  misc_feature (867)..(868): n is a, c, g, or t
  misc_feature (875)..(876): n is a, c, g, or t
  misc_feature (937)..(937): n is a, c, g, or t
  misc_feature (975)..(975): n is a, c, g, or t
  misc_feature (985)..(985): n is a, c, g, or t
  misc_feature (1027)..(1027): n is a, c, g, or t
caatttttcttaaacttcaactttatttggaccaggaaatttttccttacataaggttgacatgttttaaacaccttaggacaaactatttaaaaagcaacattttttatttcagaagggtcttgcttaagtggttttctgaattcttctcgttattatgaatatgtgctttataaataaatatattgtcggttactccattgtaatcaaatcagctgactaattgctatctgtactgagttatctgagatcagaagacttgatgcaggtcatttaaaattcacattagcacagtgtctatgagaaattgataatacagattaatgtgatatttacctctagtttgttttcctaatggcttccatgagaaggtcctcacaataaattatataacagtacagtacatttgtttggaaatcgtaaaaataattctacaaattagctccatatattatgttgctacagtatggtttaaatgatataaaattattagtatgtcaaacatcttcttataaacatattggttttggtcatacactgaactgaaatgtacagcattaatttctttttttcctctcctgaatggcacaaaacaatggcttgatggtagggaaatgctacttcatgagaaagcatggtgcccatcaactccaacagtacctgtatttgcactcaaaaataaaataattcttggtgttgtcttgattgtatacaatttttgataactccagaagatgacacagtgttactttattagatgtatatagtcctttaggcaagagatacatttannaatttattgaaatcaagtttctcctacataatcctatccacatgggctgggtgagggctggtaantatggattnntttgtannatgacatcatgtcagagtagttttatgcaatgcagtttccctactctgctggaactactgnggacatcataccctacaacgcactcgtcactgatttcngtccaattcngacgaatgagacaacctgtatattcctgaatcccatagctcngactgtatgaggaatccgatg

SEQ ID NO: 134840 - DNA, 1018 bp, Homo Sapiens
  misc_feature (714)..(714): n is a, c, g, or t
  misc_feature (760)..(761): n is a, c, g, or t
  misc_feature (801)..(801): n is a, c, g, or t
  misc_feature (814)..(815): n is a, c, g, or t
  misc_feature (839)..(839): n is a, c, g, or t
  misc_feature (844)..(844): n is a, c, g, or t
  misc_feature (852)..(852): n is a, c, g, or t
  misc_feature (864)..(864): n is a, c, g, or t
  misc_feature (892)..(892): n is a, c, g, or t
  misc_feature (904)..(904): n is a, c, g, or t
  misc_feature (943)..(943): n is a, c, g, or t
  misc_feature (974)..(975): n is a, c, g, or t
ttaaccataaaaatgtaattttaatgatacagaaatagtatatgtacatttctttccacagcagcacttcattcatctctaaaaaatttaacaaaattaaggctaaatcagagcgagctgataggaaggggtattctatgtggtggtcttcttaaagaatgttctcataaatataggatgttctgcagacaagaaataaaaataaaacatgctgaacaagataccaaaaatgggaaatgcagtagaaaatgagcccctttctaccaatctactaagaatcccaactcccctgggaagtttcagatgggatgtgagttcttttaatgaatgtttatgatctgatgctaagactttctaaaattaaaattccacagtactaggccattttataaactaaaaccaagggcagttgagtctccaatataatccctctagaattttttaagttaaagtggacaatatttgaaagtactaattttatctgaagctgtggtgcttgaaaggacaatccctccatttgtggcccttctccctaacccatgttataaaaataaatgaagactttaaaacacagtgaaataaaaatgccatcactgccaaggcaaagggccaggaaatcaaatgtggttcttgagtaacctggctacagagactgctggatgctacaatcagggaggaggaggacttcctttccactttttcattatccttggncacacttgctggttaatgcattacactgcatcctgactcaagagannacttcagctgctccaggatttcagataagatgaaaagtcntttctccctcctnnccactcttctccccagaaggtctngaggngaacgganaagggcatgcgnacacctgcaggaagctcagtctaaaccntagtctctgtcnagaggggcatccctgacaccgcagatcctggtctcatangggccaaccatctgcttaaggggttacatcnntctctctgctcctctttgcatgagtttcatttacatccttctc

SEQ ID NO: 134841 - DNA, 387 bp, Homo Sapiens
ccttgagaaacaagcatttgtgtttattaaccaaggagagggaagtcaaagcaatgcagactcctaaccagtccctcctatagtctgcccacctaggccagctgccaaggactaggaagagcagtggataggcccctccccactgccccgaccccagggtgagttctgctgggtaaggaagaggaagtcagcaaaggacagaggccaaggaaggaaggaggaaacagagccgctggggagacaggattgaggagatcccttggcccctcactcacagtggggagggcaaagcaccgcaaatgcagccccacaagaggaactaagcaggagtacactcatgtcaaaaaccttgtattgggggaggggagggggaagggagttagtcct

SEQ ID NO: 134842 - DNA, 1087 bp, Homo Sapiens
tccgtaccttttttcccccccctcaatatatcccgcgaattttttctttgctttctgagacacaagcatttgtcttattaaccaggaaagcgaagtcaaaccaatgcatgacttcctaaccagtccctcctatagtctgcccacctaggccaactgccaaggactaggaagacacgtggataggcccctccccactgccccgaccccagggtgagttctgctggctaaggaagaggaagtcagcaaaaggacagagccaaggaaggaaggaggaaacagagccgctggggagacaggattgaggagataccttggcccctcactcacagtggggaggcaaagcaccgcaaatgcagccccacaagaggaactaagcaggagtacactcatgtcaaaaaccttgtattgggggaggggaggagggggttctcaggtgtccaaagccaagaactaaacccttggagagtcagtccttgcccaacaatgctggtccagcctctaagcctttgcctccataccaagttcacaacagggtggagcctctgacacggccgtctagagaatggatgcaagagaggtccagggaccacttgcctctgtaagatccgtcctgtggcgaattccaggcccagtggcgcctagccttcagctgctgggctctcccgagcctgccttagcccatacaaccacttgatcacgcgggcattgcgctccaccaccgacacgccatagggaacgcgctcccgggcccgctcctcaacagtcaccgagctgcggcgggagcagcccccttcagagctgcccggcccagcactggggcctgccagggacacgatatccgagctggcccgtgccaggtgggccacacccaaccctctcgcctcctccgggtccagcccgcagaagttaaaaaagcgctcgagatcagcggctgccctagaaaagcgctcgctcaagtccgacttggagcgttgcaaacccgcggccgggctgggctggaggcggcggcaggccgggtgatgggcaggccgggcaggcgagcgggcaggggcgacgtccacccgccctcgtgccgatttacgcgcgg

SEQ ID NO: 134843 - DNA, 735 bp, Homo Sapiens
tttgtgtataaaaaagtgatatgtctttaatttaaaattatgacccggaaataactagtcagtttaagtgatccagacttcctcttcatacccaaatggaacagacacaatattggctcagatttccaaccccagaaaaaaaccaaaccaagtcctcaggaagtccctgcagcgaccttgctggggccatcagaccgcacagagtggaggtgcccaagctgctaggctgctcttaatccagccacactgagaagagctttccttctaccagcaactccctcgctgggtccgatatcccccttcacctcccttttagctggcactgcacgaatgcctccacagagaggctgacagtacagcagtcacctcccagctgtcttcggtgcatcttcagggccaccttcctgtggtcacaatagaggagttgagcattctaaacgttcgtgcccaggagggcagcgtcttctctttttagctgaggtctggagccctgagttgtaaccattggtcatatgtggctgaggcaccgacagcaaatcgccaaacttgggaaacgatctggggagatgcaagggccttggtaattgatggtgagtctgaaaatgaaacagacaaatggcatctgggtaaaatccttacagacatctcagaagagaaagtggtaagatggaacagggaacagcacctccttcagcactccaaggctctgcctgctcttccctgagcatagatcca

SEQ ID NO: 134844 - DNA, 1532 bp, Homo Sapiens
  misc_feature (878)..(891): n is a, c, g, or t
  misc_feature (1433)..(1476): n is a, c, g, or t
cagcaggagaaaccattttctaggctctttaggaaggaccatgcaatgagtaggtgatgtatttgagccctcacagtctttacatccctagaggagctggaggacttaagagtttgctgcagaagcgtggccaagcacaaaacacatgatcaggaaagcagagtgttttcccattaccaatggatgaactatgcaaaccctaaacgccttggcagacacctcccaccccttacccctcccatgcagctgaaaaatctgagactagaaccaatcatgactctggatggcagagggaaacctctaaagggacttattacattggtacagacatatttatgctttcttccatcaccaaccactaaacccctttgggaggaatgaaataactgcataaactagtcaactgaacactgggccacttacctcaatgttatacaaagtcctggatgatttgattctgaaccacagcctttgcaggagttgggggaatcagatttgctcatgaagacatccctttccacttttgtcatgggcagtaaatactatagtttacaatgcctaccaattagcaaaggatcattcattcagctactcagttcctctgtaaaacaggtctatgtatgtgcaattcagctaagatctagcagtaacttaagggcagaagctggctctctacttacaacctgctttctctgctgaagccttacctcctcttcagtttccctcctagacacaaatcgaaaataatatactgatagctggttagtaacctcagtaagaattaaaactgaggttgtttactcattttggctttaaatcttttatccccttttggtgaaggtttccctttaggaaaaaaggtgtcaaacaaccctgannnnnnnnnnnnnngcatcatttttattacaccaaattaaagttgggagttccaagatcccattccagttaatatttaaccaaggtctaaaatttgattttttttaaatctttgaatcctcccttctgcccctcatggatccttggttttaatgatatggaaacatctaattcttagaattattccgtagcttttgctgattactctgagatttcagttaagacttgtttcaaaagacagatagctgactggttcataatacattggaatagttggatccaaactaataagaataagctgtacaggaactagtgctcaatatacattgtataaatttgtggaaatctcttggatgtgaattgttacttcaagtggcttttattaagattttctcagacttacttggaggttaaagcaaacccaaatgtgtattattttgttacagagctctgctttataattttgtaataaagtttcaatacagacacctgtcctgtctggtgcgaggatgttagaggttgataggactgacaaaagagcctgacagtggttcatnnnnnnnnnnnnnnnnnnnnnnnnnnnnnnnnnnnnnnnnnnnntgagctcaggagtttgagaccaacctgggcaatgtagtgagaccttgtctctactt

SEQ ID NO: 134845 - DNA, 615 bp, Homo Sapiens
  misc_feature (553)..(553): n is a, c, g, or t
cctagtagaacaatttattaattaatatgcaataaaatatctccccaaaatctttccagaaatgacaaggcaggaaagtgaatacttttatgcttctctggaaatttttaatgtaaacatgaaatatttgaagaaccgattaaaaagtctcaagtgaatctgtaaatacatttttaagtctgacttcaaatcggtacatgaggcttagacatacacatcattggacaagtgacttaaatatctaaatacaaatcaaatagcattttcctaacttcaactataaaaacacaaatttcagtaggtactgcaaatctaagaagaataacttgaaaaataccataataagtgttgtaaaaggggaggactcatatgacagaccttgaaggaaaggtgggacatcacgggaggcaggtccccctgtggacatgattccacagaggcgtggagtccttttgccaccagcatgatcctgaaatattgaaaaccctcaagacaagtgataccttcaacatagccacaaatcagtgagcacatcccacgacagggtgtttanagaccaaaagaaaaagaacagtcagaggcagaattcccctagtaactgccacacagtgacca

SEQ ID NO: 134846 - DNA, 1094 bp, Homo Sapiens
  misc_feature (294)..(294): n is a, c, g, or t
ccgacaggacattgaccagacaactccagaggctgaaagttgattattcatggtgttgagttctcccaaagtggccctaggcatccggggactgggacttaggtcgaggagatcttgagatggggcagaaggctcactggtagtattggtggcttccttcgtggttcttattttgctcccaaaatccctttgttggtttctagtaaacctctcaatatcccaaggatagcattattcaaatcctcattcacctgaattagctcaacagttacatcttcgttctccacccaccancaagcaggtccatgatcctctcctgcatctcccgacctgttttatagagtttctgcagaagctctatgtcttcatggttttcagacccaggagtattctccatcaatatggcggacatcactcgcacattcattttcaccatatccaattcactgtgcagttttccaatctgttctgggaccaatgtaacagtcgagttctttggagcaattacagaagaaagagctggtgcagtagggacagatgttggaggatttgatgagatttgagcagtctcttgtcttgctgtttcagcctctgcttctgagggaggaaactgaacgcctttcttaaccaggtcgaggtatacttctttgacttcgcttacatccacacctcctgggaagccctgtgaccaagtcttaatgaaattcaagattctattctgaatgtctaatggcaagttgtatctgggattcagtagcttaactaaattctctttaacaaattccttcttcacaatcagagactggaaacttggaccacagttctgcacacacatgtcaataagtgacaaggtaagttggatttctttatgattgtagtttttggaaatccttttcttcaaagctttcactgcatcttttggcccatcctgggtagtgttaattatgtcacagatgtgcatgaactggccccaatcttcagtctgaactccagcaaatgtagccttttctatgaggtggcccacggaggtcgcgtagggatcccggtgaccggacgcgtgggtcgacgatatcccgggaattccggaccggtcc

SEQ ID NO: 134847 - DNA, 1029 bp, Homo Sapiens
  misc_feature (90)..(220): n is a, c, g, or t
  misc_feature (224)..(224): n is a, c, g, or t
  misc_feature (230)..(230): n is a, c, g, or t
  misc_feature (296)..(296): n is a, c, g, or t
  misc_feature (381)..(381): n is a, c, g, or t
ccctctccccgcgcgtgccgattcataatgcagctgcacgacagtttcccgactgaaagcgggcagtgagcgcaacgcaataatgtgagnnnnnnnnnnnnnnnnnnnnnnnnnnnnnnnnnnnnnnnnnnnnnnnnnnnnnnnnnnnnnnnnnnnnnnnnnnnnnnnnnnnnnnnnnnnnnnnnnnnnnnnnnnnnnnnnnnnnnnnnnnnnnnnnnnnaaantgcccntcgagcccaggaattcggcacgagggacattttgctgtccagataaatgaacttgataaagacttnccaaaaccaaagaaaccaccacctcctgctaaggctccagctccaaagcctgaactgatagctgcagagaagaaatatttttctntaaagcctgaagaaaaggatgaaaaatcaacactggaacagaaaccttctaaaccagcagctccacaagtcccacccaagaaacctactccacctaccaaagccagtaatttattgagatcttctggaacagtgtacccaaagcgacctgaaaaaccagttcctccaccacctcctatagccaagattaatggggaagtttctagcatttcatcaaaatttgaaactgagccagtatcaaaactaaagctagattctgaacagctgccccttagaccaaaatcagtagactttgattcacttacagtaaggacctccaaagaaacagatgttgtaaattttgatgacatagcttcctcagaaaacttgcttcatctcactgcaaatagaccaaagatgcctggaagaaggttgccgggccgtttcaatggtggacattctccaactcacagccccgaaaaaatcttgaagttaccaaaagaagaagacagtgccaacctgaagccatctgaattaaaaaaagatacatgctactctccaaagccatctgtgtacctttcaacaccttccagtgcttctaaagcaaatacaactgctttcctgactccattagaaatcaaagctaaagtggaaacagatgatgtgaaaa

SEQ ID NO: 134848 - DNA, 1792 bp, Homo Sapiens
  misc_feature (570)..(609): n is a, c, g, or t
acgtctgcatgggttagggtgtgcacgcaggtgtgtttgttgccttacctgggcttgttgttcatgaggtcacttcgcgcttcgtcgtgttgctctaacctcgtgctcgcggattgatctttcctctggcctggtgtgagaggagcgtggcagttggtgtcttctgttcgtacatcatcgttttgtggcgtctgtggacgcaccgcctctcgcctgtttgtgctttgagtgtgttgtcgctctgcggccctctctcctacggcgtatgattttgtgcgcaacatcatcgctcatcttgcagcacggtcctttgtgtcgtctcactcttgtcttcgtcgatttcgtttttgttggattagcttgttgttcgcgttcgcgtgttgctctttgtggcgtttttattatagacgtctggtgctctccagctgtttaggtgggtgcccacccctctctgtggcccgacaacaatcgcggtggggtcatgtgccactgatcaaccatttgggggtcctctcactctcgtggcgtgtgtacgtctctcatggggaggtcgcggccagccctctctcnnnnnnnnnnnnnnnnnnnnnnnnnnnnnnnnnnnnnnnnagaaagggcataaaactcacgggggcctcttatagggctcgaaaaatatcctgagaccttgcacgaacagaataacctcatacgcaataagttggaaattacccttgttgccagacacccaacgatcggtattccgtctttaaagcggagatttgttttaaacttttctttttttaaataaaaataaaaagaaagttaaggacaaacggcaaactcacactgcctgacgcagggcctggtttctcttccttgaaggccttttacagatgtcagctttcactggcctccatgcacaacctcccactaccacccaatctgcctgccacagcaaagtgcaggcaccctgggccccctggaggatgcgggcaggggctacagggcatccaggatgtggtcgatcttggtgaccagctcctggcgctttcctgagatgagcttctcattctcaatgtacgtgtctttcttgagcttgccagccaccaggcgctcagcctccaccgccgacttcagcaccagctccttgacctgtgcatccagcttctgcatttcgctcactctgtcgcacagatcagagccctctgtcttcagcctggactgcagcagtgcaatctcactggtcaaggccttgtgttcagtctccaggctcttcttgccactgttgagggtggagatgtcccgggattgcttgtacctattgacggtctcgtcaaagtgacggtaaaggcctattctcttgttgaccagggtcaagacctgctctgtgatgcaggctaccttcatcctggcttctgcggctggatccttggtgatggagaagtccagccgaacatagatgataacggtgaagaacaggatgtagaaggccgccaccaccagcaggggctcctgcagcatgagcaccttgttgaacgtgtagtggaccacaatgtcctgaatgtgctgttctaccagatttttcttgtaggcaacaatcacagggcggccaaatgtgtccagataggtgtagtgcagctcatctggggcacggctgatttcatagggactatcaatttcaatgttcttggctccttcaggcaggatgatcttcacagtcagagaatctatcggacgcgtgggtcgacgatatcccgggaattccggaccgtacccagcctgcttttgtgtacacacgtgtcatattcac

SEQ ID NO: 134849 - DNA, 1031 bp, Homo Sapiens
  misc_feature (820)..(820): n is a, c, g, or t
  misc_feature (825)..(825): n is a, c, g, or t
  misc_feature (837)..(837): n is a, c, g, or t
  misc_feature (862)..(862): n is a, c, g, or t
  misc_feature (935)..(935): n is a, c, g, or t
  misc_feature (941)..(941): n is a, c, g, or t
  misc_feature (943)..(943): n is a, c, g, or t
  misc_feature (947)..(947): n is a, c, g, or t
ttttattgtgacaaatttactgacaaatattttctaatagatttttaccaacaggcagtttttgttttctttactgacagaccgtaaatgtacttctggttggcagcagctgcatcattataacacaaaagcaaccttggctaacttcagtaccttatgtaacataagaaataaagaataacttgaatttaaaatactttttatatgtttactaacattaaactattttcaatgcaggaaataaatatttccccaaagaggaatcccccctcaattactttctttcagacttaacaaattggagtagatgtggttttgctcattcttttatctgctggcaactattttaagtctcctgtgcaaggcagattccgatgacctcgggaaagtcacaggacctcagtttcttcaatggtaaaagcaaaggcagtggtttctaccgtcctttctcactgcaccattcagcgtcagtgccctcatgagaaacacacccaaagcccagtgtgctctaccccaaaacttgtgaaatttctagagtctcaaaaaagtgaatatgtttaaggcagtataataaaagccaggtggacgacagttcctaaagttaggctggtagtggcgtgaacaggggtcttttgggccaccctgagacccgccccacggggcttctcgatccacgtcttggcttctcgctccactttcacagaacgtactgaatcaggggcctgcatccccgtgccgtgccgagccgacggagaaatggactcctcttctcgctcctgtggagtttcgtcttctgggtgagtgtggcacggggtcctgngcggntgatgtctgtanttggcgagcgatcctcagcccaganactggctgcgcacacaggcgcagacacgcgaacatgttcctgcgaacgagcttgggcgcatgtttccctcccntgcttncnttantgctcagagacaataggggatttacgagaagcatcggtgcccatgccgggtttgggacgcgagcacatatcggttccttgcata

SEQ ID NO: 134850 - DNA, 591 bp, Homo Sapiens
  misc_feature (44)..(83): n is a, c, g, or t
  misc_feature (223)..(507): n is a, c, g, or t
  misc_feature (526)..(544): n is a, c, g, or t
ccctcaactaaagggaataatgcttgcggccgcatacgcggtcnnnnnnnnnnnnnnnnnnnnnnnnnnnnnnnnnnnnnnnngaggttttaactgatgtgtatctgtatgtctatttgtgtatattttgtcatgatcatgtaacagagtctgaaaagtgtcgaagagacagttttcaggaacaacaagcaattattcctactttccaagttattttgatgcnnnnnnnnnnnnnnnnnnnnnnnnnnnnnnnnnnnnnnnnnnnnnnnnnnnnnnnnnnnnnnnnnnnnnnnnnnnnnnnnnnnnnnnnnnnnnnnnnnnnnnnnnnnnnnnnnnnnnnnnnnnnnnnnnnnnnnnnnnnnnnnnnnnnnnnnnnnnnnnnnnnnnnnnnnnnnnnnnnnnnnnnnnnnnnnnnnnnnnnnnnnnnnnnnnnnnnnnnnnnnnnnnnnnnnnnnnnnnnnnnnnnnnnnnnnnnnnnnnnnnnnnnnnnnnnnnnnnnnnnnnnnntaaataaataaaaccaccnnnnnnnnnnnnnnnnnnngccctacagccgcggccgctccaacatcagcctcgtgccgaattctt

SEQ ID NO: 134851 - DNA, 1035 bp, Homo Sapiens
  misc_feature (703)..(703): n is a, c, g, or t
  misc_feature (760)..(795): n is a, c, g, or t
  misc_feature (810)..(810): n is a, c, g, or t
  misc_feature (843)..(843): n is a, c, g, or t
  misc_feature (853)..(853): n is a, c, g, or t
tttaatttttaacttttttaaattttaccaagagccagacacatagcagggaacagtatagttacttgttatttgctcacccccatggggctgatggtgtagtctgagggactgaagatcaaccatgacatggcccttcacaccgtgttgaaggggtgaagacgttaccagtggggacggaggagctgactcccgaggggctcaagctggccacactctctcagatccttctggccgactcctgaggggctcaagctggccacactctctcagatccttctggccctgtaccgtctctgctttttgctgggcctcgttcctgagcaagtggcagctgctgtgggaactggatcaggcagccttccaggagactaaatctgtcttctattgggagtcccaaaaagctcccaggcagcatccccttctctcggggggcctcctgctctgccctgcacaggtcctcttcttgctccagctgagagatcacatcagatttggaaaggaaaagccccagggagacaatatgctcccaggtctccagtgtcacctctcggtacagtgtcctctgggccaggtccagctgttcccactcctcctgtgtgaatgccatagccacatcctcgaagcacacagatgcctggggtggaaccagcatagaacgtgcttccatttcctccctgcacctgaagaggccgctgtgtanagggcagaggtcctcagaagaccagtctgccactgtaggactctgaacgggtctctnnnnnnnnnnnnnnnnnnnnnnnnnnnnnnnnnnnncatcattggaagaanatgtgtccacgtctggagctgggatgacctctngggtccatangcgtcacctgctggtgccctgtgcaggaggtcttggtggcactgcaccacggccatggcggctcgtgcgaatcctggctcgagggcaattccctaaggggtctattaatcgtatcagtctagtgttctgggtgaattgtaccgtcaatcaacacaacaacggacataatgtaactggggcta

SEQ ID NO: 134852 - DNA, 987 bp, Homo Sapiens
  misc_feature (781)..(781): n is a, c, g, or t
  misc_feature (837)..(837): n is a, c, g, or t
  misc_feature (847)..(847): n is a, c, g, or t
  misc_feature (891)..(891): n is a, c, g, or t
  misc_feature (935)..(935): n is a, c, g, or t
  misc_feature (964)..(964): n is a, c, g, or t
gttgtcttatgtagtgtgttttcaagctccagcaatttttattttcatgaatgagagttggggatcagctgttaggttctgtgcccaggacactgactgctgcctggcgcccactctctatacagtcattaacagcaactccctcataggaggctccagccagagtcaggggcaacctgtgagcagtcaggaattgcctagctgactctagtttttgccagtgacctagtgtatactggggaatgcagttcttgtgtagatggaccaagcagtggctcggcatctccttcagtcctaattgtgtagcagctgcttcctgggcccgctgttgaaacagctcctgagataagacacagccactagcctccagtgtctgtaaccaggaacctcccagcatcacagtcactctgaggccaggggggctcccgtcctgctcagggaaagcaactgagtcatacacgattcccaggactcctggatcttctgaagatggcaccaaatgtccaaatccctggacaggcagatgggctccttggtactgcagattcaccacagctacagacactgcagtgatggcactcagggcacgagccagaggggcagcctcagcagggagcagctcactgagcactgaagctggaatggcactaataacgtggtcagcctccagactgctgtcccttagagataccttccagcgcccttctgcctggaggctgagcccacagaccggctggcctctgagaacactgacccccctactagtcaggtgggtttcaangggctgaggcacatctctagacctcacgaagtgacactggctcagcgctcagccanggctggcgantgatgctgatctggctgtgggtccgcctgccccagcagaggccnagtatatggacgatgggttgctcagctgggagagacgggaagangactgatgcgactcaggctgttgctgcanactcacggcaagatgtcatggta

SEQ ID NO: 134853 - DNA, 821 bp, Homo Sapiens
  misc_feature (51)..(51): n is a, c, g, or t
  misc_feature (59)..(146): n is a, c, g, or t
  misc_feature (153)..(153): n is a, c, g, or t
  misc_feature (163)..(163): n is a, c, g, or t
acgcagaggtaacgggctaagagtaactctagagggcgtacaggtgatganggaatccnnnnnnnnnnnnnnnnnnnnnnnnnnnnnnnnnnnnnnnnnnnnnnnnnnnnnnnnnnnnnnnnnnnnnnnnnnnnnnnnnnnnnnnnttttttnttggggtttntttttttaagggagaacagttttattagcatcacagggtccatttttccctttccatccaagcatccagagtctggtgtcctttaatcagttggcaggttcaacctggaggccactggagctgccggcccccaagtacatgaatgtgcagatgatacacagattgtgcacccagcttcccatcgttgatcacaagtcggtatccatctcccaggccctcagcctttgctgtctgcttggccacaaggagtaggtgtcctagaagctgctggtcttcttcttcagcctggctaatccgaggaatgggcttcttaggaatgaccaggaagtgcacaggagcctgaggggccacatcacggaacacaagacactgctggtcctcatagagaatgtcagctgggaggctcttgtccaggatccgggagaagatggttggggctgctcccccaggagttgcctgctgggccttggccacttcattcccatcagtcacacctgcagctcctcggacctgccccccgcgcacccccgtggccgccacggcgtctgcgcgccgcgcgcaacccagcagccagcaccacggctgccgccatcttccctgagccgcgggaacctctcacccgggtcagcactcggctccgcggccggccgtgggtccc

SEQ ID NO: 134854 - DNA, 1144 bp, Homo Sapiens
  misc_feature (74)..(105): n is a, c, g, or t
  misc_feature (296)..(314): n is a, c, g, or t
  misc_feature (827)..(827): n is a, c, g, or t
  misc_feature (834)..(834): n is a, c, g, or t
  misc_feature (997)..(997): n is a, c, g, or t
  misc_feature (1008)..(1008): n is a, c, g, or t
  misc_feature (1010)..(1010): n is a, c, g, or t
  misc_feature (1038)..(1038): n is a, c, g, or t
  misc_feature (1078)..(1078): n is a, c, g, or t
tttaacgacggccagtgccatgccgaaattaaccctcactaaagggaaaaagcttgcgggcgcggctgtagccnnnnnnnnnnnnnnnnnnnnnnnnnnnnnnnnatgctcaaactaaggcattttattagctggctttacaacttaaataatatcttggctttcaaaggaacagcttccactaattccaaattaaactttcacaagtttacttgtttggggagggacattcttatggtcaccacaaaatacttttattataaccttccccaaatcttttcttagcattaactggnnnnnnnnnnnnnnnnnnngcttaggtcaaatatcaactgcctgaaaaacccaattaagttacttttccttaaaacatgtgcagtataattgaatcaaaagagaaaactgcaaatacattgtgctttggccagaagtagagttcatttcatgatgattcagtatcttcagatactatttttgacacttgccataaatcttagcaaagtaaatccatttattaacgtttcaaaggcaaagttgtttttaacattagactttctttgccagttggcaacttagaatttttgcagaggtgattattaatacttctttgcagctaattttagctttaatttttctctctcatctaaaaacatatcaattgcacattgttcctttgacttaataactgcattcttgaaacagaggttagctatttcactgtatccagaaacgtggtagaaattctgacccatcattcttttatctcagtgacaacaccagcagctattgtagaccaccgtaacgtagcatgaactccccagctcttntaagtcnttatatagctcaagagctattggtctttgtgtctgtagctctacaatgcattctggcctttagtcaaaacttaggctttttctttgtgacttcacccgtgcttttgtttaagacactaatcaatcgtttaataacgcctcgtgcccgatttctggctcgaggnccaatccctanantgagtcgtataaattcgtaacatgtcanactgtttctgtgtgaaattgtatccgtcacaatcacacanatacgagccggagcataattgtaagctggggtgctaggatgactactcaataatgcgtgcgtacgc

SEQ ID NO: 134855 - DNA, 1548 bp, Homo Sapiens
  misc_feature (246)..(255): n is a, c, g, or t
  misc_feature (484)..(499): n is a, c, g, or t
cactttgcaaactctgtatttatttggattaaaaagctttagatgaacaacaaaaaaaagatacatccatgttataagactagttaccacgtaaacctcagatgatatgatacagaaattagaataaaccaagttttaatcaggtatgaaaacattcaagctcaaaatcatcaacaccaatttggggattttacagaaataggtgcccctctcaattcttcctcataggaaggggagagtggcttnnnnnnnnnncaacaaccaaaacagttaaaggccttttaaatcagttggctgacaaacatactgttttaaacctacaggttcccctcagtccccccgtttgcaatataaacaattcttctccacaggaacttacattttgaaaacatttaggccattatactttctaagccacattactacagttcctaaaacttatgaaaaaaaggtgtatagtttacttgtactttcttgagtcaannnnnnnnnnnnnnnngaagatggctgacctcaaatcttatatcctaaatattaacgatatcccccaagttaatatacagaaaaacatgattctaaaataaatacacaggctttttaaaaaaaacttaattagggcctgtctagtgatgccctgggccggtgctgcactgctttagggaagcccctggctggatctatgtttcctatagcacctctaggcactgggaaggagcctggaggagagctctggcttctaatgacccacgtggcccccagtgaaaaatttttttagaggctccccaaagaagtctcatccagaccttaagggaaataaaatgaatgcatgaaataaataaataatgtaaccacaactaagtttcatgttctttggtgtaattcaaggatgtctagaaacaaaataatctgattgcattatacagtccatgatgattcaattgcccaaatagccaggaattgaagatttatctgactcactttaacaataaggtactgacgcactactgcaatacatttttttaaattcaatattatttaaaatacttgatgcaaattcaaatccagtggttgactaaaggcaattaagttaaagggcctcccatatttaaagtatctagatacaagagacttttttccattctacactcttttgccctcatgatttaataagtacagtaattaaacatctgggtactgattcatagcagattaaaaggaaaaaagcatcctctgagattaactctctcagattataaacagcagtggaagctctaccacaatggcaatcacccagttactataaagcaggtttcaaaaacatgccgccaagtgaaacaatgttcctactgtctgccatcctatgctgccttcaaatgtttattgtagggtcatataagaaagacagggtcaccaaacccacgtgtttgggatctgtaatggtctttctagtaagcgttttattaaattatgattcccttctcctgtaattcaaaagcacaagctaaatttaaaaaatattttagaaagtattaaatttctggttgagaa

SEQ ID NO: 134856 - DNA, 608 bp, Homo Sapiens
ggcttttaacaatgatgatttattaaaagaaacaacccctcttccctgcctcccatatcccctgtagtctccatccacaggcttgctgttttcatccatcttcctagtcaaggaactccagacagtcacatcttggaagataggaactccaggaagggatgacgatcttagggaaagatgatccttaagataactcttcatctgtccttaccctgcaacacactcatggccacacccattgctgacacagtggtctccggggttgcagtcccagtcacctgtgcagagctcgacgcaggtacctgattatgtctctgggtctttctggaacttttctcatctgtaaaaaggggcccctggattcagcaggggtaatgagttttattctccattgtcaacttcagtcaatagaggtggctgtctgatgctgtgttgagaagggtcagacaccttgtccaggttcaaagagaaagagtgctaggactgattagcagtatccaaaagccggtctcctgcagcctgaagctcttgtacctctaggctgaagatgatgaggatcacaggaggaggaaggctgccaacttcatgttgctgttggaaggctttgg

SEQ ID NO: 134857 - DNA, 1017 bp, Homo Sapiens
  misc_feature (583)..(583): n is a, c, g, or t
  misc_feature (611)..(611): n is a, c, g, or t
  misc_feature (652)..(652): n is a, c, g, or t
  misc_feature (720)..(721): n is a, c, g, or t
  misc_feature (736)..(736): n is a, c, g, or t
  misc_feature (745)..(746): n is a, c, g, or t
  misc_feature (842)..(842): n is a, c, g, or t
  misc_feature (870)..(901): n is a, c, g, or t
  misc_feature (950)..(950): n is a, c, g, or t
  misc_feature (973)..(973): n is a, c, g, or t
  misc_feature (998)..(998): n is a, c, g, or t
tttttatcaaactgaacagtgtttggtctggaatgtgtttaaggaaaaggcaaagttcgcagagtgtgggtagacagaatagggaagaagtacagtttcagaagaacatgcaaaggtttcgtgcactggctgaattcaaggaccttcaattaatttgccagaagtgattgtgcaaacctgggaaagaggacatcttacttctgtttatgaaaaacgggaggagcttccctttgcccgcacttgccttcctttctcatatccaaaggaatcccagtcgtgtgcttgttaaattctgcgaagcagcgagggctctggctgaagctgcggcagtggccctacttccaccttcagccctagagcaatggttccagcgtggcctccccaacgcgaagactcaattctggccaaggttctgggggagagggagaggcgaggggccacgatgctttcaaaaataaagtctacctgcactgggatatcatctttcctttctgtttaaaaatgctcataaaatagcaagccccagtgggttaatcaggttaagctgtcattccacaggggagaggatcaatccactttccanaggggatcacctgggctccccccattcnccccaccccgtgtgcctggtgttctcggcttctgtccctcncacctatgattcatccagggcatgatggacactagggtagacagatgagtgggatgagtacggggtanngtaaccgagtccggngctccctanngcagatcctttcatcctactacagatatttcctatgagcccagcctttggcagcatggccatcttttttgagacggagtcctgctctgtcacccangctggagtgcagtgagactctgtctcannnnnnnnnnnnnnnnnnnnnnnnnnnnnnnnaaaagctacagcgcgggcgctcaacatcaaaatgtcctcgtgccgatcntggctcgagggcaaatccctaangagtcgataaattcgatcagtcaanctgttccggtgtgaatgta

SEQ ID NO: 134858 - DNA, 1629 bp, Homo Sapiens
  misc_feature (41)..(41): n is a, c, g, or t
  misc_feature (110)..(110): n is a, c, g, or t
  misc_feature (156)..(164): n is a, c, g, or t
  misc_feature (575)..(599): n is a, c, g, or t
  misc_feature (1508)..(1542): n is a, c, g, or t
  misc_feature (1546)..(1588): n is a, c, g, or t
ccccaccaggttttgtatggtgttatatgtcacgcgttttntacccgaccaattgtttacgcgaaggcataaataaaacatgcgccctttttaacatgtcggaaaatcgntacccccagcccccccgattcacacttgtcgggagagaagggaaannnnnnnnncatgtgggcgcttgtcaggggggccgtaaaatctcaggcacatataataggagaggtcgtccggggacttcgagggaatctccccgtggtgtggagaataacagatttccccgaggttaaatagagcccctccccagaaaaaatctccccatttcttggggatctttgttttcaaagagaaccggtcttcgcagttttgcccccgcccggggagcggttttgtttatatttcggggggaggaaattgcccaaagtccccactagttcctatgatccccagggatttttccttagggaaaacaatgttttatgggcccatgtttcttcttttcctaactggggcccccggggcgcccaaacgaaatgggttttagaaagccttctcgaggggccgaggcggccgacaagtgnnnnnnnnnnnnnnnnnnnnnnnnnacgggtgtttaattaatactgaattttttaatgtgcaaaaatctaactctgctttttaaagcaagtagaaggagtgacaatatggcaccattccaataatcaaacaccaataaaaatggcagcagtacaacaatctaagcaaatctcaaatacaacatacttgtaattagaacacaatgcaatgacttgattttagcaagaactagacacttaatttggtaaaagaaaccaaacaatgcattatattgaatactaagctaagttaccataattagtcttacaaattctcaaatttcacaactacttttgaacatctaaatttaaacctaaattttttaattaaatgcctgttcaacaaagctaattggaacaaacacatttatgtaaatttacattctagaataccagggtaaacaaggagacgttattcaaagatgaatgagaaagttctattctttttcatcatttgtgtgatcaggttgcaaaggacatgcttttctctttgcttttcctaagccactgcttcctgcctcttcaggaatctgattctctttttcagaatctttaggggacaacctaaagaattctccaattcctttttgccacttgggagttgggcgcacgcaaacggggttccctcctgcatatttattttcagctttcctcgatgaaactgatgtcgaattagtggcagaggtggaagaaccaagcacctttctgggggctcgagcagccaccacttttctgtaagtgcctggaacactgtctgctttagtccgcaccatgttcaaacaagaagagaggagaggagagaacgaactgacttcccagccgagggtgtttcactggacaaggacccccggccgtaatggccgaattcccgggcatatgtccggtaccgtcgactgnnnnnnnnnnnnnnnnnnnnnnnnnnnnnnnnnnncggnnnnnnnnnnnnnnnnnnnnnnnnnnnnnnnnnnnnnnnnnnnaaagacgacgctagcgccctatagtgagtctatacgatttt

SEQ ID NO: 134859 - DNA, 827 bp, Homo Sapiens
  misc_feature (111)..(139): n is a, c, g, or t
ggatcccctgggaaaacctgtatggccctttttcatttcctggggggcgccgcgcccccaaaaaaaaggttttagaaagcttctagagggcccgaggccgccccacaaggnnnnnnnnnnnnnnnnnnnnnnnnnnnnngttaattaatactgaattttttaatgtgcaaaaatctaactctgctttttaaagcaagtagaaggagtgacaatatggcaccattccaataatcaaacaccaataaaaatggcagcagtacaacaatctaagcaaatctcaaatacaacatacttgtaattagaacacaatgcaatgacttgattttagcaagaactagacacttaatttggtaaaagaaaccaaacaatgcattatattgaatactaagctaagttaccataattagtcttacaaattctcaaatttcacaactacttttgaacatctaaatttaaacctaaattttttaattaaatgcctgttcaacaaagctaattggaacaaacacatttatgtaaatttacattctagaataccagggtaaacaaggagacgttattcaaagatgaatgagaaagttctattctttttcatcatttgtgtgatcaggttgcaaaggacatgctctttcctcgatgaaactgatgtcgaattagtggcagaggtggaagaaccaagcacctttctgggggctcgagcagccaccacttttctgtaagtgcctggaacactgtctgctttagtccgcaccatgttcaaacaagaagagaggagaggagagaacgaactgacttcccagccgagggtgtttcactggacaaggccc

SEQ ID NO: 134860 - DNA, 1571 bp, Homo Sapiens
  misc_feature (658)..(658): n is a, c, g, or t
  misc_feature (1228)..(1292): n is a, c, g, or t
gaagagttttgctttttaattaaaaagagcgatatttcaaggttcttctggcagcagtatggagagtggccgtcggggcaaccttcaacaaggctggagcttggatgcagaaacactggggcagaggtcccctcatctcccacctctgctctctcacagaaaactgcgccaaacaaagggaagggagcctctgcctcacttccgcttcacatctcagcttgatggcatcatccacaggccacacgactgatcaaggcccagatgacctttcatttgcaagcacttgagcacgcgcaggagaattcagcagtacagggcaggctgtggcaaaaccatgcctcccttcaccccagtccagatcccagactctggaatctctagagactgaaatcggaaagtgcctgcctcaaagtggatgtcacttctctcacatttcattgaccaaatcaagtcacatgccgatgcctgaattcaacaggtgcctcccttggaaaattcacaagaactctctagatgaacctcacattcctcggcttctgtcatcatagatccagtttagcagatggcaggggcttccgatcattcagaaggtatttcctgagcaccttcagtgccaggcactgggtctcagcagagatgaagcatccaaactcctggnggagtttccacttcctatttttattaacccgggtcttctgcgcccaaagactcagcctcattcaggaccatattatgttcatacttctgctgcgtccaaggagtgttgacgaaaaagtggggccttggaggggtagaggccaagggacagtttcccctctgccctttgaagttcacgatcttccatgcaacaaaattgttttctgtgaaaagcaggaaatgaataacaacagcgtaggtgcgttggctatgtccggtggcatttcttcagaattttcattaatgacacctgattttggaggcattgtatatttttaaatacatccagatgttgtttcagttgcttcctctttggttctttttgcttttcgttgttgagcgtcacttaaattcgtgtcatttcatgttggtacaggtactccacttcaaatttcccaagaaattcagaagaattgtgaacaagttgctggtttcacaatactgcaagacactgcaagttattccaagttcctcagcaagtgtttacacattgggccaaggacagatttttcctggagaaggattttaccannnnnnnnnnnnnnnnnnnnnnnnnnnnnnnnnnnnnnnnnnnnnnnnnnnnnnnnnnnnnnnnncagctctgttctgagaccggggccataggggttcttggagagacagggcagatggaagaagtggaaggcatctgcacactgtagagtgcctttaagccacccccattgcctgagttgttttccttttttacaaatgaagcttgttcttttctgggtctctccaaggtggagtgtaggagggcagtgttttccgtagcctctggctcgtgccgcgctctcagactcttcagttctcctcacccacacgagcccaatgaggtaggcctttttattccatct

SEQ ID NO: 134861 - DNA, 605 bp, Homo Sapiens
  misc_feature (529)..(529): n is a, c, g, or t
  misc_feature (556)..(556): n is a, c, g, or t
  misc_feature (574)..(574): n is a, c, g, or t
tttttttatttctgttatagaaaattttatttgcttaatgtttgttacagaaacttaagctaactcagcatttttccatttaagttactgtgaaaaagagaacagagcaggccagagactgctattctttgatcttgcaaggttcatccttggctggagtctgtactttaggttttgggaagtttcccattgttcccagtaatgagaagtagctccgtgtgcctaaattgtcttacgctgaacacctcctgttcttctggaggtctacaattgtggtatgtgctagaaagcaagtccaatataaactctgagcaatgggtgctcaagacgacttcctggaacacatctcacgtgtgttgttttaagtcccagatggagcttcaatgaagcacatcctgtgtgatttcattaagattctcaaagattgtgcctggtttcctctggacttgggtttgagccttttgctgagtttgccctggatctttcggtgtggtaaaccatagccattgagtatgacaaaaagctgagncctgtgagcctcccaagcaaatcaaantggaagggcttgaaggcncccagcatccattattaaggattctaaaatg

SEQ ID NO: 134862 - DNA, 880 bp, Homo Sapiens
  misc_feature (54)..(91): n is a, c, g, or t
ggggtttcaccgtgttagccaggatggtcctcgatctcctgacctcgtgatccnnnnnnnnnnnnnnnnnnnnnnnnnnnnnnnnnnnnnntgcaggcgtgagccaccgcgcccggccgagttaaagtactttttctggaacaaagaaacttagcataaatagttaaaatattaagagttgtaattaagggaaatttcagctcaatatgacttcaacagtttaaaaaatgtattatttcacataagaccatggagagaggaattggaagccccagaattgattgggtcagaaattgaaaatgatactatcagtgacccaggtttgaatgtctctctccacagcattgacttcactaatggatgtgacctggttggcagcagtagcttgcacaacatgcttgtttgcagtgagtagtagagagaaggttttgctttccccagaaactctgaaaaaggtgatcaaacctaaatttccttagccctttcttcttcccctgagcgaatcactagcagatggttgctagcacgggctgttactattacaatgaacccctaagtgtcagagaaagagttagtttggggaaatatcctctccaccacaatcttagtcattgaagtcaatttaacaatatattgaaatatttttcttagaagtttaaagttccattaaagagtaacaattacagaaattataggtagcctttagttctacaagtgacatctcaaaagggagatgattcatcaatttcaaactttccctgcaagtaatactggatgaaaattaacttggcaaacataattaataatcatgggttattaattacttctgcaaggtgggtgtgctgattttaaaaggcttgaataaaacataaatttcctt

SEQ ID NO: 134863 - DNA, 1021 bp, Homo Sapiens
  misc_feature (736)..(736): n is a, c, g, or t
  misc_feature (769)..(769): n is a, c, g, or t
  misc_feature (787)..(787): n is a, c, g, or t
  misc_feature (797)..(840): n is a, c, g, or t
  misc_feature (861)..(861): n is a, c, g, or t
  misc_feature (873)..(874): n is a, c, g, or t
  misc_feature (880)..(880): n is a, c, g, or t
aattattagacaatatcatatcgtatattaaagtttttattccttagtaagaatttttaaatcacaaaatagtgtggcaatatttaggtaatagaatttatggagtgctgaaaatactagaatataaaggtaatttctagtttatcgtcacatactaaacttttctaaaccagctggtttctcacagacagtatttatttttttaaaataatttaagacagcataagcttgtaccaagcataagcattgtaacaaaagtgcaacttttcagcaaatcctccccaaaagatattttaactcaaaatatcattagcacatattttctccctacaaaaatagcatgtcagacatcattaattggatgtattaacaactatgtacataagagccaccttgtaggctaagagtttaacgttgtttaaacacagcgtttgaggcaaacagtagcaacagcagcagcaaatgcaccaaactgacgaaaagacccagatattttcctcactcatagtcagactgttgtgtctcaccccttacataacatccaagtgagatttctcacagtgctaccttggcaacaaactaaaaatatctagacaaggtcttggtttaagccttattaaaaaagctttctttgtgattatctggtatctggtttggtctccagaaaatacatagacttggagataggaaggcctcacaggacttcattctatatctttacagcatttgcaatcanaactggccagttaaatgctttcgttcacttttngattttaacagaatatangatatatcannnnnnnnnnnnnnnnnnnnnnnnnnnnnnnnnnnnnnnnnnnnaagtcagtgcactttttttancagtagatacannatttangacatgatggattatgagagtgggatagatgcactgagatgtgtatgtaagatactatctatggataatagaatctgtaagataatatcatctaatatgacttagagaatagatggtcaatatcatgtcatttccataagg

SEQ ID NO: 134864 - DNA, 698 bp, Homo Sapiens
  misc_feature (110)..(138): n is a, c, g, or t
ctcctgcaaagtttcctttttatggaacttatagcaggagaataaagataaaaacaagcaaaaatatttatctctgataagggcaatggataaaaataaagtagaatagnnnnnnnnnnnnnnnnnnnnnnnnnnnnnctgcgtgagccaccgcaccctgcatcattttttcagcagacatttgttgagcacctgcttgatacaaggcacccatctaggcacaagggacatgaaaggaagcgagtcagacacagttcctatccttttggagtttacattttatgtgtggagacagacattgaacaggatgcacacaggatcacaggatgtgacaaatgcagtggaggagaaagataggctggtgtgagagctgttaatgggggctctgctctagcctgagaggcaaggaaggcttttccaggagtcacattagaggaacaatctatacaagcagggaactaggctgggggaagtgcagggagctttttaggtggaaagaacagcatgttcaaaggcctgaagctggaaggaggctggctgacttggctccagagaagctgttgggggagtgtgggagagacaagacagggagtaggggtggggagaagccagacctttggagtcttgtaagcctggttaagacacgtggactgtcttctgcggccaccagtggctctgttgaggtgggaaattaaaga

SEQ ID NO: 134865 - DNA, 1049 bp, Homo Sapiens
  misc_feature (713)..(713): n is a, c, g, or t
  misc_feature (883)..(883): n is a, c, g, or t
  misc_feature (921)..(922): n is a, c, g, or t
  misc_feature (927)..(927): n is a, c, g, or t
  misc_feature (936)..(936): n is a, c, g, or t
  misc_feature (973)..(974): n is a, c, g, or t
gcgtggcagtttggtttattggtagtgtcgtctcagcagcgtgccacatggccaccatctgcgggctgcctgctgccctcccaattgtccttggccctctccctgcccagggagcctgcagggaccctcggtgccaggctcggctgctgagccagcttgggtgtgaagcctgggctggcagctgaatgatggagagagggtcaagaaggtgagagacccccaccatggagacccagcagagccttctcaaatgctggtaagccaaatgtcacaaggtgacaagtccaaggagtgagaccaggcccatgagtgcagcacaccctgctcttccagagatgccacaaagccccttcagggagagaggggcccaggagggcagaatgcctgagaaggtcactgagccaggcagaggtgagcacagggcggggccgggcgtgctctttctccatgggcgggtggaggaaagacagtccgggtggtctgctcaggaagcactgcctggggctgggccactctgcccgctcttcctgggaggaaacatgggcagaggggcccatggtgggaggggagagagtttttggctgcagttgtcccaccactcagagaaaagaagtggctgaagctggtcctgactagtgggaggcctgggagcagacacggtggcatttccatggaaacacaggtgtgcaggccgtgtggagctggggatttanggagtggccagtgcccggtgtccacggggtgcaagcggggaccccgcatttggggaggcaaaccacagagttgctcacagggcgaagagggcatcctttgaccgctttggctttttccggccagaagggtttgaggttggggcaggagcctccatggggggcgagggganggtcgggaaccatttcagcagctttggtctttcctcanngattnatcaactcntcacttgtgacacctcctccagatcatcacccttcanngtcggtctgagcacacctcaatgtcgtccatgacagatggctgcgcaacgggatcccccctcgtgcgattcctgg

SEQ ID NO: 134866 - DNA, 1468 bp, Homo Sapiens
  misc_feature (1078)..(1078): n is a, c, g, or t
  misc_feature (1190)..(1190): n is a, c, g, or t
  misc_feature (1215)..(1215): n is a, c, g, or t
  misc_feature (1269)..(1269): n is a, c, g, or t
  misc_feature (1292)..(1293): n is a, c, g, or t
  misc_feature (1306)..(1306): n is a, c, g, or t
  misc_feature (1330)..(1330): n is a, c, g, or t
  misc_feature (1345)..(1345): n is a, c, g, or t
  misc_feature (1356)..(1357): n is a, c, g, or t
  misc_feature (1366)..(1366): n is a, c, g, or t
  misc_feature (1369)..(1369): n is a, c, g, or t
tcatcatctgagggaattgagggggccagttggagcaagcttagagtcaccaagtcatggctggagaaggatttgggtaaagcaacttcttagaggctgcctggtggcctacttgggagaaacaaagtgcctttgagactatcgacttcctgcttgtgatctaaaatggatgtctttgaaatgattaatctggaccagctaaaggcagttgttcaccacgtgttatccaagtttagatttcctagttgattattcacaccagatcaggctttaaaagatagaccaaactagaccagaatgtgtacatttcagcagatcagcaattgcaaaatgctggtgctatttactgacgtagcactggatccaaggactccgtggatataaatatttccagattcctctgcattttaacaataacaagaatggtcagacggagacacatggttacagcatgtaatatcgatccaatggtccagtgttagttacaaatcagtttatacagttttgctccattttctatgaattttgtctttcaaataatcttttatagaatgtatattcaaaaacatgtttgaacagcaaatgtttagaggagccaagtctggtgaacggtctttccttcggttattttggcaagcggagaggtcaccgtggattctgagtgggccaggcaagtgttccacgggtcatcttctcccacgagctcagggacagggcacagagtcagaaacggtctttttttaagcacgttggcagcagggcgtaacccttcagctctttagggcgagtaccttcccgacatttttcgcataaccacaacgatgattccaccaatgaagccgatggctagtaagaccccaactatgattccaaccagggtcactgttgacaaaccatctttctcaactgttgtctgtgtgtctccatccactttctccgtggagtgactggtggccacgtttgaggctgtggcgcttggactttgttcttgcgcgtggactgtgctttctgaagttggcagatcctcgatgcgaatgcctgttacactgttgacacttgttgccaccagagttgtcangccagacttatagcggtcttcgctggttcctggagtaccacatcatcttcggcacctggcatggcaacgccgccttccaaacctgtagtctcagtgtcatcttctggctggnctgtgctggctcctttctgcagganccagagcgacgcgcttcccaaacgaagagcagagctgacacttccacatcgttnccgttgagttgttgctctcctgnngggcgagcagcangattctgagctgggggaaaattanaagcaccgcggcacnggccaacctgnnagacgcacngtnggggggcggagggtgggaacaagaccccggaaggaaggtgcgagctccagaccctagagcgctcgtgcgattcttgctcaggcaattctatatgatcta

SEQ ID NO: 134867 - DNA, 1822 bp, Homo Sapiens
  misc_feature (71)..(720): n is a, c, g, or t
  misc_feature (753)..(767): n is a, c, g, or t
  misc_feature (1520)..(1520): n is a, c, g, or t
  misc_feature (1527)..(1527): n is a, c, g, or t
  misc_feature (1534)..(1534): n is a, c, g, or t
  misc_feature (1538)..(1538): n is a, c, g, or t
  misc_feature (1573)..(1573): n is a, c, g, or t
  misc_feature (1584)..(1584): n is a, c, g, or t
  misc_feature (1599)..(1599): n is a, c, g, or t
  misc_feature (1607)..(1607): n is a, c, g, or t
  misc_feature (1632)..(1632): n is a, c, g, or t
  misc_feature (1637)..(1637): n is a, c, g, or t
  misc_feature (1648)..(1648): n is a, c, g, or t
  misc_feature (1667)..(1667): n is a, c, g, or t
  misc_feature (1724)..(1724): n is a, c, g, or t
  misc_feature (1728)..(1728): n is a, c, g, or t
  misc_feature (1741)..(1741): n is a, c, g, or t
  misc_feature (1756)..(1757): n is a, c, g, or t
  misc_feature (1776)..(1776): n is a, c, g, or t
  misc_feature (1792)..(1792): n is a, c, g, or t
acgtcagatggacggggatcgtcaaacagccagcttgagcgaagacctacccgaactgggtactaacagcnnnnnnnnnnnnnnnnnnnnnnnnnnnnnnnnnnnnnnnnnnnnnnnnnnnnnnnnnnnnnnnnnnnnnnnnnnnnnnnnnnnnnnnnnnnnnnnnnnnnnnnnnnnnnnnnnnnnnnnnnnnnnnnnnnnnnnnnnnnnnnnnnnnnnnnnnnnnnnnnnnnnnnnnnnnnnnnnnnnnnnnnnnnnnnnnnnnnnnnnnnnnnnnnnnnnnnnnnnnnnnnnnnnnnnnnnnnnnnnnnnnnnnnnnnnnnnnnnnnnnnnnnnnnnnnnnnnnnnnnnnnnnnnnnnnnnnnnnnnnnnnnnnnnnnnnnnnnnnnnnnnnnnnnnnnnnnnnnnnnnnnnnnnnnnnnnnnnnnnnnnnnnnnnnnnnnnnnnnnnnnnnnnnnnnnnnnnnnnnnnnnnnnnnnnnnnnnnnnnnnnnnnnnnnnnnnnnnnnnnnnnnnnnnnnnnnnnnnnnnnnnnnnnnnnnnnnnnnnnnnnnnnnnnnnnnnnnnnnnnnnnnnnnnnnnnnnnnnnnnnnnnnnnnnnnnnnnnnnnnnnnnnnnnnnnnnnnnnnnnnnnnnnnnnnnnnnnnnnnnnnnnnnnnnnnnnnnnnnnnnnnnnnnnnnnnnnnnnnnnnnnnnnnnnnnnnnnnnnnnnnnnnnnnnnaagaattcggcacgagggccgcggctgtaggcnnnnnnnnnnnnnnngttagctcttttgattctccctatgatagtgtgaagacagggacaaaacgctaccatttcacactcccagatctaacaatagctaccaagtaattatgccatgcgtttcttctaaccttcgcaatatcactacgaggtagttcttactatcctcattttacagataaggaaactgaggctaagtgacgctggcagacttgcccaaggccacacagctggtaacagggactggtagtcacttgagtcctacatgagcacccttgctactacagcagctcctcccctttctagaggcctagatggaaagatgctggtgtcagcggggggcacaaaggtccacccagtcccacacatgccagagaggcatcatttgttgctgataacaaagtccttggtcttgccagggatgctcaggtgtgggtggtgacccaaaggagcagggtccatcccatttccatctaggaagatgtgacctcttgtgagtgaagagaggttctacttggctccgtgttccatcttggctccgtgttccatcccaagatgtggcatcatagacctggactgtaccatcaaaacctgagatggccaagcaattcttccggcctggggcccaagtcactcgcagcagctctgggtcagggctaggtacggatactgggcactggactgagctcacaggatggcagagatcccgggggtcaagaagacaaagacgcccatctgagccaaggctggcaatgctgggcccagggncctggtnccagctnccancttcagcacaccatctctctccaccagaccagggncagggctgcgnatctcaaacgtgccnacttctgncgggggtgtcacaagccccagcggnccgangcacagcaaanggaaaggtgtctgcatctnaggactgcaggctactcagctcttcactgtcactgacatctgggagacgacagcaangganacaacggctggangaaatggttctgcanntggtaggctggtggtcaangtccttccaccatccnagcaaatatcaatctccttcatccctcggc

SEQ ID NO: 134868 - DNA, 1289 bp, Homo Sapiens
  misc_feature (959)..(959): n is a, c, g, or t
  misc_feature (997)..(997): n is a, c, g, or t
  misc_feature (999)..(999): n is a, c, g, or t
  misc_feature (1009)..(1009): n is a, c, g, or t
  misc_feature (1059)..(1059): n is a, c, g, or t
  misc_feature (1111)..(1111): n is a, c, g, or t
atgagccaccatgtccagcacactttaatattcactatgggccctcaaaaggaaatgtttgtggggccaccaaaagcaaatgtctcttgaacctagtcacctggggggacaagtgtgggaaagtgcacctgtgttcccatgagacccactcaagaggagcagaaatcctgttttgctatttccttaattgctactagggctgggattttttcatgtttattggcccctctacatttttttctttaaaaaaattcacaaagcatgtttatatttgttagctcttttgattctccctatgatagtgtgaagacagggacaaaacgctaccatttcacactcccagatctaacaatagctaccaagtaattatgccatgcgtttcttctaaccttcgcaatatcactacgaggtagttcttactatcctcattttacagataaggaaactgaggctaagtgacgctggcagacttgcccaaggccacacagctggtaacagggactggtagtcacttgagtcctacatcagcacccttgctactacagcagctcctcccctttctagaggcctagatggaaagatgctggtgtcagcggggggcacaaaggtccacccagtcccacacatgcagagaggcatcatttgttgctgataacaaagtccttggtctgcagggatgccaggtgtgggtggtgaccaaaggagcagggtccatcccatttccatctaggaagatgtgacctctgtgagtgaagagaggttctatttggttccgtgttccatcccaagatgtggcatcatagacctggactgtaccatcaaaacctgagatggccaagcaattcttcaggcctggggcccaagtcactcgcagcagctctgggtcagggctaggtacggatactgggcactggactgagctcacaggatggcagagatcccgggggtcaagaagacanagacgcccatctgagccaaggctggcaatgctgggccnanggtcctggtnccagctctcaacttcagcacaccatctctctccccacagaccaggggcangggctgcgatctccctcgtgccgattcctggcctcgaggggcaaattcctanagtgagtcggtataattcgtatcatgtatagctgttcctgtgtggaattgtatcgctcacattcacacacaacgagccggagataaaggtaagctgggtgctatgatgagctaccacatattggtgcgccactgcgctccatcggaactgcggcactgatatgatcgcacggcggaag

SEQ ID NO: 134869 - DNA, 1048 bp, Homo Sapiens
  misc_feature (480)..(504): n is a, c, g, or t
  misc_feature (557)..(968): n is a, c, g, or t
ttttcaaaggtcaaataattactgttttatattgggacagtacatttcagatttcaaccaaaagacaaaaatgcagtttaactcaaaggcacaacaattgaaacacagaaaataatggcatctcttggatgccttatttctaaattaaacaaagaagtacacaaattttgttcccttccctcccccagtgcaagcccacaagctttttccaaagtcttgagcttttgatgctgtcccgcattgtggacttgtgaggcgcttggatgtagcaatgaaacaaaatgcttgagaggtctagtgaatggcattcaaaagggacctcaaagtgcagacatatctttttcaaatatgttacaggctgaactggctctttgaacactatcactctgcttaaatccaggaagcaggctttaaaaatgcaaaaggcatacaagttgtatttcagtgcaaatctttagctggttattggaaaagattccnnnnnnnnnnnnnnnnnnnnnnnnngcctacagccgcggccgctccaacatcaaaatggtcctcgtgccgaattcttnnnnnnnnnnnnnnnnnnnnnnnnnnnnnnnnnnnnnnnnnnnnnnnnnnnnnnnnnnnnnnnnnnnnnnnnnnnnnnnnnnnnnnnnnnnnnnnnnnnnnnnnnnnnnnnnnnnnnnnnnnnnnnnnnnnnnnnnnnnnnnnnnnnnnnnnnnnnnnnnnnnnnnnnnnnnnnnnnnnnnnnnnnnnnnnnnnnnnnnnnnnnnnnnnnnnnnnnnnnnnnnnnnnnnnnnnnnnnnnnnnnnnnnnnnnnnnnnnnnnnnnnnnnnnnnnnnnnnnnnnnnnnnnnnnnnnnnnnnnnnnnnnnnnnnnnnnnnnnnnnnnnnnnnnnnnnnnnnnnnnnnnnnnnnnnnnnnnnnnnnnnnnnnnnnnnnnnnnnnnnnnnnnnnnnnnnnnnnnnnnnnnnnnnnnnngcagacccgtaaagggcgcgtgctggcgttttccatagtccgccccctgacgagatcacaaatcgagctcagtcagaggg

SEQ ID NO: 134870 - DNA, 2329 bp, Homo Sapiens
  misc_feature (1333)..(1354): n is a, c, g, or t
  misc_feature (1645)..(1645): n is a, c, g, or t
  misc_feature (2247)..(2281): n is a, c, g, or t
ctctggctggttcgtggtcctttggggccccgcctttactggggtttgtgtgtctcggctggtccttgtggcgacccttgttgtgtctatcggccgccggtggcgctggtaggccttcaatgttggtgatagtaaggtaccttgtttctgctgccgggggacttctttgttggggggtgagattgggacccggcgccttgtgggtgagatgggatgctcttcgtttaggagggggatggacggtgaagccgttcttcttcgtttggaggctgggaggggagtattctccgtcgtactgcgaggagagtatctttctaggagaagttgaggcgcgcgacgtggggagcagaaggagtcccttcgtcttggtggtgtctggagtccggcccctcgaggagaggggcgggcagaagggagaccgtcgccttctgtggtgctgggatggacttctcctccgtctaccacttttagtcactggcgattgccatcgctttcccatctgcatccgaggggaacgtctctttttttggcgctttcgtggtgatggagaagcactccgggaaggggaatgtctccgccgcctgccaacctcaccacttcttcacatgggatctcttgggtcgttcatcttctgaggaggaggaggagccagagtcagatgaagactgctggttttgtcgtctgtattggcgtctctgctgcacagaatctgctgcagccattttgccacctttatcttcttccgattcagataactctacttttctaggcttcggtgctggtgaaggggattctcttttctcagtacctttatgttttgtcactttacctgaagttctccctggagacacagaaacacgactttttcttgtacggtttgactgctggggtgtaggggaatgccgagttttgggtggtggagttgcaggaggtgatggcctgtgccttcgccttggaggacttgctgaaggagataacctacgagttttccgaggggggctggatgtcctcttgggaggcttctttggtggtgaccgtgaacgagatgaagaggatgatgagctactcccagacaaggatgctgacgaacgtcttcttcgtcttactggagatctactccttctatgccttggtggaggaggcattcttcttggcggagttcttcttcgaggagatggccgccttcttgggcttggccgccttctaggtgaatacgatcttgatcgggatctatggcgccgtctaggtcgagtgtgagaaggagagcgggaccgcgtccgggatcttgatttggagcgtgaccgagatcgtggtcgggtcttctccttctccnnnnnnnnnnnnnnnnnnnnnnccggagaaggttctttaggctctggtataggttcaggtttgggaactttcagaatgtcactagtagaagtagcctcttgtactgaaggttcttttacttccactgaaggttctgggagctctggagttttttccttcttttctggaagcaggggaaggactccggctcttggttctgtgacggggagatcgagaatgactgcgctttctctctctcctgacaggggaagatcgtcttctaggggaaggagatctggatttgcgtctttcttgggctacgagaccgctcccnttttgtctctgctgctttctttttcttccttatctcttttatctttgtcttcatcttgctttttcatagatgccagtttttcttgttcaatctgtctttgttttatttcttctttcttcagttctaggaaagcagaagggattcccgcgatgttttcttgtgcacttagcagcaggggccacagttctcccataaattctcgagcattttttccattcaaaaatccagtcaggttgatttgcatcattttggagtctggattcttcacttccagctggttgaatataaactcaatcacaacatcatcttcaaacccaaggatttccgttactctttttgttatccaaggctttataacctccaaatttactttgctcatgtccacctttttttctaggcattctgcaaatttcagctgcttcagtagtttcttctgtttgttgctgaaccgattatcctgttctgcacttgttccgcggaaaaatcccgcgtccatcttgccgcctcgctcggagatcgctccctatcccagggtacaccgcgccgccgcccccggccgtaatggccgaattcccgggcatatgtccggtaccgtcgactgnnnnnnnnnnnnnnnnnnnnnnnnnnnnnnnnnnncgccgcttcctcgctcaaatccgtccgctgcgctctgtcgtttttttc

SEQ ID NO: 134871 - DNA, 1028 bp, Homo Sapiens
  misc_feature (440)..(503): n is a, c, g, or t
  misc_feature (786)..(786): n is a, c, g, or t
  misc_feature (792)..(813): n is a, c, g, or t
  misc_feature (896)..(896): n is a, c, g, or t
  misc_feature (938)..(938): n is a, c, g, or t
gattaacaggctgctctgatgcttttggtagagtgagagagaatttggtaatctgttagagattatattgctgagaagctactagggaagactatttgtaaaatagtaaggactatatatatgtctaagcccctatggtagacttaaaaaatactaatttaaatgagttttaggttggttgatttgttggttggttggttttgaagtaacctgtttttcttcctgtcgtgtctttttgcagaatccagactccaaaatgatgcaaatcaacctgactggatttttgaatggaaaaaatgctcgagaatttatgggagaactgtggcccctgctgctaagtgcacaagaaaacatcgcgggaatcccttctgctttcctagaactgaagaaagaagaaataaaacaaagacagattgaacaagaaaaactggcatctatgnnnnnnnnnnnnnnnnnnnnnnnnnnnnnnnnnnnnnnnnnnnnnnnnnnnnnnnnnnnnnnnngggagcggtctcgtagcccaagaagacgcaaatccagatctccttcccctagaagacgatcttcccctgtcaggagagagagaaagcgcagtcattctcgatctccccgtcacagaaccaagagccggagtccttcccctgctccagaaaagaaggaaaaaactccagagctcccagaaccttcagtgaaagtaaaagaaccttcagtacaagaggctacttctactagtgacattctgaaagttcccaaacctgaacctataccagagcctaaagaaccttntccggnnnnnnnnnnnnnnnnnnnnnnggagaaggagaagacccgaccacgatctcggtcacgctccaaatcaagatcccggacgcggtcccgctctccttctcacactngacctagacggcgccatagatcccgatcaagatcgtattcanctagaaggcgggccaagcccaagaaggcggccatcttcttcgaagaaggacttccgccaagaagattgcttcttcaccaggcttgaaggg

SEQ ID NO: 134872 - DNA, 1203 bp, Homo Sapiens
  misc_feature (155)..(166): n is a, c, g, or t
  misc_feature (332)..(362): n is a, c, g, or t
  misc_feature (533)..(533): n is a, c, g, or t
  misc_feature (944)..(944): n is a, c, g, or t
  misc_feature (1108)..(1108): n is a, c, g, or t
  misc_feature (1123)..(1123): n is a, c, g, or t
  misc_feature (1132)..(1132): n is a, c, g, or t
  misc_feature (1141)..(1141): n is a, c, g, or t
  misc_feature (1169)..(1169): n is a, c, g, or t
  misc_feature (1180)..(1180): n is a, c, g, or t
tttaacaaagagaagtaaaaaaatttattgcagtattcgctccaccagattacctggggatcccttttcttgtattgttttcagggtgacctaatacatcaaaatctacatttacaaaaactccttctgcagataggtcatagatactgcatgcnnnnnnnnnnnncaacagaataaattatatatccaggagattctgccattttacagcctggaaaaaacaatgcttccctggaaactgggctaagctaaagaaagccatccgctgctaggttaaactccaagaacactttattaagaacattaacagactaatttccaacattcacttnnnnnnnnnnnnnnnnnnnnnnnnnnnnnnnccaagatataaacaatttttgttaaactataatacagtgggagtaaaaatgaactgagaatctgtttctgctgcacaacagcgaagggagctcccacaaaaatgtttgcccaacatttccttcttttgttcctgcatcccaggttccacttactcttcataaaactgattnttttttgccagaatgttggtatttcaagtttttctgccttttaaaaaaattcctgtaaatttggctgcatgtacaaattcattagctggaagtcccatccttggcggcatacagggatcgtaaagtctgaacaactttattagtcagcttattagcactcgttagagcaatttttttgtaaataatgtctgactctttaatagtgtctacccaaggcaccagtttgcggccatcacggcgcttagcctcagtccaggagccactgtaggagcctgccatccactgaacactgaaccactgctggttttctgcactactcttgcaatttgtggtcgatctttgtactttggacagcaatagcgatgaatccatgacgtcacactttcattcatctgtgctgccactcggtanagtctgatttcgttttgacttctcatgacctgaagtgctcctctctatctcccatcacttatcatctctgctctgctgcgtatattttaggctgctctccagcatgaggtatgctttgtcgagcattgtgcactgaactccctttctctctctcatcaggtcanagttcatgagagttngaatctaancgtttacanaccctttcactctccgtgatttggatancagtcaccgangagtcatgttgttttgataatag

SEQ ID NO: 134873 - DNA, 917 bp, Homo Sapiens
  misc_feature (57)..(87): n is a, c, g, or t
  misc_feature (256)..(267): n is a, c, g, or t
  misc_feature (676)..(676): n is a, c, g, or t
  misc_feature (691)..(691): n is a, c, g, or t
  misc_feature (860)..(862): n is a, c, g, or t
  misc_feature (879)..(879): n is a, c, g, or t
aaactccaagaacactttattaagaacattaacagactaatttccaacattcacttnnnnnnnnnnnnnnnnnnnnnnnnnnnnnnnccaagatataaacaatttttgttaaactataatacagtgggagtaaaaatgaactgagaatctgtttctgctgcacaacagcgaagggagctcccacaaaaatgtttgcccaacatttccttcttttgttcctgcatcccaggttccacttactcttcataaaactgannnnnnnnnnnngccagaatgttggtatttcaagtttttctgccttttaaaaaaattcctgtaaatttggctgcatgtacaaattcattagctggaagtcccatccttggcggcatacagggatcgtaaagtctgaacaactttattagtcagcttattagcactcgttagagcaatttttttgtaaataatgtctgactctttaatagtgtctacccaaggcaccagtttgcggccatcacggcgcttagcctcagtccaggagccactgtaggagcctgccatccactgaacactgaagccactgctggttttctgcactactcttgcaatttgtggtcgatctttgtactttggacagcaaatagcgatgacatccatgacgtcaacactttcattcatctgtgctgcaactccgtanagtctgaattcgttntgacttctcaatgagtatacgctgcgaatacgttgactcccctccgctcaccctgaagtgctcctctctatctcccatcacttcacatctctgtcctgctgcgtataatttaggctgctcctccagcagtgagtatgctttgtcgagattgtgctactgaactccctcnnntctctctcacaggtcanatgtcatgaaagttgaatcaatctgtttacaacccttt

SEQ ID NO: 134874 - DNA, 1355 bp, Homo Sapiens
  misc_feature (631)..(1032): n is a, c, g, or t
  misc_feature (1037)..(1274): n is a, c, g, or t
gtcagacataaagatgtttaattcagtgcattttaaaatgcccattatttagaggtgaggtttattactgatcaaaccatgtggcataccccttttaatactgttaatctccatacaacgacatccaggtttagttaagtaacataactccctggaacaatgagagtattgtgctatgatattttctgcattctcagtatttcattataatagggagtctctactttcaaaatcataacccaatctagtatatacatgcaaactatataaaaccattaagagtaaggacaagtgattgacaaaaaacagtggtcttttaatttttttgtattcttacatagaatttataaaattttttaccaatacaaaatataagataaagtggcttgctatgtgcttcacctccatagcagtatcaagaaagaaatacgtaatttagaatctcctcgaacaaaacttttgtctaggagcaaagataaacaagtttaaaatcagctattaactcttgtcagcgaaacaggaaatatattgatgtaatacttcagtaaatattgacccaaagctttattttaaatcatatgatgcttctcactgctacctcaattccagtgaccctcgtgccgaattcttnnnnnnnnnnnnnnnnnnnnnnnnnnnnnnnnnnnnnnnnnnnnnnnnnnnnnnnnnnnnnnnnnnnnnnnnnnnnnnnnnnnnnnnnnnnnnnnnnnnnnnnnnnnnnnnnnnnnnnnnnnnnnnnnnnnnnnnnnnnnnnnnnnnnnnnnnnnnnnnnnnnnnnnnnnnnnnnnnnnnnnnnnnnnnnnnnnnnnnnnnnnnnnnnnnnnnnnnnnnnnnnnnnnnnnnnnnnnnnnnnnnnnnnnnnnnnnnnnnnnnnnnnnnnnnnnnnnnnnnnnnnnnnnnnnnnnnnnnnnnnnnnnnnnnnnnnnnnnnnnnnnnnnnnnnnnnnnnnnnnnnnnnnnnnnnnnnnnnnnnnnnnnnnnnnnnnnnnnnnnnnnnnnnnnnnnnnnnnnnnnntaacnnnnnnnnnnnnnnnnnnnnnnnnnnnnnnnnnnnnnnnnnnnnnnnnnnnnnnnnnnnnnnnnnnnnnnnnnnnnnnnnnnnnnnnnnnnnnnnnnnnnnnnnnnnnnnnnnnnnnnnnnnnnnnnnnnnnnnnnnnnnnnnnnnnnnnnnnnnnnnnnnnnnnnnnnnnnnnnnnnnnnnnnnnnnnnnnnnnnnnnnnnnnnnnnnnnnnnnnnnnnnnnnnnnnnnnnnnnnnngcgtaagtactactcgggtgtagcgtcgctcacgtggctgttgcagatccccgttatccgacgtggccttacgggattact

SEQ ID NO: 134875 - DNA, 1076 bp, Homo Sapiens
  misc_feature (631)..(1013): n is a, c, g, or t
  misc_feature (1036)..(1036): n is a, c, g, or t
  misc_feature (1041)..(1041): n is a, c, g, or t
  misc_feature (1045)..(1045): n is a, c, g, or t
actaatttattaaatttatttataagaaatacaattgtcaaagcagcagctctcacccaaaagaacagcccattatctccctggagcagacttagattgaaacttaaaaactgttttgatccaaacattgcttactaaaatgccaagaaatcaaaatagtaattaatggatagtaactaatgtagccattgattaccatgtaactctgggtcactattcattagtaaaacgagattgaggacttcaaaaatgagtgaagattgctaagggtaccttaagaatagggttgtcttccctattctactgtcgaaatatgggcgaaatgggcgattatacacaaaaatacattgtcagctggaacgctataatgtatcatcacaataaggaaaagtaaaaaataattaaatagaaaaacatggccgtgtttcataacatactcaagacagaaaagagcaaaactcaccaagtgtttaaattatgagttatttcaactgttacaaaaatagaaaacagatatacaattctttaaactgggtcagaatacaggaagatgttaagaatgagatcagcccccaaactgagggcaaagtggtgggcgtggatcaaccaaacgcctcgtgccgaattcttnnnnnnnnnnnnnnnnnnnnnnnnnnnnnnnnnnnnnnnnnnnnnnnnnnnnnnnnnnnnnnnnnnnnnnnnnnnnnnnnnnnnnnnnnnnnnnnnnnnnnnnnnnnnnnnnnnnnnnnnnnnnnnnnnnnnnnnnnnnnnnnnnnnnnnnnnnnnnnnnnnnnnnnnnnnnnnnnnnnnnnnnnnnnnnnnnnnnnnnnnnnnnnnnnnnnnnnnnnnnnnnnnnnnnnnnnnnnnnnnnnnnnnnnnnnnnnnnnnnnnnnnnnnnnnnnnnnnnnnnnnnnnnnnnnnnnnnnnnnnnnnnnnnnnnnnnnnnnnnnnnnnnnnnnnnnnnnnnnnnnnnnnnnnnnnnnnnnnnnnnnnnnnnnnnnnnnnnnnnnnnngacatgtgagcaaagggcagcanaggtncagnacgtaaaaagcgcgtgctggcgttttcatag

SEQ ID NO: 134876 - DNA, 443 bp, Homo Sapiens
  misc_feature (92)..(92): n is a, c, g, or t
actagtattttgtgaagatgtatacagcatcagttaagttgattttcagacctgctcctcagtaataatactagctagtcagcattcacgcntaccaggacacaaaaatcctcttcaaaactactcagaaaagaaagtcattactcaggaatgatgtccattcaggagaaatcaaaagagaattcctccaaagttactaaaaaaagtgacgataagaattcagaaacagaaattcaggattctcaaaagaatctagcaaaaaaatcaggtccaaaggagactataaaatcacaggctaaatcttccagtgaaagtaaaataaatcagccagaattggaaacacgcatgagtacaaggtcatcaaaggcagcatctaatgataaagctactaaatccattaataaaaatacggtgactgtgaggggatattcacaagaatctac

SEQ ID NO: 134877 - DNA, 951 bp, Homo Sapiens
  misc_feature (806)..(817): n is a, c, g, or t
cggaggaaggttttgaaggagggaattttggtttccctgggtaggcgcgagaattgccgacttagcttagtttttatttactgagggaggcaggttttgaaaaattcaaccttttaactgatgctggaatattccattttccaacaaaaaattattagttttgcttccaaggtaaggttttctgcctttcctagaaacatgagaaaagcctggcatgaatgctaaaaggccacttgctttactttgggcaaggtaataaaaatttgaggaaaattttgattatttttaataagtttttttatcaaaagaaatttaattcaggttcaatctgttttgttaattttttaattaattttggtttcaggcctagctctattactggaggagttatttatcagtgacctgttttgataaaatttttgaaaacttttttcttctgaagtctacagttattggacttcgattcacttgaaacatgtcttatggctaacacgtttctttccttgtttgctgagtctgttggtttgcagttcttatctaacctcctttgttcaacaaaatattctattaatatagatttccttttgtgctgccgtttagtttttgccccaaaatatagactcgatgtctcagccaccataactcatgaagaaaattagacaaaaccattccttctaatatgctcttaacacatcacacagcaccttaaagaaataatatatcacctttttcttcaagttgattgatgaatgatgcttctgatgaatgatacttcttatcacttcctgtatgtttagtaatctttnnnnnnnnnnnnctctatagccaaagacaatcttccttttgcctggcggagggtcagactagcgccagcggatcgcctcacatccgggtatcaggagacactcagctgcttctgctgcggccgccgatcccgggaattccggaccg

SEQ ID NO: 134878 - DNA, 1042 bp, Homo Sapiens
gttttgtggtattttattttttgtttaacgaacaagacaaaaagtttccaacgtgctacttgagtcaattagccacatacatttgcttaagtgattttttatcaagcaaaaaaaggcagaaaaaggaatgaagacaatacagatagcaaggctggcacttatcaattctggaaatccacctccagaaatatacactggtcaaggatgtttatacaatgcatcacatataaacaggcataatctgctggattcatttcagaactctttgaaaccatgggtatgtggcagatactcatttgaagttactttttccttaagaatggtaagcttttattttatgtgactcagaggttataacattctataaaaatccaaggagggagtaataaaattactatgccttataataatagcagctaacattgttaaagtgcttttactgttgagtattacatttagtagcactgaagacttggagagaaatcagataaaacatataaggaagcccttttaaacagggctgtcttactctctctactcaaatgcacattagtaaaatgtcttattaatctgtctccactctctaagactaaggtagccctagtagcaccttcaacatctcatttcataggagataatctaggctagttattggcacatctttttgaatgtctagatatttgttttaaatgcctctaacaatcccactgcatgcagacatccttcatctttcttttactttcttcagtttcctcattcacttctcctgctgcgcacatccagaactccgagcctcaggcactgctacttacctttcctttccttcactttctcttaccttctgacctcaattattttattaagacacagccttgggacattattcctcagacacaacatctgacgtatttgtttagcacaactctctgtgcgattcttggcctcaggccaactcctatatgatgcgagaatcgaccaggcaattgttccggggaatgtatcgtcacatcaaacatagagcggatatatggtagcggtggcg

SEQ ID NO: 134879 - DNA, 1005 bp, Homo Sapiens
  misc_feature (732)..(732): n is a, c, g, or t
  misc_feature (754)..(754): n is a, c, g, or t
  misc_feature (813)..(813): n is a, c, g, or t
  misc_feature (848)..(848): n is a, c, g, or t
  misc_feature (852)..(853): n is a, c, g, or t
  misc_feature (886)..(886): n is a, c, g, or t
  misc_feature (897)..(897): n is a, c, g, or t
  misc_feature (907)..(907): n is a, c, g, or t
tatgtgttaatatacagcttttattctgagacattgaccttcactagagtgggacctgtggccccagcctggctggagaagcagtcccagggcctgagtgacaccatttccctttcctgaaataggaacaagttattccaaaggagaaaggagagcccagagagatctgtacaggacctctcttgcacatggtgactggaggcagagggtggggagctggagaggagtccagtccctccaacaaatattgagggcttcaaagagctcttcctggacgtttctcttaatctggatttaaaagggacaggaggtatcttagggtccaagaacataacaggaatgggcaactctagaagtgtttgtgtgtggaaggccctaacctggccctgtcctccctgtctctacctttggctttcatgaagagagattcacagctcagaggaagggaggaatttctccagtcttcactttaacaaactcttttaagttttctgcctaccttatgttccctttggccaatgacccactccctgggaacaagatcttgttgactttcttgggaatctcctaagagataagtgctttgtgtcggagacaagttcaggtaaaccaaccaaggcagtgcctcccacagtcaaagagagaagctggagggccaaagcctatagagttgggcactacagctgctcatgctgcagaggagacagctagtcaggaaccctggagattcangacaacttgctggtcccctttngcccaggctgtggtcctatcacagtcctcacctttctctcaatctgacttttgtctccntggttccccagctcccctctatctcactggctttncagnnctcactggttctggactccccctcgtgcgatcntggctcgaggncaattcctanagtgagtcgataaatcgtatctgtcatactgttcctgtgtgaatgtatccgtcacatccaacacaacgaccggagataatgtaactgggtgctatgat

SEQ ID NO: 134880 - DNA, 988 bp, Homo Sapiens
  misc_feature (14)..(14): n is a, c, g, or t
  misc_feature (115)..(115): n is a, c, g, or t
  misc_feature (165)..(165): n is a, c, g, or t
  misc_feature (175)..(536): n is a, c, g, or t
  misc_feature (680)..(691): n is a, c, g, or t
acagagaccacganactccaggggaaaccttgatctatagtctgcggttcgccctctgattagctcgattttgatgctgtcaggggcgactattgaaaacgcagcacgcgccttntacgttcctgcctttgctgcctttgctcacatgtcttctgcgtatccccntgatcttgtnnnnnnnnnnnnnnnnnnnnnnnnnnnnnnnnnnnnnnnnnnnnnnnnnnnnnnnnnnnnnnnnnnnnnnnnnnnnnnnnnnnnnnnnnnnnnnnnnnnnnnnnnnnnnnnnnnnnnnnnnnnnnnnnnnnnnnnnnnnnnnnnnnnnnnnnnnnnnnnnnnnnnnnnnnnnnnnnnnnnnnnnnnnnnnnnnnnnnnnnnnnnnnnnnnnnnnnnnnnnnnnnnnnnnnnnnnnnnnnnnnnnnnnnnnnnnnnnnnnnnnnnnnnnnnnnnnnnnnnnnnnnnnnnnnnnnnnnnnnnnnnnnnnnnnnnnnnnnnnnnnnnnnnnnnnnnnnnnnnnnnnnnnnnnnnnnnnnnnnnnnaagaattcggcacgagggttaaaatgtatttaatagatctaaaaaattttggctctatcaaaacttaggtctcaattataacattactaaagtgcttgtaaaaattatcccagatttctggctacagcttgtataaaggcctannnnnnnnnnnnacagttttattttggttgaagatttttctccaaaatagctattccagatggcttaacagtcccagaagtgaaaaatcttaagatatttcatttataaccattagagtcttaataaaaccctagtaaatactctcccttctggatggtttaaaggtcccttcaggcaagctggctgcgtaaacaccagagccctcttcataagataagtttgctcaaaaggtcaacttttacagagaaattcctacctcattagtgtaagggaaaattaacatgacctgttttcattacttaaaatgc

SEQ ID NO: 134881 - DNA, 1187 bp, Homo Sapiens
acatcccccaggtcctctcaagtacttctgctgaaacaaatttatttggctaggcactaagttgttttccagtgaatagtaactaaagaagcccctaccttgctccatggattaattccttctgttcattttccaactgcactaattgtgcatattactctgcctaatcttgtgcatgttttcattgatttccctctcccggcttttgcttctcttgaaactgttgcccagtcacttctgctccaattctcttcctctctaaatagtagtttattactgccacatctccatgcatcagcaaaatgttggtgacatttttctagcctggcagaacagattacttaaagctatttcatttcaaagcagactgaatgtgacttcatctaaaggcagcattaggtactgcatggaaataggtcattaacttgaaactcttatcaaaatatattttaccagtttccagaatttccagtacaggaccgcctgaagagagagccattgttcaattccaattcagtgtgagtgacaaagtgaaatttagaagtgaagttgtctatttgatatttaactctttattaaatctttctttaaatttctgcctgtcagtctatattgctgtttttattatacatcagtttctttgtataacttgtgagttccatgtgttttgtttttattatgtaaatatcattataaataaacttatttataaatcaaagatttgttaatttttggaaatcatgcttttcaaagcatcctaacttgctaagatgctaggtagtacgaccctctggatttggaaggcaaataaaactcttacagtgattatttagatattaaagactgagaactcacggcttaaccccagtcttgatggtatattgaacagactgaatatattttaccattacagggctaaaaggagtcttcatgtgttaatactacctccttgtacatcactatacccaaatcagttattcaaattgttaggaattttaccttttaaaatctcataatggatatctcatgttttctgtattaatgtattttcaatgataggctgtttctttttttgttgttattgttgttgttgttatatccatacttttatctctaatgaaatgtagttgggttcttcctgtaatgcgctattatgtcttgggcttaataaaaatatttgtgatcat

SEQ ID NO: 134882 - DNA, 1055 bp, Homo Sapiens
  misc_feature (39)..(39): n is a, c, g, or t
  misc_feature (99)..(99): n is a, c, g, or t
  misc_feature (101)..(101): n is a, c, g, or t
  misc_feature (115)..(116): n is a, c, g, or t
  misc_feature (123)..(123): n is a, c, g, or t
  misc_feature (148)..(148): n is a, c, g, or t
  misc_feature (150)..(150): n is a, c, g, or t
  misc_feature (207)..(207): n is a, c, g, or t
  misc_feature (279)..(279): n is a, c, g, or t
  misc_feature (306)..(306): n is a, c, g, or t
  misc_feature (309)..(309): n is a, c, g, or t
  misc_feature (317)..(317): n is a, c, g, or t
cttctacttggataacgtgaacagagaccatcctgtacnaaggtgctgaatgctttagactatcgcaaaggagacatcaccttaaatggcattctgatntntgatgatttctctnnaatattngacagacaaagacagtgttgttacntngaaaagtcatgacttcagatgtcactccgagagaggatgtgtgctcccactgatgtntacccgaagtcttgctagctgggtggtgatgatgacaccatgtcagtcatagtgggatcagcagccggggtnaacagtacggagtaaaaaatcaaaacnatntacagganaacggaaagtggtgaggcatgcactttcactcactgaagaaagtagtagtagtgacagtatgtggttaagcagagaaccaacactgcacacccctgttatgatgcagacaccacaactcacctccactattatgagagagcccaaaagattacggcctgaggatagcttcatgagtgtttatccaatgcagactgaacatcatcaaacacctcttgattataatcggcgtggcacaagcctaatggaagatgatgaagagccaattgtggaagatgttatgatgtcctcagaagggaggattgaggatcttaatgagggaatggattttgacaccatggatatagatttgccaccatcaaagaacagacgagagagaacagaactgaagcctgatttctttgatccagcttcaattatggatgaatcagttcttggagtgtcaatgttttaataccagtacacaattaaatctgtggtgaagtcattttctaagtggaagaggaaattttaaagtgtggtagatacagtgaaattctgtacagatttttctctaaggagaatatgacatgcttatgcttaccaagatcaagtgcattgaggggcagttttgtttgcctgaataaacgtaaaggacaagtaaacaatttgatgataagctacagtttttcttagaaagtaaatattttatttatgcgctgttagttggcttttgaatcgattatttcatgctttttttt

SEQ ID NO: 134883 - DNA, 1073 bp, Homo Sapiens
  misc_feature (791)..(792): n is a, c, g, or t
  misc_feature (801)..(801): n is a, c, g, or t
  misc_feature (809)..(810): n is a, c, g, or t
  misc_feature (822)..(822): n is a, c, g, or t
  misc_feature (825)..(825): n is a, c, g, or t
  misc_feature (829)..(918): n is a, c, g, or t
  misc_feature (941)..(941): n is a, c, g, or t
  misc_feature (1004)..(1004): n is a, c, g, or t
  misc_feature (1023)..(1023): n is a, c, g, or t
  misc_feature (1031)..(1031): n is a, c, g, or t
  misc_feature (1041)..(1041): n is a, c, g, or t
ttttaaatatattcagagcacagaatttattgaacataatatggagacagctagtacaaaagtttatgccttggcagggcaggtttcatcaggctgataatggaacatgggagaacatgctgtaaatggctcttttggtctggaccctgcagaaatacatctccttctctctgggaaacatcatgtcagctgccaagccatgaatttattacatatcagaaaaccaaaatgtgcaacagtaaagagtcctttcctgcaccaactttttaaattacttccatgtcaaaacagcaaatacaatgaaaaatacataaaggacaaattatgaaaactaaagcattctaagacatctcttaagatactcagttcctaacatgttaacatacattgaagactataaacacacacatcagaaactgtgggaatcttttttcaacatagggagaaagacgtagaatagggagagaacagcatgggttactgaaaccatttattcagaaagcagaggaaaggcgaaaggaacactgaaatagatcatttttagtttcttataggaagttccaaatggcagcagttgataaatcgtctttaaaaaggaaacgacagcaacagaaatgagaaccaaatatattttgcatttttctctcggtgtatcatcttgagtcaccttacttaggctacacacgaatgaaaaatattaaaagccacgcccactaatttcgcagcacctcatatagtagcaaacagacagagggtacttacgaaacgtttgctaagggagtgatgatgannagcctcgtngcgattcnntggctcgagggncanattnnnnnnnnnnnnnnnnnnnnnnnnnnnnnnnnnnnnnnnnnnnnnnnnnnnnnnnnnnnnnnnnnnnnnnnnnnnnnnnnnnnnnnnnnnccggagcataagtgtaagctggnggtgcctatgagtgagctactcacattatttgcgtgcgctcatgcccgcttcccagtcggaanctgtcgtgcagctgcattnatgatcgncacgcgcggngacaaggcgttgcgtattgggcgtcctccgcg

SEQ ID NO: 134884 - DNA, 1029 bp, Homo Sapiens
  misc_feature (673)..(673): n is a, c, g, or t
  misc_feature (749)..(750): n is a, c, g, or t
  misc_feature (765)..(765): n is a, c, g, or t
  misc_feature (768)..(801): n is a, c, g, or t
  misc_feature (851)..(851): n is a, c, g, or t
  misc_feature (875)..(875): n is a, c, g, or t
  misc_feature (913)..(913): n is a, c, g, or t
ttttatccaatttgatttttaatgtaattaatagtgatttaattttcaaaggagcaaataattacaaacaagagaaaacattgctgagatggtgcctggttgcttctattcaggccattgctgaactatatagaaaaaaagtatattcatggtgtcttcattattatgaaaatcacagtaatatgactcatcaggaaatcacaataattttatgacagaaacaatatatttagaacgaatctgtcagtatttgactctcttttgagggaaaaataaatgaaaaccacgttctctggaaagaaataagacaagaaatgcccacagttgcattctgctgttgggaatacatctccaaaattcaaggttcaaaggttatcacatttaattttcaacacttatcaccttcttcttctctcaatttatggagatagatttctatgttcattattcgggattattagaaatttccttcagtttgaacaatgcgtaacaagtattctgtgacatgggtgcaaaaagttgtcattttcaatcaagttataagacataactgtccataaagtgcatttcatattaaagtacccatcaggagagaaatttaaagtgcaatatataaggtactttacatagtgcaaagttgctaaatatatacattatctgcgccaagtccaanataaagcaggatcttatctatccctatgctacagtgaacactggagacatactctcacatctttattcctttgcanngtgtagtattttggnccnnnnnnnnnnnnnnnnnnnnnnnnnnnnnnnnnnaaacctaatatgtactgcttatggttctgcaatgtttggactggttcccnagatttgaactttaacatgaatantatggatctcacttcatagcaatcactcaagtacatangctgtatatggtgactatcagcagcaactgtaggcagattgactgtgatatgctatgaatacaaatcatcattatgtgcagactcggcgatctggctcagcaatctaatgatcata

SEQ ID NO: 134885 - DNA, 1087 bp, Homo Sapiens
  misc_feature (748)..(748): n is a, c, g, or t
  misc_feature (812)..(812): n is a, c, g, or t
  misc_feature (861)..(861): n is a, c, g, or t
  misc_feature (899)..(899): n is a, c, g, or t
  misc_feature (911)..(911): n is a, c, g, or t
  misc_feature (938)..(938): n is a, c, g, or t
  misc_feature (963)..(964): n is a, c, g, or t
  misc_feature (1019)..(1019): n is a, c, g, or t
  misc_feature (1021)..(1021): n is a, c, g, or t
  misc_feature (1041)..(1041): n is a, c, g, or t
gacattctataagtttataaaagaggatatatggatgaaatttggttaatttcagaaggcacctcaaggctaaaggctttttgtacttctttcatcaatcaaaaagttaacacgcttttattgctattcaagtagcaaaggaaaactactctcacaaacttcagttcaacagagaagaatcaccattaagattgagatatggaattgactaaaaccgaagtctccatacacgttatcaatggagcaactttcctgtgtgctttcaaattaatgaaatcgtgaaagaaaagtcaccattcgccattgtgatgttaatgtgtcattgaagatttcagttactacactaggcactgaagtaccattctggagggctgtccactgtatagaacatttatgaatagaaggtaaggacactctgatgattcccacgaactaggaggattggtggtaggtccttagatagagcttctaaccatgccatgtagagagcactagacacagcacctttttcgtgcaactgggagactcatgacaataatattagctgtgcttgaatgttcctttaataactcatttaacctgatctgccggtatgtcttggtcttattaagttcaagctcattatctgttattcgccatggttcatcttctttcattttatctgcaatatcttgctctttatcatcttcatgaagtctgtatggctcaatgatttcctcaaaagctataatattttctttcctttggntttggtatgatatctccctagaaccatgatatcagaaaagtctatccgggacttgctaagcaanagtagcatcgctctccggtcatggtctattctggttatcttttcacaantgatactctgatcttacagtctttccattttttcttgncgtcagaggtanggtatcataggtcaactccatcatcanaagcacagacatcatagatcttccnntgttttctgaactgtgacaacttcagaagcttttgtcagctcattaaggacaaangngcttgatctttttcacaggntgagtgcatctgcacccctctcactttggggtatggttaccagagg

SEQ ID NO: 134886 - DNA, 1553 bp, Homo Sapiens
  misc_feature (22)..(22): n is a, c, g, or t
  misc_feature (40)..(40): n is a, c, g, or t
  misc_feature (50)..(50): n is a, c, g, or t
  misc_feature (65)..(135): n is a, c, g, or t
  misc_feature (158)..(158): n is a, c, g, or t
  misc_feature (161)..(397): n is a, c, g, or t
  misc_feature (458)..(506): n is a, c, g, or t
  misc_feature (520)..(520): n is a, c, g, or t
  misc_feature (574)..(574): n is a, c, g, or t
  misc_feature (1055)..(1073): n is a, c, g, or t
  misc_feature (1075)..(1285): n is a, c, g, or t
  misc_feature (1287)..(1292): n is a, c, g, or t
  misc_feature (1294)..(1305): n is a, c, g, or t
  misc_feature (1307)..(1308): n is a, c, g, or t
  misc_feature (1310)..(1310): n is a, c, g, or t
  misc_feature (1312)..(1331): n is a, c, g, or t
  misc_feature (1333)..(1336): n is a, c, g, or t
  misc_feature (1338)..(1342): n is a, c, g, or t
  misc_feature (1345)..(1350): n is a, c, g, or t
  misc_feature (1352)..(1354): n is a, c, g, or t
  misc_feature (1356)..(1361): n is a, c, g, or t
  misc_feature (1363)..(1367): n is a, c, g, or t
  misc_feature (1369)..(1371): n is a, c, g, or t
  misc_feature (1373)..(1376): n is a, c, g, or t
  misc_feature (1379)..(1384): n is a, c, g, or t
  misc_feature (1386)..(1400): n is a, c, g, or t
  misc_feature (1402)..(1404): n is a, c, g, or t
  misc_feature (1407)..(1408): n is a, c, g, or t
  misc_feature (1425)..(1427): n is a, c, g, or t
  misc_feature (1430)..(1430): n is a, c, g, or t
  misc_feature (1432)..(1435): n is a, c, g, or t
  misc_feature (1438)..(1439): n is a, c, g, or t
  misc_feature (1444)..(1445): n is a, c, g, or t
tgctgcctttgctcacatgtcntcctgcgtatccctgatncttgataccngtatacgccttggannnnnnnnnnnnnnnnnnnnnnnnnnnnnnnnnnnnnnnnnnnnnnnnnnnnnnnnnnnnnnnnnnnnnnncatacgcaaaaccgccgtctccnccnnnnnnnnnnnnnnnnnnnnnnnnnnnnnnnnnnnnnnnnnnnnnnnnnnnnnnnnnnnnnnnnnnnnnnnnnnnnnnnnnnnnnnnnnnnnnnnnnnnnnnnnnnnnnnnnnnnnnnnnnnnnnnnnnnnnnnnnnnnnnnnnnnnnnnnnnnnnnnnnnnnnnnnnnnnnnnnnnnnnnnnnnnnnnnnnnnnnnnnnnnnnnnnnnnnnnnnnnnnnnnnnnnnnnnnnnnnnncccaagaattcggcacgaggcttgatgtgtttttcccagtcctaacctccaaggcccagtnnnnnnnnnnnnnnnnnnnnnnnnnnnnnnnnnnnnnnnnnnnnnnnnngtctatgcaggaanatctacgtgcgtttctgcaaaaggtcagttactttacttggggctcttatactnaacgtagctcggagagcgccccatgcattcagatacaggtgggattcctccggaaacggagttttatagcaccagactttatcccctttcctgtagaaatttagggtttttgctgtcttttataacgaacaatgctagcttgactattgcttgtacaaaccgttttttgcccaagtcggactattttcttaggttaaattccttggtgcagaagtgcgagggctgtatttaggcccctaaaggggtggtaccaaatcgccctcccccaccagcataagagggggccggcgacacccttgcccaagctggattttgcagacctggtaggcgtgagatagtatttcactgtagcttgtgtttcctgtaagtatagtcgaacgtcgtgatgttcctgttacatctatgttacgttgatcattgttaccactgacagtcgtttcgagattggaaaatatgtttattataaacgtttgactattcnnnnnnnnnnnnnnnnnnncnnnnnnnnnnnnnnnnnnnnnnnnnnnnnnnnnnnnnnnnnnnnnnnnnnnnnnnnnnnnnnnnnnnnnnnnnnnnnnnnnnnnnnnnnnnnnnnnnnnnnnnnnnnnnnnnnnnnnnnnnnnnnnnnnnnnnnnnnnnnnnnnnnnnnnnnnnnnnnnnnnnnnnnnnnnnnnnnnnnnnnnnnnnnnnnnnnnnnnnnnnnnnnnnnnncnnnnnnannnnnnnnnnnntnntntnnnnnnnnnnnnnnnnnnnngnnnngnnnnnagnnnnnngnnntnnnnnnannnnncnnncnnnnagnnnnnncnnnnnnnnnnnnnnntnnncgnncctccccccgcccttcnnnccncnnnnagnnttgcnnaaaatatgtctgaaagcacccaagcccccaacaccacagaacggtgaacaagccgcagacaaatagtcggtgtctaccctcctacaccaagaagtgtctcccccccca

SEQ ID NO: 134887 - DNA, 1644 bp, Homo Sapiens
ttttttttggaaatgattcattttttattcaaatataactacatttaacaatcaaggtcatgtggcttagaaacctgagcttggttttagactcagacagacagttcattgtcggcagccattaaaacaatgttcttgacccaagaccagatgaagagaagggacaaaagcaatgttttcaagtacacattaaatttcattcaataatagtatgtcttcataaaactaccatgaataaaacaaacgattctaaaaggcagtgggcataaggagggctgcttcacagtctaccccagtcaccacattgaataatcgtattgtgtttatatcataaagtgaagttctagtctcatcccagtgttgagttcacctgatgaaccctgacccttttccctgcccaactcatcctgcaaatagaaatcttacttctaagggaatccatttgtctttcttcccattactgtggttcaaaaactgatactacagctgcagaaggcaacccaatatttaaggattttaatcacagaatcctgtaactaagactttctttaaagaaagacaaccagttcttttttatgtcatttatttagaaaaacccatttgcccctagtgaatgtactaaccttatttaaacaaagataagtgagggaagtacgaagtgatttgaggaatgagcctgggatctgaggcccaccacacattccttaccttcaacttacctttccagtcttctcccaccactgctccacccacctgagattctaggtggagcaatctacaggatactctctgaatgtggttccagcttctcttgcctcacactcttgctcataacatttcctttccttggaaacattgccttcatctcagccccattcagtctttacttgttcacatcatactcttctttcaaaacccagtggaaaagctcaatttctcatgtagccttacctaactccatgcctccagaaagtcatgcaaactcatgccacaacacagccaacagcaacataccatcggcatggcactgagagcaagcaaaaaggacacggggtgacttcactgtctccacttgaagaacttaaggtctgtctgggtgaggggtgtacagtcttaaatattacagcaatcatttattagaaatattcatctgcttctaagttatataaacacttttaatgcaaacattcaatagggcatatttcccactgctctcaagatttcatctctttctgctgccgtaggcataaatggcttcactccgttctttcttctctgcatcacgatagaattccagaatctccggcagtttttgtacctcaagaagtaagtggaacacctttccctgtcatagttattttcatccagacatctggtggaagcatcagattccgacaaacaaggatttatgtcaggatctctcagcctctgtgttaccgagggcattctaacagtcttcttaccagttcgagtttggtgcatgagtttcttcacatttcatttccttttccttccggattctaaatacaaggcactctaagtttggatttccgaaagtcccctcctttgcatgagttcctcgtgtattaactccggcctccgcttcgccagcacccaggccgtctccagctccaaacacgtccc

SEQ ID NO: 134888 - DNA, 780 bp, Homo Sapiens
caaaaccccaggggaaaaagctcaatttctcatggtagccttacctaacctccatgcctccagaaagtcatgcaaactcatgccacaacacagccaacagcaacataccatcggcatggcactgagagcaagcaaaaaagaccacgggggtgacttcactgtctccactgaaagaacttaaggtctgtctgggtgaggggtgtacagtcttaaatattacagcaatcatttattagaaatattcatctgcttctaagttatataaacacttttaatgcaaacattcaatagggcatatttcccactgctctcaagatttcatctctttctgctgccgtaggcataaatggcttcactccgttctttcttctctgcatcacgatagaattccagaatctccggcagtttttgtatctcaagaagtaagtggaacacctttccctgtcatagttattttcatccagacatctggtggaagcatcagattccttacagatataagagaggcatcatttaaaaggtagaacaggatcgacaaacaaggatttatgtcaggatctctcagcctctgtgttaccgagggcattctaacagtcttcttaccagttcgagtttggtgcatgagtttcttcacatttcatttccttttccttccggattctaaatacaaggcactctaagtttggatttccgaaagtcccctcctttgcatgagttcctcgtgtattaactccggcctccgcttcgccagcacccaggccgtctccagctccaaacccc

SEQ ID NO: 134889 - DNA, 1026 bp, Homo Sapiens
  misc_feature (825)..(825): n is a, c, g, or t
  misc_feature (833)..(833): n is a, c, g, or t
  misc_feature (939)..(939): n is a, c, g, or t
aaactttaaaaattattttattatctctgggtgacattttcatttatagtggcatttatatatacacatacatataggaggtgaatgtgagatatattccttagggcttttgataaaacccatatctttatccctagttcatttacaagagagcagcgtaatggtaactttgagattttccttttgacagtaatttccattatcatttgaatgggagaaattcttaggacatgatttggaatcatttctagaatataaatttcatataatcttattttataatgagacaaaactgtgtctttgtaacaatacgtgataatttaagcctatgttttaatggttattgacaaagtttaatggcatccaaaatactcttatgtctatctgaatttttttcctgtactcttcttttttcttaaaagcatgatagacccctctgcaaatacagagcctttgttgttgctttgctgtactttggtaccttgctgtttattccttagtctagcagcatccttagtttgtagtatatcttacttagttgcaactaaaaaaaattgctagcctaggctttaactgggagtttctattatcttagaaggttactgtgaacctttcagaaaagtggaaagcaaccaaaagagctgtctcaaagactgtgtcccccccagagtttgtccagctcttactgtagacactctgaacaggcacggttatctcatgtccaaagctcattacagcacattagaagaaagtggggagcctgttagaagcaggcatattgatagtgtgggagaagacatagcaaattacttagcagatatttanaattttanatccacagcatctgaggcaatgatctgtatactcaggctgagagatcacttatacatattgttaagcctttacatttagagtgctcgtgccgattctggctcaggncaatcccatatgagtctataatcgtatcagtaaactgttctgtggaatgtatcgtcaaatcaaaaataagcggacatatgtagctgt

SEQ ID NO: 134890 - DNA, 1028 bp, Homo Sapiens
  misc_feature (741)..(795): n is a, c, g, or t
  misc_feature (811)..(811): n is a, c, g, or t
  misc_feature (849)..(849): n is a, c, g, or t
  misc_feature (902)..(902): n is a, c, g, or t
  misc_feature (906)..(906): n is a, c, g, or t
  misc_feature (938)..(938): n is a, c, g, or t
  misc_feature (982)..(982): n is a, c, g, or t
tattattaaaattttttttaatgatccatttatttacaattaaaaaaacttttaggttcaggggtatatgtgaaggtttgttatatagggaaactcttgtcacgggtttgttgtacagagtacttcatcaccaataggtactttttctgctcctctccctcttcccatcttccaccctcaagtagaccctagtgtctgttcccttcattgtgttcatgagttctcatcatttagctcccactcacaactgagaacctgtggtatttggttttctgttcctgaattagtttgctaaggataatagcctccagctctatccatgttcctgagacatgatctcattgtttcttatggctgcatactattccatggtgtatgtgtaccatattttctttatccaatctgttactgatgggcacttaggttgattctgtatctttgctattgtgaatagtgctgcagtggacatttgcatgcatgtgtctttatggtagaatgatttatattcctctgggtatgtacccagtaatgggattgctgggtggaatggcagttctgtttttagcactatgaggagttgccacactgctttccacagtggttgaactaatttacactcccatcaatagtgtataaatgttcccttttctccacaaccttactagctgttattttttgactttttagaaagaggattttgactggtgtgagctcgtgccgaatctttggctcgagggccannnnnnnnnnnnnnnnnnnnnnnnnnnnnnnnnnnnnnnnnnnnnnnnnnnnnnncatgttatcgctcacnttccaacaaatacgagcggaagcataagtgtaagctgnggtgctaatgagtgactactcacatactgcgtgcgcaactgccgcttccatcngaanctgtcgtgcactgcattatgatcgcacgccgngagaagcggtgcgtatggcgtctccgctctcgctactaccgctngctggtcgtcggtgcggaacgtacactcatcaaggggatcggtaca

SEQ ID NO: 134891 - DNA, 1683 bp, Homo Sapiens
ttttcaagaataacagttttaacaaaaatgctgtcagtaagcaaatgtaccttggagtgaagtacagaagatttttatgtttcataaattattcccagtggtttcagtttggcatacagcaaagatacagactggattctgagaacctcctcctgccccccaaatttcctggctttggcatagaaagggctacacagctcttccatcaagccctggcattttctactggtagagattgatttttctacagaagagctcagattttatctcactaaaaagacgtgcttgatttttaaattggaaatttacaaaaggagtgaaatgaagtgtgagtagtaaggtagtgggtgtctgtgtacatcctcatgcccaaccccagaagcattgaagcctgaggcttagcctctcccaggcattcctcaggtcctctgaaggaccttccgtcacacaagctgagaacttgctgaatttgaaaagcaatttgccctttggcatcatcatataaagagatttacctccagatgataataggtgaagacaaagacttacaggtggttgattgttgttggtttttaaagccaactgtgatcccatcaatgtatttctaaggaaaatgtaaactgttcatacattctcttaaacatcacagtgaaaagcaagtacccgtatgtgtgatagggcaggcagagggctccacctgctctgcccttggcaaaggcccttggctacactggtgaaaatgccagctcggcttctgcacggatacactatgttgtgccatccaactggagtgccggtggaccccaaaggcagggcagggcagggggagggggtattttgaaatgttttcaggagctctgtccagctgtctctgtcttccagcccggaactgctgcacaaagctacaaggacactgatgagaccatggatctgctgctgttctctagggaagacttggcttggagtgtggctgcctggattcgaaagtgtgtccttgactccatggagtaattcttgtagttttgcttggcagattccaaaagtttgatggcctcttcgtttctgtcttgctccataagcagcagggccagctccagcagggcgtttgggatcaagtagtggtcatatttaatcttcttttcattggcagagatgctcctaaaattctcctcggcctcctggacacggcccaggtatttcagacacaggcctttcaacaatttcaccaagcactcgtcatccactgagtactcgttctctgggcctttctccagcatctcttcagccttagtgataatctcaagtatcccatccgtgagtttcggctgcttcccaatcacggcgtagccgttccagatgtacatcatttccagagcaggcactggcagcgagatagggttggaggagaagtagcgccgggacttccggatggcaaacttctctgtgggtagagatttcccagcaatcttgagcttcaggcctggcacagctcgaaataattccacttcgtcgtccccgaacggcttgtggtcctccttcccaaacatgctgaggtaggcggccttcatgtaaatgtaggtggccttggaccagcagttctccttgctgagcaggtcggcgtagaagtaggacatcttccactggcccttgtaggtgaagcaccacatcagctcccagtagcac

SEQ ID NO: 134892 - DNA, 913 bp, Homo Sapiens
  misc_feature (854)..(854): n is a, c, g, or t
  misc_feature (861)..(861): n is a, c, g, or t
ggtatgggagatctagcaacacattctccaaatttttcctttttgtttctctggtaatggttttttacaccttcatctttggaagataatcttattaaatttgtaattcttggttggccattttgttgactttcactgaatatgtcattccactgtcttctggactccactatttctgataagctaactgttaatactattgctactgccctctacattagttgttgatctcttgttgctttcaagattttttgtctttgtcttttaacaatgtgactatgttgtgtctatatgtggaacttttgtgtttattttatttggattttgttaagcttcttgaatctgcaaattgtctctcatcaaatttgggaggttttcagtgattatttcttcaaatattttttctgcctctattcctctctcctttccttctgggattcccattatacatatttcagtgcacatgatggtggttccacacatttctgaggctctgatagtatttcttcaatcttttttcttctctgttcttcagaatggataatttctattaatcttaatgtttttctattgtctctttcatcatcttaaatctgctaattaacttactcagttaattttaaatttgtgcattgtacttctcaccagaaattccatttgggttttcattattgagattctctacttcttgttttcatattttcctgtaattctttgaatatacttattaaaaggcctctgaagtctttgcctgctaaatcaacatatagcctactgagaagcatttctattgtctgctttttttcctgagtatggtcaattttactgtttctttgcatggctgtagttttccntgaagtnacatttttgatatacagtactaagattatagaatatcatctgagaccaggag

SEQ ID NO: 134893 - DNA, 1073 bp, Homo Sapiens
  misc_feature (847)..(848): n is a, c, g, or t
  misc_feature (878)..(878): n is a, c, g, or t
  misc_feature (917)..(918): n is a, c, g, or t
  misc_feature (939)..(939): n is a, c, g, or t
  misc_feature (942)..(942): n is a, c, g, or t
  misc_feature (954)..(954): n is a, c, g, or t
  misc_feature (979)..(979): n is a, c, g, or t
  misc_feature (995)..(995): n is a, c, g, or t
  misc_feature (1027)..(1027): n is a, c, g, or t
  misc_feature (1030)..(1030): n is a, c, g, or t
  misc_feature (1037)..(1037): n is a, c, g, or t
  misc_feature (1045)..(1045): n is a, c, g, or t
gtagaatgatttgtgctaaagcaatacatctctttctatcatatactgatatcttgaaaacttttataacgtttcttgtcacattcagtattttaaaaataggattgattctaagttttgagtttatggtgtatttgaatattagagatattatctcttatacatttcaaagctttgctgcattctaaactcagtcctgccttagccttagtaatggcaatgaagtgcggggatagaatgttcactatttttttatgtgctgttaaaatttcatacctcctgttctatcttgaagtcttacagttttggaatggtgagtgggggaaacaagcataaaactattacataattcatgcagttttcactgggcaacagtatcctctgaatggtgaaatggctacttttcatttatttatttttttctctcctggggtaaagcgcttgaaaactgcaccactgggaaattgcagctatagtccatgtttcaacatagttcatgcttctttgagttggccacttactgtttactctcatctccttaggtttagcagtaaagacctgtaagatttcttctgttaggatcatctagccattccaaacatttctcttagatttgattctttcaagacaaatcaacccaataaaaatctcataaataaaggtgagctagctaccacatttggtgttctcatctgaccaaaccacattttatgtatacattcaattctcaatccaacccagtctggtttgcctaagccattccagacaaactttcactttggaggttttacatgcataagtcagatagcaatccttcagttgctccagaggacatcacgttctttgnnatgctcagtatagtcctcttcatttagcantcagtgaggcatacactggcatcatgatcccttttttanngactctgtacaaattcctttnganatataatttggnaatgagtgtgagcaaggtttcatancatatcaatctctganaatctgctgatatgtacactattattgggaantangacttgnacaatccntctgcgattctggccaggccattcctaa

SEQ ID NO: 134894 - DNA, 1034 bp, Homo Sapiens
  misc_feature (557)..(569): n is a, c, g, or t
  misc_feature (725)..(725): n is a, c, g, or t
  misc_feature (734)..(734): n is a, c, g, or t
  misc_feature (760)..(760): n is a, c, g, or t
  misc_feature (767)..(767): n is a, c, g, or t
  misc_feature (794)..(794): n is a, c, g, or t
  misc_feature (800)..(800): n is a, c, g, or t
  misc_feature (806)..(806): n is a, c, g, or t
  misc_feature (824)..(824): n is a, c, g, or t
  misc_feature (839)..(839): n is a, c, g, or t
  misc_feature (862)..(862): n is a, c, g, or t
  misc_feature (871)..(871): n is a, c, g, or t
  misc_feature (896)..(896): n is a, c, g, or t
  misc_feature (900)..(900): n is a, c, g, or t
  misc_feature (904)..(904): n is a, c, g, or t
  misc_feature (920)..(920): n is a, c, g, or t
  misc_feature (927)..(927): n is a, c, g, or t
  misc_feature (1000)..(1000): n is a, c, g, or t
gaatggtgtatgtacttgtcaaactgtttatttgccattcacactgattgtaacactggatttacagaagaaactgtggtacaaagagaggaaggctctggtggctcctgaacagcagcagtccagctgccctgctcaggctgggcacgacgaatgctcccaggagaggggaggcggcccacccgactgtgtaccgtggactgtggacagtgcagtgcctgctctcctgtgctatctagaaacaccttggagagagggttctgggatattctctcatgtcatctggctgaagacaccagcttgacagttcccctttaagaagcattccatacgtttgtaccagggagaaagaagcccacgcacgaattttcaggatgttttgtgaccaaacccaataactgccacacaaatagaccctaggtgggggctggcttaaataggaccacatttcccgttgctttttcagtagatgtgttataccgtcatttcaatttgaaagtttatttttttccattgatttttatacatccagaataacacaaataaccaacagttcnnnnnnnnnnnnngcacattcatttcccctagaacaaaaaaagtgaacttacaaaaaattggaaccatgctattagctgtttacacaagtgaataagaagtagctcattttaaagtctacaataaacaaagtagaaagaagcatttttttccctacagtgtttacgcanacctaaganaaagtcctttagaacacacacagaanaattgangaaaagtataggcattacaaattttantatgangcttanatctatttacatacatanatacatttactttgntgatgcactccttctggaggaanaaagagcanatgatcagctcatcatactgactgnctanacanatttccacaaacacanaatccanacaatgttacctacggtacaaaggcattgtcgatgtaatagtttgtaatatgtcacatttcatgttaagacanattcatcccccaataaccacacataatctcaggc

SEQ ID NO: 134895 - DNA, 1105 bp, Homo Sapiens
  misc_feature (432)..(449): n is a, c, g, or t
  misc_feature (494)..(895): n is a, c, g, or t
  misc_feature (897)..(897): n is a, c, g, or t
  misc_feature (906)..(906): n is a, c, g, or t
  misc_feature (948)..(948): n is a, c, g, or t
tatttcattactcttagtacatccacaactatttccacctaaatagatctttaaaataagcatacacaagtattgactattatctacaaatatttattgtaacacttgaatagaactacaggaagcccttggcactgatagaaaatattgattcactgttaggttacaaaaatttatacatagcaaaatttaatgctctttacataaaaaatattagactacttaaacaaaactttcaaaaattcctggtaatagctaccagaattagaaaaggaaaattaggctttagacactgcctcttctagaacactggactctgacagcacctccactgctggaaagaatagttaaatctgtcatgcaacaggaaaacaaaacactaagctattttggaacaactgttctacacagaagagagcttctcttaatttnnnnnnnnnnnnnnnnnngcctacagccgcggccgctccaacatccctcgtgccgaattcttnnnnnnnnnnnnnnnnnnnnnnnnnnnnnnnnnnnnnnnnnnnnnnnnnnnnnnnnnnnnnnnnnnnnnnnnnnnnnnnnnnnnnnnnnnnnnnnnnnnnnnnnnnnnnnnnnnnnnnnnnnnnnnnnnnnnnnnnnnnnnnnnnnnnnnnnnnnnnnnnnnnnnnnnnnnnnnnnnnnnnnnnnnnnnnnnnnnnnnnnnnnnnnnnnnnnnnnnnnnnnnnnnnnnnnnnnnnnnnnnnnnnnnnnnnnnnnnnnnnnnnnnnnnnnnnnnnnnnnnnnnnnnnnnnnnnnnnnnnnnnnnnnnnnnnnnnnnnnnnnnnnnnnnnnnnnnnnnnnnnnnnnnnnnnnnnnnnnnnnnnnnnnnnnnnnnnnnnnnnnnnnnnnnnnnnnnnnnnnnnnncnaggcagcanatgtcaggaaccgtaaaaggcgcgttgctggcgttttcatangctccgcccctgacgagatcacaaaatcacgctaagtcagagtgcgaaccgacagactataaatacaagcgttccctggagctctcgtggtctctgttcgactgcgctacgatactgtcgcttctcgtcggagcggggcttcctactagcgtagacc

SEQ ID NO: 134896 - DNA, 753 bp, Homo Sapiens
  misc_feature (690)..(701): n is a, c, g, or t
ttttacaaaatgtatttgttttatttatctctcacaaaaatcttattaataagttaccaaatcatctctattttacaaatgtagaaactaaggtacagaagaattatgtctcttgcccaatgtcacataattagcctatggtgaaactaaagtgttaaaatcaggcaatctgaatccatttttaattcctgggttacaatgtcttcttcctgcagcccaatcacttaagctctcctaagatagagtctcttaaaatacaacacctaggccagagctgcttaacgcatttgcctagtataatccccgtgggcaccatatcttcaaatctcaagataatgcagtatacttggaactgttttatgagcaacataggataaaactgggagctggaattattcaatttagattgaatttgctgaaacttagttcaaatgcatagacagaagtttatttcataaaacagaatagcaacaaagtaaaaattttgattttgcctatgaagtcaaataccacaaaactcatcatcttgagtttatagtaacataagggacaaaggagtacaagtttcttaactggtagccaaaaatataatttctactaaagagaaacaggacacatcatttatggattactaacttgttgtgatttaactaggaatagaggaaaaagcataactttatttattttccnnnnnnnnnnnnagacagtttcgcttttgtagcccaggctgcagtgcatggcgaactgtctatt

SEQ ID NO: 134897 - DNA, 1406 bp, Homo Sapiens
acccatggcatctgagagcacccacctgtccctgagggcagctgcaccggccaggagccgcaagggcacgggtgagtctcggtcactggcagcactcggccacatgcctgaggagctcttccccttgctcgtcactgaagcactgcaggcagtgagggcactgaaggtcccctggcctctctggaccgcgccaggatgcccgccctctgcagggggttctggctggctgggacccagtcccaggcctccagccaccaggcaccataagctctaatgcgtcggcggccaaatacttggcagttttgctcccagcgtgaatccggccggcgtctggctctcgagaatcctgtctccaggacacctggtgcagcaaagaggcgaccttttcctccagttcttgaatcctactttgagcccgttcccgatcggccctttctgacatgaagtcatccttgtaagcgagaatctgctgttccagcatctgcacccgctccaacgcagcatcccgggccgtcctggaggccgccagctcctgcttcacttcggcacagtcatttattttctcttccaactgtctgttgagccgggagatctccttcctcatcagctcgggctcgtgggggatctgcagccccctgagctgcgcatggagccccctcacgtattcgtccctgctggcgttgtagcgctgccacttggcattgaggtcttcaacgtgagtcaccttctgttttaacagtcgattttcttcctgcaacttctcaataacactctggacagaggtgtgcccatctgtgtgttccgactggtcaggacttctctcccccacattcctttgtgcatgctgtcgttcatccagacacttggccagatgctgacacatgtgggcggtggcggtcagcgtcctccgcagctgatgggtctcgttggccaaggagcggcacaggacgtcactggcggcccgggcgcgctccccttctgccatgctcctccgtagcaggacgacttccttctctcgctcgtgttggggctggctcagcagctgctgcatctccctctctttttcttctagtcgctcagtcagcctctcaatttcctggcgcatctgggcctcggcggcgccgccctcctgccttcgcagctgctcccggaagcgcgcaacctgctccagcagcgcgtccactagggacggcgcggcgtccccctccagcgcggccaggcgggcgcggaggcgagcgatgagggcgtcgcgggcagcgagctggtcctgcaggcggcgcagccgctgtccggcctcgtggtacagggtgcagagcgcggcagctgcgcgcggggcctcctcccagccgcccgaccccgggtcccgggacatggctgtaggcccgcccgggaggccgcgcggccgc

SEQ ID NO: 134898 - DNA, 1273 bp, Homo Sapiens
  misc_feature (149)..(149): n is a, c, g, or t
  misc_feature (154)..(154): n is a, c, g, or t
  misc_feature (156)..(177): n is a, c, g, or t
  misc_feature (179)..(186): n is a, c, g, or t
  misc_feature (188)..(236): n is a, c, g, or t
  misc_feature (238)..(243): n is a, c, g, or t
gtggggggaatccccagcccttttgtttttggcccgggttttctttttggggaaaacagtttaggcccccttttccctttccccctatggggccccggggcccaaaagaaatgtttttgaaaaatttttttagggcccgaggccgcccnacaantnnnnnnnnnnnnnnnnnnnnnntnnnnnnnntnnnnnnnnnnnnnnnnnnnnnnnnnnnnnnnnnnnnnnnnnnnnnnnnntnnnnnnttaaataatcattttaatgtgtaaatcctgaatatatcatgttagaagatgaagtcgatgtatttagcataatctgtcttgggatatttgacgtgtagatgactaaaaatacacttgtggtcgtttcttcactttgtattttagtgacccgtaccgcacctctttgcggcctttggtggttttcacagatttcatgctttgcgatcttcgaagccctttgtgtgttaacatctcattatctgaatatggcccctctgcttcttcatctgttttctcatctccgtctttcaagtggaattccataacctgctgattcactgggggctggtttacttttcttttttgcttctggtagaggttggtatggtctttgtcccacaggctcatcaccttggatagttgttaaatcatgcatactgaagcttcttaaacgttcagttattgctccttggctctttactgctgcagtaacagcagcagtagctgcaaggtttaaaccttgccgtccaaagtttaccatggtttcatagcctcgttcctttgcttgtacaatataatcatcaatctccctttcctttgaagaaagaagtggatgaaggaattttctatatattaaacttgctcctttggtatagggagaaagcagccatatgacaaaagcaatcttcagctcatagtacaggggaaaccaagcaactgtttgatcggctactgtttcaatcacagtatagagagcaaaaacaatccagtacatcatccatcgaacatattccttcacgttttttgttttcacagctttgtatgaataatatgcaggataaagcattccaaacaccagcaccacggctctggagatcatccaggacaccatcttcacgggggcttgggccccacgtccggggcgggtgggcgcagggcgctgcggaccaggccgccaacggcaggccgcgcgcttcgccggctcctcgcgctccccggggccgcgctggcgccctcaggagccgggcccggtgtgtgcgcgcggcggcct

SEQ ID NO: 134899 - DNA, 596 bp, Homo Sapiens
tttatttatttaaaggaattagtttgttctcctggctcattcctctttgttactttctgttccaatacacagaaagcttgatcatctttgatcagcagaaatatcttttatttagcaaagctcaacttcccaagagttatgcatggtgtgcctatctgaaggtggtgttagctctgttgaaatgcctgggtctgagtaactgtcatgatttttatgattaaaaacagactcttcatcaagaataatgactaattctaattggtctttgtgatatgtaagataactcataaatgaattgcaatggattttatttcgaattaactatatatttatcaaagaggaactggcagcaagggtttggagaatatttttaggtaccaaatagcatagtgaggattcaaccaaaagatgaatttataagcagcagtgcccatcacctaagtgttttaactaacaggttttaaaaacattttatttacacaaaatatcagggctggataccttttaaagaggaggctcaagtatcgggctgtcatttccaatagatctgaccttttcttcagatacataagcattattttctctgtttaggtcca

SEQ ID NO: 134900 - DNA, 948 bp, Homo Sapiens
  misc_feature (44)..(44): n is a, c, g, or t
  misc_feature (118)..(118): n is a, c, g, or t
  misc_feature (215)..(225): n is a, c, g, or t
  misc_feature (339)..(339): n is a, c, g, or t
aatgcgatctggggaacaccttcctcttctcccgataaaatctnagccattcaaaccagatctgttattattcccacgtccagagagaggaggagaaatttcagaactcttgtctgtntctttccccacactcacctatggagattcatggctgctgcctggagctcacttcctttccagagactcaagctgactgccaagcttttgtaaaacannnnnnnnnnntcaccccttcctgaaagcattttaccacccatttattattggctttgctcccaacccccctgccctagagcaattgagtttttgaatttttgaccctctctctgtcttcagcanaactgcatgaccagctgcatattcagcctcagtttttccaaggagaatggaaagcacttgcctcctgtcttaagaatgcacaaagagtaggactagcaagcctgggggatgaaatctcccttcctaagtctttgacagagaacttttatttttctgaacagataagattagcaaacttacaaggaatagcttcttatttcccattccttacggttataatcagtcctttaacaacaccagcatgaaggcaaaggtcttttgtcagactgcaacatctattagaaaggcaaggcaactgggaattgctggagaaggataaatcaggaggaattgctggtagaaaaggctgcagacagtcacagggaagtgctgtatattaaatgcatgtgaatagctggcaaaaagatgtcaaggatgtcactgggagccctttggcttcacactcgcctgttagcgccttgctttcgctgaattaccagagcctaccactcggaggaaggtcttggagttagactgatgagaaggcaatggggtgtcaaaaacaagtgtcaaagttctcttagattctgaagtcggtgatgagcacccaattaaagtggtttgtggaag

SEQ ID NO: 134901 - DNA, 1023 bp, Homo Sapiens
  misc_feature (748)..(830): n is a, c, g, or t
ctttagaaaatgaaagcccagagcctttcaaatattccagaaccagtgtgactcatataagcttttcccatgactcccagtatatggcaactgctgatagaagttttactgtggctgtttacatgctggtggtcagaaatggacagagggtctgggagtacttagcaagacttcgctctcatcgcaaaagcattcgaagtctcctgtttggggtttacctggacagcaatgagcctagactgctgagccttgggacagacaggctcttgatagagtatgatcttctcaggagctacaaagaccacctggaagtcctggacatttcaccacaccgaccagggctgctatcccacctgcatggtctggtacccaccactcaccagggaactcttcctgcttatttgcaacagtggctacaaagtgaagctttttaatgctactaccaaaatgtgcagaaagacgcttctggggccagcttatggttcccctattgagcagacacaagtcctcccagtgagaagcatggcggagctacagaaacgctacttggtgtttattaacagagacaagttgggacttcagatcttaccagttgacggcaatccacataagacatctgctattgtttgccacccgaacggggtggccggcatggccgtttcctatgatggctgctacgccttcactgcgggagggcacgatcgctcggtggtgcagtggaaaatcaccttaagagtcacaccaagcnnnnnnnnnnnnnnnnnnnnnnnnnnnnnnnnnnnnnnnnnnnnnnnnnnnnnnnnnnnnnnnnnnnnnnnnnnnnnnnnnnngaaccttccttctgaaatgtttgtcttcttctcagtcgtcgtgggatctggaatggtagaaatttaagaagaagaaaaaaaggcctctgctttccaatagctttcgcctggccagagtccaggcttctgagaatttcaatttaatctgtggtggggacaaaggatcattataaactaattatcccttcaaaaa

SEQ ID NO: 134902 - DNA, 995 bp, Homo Sapiens
  misc_feature (419)..(428): n is a, c, g, or t
  misc_feature (501)..(513): n is a, c, g, or t
  misc_feature (847)..(847): n is a, c, g, or t
  misc_feature (860)..(860): n is a, c, g, or t
  misc_feature (881)..(881): n is a, c, g, or t
  misc_feature (955)..(955): n is a, c, g, or t
aattgtaaatggttctttgtcagtttagtaaaccagtgaaatgttgaaatgttttgacatgtactggtcaaacttcagaccttaaaatattgctgtatagctatgctataggttttttcctttgttttggtatatgtaaccatacctatattattaaaatagatggatatagaagccagcataattgaaaacacatctgcagatctcttttgcaaactattaaatcaaaacattaactactttatgtgtaatgtgtaaatttttaccatattttttatattctgtaataatgtcaactatgatttagattgacttaaatttgggctctttttaatgatcactcacaaatgtatgtttcttttagctggccagtacttttgagtaaagcccctatagtttgacttgcactacaaatgcannnnnnnnnnaataacatttgccctacttgtgctttgtgtttctttcattattatgacataagctacctgggtccacttgtcnnnnnnnnnnnnngtttcacagaaaagatgggttcgagttcagtggtcttcatcttccaagcatcattactaaccaagtcagacgttaacaaatttttatgttaggaaaaggaggaatgttatagatacatagaaaattgaagtaaaatgttttcattttagcaaggatttagggttctaactaaaactcaggatctttattgagttaagaaaagtttctctaccttggttttatcaatatttttgtaaaatcctattgttattacaaagaggacactttcataggaaacatctttttctttagtcaggtttttaaatatcaaggggacattgaagatataatttantcgattttcaaangggaaaaagtcaggcacatantcatttgtgattactgagtataggtttataatgtcttgaggggaaagctctgcgatctggctcgagcaatcctnaggatcgataatcgatcagtcaacttctggggaatgtacc

SEQ ID NO: 134903 - DNA, 726 bp, Homo Sapiens
  misc_feature (610)..(627): n is a, c, g, or t
  misc_feature (641)..(658): n is a, c, g, or t
ttttactaacgttttctatttattcattaataaaaagtgcatagtacaagccctttatcccaatccaagtactcagaaaaagattaacaacagaccctggatggcacagacataatttgtttggcgtgatttaaacatataaaatcagtaattaacatttagcatatcacacgaccacttttgcttttaacaaagtaatcttcacacatggtaacaaatacctatgatttttcatttagaaatattataagaagactaaacttactattgcaacaacaaaaatttaacccattaaactagaaactctcttcatttttccttcttcaaattactgttttgtgtcttaaactgagttggtcaaatttgagcacataattcatgtagagtgacagactttcatttagagtgatagacttccaaggttcctttgaaaatttaagatactggtaattccataaacactcccacaccacataccacaaaaacactaaaagtagccatagaatagctgtattcaataattattttggaaaatccacattatgaaatatgacttgctgaccatggaacagtgcttggatagataacatgaaaaaaatgaaaaacatcnnnnnnnnnnnnnnnnnngagacggagtttcnnnnnnnnnnnnnnnnnngcctacagccgcggccgcaagcttattccctttagttgagggttaattttagctttggcacttggccc

SEQ ID NO: 134904 - DNA, 1000 bp, Homo Sapiens
  misc_feature (64)..(64): n is a, c, g, or t
  misc_feature (84)..(84): n is a, c, g, or t
  misc_feature (115)..(115): n is a, c, g, or t
  misc_feature (139)..(139): n is a, c, g, or t
  misc_feature (157)..(157): n is a, c, g, or t
  misc_feature (190)..(190): n is a, c, g, or t
  misc_feature (215)..(447): n is a, c, g, or t
  misc_feature (650)..(650): n is a, c, g, or t
tactgtttttgtttcttagggcggactatgaaaacccagcacgcgctttacgtctgcctttgtngcctttgtcacatgtcttcntggtatcccctgatcttggataccgtatacncctttgagtagctgtacgcttgcngcagccgacgaccgaggnagcgatcatgagcgaggagcggagagcgccatnacgcaaaccgcctctcccgcgcgtnnnnnnnnnnnnnnnnnnnnnnnnnnnnnnnnnnnnnnnnnnnnnnnnnnnnnnnnnnnnnnnnnnnnnnnnnnnnnnnnnnnnnnnnnnnnnnnnnnnnnnnnnnnnnnnnnnnnnnnnnnnnnnnnnnnnnnnnnnnnnnnnnnnnnnnnnnnnnnnnnnnnnnnnnnnnnnnnnnnnnnnnnnnnnnnnnnnnnnnnnnnnnnnnnnnnnnnnnnnnnnnnnnnnnnnnnaagaattcggcacgaggctttttcataagactgtgcctgagtttaaatacagaattttgcagatattgagagtccaaaaccagtttctttgggagaaatataaaaggaaaaagggatatatgaacaggaaaatgtttggccgtgacaggataataaatgagagacatttatttcatggaacatcccaggatgtggtagatggnatctgcaaacacaactttgaccctcgagtctgtggaaagcatgctacaatgtttggacaaggcagttattttgcaaagaaggcaagctactctcataacttttctaagaagtcctccaaaggagtccacttcatgtttctggccaaagtgctgacgggcagatacacaatgggcagtcatggcatgagaaggcccccgccagtcaatcctggcagtgtcaccagtgacctttatgactcttgtgtggataatttctttgagcctcagatttttgtcatttttaatgatgaccagagttacccttattttgttatccaatatgaagaagtcagtaacactgtttccatttg

SEQ ID NO: 134905 - DNA, 997 bp, Homo Sapiens
  misc_feature (686)..(686): n is a, c, g, or t
  misc_feature (779)..(779): n is a, c, g, or t
  misc_feature (837)..(837): n is a, c, g, or t
  misc_feature (840)..(840): n is a, c, g, or t
  misc_feature (869)..(869): n is a, c, g, or t
  misc_feature (890)..(890): n is a, c, g, or t
  misc_feature (960)..(960): n is a, c, g, or t
tcaagcagattggggttatacaagcaaccttgtatttctcagtcttggcttaccagtgctgctgactttgccgtgagcattttactcctcattctcccatcctggtcccctcagtatcctccctaaaaggtggaacagcactgagctgacctttccccccaaaccccaggcctcacttctgcctccgaagccctctgctgccccagtaagggacagtagggctgcacgctgcctctcagctgcctgcacaggtgtggccagagagcaggactggagggttccttctggtaccttcttgaagggctcccaatgccaagctcctttccttcccaccttcacatcactgaggatgagaagaggtgtggaatgagtggggatcagctggggcagcggggccccgagtggctgtgtcctgggtgacaccagagcactggaaccatggcactgtccaaggaaacccgaaagaggccctgcagccttgtccctactccaaggtcttctcagagtggcctggggtcctcgtcagagccaggtcagtgagcctgaacttggcttggagactttctgaaaggatggagagtgctggttcctccaagtgaggggaacacaggctggaagcctccctgccctggccctgccccctctagtttttggtttgatatcagcccttctgcacagggagcggngaaggagggaagaagagagggaggggacccaggctcaagattcccgaccagagcccctttaggcagatatttgtgcttacaagacatgatganacacaacaacccctcatgacaacaatgagaagagagaatcacatgtgtcaagagggancanatcggacggaggtatgggtgggaagtggngagtcagcgggtctcaggcangtacatgtcctctctgaggggcactggctgggtgtctcgtgctcggcgatctggctcaggcaatcccaangatcgataatcggacagtcaatgtctggtgatgtacg

SEQ ID NO: 134906 - DNA, 1153 bp, Homo Sapiens
ggacaggcgcctgtgcctcctcctcgtccctcgccgcgtccgcgaagcctggagccggcgggagccccgcgctcgccatgtcgggcgagctcagcaacaggttccaaggagggaaggcgttcggcttgctcaaagcccggcaggagaggaggctggccgagatcaaccgggagtttctgtgtgaccagaagtacagtgatgaagagaaccttccagaaaagctcacagccttcaaagagaagtacatggagtttgacctgaacaatgaaggcgagattgacctgatgtctttaaagaggatgatggagaagcttggtgtccccaagacccacctggagatgaagaagatgatctcagagggaggatactgaggggaccaggatgggagaatgaggagtaaaatgctcacggcaaagtcagcagcactggtaagccaagactgagaaatacaaggttgcttgtctgaccccaatctgcttgaaacctgactctgcttctctcatttgtcttcctaccctactcacataattcactcattgactcactcattcaccagatatttattgacctgctattataagctttgggtcctgccatgttgtcctggcatgtgcagtatacacggtctaactcatctctccccagatctctcagaaccttgagcttgggaattgaactggggtcacctgtgtcctttcttatggactcgcaggattttagaaccctaatgcaccctggagggtgggtgggccagacttctcatttcaccaggtgaggagactgggtgccccacagggcattaagtgccttgcccaaaggtcagggttatctccagagggaggtgccctggactggggcccagatgttcagggaccctgcctacacctcatttccagtgtgggctgccttagttagttatgagaacagggaagggctgggaagagacagcctccaaggtcaacacttggagagggtttcacttgctctgaagaccctggtccaggattcgccctctcccatgccttcaagtcagcatcaggcttagggcaaagaccaggcctctgaagctgcctcttgtaattcatgcaggaagatgtcaaagtcagccccatcttggctgatcagggtgttcagccttaaccccacctgtgtt

SEQ ID NO: 134907 - DNA, 801 bp, Homo Sapiens
  misc_feature (89)..(89): n is a, c, g, or t
atgtttcctttctgtttcaaaataggcacgacccacttcgactgttttacccttgtctcgttcctcctgatttgtatctaaggcccagnacaaataccaggtttctctgtttttttccttagcttctctttcatatttctccagtgttcttttgtcaaccattccagtcaaaaacattatctgtcctccgatggttgacttgccagcgtctacatggccaatgaatactacatttacgtgttctttcttaggtgcacctgagggtacgatcacaaatttggattttcttatttcctctttttcctccatcatttcctggccactttcttctgggggccctgaatctcccgaggaaccacccccaggctcggcttcacttacttctttactgtgctcccatgattcttctagggccatttccacctctccattttctacaacaggttctgaaagttccatggtaacggctgaattggaaccttcaagcgacactaacggttcctctcgggaaggttccacaggtgccccccgtcccatccttttaccttgagggtatcccgcgccggtgcaggtttcatcgttgctgccggagccggccgggagggtgggcggctgagtcgggccccgcaggaaggacggcacgaactccgcggcgtgtacgttaggcacgaagggcttggcgttgacgttgagcttacggctgaaagccgagctgaggggctcgcgctgggcctcggccaccgcagaggagactccatccccgctcggggccgaccccggggattccatgtccacctggtc

SEQ ID NO: 134908 - DNA, 1634 bp, Homo Sapiens
  misc_feature (463)..(500): n is a, c, g, or t
  misc_feature (1287)..(1287): n is a, c, g, or t
  misc_feature (1311)..(1311): n is a, c, g, or t
  misc_feature (1381)..(1382): n is a, c, g, or t
  misc_feature (1390)..(1390): n is a, c, g, or t
  misc_feature (1396)..(1396): n is a, c, g, or t
  misc_feature (1436)..(1436): n is a, c, g, or t
  misc_feature (1512)..(1512): n is a, c, g, or t
tttattttactaaaatagtttattgcaataagattttcactgtattcaaaatcaatacaaagtaagtttttaaaattatgtacaaatgattaaaactatgtaattaggtgagtaaacagcatcaacacaattttagcctctaaaccaatatgtaactttctaaggctttttaataaaaccttaaaaaatatagtgaagaaatagcaaagaacatagttcatcatagttgttggaattcaccatttccataagaataaaaaagtcctccatcaaggtatatttgagacaaataatttattattttgaaaggtagctggagaaaagtctgattcacttctgtttacagcagtctagggaacattataattaaatagcatatttttccaaacttcacacatcctagacctatgtctccaacagatttttcctcagtattaatatggtaaagtacactgaattttgnnnnnnnnnnnnnnnnnnnnnnnnnnnnnnnnnnnnnntgatttttagtcagtttggaacaaatgtccatgtgtaacaaattattaacaattctgatatttgcacgtgtatatatatatgcccacaaaaactggtctgttgatgaatctaaaaaaatatattaagatgccacataaattgatttcattatgaaatgaagacttttattaagaatatattttatcaggcattttgataacaaactgttactctaagtataggtgatttacccagtgtattttaaaaagtaaatgaatcccactgtagtttttcttgaaggaaaaatcatttctccagttgctgaggggtactaaaagcttcatacacattagcagcaaagtctttcacttgctccattgtcaacagatcctgaacaaaatgactaggtgtttcactgcaaactgaatggatctgtccgtttactattggaattatcttagctaaaggcaggctgacactggaaagactattcatagagttaccatgttgcaggtcctgttcagtaggtcgaaagaactcagccatattgtctagaagtctactaaaacctcggtttaaacaggtattcaaaactgtactaaaatctgggctttccaacatgtctctagtttcattgagaagtttaatagtggtaatgtctcgaggagaaagtccacaggcctgcactgctaatggagtttcttcatctggcatcatataatggcataataaaggtttggatccatctttattaatcccagaagaagacttatgctgctcaacgagatttctgatttcttttagttnttgctccaagtccaaaagggacanagaatgtttaagagaaaacttcctaaaacttctgcacagcttgtttaatgacagtgatcaattctgtcanngcatctcnaagtangtgctgaatactttgataatactgctgttggacatctggnggagcaagattgtagtgcaatttttgcactgctgcatatcaagtaatatatcacaattatgtttactggaccgcanagacaacagatacagtatgttaagaacatatctgtgaactatactcaatctccaattctactgttgagctgttttacaagtgtgagtccgatcatgtgataggccctaatgtgacagcaacg

SEQ ID NO: 134909 - DNA, 1053 bp, Homo Sapiens
  misc_feature (21)..(21): n is a, c, g, or t
  misc_feature (26)..(26): n is a, c, g, or t
  misc_feature (63)..(406): n is a, c, g, or t
  misc_feature (442)..(457): n is a, c, g, or t
ttgccttttgctaacctgttnttccntgcgtatccccctgatctgtggatacccgtataccgnnnnnnnnnnnnnnnnnnnnnnnnnnnnnnnnnnnnnnnnnnnnnnnnnnnnnnnnnnnnnnnnnnnnnnnnnnnnnnnnnnnnnnnnnnnnnnnnnnnnnnnnnnnnnnnnnnnnnnnnnnnnnnnnnnnnnnnnnnnnnnnnnnnnnnnnnnnnnnnnnnnnnnnnnnnnnnnnnnnnnnnnnnnnnnnnnnnnnnnnnnnnnnnnnnnnnnnnnnnnnnnnnnnnnnnnnnnnnnnnnnnnnnnnnnnnnnnnnnnnnnnnnnnnnnnnnnnnnnnnnnnnnnnnnnnnnnnnnnnnnnnnnnnnnnnnnnnnnnnnnnnnnnnnnnnnnnnnnnnnnnnnaagaattcggcacgagggcggccgcggctgtaggcnnnnnnnnnnnnnnnntgccacattctgcccttccctgaccccattgtaataaccaactccatatccaaagggaggtggtgctctcagccattgtagaagatggtggctttaacctgactgtctaaaaattcccagctaagccttttcctctactctcttccttgttctgaatcatttcttcttctcaggccaaagtagccatggtaaggaggcttcatggggcagaccctgaaagatcaaaactgcatttgcaaagccctcccctgtcccaggacaaagctgagactgacgggtgatgttgctcataggctccagctctgcataagaccttggcttggagacctccctctcagtcaacagctgaactctgagcttgtgcccagaaattaccccaagaccacaggaacccttcaagaagctcccatcacaagcttggcattgctctctgccacacgtgggcttcctcaggcttgtctgccacaagctacttctctgagctcagaaagtgcccctttgatgagggaaaatgtcccactgcactgcgaatttctcagttccattttacctcccagtcctccttctaaaccagttaataaattcattccacaagt

SEQ ID NO: 134910 - DNA, 1049 bp, Homo Sapiens
  misc_feature (477)..(477): n is a, c, g, or t
  misc_feature (580)..(580): n is a, c, g, or t
  misc_feature (589)..(718): n is a, c, g, or t
  misc_feature (726)..(881): n is a, c, g, or t
  misc_feature (952)..(953): n is a, c, g, or t
ctcaaagcaattcatttttattttttaaaaaacaccccaaaataaaaaaccactgactcatccatgccaaactgcactttccagaggaagcatgtcagcagactcaaacggacaatggacagaatcccatgacaccaaagtcattcaaacctgatgcttcagaggctgacattttgagctgaaatagccacaggtcaccacttggcctgatgtgggactctcctttctttttagtctattcatgtggtggcagaagatgtgagactctagtctccagtcagggaggcttctcctgttatagaaaaatattagagtctaggcttgacttagcgatgggtgagctatattaagaatcataccctgcttcttcaaagtctagacaatgcatttgtagttctggcttctctcaggggttgtggatctcagggaccagagagagcttttagtccttttatggatgggttcactgtgactctnaaatcttttctcattgaaattagccagcataatttgacagacactcagaaaaacaccctaatcatattaggctgaaggccaggtctggaagcctcgtgccganatcttgggnnnnnnnnnnnnnnnnnnnnnnnnnnnnnnnnnnnnnnnnnnnnnnnnnnnnnnnnnnnnnnnnnnnnnnnnnnnnnnnnnnnnnnnnnnnnnnnnnnnnnnnnnnnnnnnnnnnnnnnnnnnnnnnnnngggtgctnnnnnnnnnnnnnnnnnnnnnnnnnnnnnnnnnnnnnnnnnnnnnnnnnnnnnnnnnnnnnnnnnnnnnnnnnnnnnnnnnnnnnnnnnnnnnnnnnnnnnnnnnnnnnnnnnnnnnnnnnnnnnnnnnnnnnnnnnnnnnnnnnnnnnnnnnnnnctcggtcgttcggtgggggaggggttcactcactcaaggggtatacggtatcacacatcaggggatacgcnngaagaaagttttgcaaggcagcaaaggcagacgttaaagcgcgtgcttggttttcattagtcggcccctacagaaaaaatcagctaatcagggggg

SEQ ID NO: 134911 - DNA, 1881 bp, Homo Sapiens
  misc_feature (1621)..(1621): n is a, c, g, or t
  misc_feature (1634)..(1634): n is a, c, g, or t
  misc_feature (1674)..(1674): n is a, c, g, or t
agtaaggtggatttctttaaaaaagggtttaagttgggtcaaagattacaggggcgttggggaccccttgtgggaaaggtgttaagccccccaaaattattttgggaggaagggaggaattcccagccaggttttttctacctgaaccaaaaggccccccttggaaaaaaagccttccccaattttgttttttcgttacttaaccaaaaacacccccagccattcatgggaggcatattcccattccagattggttcccatcctgattccatagggtttttttctaaaatttcaaaaagattttaaatccagtaagtagtttccatccatccggatggtggtaaaaagtcttcaaagggtccaaaatcagtgtaagggcatgattctttttactttgcccataaatataattaagtgtgagtgctgggctccagcatttatagtcccattaacctgccaacaagaatcgtttattagcaacttaagatattcagaggcaaaacacatttccttggcacacgagctgcgcagcgacacagcatcttctcctttcctttcaagccgttatacaggaacacaccgaaaatcaactgtgcgcattttggcctgtagacaagaaagtaacaccaaaacttgatgttcctggctatgcagactccttgagtgacgcctgtgggcatattacaggtgggtttctgcaattctctggcctctgttcattcacacgagcaagggcacctttctcagtctcgcagcccctgtgccggagcggatggcgtccatcaaggcttgccttgcgtctgcggtgttgctgagggtgcccgtgctgaacctggaggccgtccttggtgcagagagagcctgggagggtggagggggtggtgggggaatggctggtggggacagaagaccaaggtcttctagcagaggactttccgagccctgtgcagagagtgcggcatctcggaagctctggagctcctcagaagcagaggatgccaccttcctcaggctgcaggtgccgctgtgcccgcggatagctgccagcagtgcagatcgttcgccctctgcctccgtgtaggacagtttcgctggcctgccctccccggtgtgttctgccgtcttgcgtagtctgtccttccctcccgcagagtggatggcttccatcagggcagagtgcagggatgtgtcttttgggactggtctctggacaacaggtttgaattttttcttcggcccaaaaatgctgggtggccaaatactgtctgtttcatttccatctgtagagaacacactgggcttttcctctctttctaggagaatgtggctttctgtgccagaccctcctggagggtgggaaggctcgccgtggcctggggcgcgcacagagccattgaccagctccctgctgcaggcctgagtgtcagatgtgtgtggagggggtgggtctgtaccatcaggtgcgcgtctgggctcagatgctgagctggcctcctggctacttgtgctttgctttccactgaaaccacagctctgtcccacagaaacacgatccctctgggaagactgaaccagtgagaaacaggagcttctgtggatagcagcaggtctgtcctgagtnagacactcctgtngtgggcaatgacctccccctaggaggggctccactgccanatcttcccgtggttgttgggaggagtgaacaggtcactgtgcacatccttcatcttgtgtcctgactgtgggctggtgtctgtcacttcaagtgcaggctcgtgcgattcttggctcgagggcaatcctaaggggtctataattcgatcagtcaactgtttctgttgaatgtttcgccaattcaacacaacagcggagcaaatgtaa

SEQ ID NO: 134912 - DNA, 1005 bp, Homo Sapiens
  misc_feature (833)..(833): n is a, c, g, or t
  misc_feature (852)..(908): n is a, c, g, or t
atcttaattgtaaaaggtttatcaagaaaaaagattcaaggagcagcatccaggaggagaccatgacccccccgggggcaaggggggcagtggtgacacatgtcagcaccccacagcaagctgctggaccacaccctgacctgggtggggaggaggcagaaacccctcggggatgtaaacataggtcagagacagcacaacctgacggggagcaggggcccacattccagcgaggcagacagagggcaggtgggcatggaatccctcgcatggctgggcaagcaggcccctgtctttttcctcttaggtttcccattgtgcaacaggaaggatcttgggaagacagtgccacagagcccaaggaccctgagatcctgggtttggacctgcttcgagtgtggggagttattgctggtgaactcaaatatacagtcacttttgagagtcttctcccaggaaggtgtcaccagggatctggggcccagggcttatacctcagcaccttgagtccgaaggaggggaggatgctgcaatggtcccctgcccgagataagctggagggcccaaaagtggaggggagtcaagaggcctaccggagggagatgggcctgtagccccctccttgcaggggacagggtgatgtaacggacagccagcaacatgggagcaagggagatcccttcctaccacacaggccagaatccccatggaaagcgtaccttacttgcttggaaagttagggagagaagagggagatgtttgcatgcctcccatactttgccatgctgttcctctcccctgaaagtccttctcccccatgtactgtctggcangccctcgtgccgattcttnnnnnnnnnnnnnnnnnnnnnnnnnnnnnnnnnnnnnnnnnnnnnnnnnnnnnnnnnttctgtgtgaaatgttatccgtcaaattcacacacatacgaccggagcataagtgttaggctggggggctatgagtggctactcaattaatgcgttg

SEQ ID NO: 134913 - DNA, 887 bp, Homo Sapiens
  misc_feature (851)..(851): n is a, c, g, or t
gggtggacactttcaaggccttcagtaagaagatggacgacagcgtcctgcagctcagcactgtggcatcagagctggtgcgtaaacatgtggggggcttccgcaaggaattccagaagctgggctgccggtcagtcagtgaaggtcaggccagggtctcagcctcccctagagcctattttgcttgctcacctggccactgctgccttatccattcagcagacaccgaggcctgctgcacccttgggtcggatgctgggcacccagggctgtgacatgcctgctcttcaggagtcctcagtgaaggtcggggtcagacacagacagagtcaatgcagtatgactgatgtttaagtgagggatttctggaagctcatagaagggaccacagcattccactggtcagggaagactccatagagtaggcaacatttgggcagtgttttgaagaatgacaagggcctgccagacagtacatgggggagaaggactttcaggggagaggaacagcatgggcaaagttatggaggcatgcaaacatctccctcttctctcccttactttccaagcaagttaggtacgctttccatggggattctggcctgtgtggtaggaagggatctcccttgctcccatgttgctggctgtccgtacatcaccctgtcccctgcaggagggggctacaggccatctccctcctgtaggcctctgactcccctccacttttgggccctcagcttatctcgggcaggggaccattgcagcatcctcccctcctcggactcaaggtgctgaggtataagccctgggccccagatccctggtgacaccttcctggagaagactctcanaagtgactgtatatttgagttcaccagcaataactc

SEQ ID NO: 134914 - DNA, 1000 bp, Homo Sapiens
taagtcataaaacaaatttattttaaaaatcaatatcttgcatttcagatatacagatgtatcttttaccagcaggtgaaagcaccttttccagaatctgcttccagcagaatcaatactgatttcgaaactggttgcttaggtcttggagctctgtcactaaggtgtccatagctgttatgtcatcagctaattccctggacatttctccagttgccacatctgtaaaaagttgctttgctttagataacaagccccgtaaattgagtcgaacagaagaaagcatttgtacagcttcttgggaactggatttgtttttactgcattttatggccacatgtgcaagtcctaaggctctttgaacaacttccttaaatgatgtaatatctttctcccaacaattggactgggtgtcacacttgtatgcctttgagaggcactggaatgccttttcattttcatcaggcttttcactctgcccatttccatatacgtgggcatacagcctccagatttctccatcatttgtcactcttgaagtcactctgccaaataactcctgcagctttcctttgaggccagttgcaacatctccacttcgatcagtcatcccatcaatcactgccctgactagaattttaaggacctgaacatctttgtatttgtcacgtaagtccaagagccggtgataagctttaatggcttctgaaaattccccaacgtcagtgctggtgaggatgtagttttcccaaatctgccagtgttcatagttacacttgagagcttcttgtaaagttctaaaagcttttactttttgttttaatcggatataggaagttgacaaattgttccaagcttcagcattatcgggttctagagtcacacagcgctgaaatgcctttgctgaaccttgatagtcttccaaggccaaataggcacaaccgagagaaaaccacaccccgagctgcatgggattaatcttaaccgagcgttcgaagca

SEQ ID NO: 134915 - DNA, 592 bp, Homo Sapiens
  misc_feature (465)..(465): n is a, c, g, or t
  misc_feature (478)..(478): n is a, c, g, or t
  misc_feature (490)..(490): n is a, c, g, or t
  misc_feature (502)..(502): n is a, c, g, or t
  misc_feature (510)..(510): n is a, c, g, or t
tttttaagtcataaaacaaatttattttaaaaatcaatatcttgcatttcagatatacagatgtatcttttaccagcaggtgaaagcaccttttccagaatctgcttccagcagaatcaatactgatttcgaaactggttgcttaggtcttggagctctgtcactaaggtgtccatagctgttatgtcatcagctaattccctggacatttctccagttgccacatctgtaaaaagttgctttgctttagataacaagccccgtaaattgagtcgaacagaagaaagcatttgtacagcttcttgggaactggatttgtttttactgcattttatggccactgaacatctttgtatttgtcacgtaagtccaagagccggtgataagctttaatggcttctgaaaattccccaacgtcagtgctggtgaggatgtagtttttcccaatctgccagtgttcatagntacacttgagagncttcttgtaagntctaaaagcttntactcttntggtttaaatcgatataggaaaggtgacaaaatcggtccaagcttcagccatattcggttctagagtcacacagcgctgaaa

SEQ ID NO: 134916 - DNA, 1022 bp, Homo Sapiens
  misc_feature (498)..(506): n is a, c, g, or t
  misc_feature (538)..(911): n is a, c, g, or t
  misc_feature (919)..(919): n is a, c, g, or t
  misc_feature (938)..(938): n is a, c, g, or t
  misc_feature (941)..(941): n is a, c, g, or t
  misc_feature (947)..(947): n is a, c, g, or t
  misc_feature (949)..(950): n is a, c, g, or t
  misc_feature (981)..(981): n is a, c, g, or t
cttggggtttctgctttattatttccttgatatccacagcagaaattcagaggtataacttcaacattaacaggtgaaaagttctacaatgacttgttgcactccatcacattaaaataattgaactataatttccatacaacataagaaaactacagtatttggtgacaactgcaagatacctgataaataaatatatcaacttactattcatgaaaagaatggagctggttatttcagctttaaaagggcaaagcaaaaagaccattttctagccatttaaaagttactcaaaaaattgatacaatggagtggaaaggaaaacaaaaaagatcgtaagcacctttaacaatgttcttgcattctactgatatacaaacctctggggtttcagttggcacaatcaagttcaacttgtactaacagaaaatattaaaattcttcctatttttaatatcaaacagggaggttagtaaattgttttctgattcttctacnnnnnnnnngcctacagccgcggcctcgtgccgaattcttnnnnnnnnnnnnnnnnnnnnnnnnnnnnnnnnnnnnnnnnnnnnnnnnnnnnnnnnnnnnnnnnnnnnnnnnnnnnnnnnnnnnnnnnnnnnnnnnnnnnnnnnnnnnnnnnnnnnnnnnnnnnnnnnnnnnnnnnnnnnnnnnnnnnnnnnnnnnnnnnnnnnnnnnnnnnnnnnnnnnnnnnnnnnnnnnnnnnnnnnnnnnnnnnnnnnnnnnnnnnnnnnnnnnnnnnnnnnnnnnnnnnnnnnnnnnnnnnnnnnnnnnnnnnnnnnnnnnnnnnnnnnnnnnnnnnnnnnnnnnnnnnnnnnnnnnnnnnnnnnnnnnnnnnnnnnnnnnnnnnnnnnnnnnnnnnnnnnnnnnnnnnnnnnnnnnnncgcagaangacatgtgagcaaaagcancanaggcangnnacgtaaaggcggcgtgctgggtttttcatangtcggccccctgacgagacaaaaatcgagctcagtcagagg

SEQ ID NO: 134917 - DNA, 659 bp, Homo Sapiens
tcataaaaatgtgaaaacattttattctatgtacaataatgtacacaaatttaaacaggtcaccaaagagaccagaagtaattaaagaggtatatttacagtagcacatcacagtaaacggaaaaccattcacagattcaacattgatactgtttttgtgcttggttacacactgaaggtgaaggatattactccattttggatgaactgaattttaaacaaatacctcaatcattaataaatgctattttcatcagtcagtatcatcattaaattcttcagctgctgcgcctgtgtgctgaatcactccatttctttctctttgaacatcatcatcacaatctgtactgtcatcttcgttcaattccctgtcagattcagcagcagcttctcttacagcttcctctggagtttcattgggtggaataaatcccttgttgttagatacattttgaattatccttgatatcatcttcgatgtatactttctgatggcacattggacaagtatcttgaatgtacagccatttccgaaggcaaagtgcatggaaataatgattacacggtgtaatacgagcagatgttgtaaactcatgatagcagattgcacatacatcatttatttgttggtagcggctcccttttatttcaggaagtga

SEQ ID NO: 134918 - DNA, 1006 bp, Homo Sapiens
  misc_feature (624)..(624): n is a, c, g, or t
  misc_feature (654)..(654): n is a, c, g, or t
  misc_feature (744)..(744): n is a, c, g, or t
  misc_feature (751)..(751): n is a, c, g, or t
  misc_feature (760)..(760): n is a, c, g, or t
  misc_feature (833)..(833): n is a, c, g, or t
  misc_feature (838)..(838): n is a, c, g, or t
  misc_feature (844)..(844): n is a, c, g, or t
  misc_feature (877)..(877): n is a, c, g, or t
aaaagaaaagaggtttatttggctcatggttctgcaggctgtccaggaggcatggcagcacctgcttctggtgaggcctcaagaagctcctactcatggtggaaggcaaagcagagcccgtgtgtgtcatgtggtgagagaaggagcaagagagaggggaggagggctaccagactcttttaaacaaccagctcccgagtgaactaacagagtgagctctcactcatcacgaagtgggggcaccaagccgttcacaagggagccgcccccatgatccaacacctcccactagtctccacctccaacattgggagtcacatttcaacatgagatttggaggggacacacatccaaattgtatcaaaaggcaagctgactttaagggcacaagaagaaggctttcagagagcagagagctggtgggggcagaggtgacgtttacagggccggcccagcactgctggcagagcaagctgatggatatttggcacaaagtcacaaagcagcatttctgtttggctctattcgcctgcagagcaacacggcagattggaattcccacttgggctctcaccaactcaaacaggcttggccaagacctttaattgatttgcttggggcaanagtggctctgcttacccacgcctggctgtnggaagcaagacctcctcacctcccccgacctgggatcagtaggggtgacctaaatggtcttcgtctccagcctgcatctgatggtttggnggcacantgggataangggactgggcccgatctctcctggtctgccaagcctcccccattctgtggaaggatctggaatcaaggctganggttnggaggngctgatttctttttaaactgctctgatccacancagaacagctgtatggggatcaggatggatggaatgatgccttcatcaaaacccaaatcttatggactgggactgccttaggtcttcaagttaaaccctaacaaggctaaaagagtcgtctggtctctc

SEQ ID NO: 134919 - DNA, 1023 bp, Homo Sapiens
  misc_feature (482)..(530): n is a, c, g, or t
  misc_feature (765)..(765): n is a, c, g, or t
  misc_feature (867)..(867): n is a, c, g, or t
tttttaattgcagtcacgtttatttgcagtttctatacacactttctaggtaatcaaacttttctgatacattttttttgagaggggttcacaatgaaactgtcaccatttttactaaaaataaatacaagacttaaagtgttgcacagctctaaaatatacaaaggcttggattgaatgtaaacgttgaaaacatcttacaaaagaaaccatctttgcagcaatttaaaaagttcatatttacaaatattacaaaaatacaaaatggatgcaagtccataaaccattgtcgtttcggccagcatgaactggttctagtaccaaaatagttacactgtaaccttcttcatagttttaaatctttattaccatctagttctctacgtgccaccactgcagcaaatgcactcactcactgacctttggcaagagcaaacagcatgttctgtttgctacaactagtccatgtcctctacttagcnnnnnnnnnnnnnnnnnnnnnnnnnnnnnnnnnnnnnnnnnnnnnnnnntgaaaaaatttcccctacacaacatagatacgttgtataaacataaaagaacaaaaaatcgcatcagtgcaaacaacagaagaaaagttcggattgatgttcttcacaatacctaacgtgtgtaccctgcttcaagacggcagtgatgttaaagacagccctaaatcttggtcttgtttgctatgttatcaagccatgtagaatattccagattattagggaacttcctgctttnttcttctcagtttgtaactcaatactcttttccacagtgattttaatccatcttattgggtttttaatctatgaatatctcgtccgctcgtgcgaatctggnctcgaggcaatccctaaggagtctataatcgtatctgtcaactgttctgtggaatgtatcgccacatccaacacaacagcggagataatgtaagctggggctatgatgagcaccacatatggtcgccacgcgctcatcggactgctgcatgatata

SEQ ID NO: 134920 - DNA, 1039 bp, Homo Sapiens
  misc_feature (111)..(111): n is a, c, g, or t
  misc_feature (130)..(130): n is a, c, g, or t
  misc_feature (139)..(139): n is a, c, g, or t
  misc_feature (154)..(154): n is a, c, g, or t
  misc_feature (188)..(188): n is a, c, g, or t
  misc_feature (217)..(454): n is a, c, g, or t
  misc_feature (496)..(519): n is a, c, g, or t
  misc_feature (551)..(560): n is a, c, g, or t
ccaccttgagtaggcgattttgtgtgtcaggggcgagctatgaaaacgcagcacccgcctttacgtcctgcttttgtgcctttgatcactgtcttctgcgtatccctgatntgtgataccgtatacgccnttgatgagngatacgctgccgcanccgacgaccggcgcagcgatcatgagcgagagcnggagacgcccatagcaaacgcctctcccnnnnnnnnnnnnnnnnnnnnnnnnnnnnnnnnnnnnnnnnnnnnnnnnnnnnnnnnnnnnnnnnnnnnnnnnnnnnnnnnnnnnnnnnnnnnnnnnnnnnnnnnnnnnnnnnnnnnnnnnnnnnnnnnnnnnnnnnnnnnnnnnnnnnnnnnnnnnnnnnnnnnnnnnnnnnnnnnnnnnnnnnnnnnnnnnnnnnnnnnnnnnnnnnnnnnnnnnnnnnnnnnnnnnnnnnnnnnnnaagaattcggcacgagggttggagcggccgcggctgtaggcnnnnnnnnnnnnnnnnnnnnnnnnggaaccagcccctttcaccctttcatccgtcnnnnnnnnnnaggaaaataacccttcttgcttcagcacttctccctggtccttgctgaaagacagagataaaaatccattctctgagccttgcttggttgtcagaggccatgagaggtgccagttataggtggatgtgccaagatgctggtgaacttggtcttcagctatacccaggctcagaaagggcaagagccatgctgcagcgtaggtgactttggaggtgcacttggggcccagggctttgagtgttgcgggtgtgcctgtccctccagatagtgctctgtttctctctgttgtccccctgcctggtcctctggggccactgtgctttctgctgtgtgcatttataaatgatgtgtattttatatagacctgcttgcattggctgatgctcctctaattccctgagtttgattcaaccacccttgggttgttttgctatggccttagcctttgaaaatattttaaaataaaaaacttgattttt

SEQ ID NO: 134921 - DNA, 805 bp, Homo Sapiens
tttaaaagataaatggacagttttatttttcaatttcaacagaatgaaaaatgtgttacagaaaacagtttgataaaatatgggaacccaataaacagtcacacaaccaatgaatgtgccacccctacaaaattaatttgtatagatgttaatatacctttaagtacttgctattgttcataattgagtagcatctattttaaaacgttgtctgtaattaggtttcatccacatctctagttaagttcaccttgacctcatcggtgatttcgctctttcctccacgaagaccagccaagtaaatctgaggcctgggcaccccagtgctgtcttccctcatggactgggtgctagtgtcctttggagggtacacttgggaacaattttctcttctcaagtgactaagatcagtttgtactgagtgagtaactttctggcgcaaattagccaattttatagcttttcttcttaattcccattcattccactcatatgatctcacaatcgttggtggcagtatgtgtgtattcgtctgtgtgctactttcacattttgtaattggttttatataatgtttgtcagcatctctcatctgagaatatggaataaatgtttcaaactgttgatgaagttccaatagttgaattaactctgtattttttttgggcttttctctaactatgtcaatataatgttcaggattttctgcaaatgaatatgcagcatctttactattgaatgtgtaatatttttctttatattttaaaattccaattgctggatttcctggaaggagaagaccacc

SEQ ID NO: 134922 - DNA, 950 bp, Homo Sapiens
  misc_feature (631)..(631): n is a, c, g, or t
  misc_feature (686)..(686): n is a, c, g, or t
  misc_feature (747)..(747): n is a, c, g, or t
aagatttctatccaaaacatgctttccttggcagcctccccagaggactgtgaagtcatagggcataaattatccaactcttacctctgcaggatggtaaaacagatttaagaagacttgcaaattgcaggtgttcttgggcaagggctctggccaggtcgaaaccagcagatccaccggtagtgcacacacatacacacaggctgtgtgacaatccatcttcaggtgccatcgaacactagagcaaggctatctgtgttcacccaatcactccagctttgtgcttaacttctcacagttaattgttcttttctttaatgactacttttcaaaaagactaggaagtgtggaatttatcagtatttcttattaatgggtaaaagattaaatagttgcatcctaccttttcagtctattctctgccacactccttttattcctaaccacacacccactgtccagctttcttagaaatttctctctatcctttccttactgcatattctgccttggcttgtgctgtttcttctaagatgaaggtctttaccctcacccgtatcttacaaaaggctgttttctcttcagagctactgcatctgtgaaaattcctcggtgcctggttctgacttangcattgctctaccatagcattctttttatggtatttctggatgatcaaggcctangcttacaggatttgtttcatgtgtctcaccactagttgtgctcgtgcgaattctggctcgnaggcaatccctaaggagcgtataatcgtatctgtcaacttttctgtgtgaatgttcgtcacatcaacacaacagcggagataatgtagctggggcttgatgagtatcacatatggtggctacgcgctcatcggacttctgcatgatatatcgcacccggaagggtgggtgggctcctctcgatacctgccgtgttgtggaggg

SEQ ID NO: 134923 - DNA, 1072 bp, Homo Sapiens
  misc_feature (615)..(615): n is a, c, g, or t
  misc_feature (664)..(664): n is a, c, g, or t
  misc_feature (686)..(686): n is a, c, g, or t
  misc_feature (710)..(710): n is a, c, g, or t
  misc_feature (847)..(847): n is a, c, g, or t
  misc_feature (880)..(880): n is a, c, g, or t
  misc_feature (893)..(894): n is a, c, g, or t
  misc_feature (907)..(907): n is a, c, g, or t
  misc_feature (924)..(924): n is a, c, g, or t
  misc_feature (930)..(930): n is a, c, g, or t
  misc_feature (938)..(938): n is a, c, g, or t
  misc_feature (941)..(941): n is a, c, g, or t
  misc_feature (943)..(943): n is a, c, g, or t
  misc_feature (954)..(954): n is a, c, g, or t
  misc_feature (960)..(960): n is a, c, g, or t
  misc_feature (1002)..(1002): n is a, c, g, or t
agcagttcattgtcttttttcacaaccaggtactatcacatatttcaaacatcacagtggctggaagcaacagggcaggaacagacaggtgtcgtcacttaacctggtctttggggaccttgacatcaagaccgacaggtcaaatctttggtctcagggagaagagtgccagctcacccagaaggcagaacagctaacagccatgcccaggagaggcagcagtgggagtcatgaaggaggacggggtcctgtcccagcgtcccagcccagctacccaagtagaaggtggggcggcatcttctatggctgagtcttgggcagtgggtgctctgtcatattgtcaggtttcttcccccagctccacaatgtgaagactgaggtggtccctccaagccccactcagcaaggaggacagggctggtggatcctccagggtcagatggggaaataaaagtgtttcattcttgaaggggaagctgcacttctccacggcacgcctggtggtgccaggggttaccacaaagaggcggcagagccatggcccaccagccacttggcaggctggttgtctggtgaagcttttcagggtttggcacagggcccagtcctcagtcncccccatgtccaccacctccactggtgcccccaggcctgggaggtgtangaggtgccgggggggcatgtangtgtgagtgaagaggagtgtgtantgggtgggtgtgcttgggagcacaggggcatggaccactgctccaggtactccaggccaggcaccaggccccctgatgcaggcagccgaaaggaggcaccgaggcgttgaaaggacacagtgccttcccaggcacangtgcgtctgtggctacaagcaggacaggggganccagagggatcanngacgagctcctgntgggctaggcaatatcnggccanaggatgantanangaaaaggaaangactgnggtgacacaagtcgggcaccatgctcaggaggcatttttganagctggaagcgcttcactgtgcaccacctgcaggctgggatgaaccccaaaaagagcgtgatgcaatgtg

SEQ ID NO: 134924 - DNA, 2032 bp, Homo Sapiens
  misc_feature (1924)..(1958): n is a, c, g, or t
cctggccaatattttattgaaatgtttcaagcagcactaacagcacaatattcactgtaagaatttcatacaccaatataattgctgcatgaatgtcatttattgaaattaacattattatgaatacataatggaaaaatactcctcaaaagaggaaggtgaatgttaaccagcaacaggacaaagccatcctcaaaagacagagataaccgaaacagtttcacagttcagtttatacaggtacaccggggttagagttcctctaggtatgcgtctctgcaggtgccaggttttggaccaggaggctcaggaatgtctccagccgcttcctggatctgtatgcaatgagtcctcccttgttggcccaccgatccaccccagcagcaccctcattttccacgtggtacaccaactgtggcaaatcaagccctgtttctggatttctttctaagcattctttcaagtctactattcccccacccatggcccgcagtatggcatgagcagcacaagagtcccatttgaatgtggtatcttctgaaaagatgtaaatgtcaacgaggccttggacaacacataggctcttataaccagccccagctgccccaaatatgcgatctccacacacacgtgacaatgcagctttgatagtctccttttcacttgtactaattacggctgaaaaactgggggagaatgctgcctcagagccggtgtttccagtgtgtgtttcactgccgtttcttctagagatggtgagctgtagtgaatgcatgttggtcccccatgtaggaaaggcccccaatagccctgtccttttccacctgagggtgtttggaatctcgtgacacaaaaaggttgattgatgactcccatcaggggaacccctgtctgtatgtcatagacaccaattaaaatggtgacacactgaagtccacaggggaagattccctggttggatttaatgtcagcagaaccttttatatactgataagttgaatctatggggtccacccaaattcccaaaatgtcctgtggaacattgatctctgtggaatccagagttgggtcagtaaaggcaacatcctgatgaacaaccctggctaatgcttcagatgccaccttgttaccattgaggactttgctaagaagctctgctgtttcctcctctgttgaacacaacctcaaggtaatcttttccccccagtcattagtaaactcattggattcttctccaaaaatatttttttccaagcctggaaacttgttctccatattctgttttataacttcctgtaccagtacatcagccagcgtcttgaagtcaactgcaaacttcttgttcttttctccctctttcttttcttcgatcagcagctggaagagggcttcctgctgtctgcacgcccgggcaatgttagcagccttctcagagacacagagcagctcccggaggatatctgacatttctgaaccttgcttttcagttgcagctgctggtggaattggcacccaccctctgggccgtcagctaagccggggatgaggacagagcaggaggcagcagcctttccctcgagaaacggaagcggcggggagcaggaggaggaggaggcgcggcccgggcgcgaggttaggcgaggggcgctgggcgtgcggccgcaggcgcggccagaggacgagggttggggaggacggcggaggtcacgcgagcgaaggcgaagccccggcgacgcacggccccgcttggctcggcaccggatccgagcttggcctcagccaggccgccgcccccggctttcccgcgggaccgcggcgtggaaacgcgcgctgccgcctcggggctcccggacgcgcgggccccccacgcttgcccggccgtaatggccgaattcccgggcatatgtccggtaccgtcgactgnnnnnnnnnnnnnnnnnnnnnnnnnnnnnnnnnnncgccgcttcctcgctcactgacttcgctgcgctcgtcgttcggaaatacgccagccccatgtatcaatagtcct

SEQ ID NO: 134925 - DNA, 324 bp, Homo Sapiens
ggaaacagcagccgtggccaagctgaccccagagcccttcccttcctggccctccctctgaatcatcgcgctccacttgtgacgtcgcggacgcccggctcgggcaagcgtggggggcccgcgcgtcccgggagccccgaggcggcagcgcgcgtttccacgccgcggtcccgcgggaaagccgggggcggcggcctggctgaggccaagctcggatccggtgccgagccaagcggggccgtgcgtcgccggggcttcgccttcgctcgcgtgacctccgccgtcctccccaaccctcgtcctctggccgcgcctgcggccgca

SEQ ID NO: 134926 - DNA, 1573 bp, Homo Sapiens
ttttacgaaccagcatacggatcttttattctatactactactgctaacaaagataatttcaacttcagttttaaaaacctagatataacactttcttatgaatgggcccctctttgtttaaaggccaaaatttcacataatcgggacaggaggaaattgatactacaattagtccatatgaaaaggacttcaaatcaagtatcttaaacacattattaaaagtggtttctggttttcgataccatccaaacaacatgaacaatttttaaactgactaacctaaatcgtggcggtcaaaccaaaaaggctctggtagataaaggactccatagtttatttttatggcaaaagtcttattccacacagttttaagtgtgacattagaaatcaaagtttgaggttatagcacaaacgaagtgtggacttttatatttagggaaaaaaaccaacaaaacagttctgctcatttacaaatgagtcaattagacaaacaaagcagcaacttctgaagcaggactgtctatacagcaaggacccttaagaagcaataaaggtacatacaatgaatctgtatacagaaattttattcaattttaaaagaaaatgaggactttagacaaagctttaccctataacaaagcaaatctgtccagctttaaaccaaattctgagagtagccaacttctattttcagcagctggcaagagcaccctcaatgagttctactgacatttctattttcttcatcccatatggtataaaacaaaaccaatctagactccttgataagctttatgtggtcatttgagttttacaaatggtttctctaatggtatgccaaaatcatttatgtgttctctccagatagctttactgtaacatacagcaatgtttatcctggtgagtgagtcttctgtaaacagtcaaccaatgctctatgttatggaaaccaagctatatgcaattgaaacaatccacaggttctaacctggaaatactaggaaaacaatctggatgcattaatcacagcaatatgaagatctaccctataaaaaatgatgtgaatggctaccctaatacaagttttacttttcttgaacctataggcctgtcatttaaagtcatgacagcagctgtggcttcatcccgagactcaaaggccaccatggcttcacctgtggggatacctttttcattgtattttaaacacactgagcctggggttacttgatagccataaaagaaatctaaaatctcatcaatagacacagtaaagggcatgttttgcactttaattactttcggtcctggttttccagaattagttgcaaagcccgggggacccccaatatggatttggccagggccggggccggggccggggccaggcccaaaagcttgtggcccacccaaatgcccaggggcacttccaagaccaggagggccacttccaaaccccgggggaccgcctaagctaccagggccatttccaaaattctgagggccccctccaaatcccgatggcccacttaaattgtttggtccacctccaaaacccggaacatccagtcc

SEQ ID NO: 134927 - DNA, 1081 bp, Homo Sapiens
  misc_feature (584)..(716): n is a, c, g, or t
  misc_feature (719)..(719): n is a, c, g, or t
  misc_feature (736)..(736): n is a, c, g, or t
  misc_feature (794)..(794): n is a, c, g, or t
  misc_feature (798)..(798): n is a, c, g, or t
  misc_feature (803)..(803): n is a, c, g, or t
  misc_feature (828)..(828): n is a, c, g, or t
  misc_feature (841)..(842): n is a, c, g, or t
  misc_feature (849)..(849): n is a, c, g, or t
  misc_feature (875)..(875): n is a, c, g, or t
  misc_feature (882)..(882): n is a, c, g, or t
  misc_feature (908)..(908): n is a, c, g, or t
  misc_feature (928)..(928): n is a, c, g, or t
  misc_feature (930)..(930): n is a, c, g, or t
  misc_feature (943)..(943): n is a, c, g, or t
  misc_feature (967)..(967): n is a, c, g, or t
acttcattaaatgtatttattatgagaacctctaatctgtggatatagaaatctgaaagacagaccctgccctcgaggagatcacattgtcctggcagataaagtacaaacatgcagttagagacaggcaagaaacagttatcacttggcacagaaggggcctaatccagcctgggaggcgatggagaaatcaagagacatttacattttcactttggaacttgtctcgggcagccagtgctctttattttccataaaagtctagaacctcttaactcaaaatgatttgtcctgaaatggcagttttacaacactgagtaggtgtaacacaaactcgctaaataaaataaatgaggaaaaactgtaaaaggcacaaactgaaattattggggattctgttttcctctagttcgagttgaaatagactcaaatagatgtgttattgctcccaaacacaaataacatgcattcctgttcttggatcacaagtggcagaagctttcaagagctctagatagcaacagcaaaactttaatcttcttggacttccctttaaccttctcaaggtatataaaactgttgcnnnnnnnnnnnnnnnnnnnnnnnnnnnnnnnnnnnnnnnnnnnnnnnnnnnnnnnnnnnnnnnnnnnnnnnnnnnnnnnnnnnnnnnnnnnnnnnnnnnnnnnnnnnnnnnnnnnnnnnnnnnnnnnnnnnnncanatcaattgtatcttcanactgaggcctcatctcctaatttttttactctttacttccatattttacacacagatnacanatganagatcctaagtttcccactgtaccnactttttcctacnntggtccntctcagactctatcactggtatttantgagganggtaagcccgagaaacctggaatttngtttagcacactttccccananactgagaggctangggaaatctgagctctttgcccangggacagaagctctactataacaccattaagatttgtgacctggaaggatagttattttctcgtatgtctgacaggagcaccagtgtactatgatttttatgcatcaaagatat

SEQ ID NO: 134928 - DNA, 961 bp, Homo Sapiens
  misc_feature (666)..(666): n is a, c, g, or t
  misc_feature (675)..(676): n is a, c, g, or t
  misc_feature (685)..(687): n is a, c, g, or t
  misc_feature (727)..(727): n is a, c, g, or t
cctctgagtggagctttatttagtttccttttctccagctgacaaagctcttgctccaatctcctccgatccctaggcatttcaaactctacctcctccagttctactcttaactgagctttcatcctttgcctctcttcctcaagaactctcagtcggtacaatgcatggcccatgtagaccagggatggtgaagacacaaatatcacctgcagaacccagtgtctaatgagggagataggaaaggcctggtcgtagcatacatttctgcggccgtggttgttctgtattgcagatgaagccagactgctcatcattccggacatcttcaggtgctacacccagaacaagcgttggaaatatgaacaggatggtgagccagatatttccaatcatggtggagtggatgtgaacttcctccagagtatctccaaggagattccagtcccccatgtttatttagtcagccatcttagctctgatccacatcaaataagaggcagataaattcttccattctgaagggagcactatttcttaaagcaaaccggagacccatcttcaggaacaaagaaccttctatagagagcaaatcccatgtccaacacaattatcaggatgatgatcagcagtctgaaaattcaaaggcaggaatcatttcttganaattcttannaagagatannnatatattatataagctatctatgggcaaatgaaactcaantctactccctcttcatctgctcttcatttgaaataatcttcagtatcaaatatttgcaaacaaagcatgagtgtcacagccgaggttttaaatgtatttgggaagtacatgcactttgggggataaatggccagacattattttatattataatgcacagtttggctagcagaacaatctcattaaagtatataaatcggcactacatgttcataatataaataataaatgcgt

SEQ ID NO: 134929 - DNA, 429 bp, Homo Sapiens
ttttttagaagtgacatattgttatattttcaccataggtttgctttaagaaatagtgctcccttcagaatggaagaatttatctgcctcttatttgatgtggatcagagctaagatggctgactaaataaacatgggggactggaatctccttggagatactctggaggaagttcacatccactccaccatgattggaaagatctggctcaccatcctgttcatatttcgaatgcttgttctgggtgtagcagctgaagatgtctggaatgatgagcagtctggcttcatctcctgcaaagaaacctaattgctacgggggccggaagaggaagaggtgcggctccgacagccagaggggcgggcatacgcagcctccctcggctcagcctgctactggggatgcagagcgtcctggtcgccatgaaa

SEQ ID NO: 134930 - DNA, 504 bp, Homo Sapiens
acgcttgtttaactgtgacggtatttgtgtttgaataagagagatgcaactgaaatacacaattagcattgtcttcacttatttccattttccctccttttctcccaaggtgtcttttgcagctcacattgcaggtggatttgctggaatgtccattggctacacggtgtttagctgctttgataaagcactgctgaaagatccaaggttttggatagcaattgctgcatatttagcttgtgtcttatttgctgtgtttttcaacattttcctatctccagcaaactgacctgcccctattgtaagtcaattaataaaaagagccatctggaggaaataataaaaaaaaggaagactctatgaagaaacagagaagtctcagaaaaggctaacaattttatatagaggacaaaacagcattaaactcatcagttgcaaagattgcctataaaaggaccttaggatttaaggaaggggcttcttaatgtagaaagggaaaaaaaa

SEQ ID NO: 134931 - DNA, 1222 bp, Homo Sapiens
  misc_feature (808)..(808): n is a, c, g, or t
  misc_feature (864)..(864): n is a, c, g, or t
  misc_feature (927)..(927): n is a, c, g, or t
  misc_feature (997)..(997): n is a, c, g, or t
  misc_feature (1018)..(1018): n is a, c, g, or t
  misc_feature (1035)..(1035): n is a, c, g, or t
  misc_feature (1068)..(1068): n is a, c, g, or t
  misc_feature (1081)..(1081): n is a, c, g, or t
  misc_feature (1096)..(1096): n is a, c, g, or t
  misc_feature (1136)..(1136): n is a, c, g, or t
  misc_feature (1153)..(1153): n is a, c, g, or t
gaaagaatgagggaagtgtttattgagactgaaatggaacactcttctcttttatgagttaacagcagtgtgttaagaggctggtttcaaactgactccaaaatgataactggcagctcatgaacagctctgccaactagtgccactaattggggcaacctagtaaggggtagaaccatttagcccaagataaattactgattcaatttcatttatatttagatttatttcctataaacaatagcaatatttgcattttaaaattcacattgaatcattatttactatttatgatgtttacataacaattcagtatcattatgttgtagatttcagatgtaggtcgtcaatactgagcacttatctactcttctgctatctttggcacaatttctcatttcttaaacatgaaagcacaggtttaagttggctacagaatactgcagaaacatgactattttggatttcagtgtaagtacaagtttatgttaagcattatttacaagatgagaactgaagtacagactataataaactatcttcataaattagcagaatgacaagcagaggatgtaatgaatagggccaagattactagttagaacagtcctcctggaggaggagacaagagtcatagaatggaactatttcccccgaaccactgataccagcttatgtcgtgggatttactctgcaacaacccaggttaggggaagctctttttctgcaacgtggcttgttcaacccatggaatctttattaaaatacaacttagttggtagcttgccactgttatttgggccctgantacagaagtgcaaggatggcaaagtactggcctctttgagtatgaatgaacttggnagaaataagcttccagttggatgaaagcacatccagccttttgtgagtgacagctttgtatantatcttatgcagagctgatatggattcctccaggcagctcaaatctgggagtttgtaatgaatggctatngcaccttggagtatcaccatnatacatctctgctttanagctgatatacagatgtgaaacgatcgaacaancatgattctcaantctagtgctccttanaaaaggagttctgatagccccaaagcagacctggggtggnatcgttgggtatatcangtacaaggagactctttattcacatgacgggtcaatctgatctcctcgggcgatttctgcctcgagggc

SEQ ID NO: 134932 - DNA, 1022 bp, Homo Sapiens
  misc_feature (310)..(310): n is a, c, g, or t
  misc_feature (541)..(560): n is a, c, g, or t
  misc_feature (601)..(709): n is a, c, g, or t
  misc_feature (739)..(782): n is a, c, g, or t
  misc_feature (820)..(923): n is a, c, g, or t
cccatccaggggattcatgatggtgcagactactttattaggaagttgtcgatgttttttctggaggcctgatctgtctgcttcacaaaggcctggagccagtccttgaatggatctgagtgtcagcaggcagggcagctcctccctgccactgagatgaaggagtccatctggcagccagctctcacaccagcagtgctgcagaacagctttttatgtcccctcatggatttcccgtttcttagcaaagtgcttgctgcctttcttcatctcgagactgtccttgatccttttacttctatggccactntcaccttgcacaaaaatgacccacggttgaaagaacaatactgatttgcttcatttatagctttgtcactaaattgaagcactgaagtagaagattaagaaaatgaggggctttttatcatctccgggggatagaaagtagttctattacaatctaatatactagtttttatcatctccgggggatagaaagtagttctattacaatctaatatactagttccttttaagnnnnnnnnnnnnnnnnnnnngagatgagcactttggaaggctgagacaggagaatcgtttnnnnnnnnnnnnnnnnnnnnnnnnnnnnnnnnnnnnnnnnnnnnnnnnnnnnnnnnnnnnnnnnnnnnnnnnnnnnnnnnnnnnnnnnnnnnnnnnnnnnnnnnnnnnnagcttgcttgagcccagaagggtgggcttnnnnnnnnnnnnnnnnnnnnnnnnnnnnnnnnnnnnnnnnnnnngaagaaagcaaagagcccatctccaaaagagagggagnnnnnnnnnnnnnnnnnnnnnnnnnnnnnnnnnnnnnnnnnnnnnnnnnnnnnnnnnnnnnnnnnnnnnnnnnnnnnnnnnnnnnnnnnnnnnnnnnnnnnnnnagctccctttctcctgcagaaataagaaaaagtctctctctctcatagggccatcagtaaataaagccaaaagttgtgccactgaagagcgatacaaag

SEQ ID NO: 134933 - DNA, 1074 bp, Homo Sapiens
  misc_feature (43)..(60): n is a, c, g, or t
  misc_feature (474)..(1003): n is a, c, g, or t
  misc_feature (1019)..(1019): n is a, c, g, or t
acctcaactaaagggaataagcttgcggccgcggctgtaggcnnnnnnnnnnnnnnnnnngttaacttttattttaggttcaggggtacatatgaaggtttgttatataggtaaactagtgtcatgggggtttgttgtacagattattttgtcacccaggtacgaagcctattaaccaatagttatttctttctgttcctcttccttctcccagcctccaccctcaagtaggctccagtgtttgttgttcccttgtttgtgtccatgtgttctcatcgtttagctcccacttataagttagaccttgcagtatttggttttctgttcctgcattagtttgctaaggataatggcctccagctccatccatgttcccataaattacatgatcttgttttttatggctgcatagtattccgtggtgtatatgtaccacattttctttattcaatttgccctcgtgccgaattcttnnnnnnnnnnnnnnnnnnnnnnnnnnnnnnnnnnnnnnnnnnnnnnnnnnnnnnnnnnnnnnnnnnnnnnnnnnnnnnnnnnnnnnnnnnnnnnnnnnnnnnnnnnnnnnnnnnnnnnnnnnnnnnnnnnnnnnnnnnnnnnnnnnnnnnnnnnnnnnnnnnnnnnnnnnnnnnnnnnnnnnnnnnnnnnnnnnnnnnnnnnnnnnnnnnnnnnnnnnnnnnnnnnnnnnnnnnnnnnnnnnnnnnnnnnnnnnnnnnnnnnnnnnnnnnnnnnnnnnnnnnnnnnnnnnnnnnnnnnnnnnnnnnnnnnnnnnnnnnnnnnnnnnnnnnnnnnnnnnnnnnnnnnnnnnnnnnnnnnnnnnnnnnnnnnnnnnnnnnnnnnnnnnnnnnnnnnnnnnnnnnnnnnnnnnnnnnnnnnnnnnnnnnnnnnnnnnnnnnnnnnnnnnnnnnnnnnnnnnnnnnnnnnnnnnnnnnnnnnnnnnnnnnnnnnnnnnnnnnnnnnnnnnnnnnnnnnnnnnnnnnnnnnnnnnaagcgttccccttggnagctcctcgtggctctctggtcgacctgcggctacgggatactgtcgctttctcc

SEQ ID NO: 134934 - DNA, 611 bp, Homo Sapiens
gtaataaaaatatttagtgaaaagacacattttaactcccatttatgaattttaaaaatacaaataaaattttatcaacctgatattcagcctataactggctcaatacatagccttatttcctaaaatcatattgcagcatcttctgaaaaactaaatgcaattttataccttcattagttatgttaatagaggtaaatatttaaacagtacactcatccctgggtctttaaataaaactgaaaagtcttagtgtaagtttaaaattttaatatttataaatttaaaaaattttacacgtgctgagtggtagcagtgctaacatttttgtgaccattaaaccacaaactcactgcatagagcttctttctttgtacagataatcaaatcacaataccaacatttgcaatttgtaataattttatgtggtaaaagacaccacaccaggaagcctgggctcagaaaacacttgaggtcagatccctagtaggtacatagtgcagatgcagtatataatttcaggctaggaaaattagctactagtatgtatctgacagttcctaatagctaagaggcctaagaatgcagacggggagaaaaaaaccaaaacc

SEQ ID NO: 134935 - DNA, 1031 bp, Homo Sapiens
  misc_feature (933)..(933): n is a, c, g, or t
  misc_feature (986)..(986): n is a, c, g, or t
  misc_feature (994)..(994): n is a, c, g, or t
  misc_feature (1008)..(1008): n is a, c, g, or t
  misc_feature (1010)..(1010): n is a, c, g, or t
cacccctcccttcaagttttaatagacaacaggaatctgggctctgaaaagtcacaaacacctttcccaagatgatgagcaactgcaacaactggccaaatgtgttagcagcagaaaagctgggcattacctgtgtgagaggcgctcagcatgggcagtgaatggccgtgagcagcgcaccagctacatagcctccacaccggaagggtgctgctgctctgcaggtccgtttcaggcgggatccagccatccacaggaccaaggggctggagtgttgggaacagatgattctgtgttccacagataatggtacaaagtgactgttcatagataaggtgtaagcacagcatttgaagacagctcctccagatggtctgtctgttagtgaattcttaagcacttagagccttgaagattgagaaattctaaagaaattttttaaaaggaggagggtggtagatgtcaaagacacaaaagctctttgtaggtgctgactggctcactttgtccccaggttcatcttagagctcaagcagattcaagacatgaggcagagatgctagacttgcgtcaggggcaaaaacttctggtagtagctcttggtgacgtcaatcatcagctcctgagtgcactccgggagctcccctgagaagagtcctgggcagcctgagaagacagtgaatggtggaacacagtttctggaggtatactgtgttgtcaagaattttgcagcagtctttcacacacatcggcgccaatccacagttcttcccacatgacataggaccatctgtgctgcgttgacacacaatcttcctcataagaatggtctccaatatgtaaggaagatgcacactttgctgactttctgatggtggctatgaactagactttcacacacatgacgtcactcctacattgcagatccctcgngatatacatcatcatcacatggtctgccatgagaacatgttctgctccaacanactgactncgacgacttgtccnanatgcgtccgattatcaactgg

SEQ ID NO: 134936 - DNA, 1084 bp, Homo Sapiens
  misc_feature (101)..(101): n is a, c, g, or t
gcaaggggacccaaatcccgccagtttcgtgtgagaggcggttcagcatggccagtgaatggccgggagcagcgcaccagttacatagcctccacaccggnggggtgctgctgctctgcaggtcgttttcagccgggatccagccatccaacaggaccaaggggcttgaagtgttgggaacagatgattctgggtcccacagataatggtacaaagtgactgttcatagataaggtgtaagcacagcattgaaagacagctcttccagatggtctgtctgttagtgaattcttaagcacttagagccttgaagattgagaaatttctaaagaaaattttttaaaaggaggagggtggtagatgtcaaagacacaaaagctctttgtaggtgctgactggctcactttgtccccaggttcatcttagagctcaagcagattcaagacatgaggcagagatgctagacttgcgtcaggggcaaaaacttctggtagtagctcttggtgacgtcaatcatcagctcctgagtgcactccgggagctcccctgagaagagtcctgggcagcctgagaagacagtgaatggtggaaccacagtttctggaggtaatactgtgttgtcaagaattttgcagcagtctttcaacacacatcggcgcccaatcacacagttcttcccaacatgaacataggaaccaatctgtgctgcgttgaccacacaatcttcctcaataaagacatggtctccaatatgtaaaggaaagaatgcaacacctttgctgaacttcttgaatggtggccttatgacactacgacttttcacaacacaatgacgtccaactcttacatttgccagatcccctcggataatacagtcattcatcacaatggtcttgccattgagaacgatgttctggcttccacacaacactgactggcgactgactttgttcccagatgccgtctcgatgtactcagacttgttgtagagcagctcgcccaactccatggccgccgcctccttccctcagccccggatcctgtcagagtcagtcggtcagttctttcagaattccctcgtgcc

SEQ ID NO: 134937 - DNA, 1052 bp, Homo Sapiens
  misc_feature (42)..(64): n is a, c, g, or t
  misc_feature (630)..(630): n is a, c, g, or t
  misc_feature (760)..(760): n is a, c, g, or t
  misc_feature (893)..(893): n is a, c, g, or t
  misc_feature (1006)..(1007): n is a, c, g, or t
ccctcaactaaagggaataagcttgcggccgcctgctcaggnnnnnnnnnnnnnnnnnnnnnnngattacttaaataaagcctgcttttttatttcatctgattccaagaagtagaaaagaatgcttatttaacagttactgccatcttcgctcacatacagagtacatgggggagtcaagacatttcctgaaaatccctcagaggtgagtgaggtagtgacttggggtagcaagactgtcctcctaagtcagttgaggagtgacatcgggatgaagctccacccacaagccctgcccacagaggtcttctccctgagtgtgtcctcctttagtacaagatgaggtttaacttattgctaatgtgtttcacattttccctccccacccatgtaaagcttgtcccaaaaaagctgttctttgatgaggactttttcctaagtccttgtccattctccccacacatgcagaatttctattcaatatactctggggcttactggggggtgactcatggctgaagccttatctacactccttatatacctaacatgtcttagaatcaattatctggacagacaacgagacagaaaattgaggattcactggggagtgagggcaggactgggcanaggaagaagctgacctgcaatgtgtctgcaaccagtgatccttcagttcgatggggatctctggatctggaatgacttctggagttgtccccgttgagtccagggttggggccagaaggtacccctgcanaggtgcattgcccctgtgggtgcatgcagctccctgtgggctgagagtgagttccagagcggagtcatctcttggatgcatctctgccagcagcacactgttctctcaagcagttggggtggtacccctgaanaggtcatctgggcagagctcacagtgtcccacatgcagatctccctgtggggtgtgatcacaaagctttgccataccctcgtgcgcgattcttggcccgaggccaattcccannaggagtcgataattccgaaccagtcaaacttttccggtggaattg

SEQ ID NO: 134938 - DNA, 489 bp, Homo Sapiens
ttttttaataatgggtggttgttttattgcatccgaatcttcagcttgtcttaattccatgcttttattatgtgactttgctgttacttcattgatgttgagtgcccatttgtgcttactctgccttaagcaggttgtctcttaaatgaggtcctggttcttgctctcctatccaggattctggctggcaccttttgccctcagtctcagttcctcttcataatacctccatctggatgctcacttgtagctgaattttggtttctgatgaatgcttctcttcctcagttctttggtcttgctttggggacatctcagacttgattcagtccattcccttaaagttcctttttgggggaccagctcacccatgacgctgtagctactttctccttactgggaccggtcgactcctcccagtacaaatgtccttcttctctcttctctagtgatgtgaaacttctgaacagactttttggcagagtggcg

SEQ ID NO: 134939 - DNA, 734 bp, Homo Sapiens
  misc_feature (69)..(69): n is a, c, g, or t
  misc_feature (135)..(135): n is a, c, g, or t
  misc_feature (163)..(163): n is a, c, g, or t
  misc_feature (174)..(174): n is a, c, g, or t
  misc_feature (196)..(196): n is a, c, g, or t
  misc_feature (222)..(222): n is a, c, g, or t
  misc_feature (225)..(225): n is a, c, g, or t
tacctttgtccgctgttttgttgatggacgtacaatcacccagacagttgactgtacgattatagatcnttagggattgcctcgagccagattcgcaggagctgtgagagataccatagtatgagggcagccccntcaaacaggatttctttgtgctcagctnatctctactcntgcctcaaatgatcctctgacntgcctcccaaactggtgaattacagnagnagccaccataccagtcaggacgcatatcttaaggatactcctgaggtgaagctgggcttttcctgcagaagcgcctctgggatttgtgccctttaccctccttgttgcctagggaactacattacccagaaaactccgcctggaatgatagcgtggaagagctctgggggctcagaataaaggcgtttcctgtgtgcacgtgacaatgggtccggacttccggcgccctctggtggcggccattttgattggtgttgggtttatttgtaggagaggctcctgagcgctaggtccgcactgtggtgactgaacccagaagtcggggagcagttgtcctccgctgcacagaggctactctggagctctgtgacggcgcccagcgtgacccactcctgggccaggatagggaccgtcgtgcccatgtctcctggctggtcgccctctcctcccgactctgctttaaaccacgtggttcgatggctgcgcggtacgctgaggctctccgctca

SEQ ID NO: 134940 - DNA, 644 bp, Homo Sapiens
ggtagtttcttgggctgagtgggatttgcgtggctgcagtctgggccccgggcagtcactagcctagaggcttggcagatatgcctgccgcaaattgcaagaattacgccttttcacctcctctgctctcctcccggagccggtgcccaccctctttttcacaaaccgcagggctggggagagggacttaacctttggcctacctgcctggctgtttggctctgcgcttgctgtttttggtttctttctcttctactggtctttcctttgtctttgccagccacctatgctgctgttttctcctctgcttccctctcccctaggggagggaccggcaggagtggagctactgtttctttccccagggaggacataagtgccaggttctccagcgtcacatcacggtacaggcatctctgagcctcactaaggagattccattcctcccgggtaaatttcacagccacgtcttcaaaagtcactgtgccctgagcggagagcctcagcgtagccgcggcagccatcgaaccacgtggttttaagcagagtcgggaggatagggcgaccagccaggagatatgggcacgacggtccgtatcctggcccaggagtgggtcacgctgggcgccgtcacagagctcccc

SEQ ID NO: 134941 - DNA, 852 bp, Homo Sapiens
  misc_feature (288)..(414): n is a, c, g, or t
cagtcgacggtaccggacatatgcccgggaattcggccattacggccgggggaccgtggtggtgactggatccaggaggtcgagagtcgttcttctctttgcacagacgtgactctgcagctctttaacggcgcccgctgctctcaacccagcttaccccacgtggtcccatggcggcggccgcgctaaggttccccgttcagggcacagtgacttttgaagacgtggctgtgaaatttacccaggaggaatggaatctccctaatagctgggactacaggcaaccannnnnnnnnnnnnnnnnnnnnnnnnnnnnnnnnnnnnnnnnnnnnnnnnnnnnnnnnnnnnnnnnnnnnnnnnnnnnnnnnnnnnnnnnnnnnnnnnnnnnnnnnnnnnnnnnnnnnnnnnnnnnnntgagccactgctcctggcttgaattttcttataatcccatgaaaccatcatcagagtcacaataatgaatttatctaatctatcacctttgtattcacctggagcctttataaagtttttctctatgcagacaaccattgatttactctgctgtataatactttccattttctagaattttctgactgatgtaataaagtgtttcctcttataatccctgggtgctctcctgcatcatgcttattttgatgtcattgtagacatgggttaatttgttgtatattgctgagaagtatagtctgccatgaaatgtcattatatattcattcatccgtttatggatatttgaagttgcctgcttgtgttttgtgttttgagggggagtctcacctctgtccagccttaggcgaaaaattaaacgcctgtctcaaaaaaatt

SEQ ID NO: 134942 - DNA, 686 bp, Homo Sapiens
  misc_feature (276)..(276): n is a, c, g, or t
gtctgttgaaaatatatttttattataaacaacataaacacttcctaatacactttgcaaatatgcatttcattttctttgcctgagtttttatcaacagtgtctctgagcacaatagttcttcccttgatggccgatcatatattcaataagtgccaagcaccctccccaagtatcaataggcactgtgggaagtgctgggggatttttttaaatgcagagaaaaaaaggcatccttccatatctcaagggatcacaatctagtagactgctttnaaaaaaaatttggatgtctcttttttaatatacatacttccactttataagatatattttatttcatgctatacaagtctttagaaaatagcctatatatccaagacaaactggacaattaaataattagctaggtaaaatagggttaaaatgcaacttttagtcttaaataatcaaataatttatgaaaaagggatgccatggccttagactattttgataacaattttaactttgtaatgtgtgacttctgaagaacctgaaatattttaataaaaagacatcatccttctttatcctttataatatgcaaaggaatatttgtcttatatgagagcagactttgagtcattgccaaagtgaaattaaccagaatcaagggcacatctactattcttacactgctcttt

SEQ ID NO: 134943 - DNA, 992 bp, Homo Sapiens
  misc_feature (689)..(689): n is a, c, g, or t
  misc_feature (701)..(866): n is a, c, g, or t
  misc_feature (875)..(875): n is a, c, g, or t
tttttttaagtaatggtaaagtttatttcatttttaataacaattagaggacaaaatgtttaaaatttgcagtttaaaacatgcacattcacaaaaggccaatgacacataacactgcatagaaataatattactcaattttaataactataaaacacagtgcatcaaacatcaagataaacaaacctgagaaaactactataaccacagattcaatactctccactcatgcagcttcacaatttctacagcagtttcagcaggaatggtttttcagggagctgaaaatactactttatctttaacgcaaaactgcagttttctgtagtagctgccttccaaggctgccctgtttttcttaacctaataaacttgaaaatgtaaaaaatgacgattaaagtagttaaacaacagatagtatttactgcatttatggcttccatttagaaccatgaaacataaaaatattatttttaactattctgctcacatctttgcaagaacagatttacctgtggaaagttgctgttaattcaaagtaagcaaatatgaaatctagttttcctacttaagggagatttatttgctgagaagttttgggagctttattaagaaaagttcttagaggcaagctaaacaaaagattcaattaaatttgttcaaatttctcctcgtgcccgattcttggnctcgagggccannnnnnnnnnnnnnnnnnnnnnnnnnnnnnnnnnnnnnnnnnnnnnnnnnnnnnnnnnnnnnnnnnnnnnnnnnnnnnnnnnnnnnnnnnnnnnnnnnnnnnnnnnnnnnnnnnnnnnnnnnnnnnnnnnnnnnnnnnnnnnnnnnnnnnnnnnnnnnnnnnnnnngctttcagntcggaactgtcgtgcagctgcattatgatcggcaacgccgggagaggcgttgcgtatggcgctctcgctctcctcatgatcgctcgctcgtcgtcggtgcgggagcgtacagtcatc

SEQ ID NO: 134944 - DNA, 1005 bp, Homo Sapiens
  misc_feature (60)..(60): n is a, c, g, or t
  misc_feature (63)..(63): n is a, c, g, or t
  misc_feature (416)..(416): n is a, c, g, or t
  misc_feature (684)..(684): n is a, c, g, or t
  misc_feature (690)..(690): n is a, c, g, or t
  misc_feature (712)..(712): n is a, c, g, or t
  misc_feature (769)..(769): n is a, c, g, or t
  misc_feature (778)..(778): n is a, c, g, or t
  misc_feature (781)..(781): n is a, c, g, or t
  misc_feature (790)..(790): n is a, c, g, or t
  misc_feature (794)..(794): n is a, c, g, or t
  misc_feature (815)..(815): n is a, c, g, or t
  misc_feature (824)..(824): n is a, c, g, or t
  misc_feature (842)..(842): n is a, c, g, or t
  misc_feature (896)..(896): n is a, c, g, or t
gacctgtcacaagctttattgtcccgagcacagactcgccacacttcaacaattccactngtnggggaggggaggggtgaatgaaggacctggggaggggacatggctgagccacacccgggcggccacacggggcgggctgagaggcccacggaggcagaagctcccaaggaaaccgcttcttggacacccgtcaccaggagcccacctccgggggctcagctcctcccggcaccctgctagatggacctctggctgttagtagactaatcggtgcccctaccgatggggcagagctgcctgattttgctagaaagagctgtatttgaccctgggttaggccactaaagcatcgcttctagacggctgttaatagaactgcatgcgagagctaccgaaagccaacagggactggngaggggggccggggggactgactgtgactccccgatgggctgcatttgggcaggaacgtgagcgccacctacctgtaccaggtggcactcatgagggcgatctgggccgttcctatgaattgcacacgtgtcctgtgcgttacgggaaagccgggatggggcatcgggcttctccctctggtccactgatgggggaggcctcacaggaaacactccctgagctgccggagggtggggcagggacccctgtgctgatgccggggtgcanagctgntagcaacctgttggtcccccancggcgaggtggaggctgcagggccaaggctggctttttcccacacgcacaggcctgngatacttancangcttgaggngaanatggcagggcgaggggttggnggagcgcanttagattctcttaccccnagccccgttaggagatgggctggagagctctgtgcaggtgctggcagacaggangggatgctcatgtggaacacaccctgatgctggtgcgtgtactgggtgtgttagcacctctagctgttgacgttgcatactgtagacgtctgccagctggtctcatcaa

SEQ ID NO: 134945 - DNA, 979 bp, Homo Sapiens
  misc_feature (912)..(927): n is a, c, g, or t
cccctctcctcacctcccaccgtgaccttgggcaaaccctggctcggagcccagggcagaggcagctcagagtggaggctctaggcaggtttgacaaaggtcagtaatacggtttcccctggggttgaccagatgttccaaaatatctgcatccacctggagatgcagctaagtgggtccttatgtacacaccacgttcacacacacacagagggaccacgtgtgcacgcatgaccgtgtgggtggcggcgtttgctgtgaaccatgctcaggccacacagagacacatacttggtttctgggactgagacccaggcctggcaggaccgtgcctacagatactgcaaacgttcctacagcctagaggtgcgtatacacacccaagtacacgcagccaggcattcaggggtgtgtttgccacatggagcatcccttcctggtcttgccaggcacctgcacagagcgtctccagccccatctcctaacgggggctgggggtaagagaaatctaactgcgctcccccaacccctcgccctgccatcttcccctcaagcctgctaagttatcccaggcctgtgcgtggtggaaaaagccagccttggccctgcagcctccacctcgccgctgggggaccaacaggttgcttacagctttgcaccccggcatcagcacaggggtccctgccccaccctccggcagctcagggagtgttttcctgtgaggcctcccccatcagtggaccagagggagaagcccgatgccccatccccgggctttccccgtaacgcacaggacacgtgtgcaattcatagggacggccccaatcgccctcatgagtgccccctggtaccggtaaggtggcgctcacgttcctggcccaatgcagcccatcggggaagtcacagtcagtnnnnnnnnnnnnnnnntcccattccctggtggcctttcggtaacctctcgcatggcagttctattaac

SEQ ID NO: 134946 - DNA, 1388 bp, Homo Sapiens
  misc_feature (927)..(1260): n is a, c, g, or t
  misc_feature (1285)..(1285): n is a, c, g, or t
  misc_feature (1312)..(1312): n is a, c, g, or t
  misc_feature (1334)..(1334): n is a, c, g, or t
  misc_feature (1347)..(1347): n is a, c, g, or t
gcaatgcggttgctgtttaatacctgctgactgagtggaaggaagacaaaacaattacctgactcaaagagaagcaaaagaatgctgccttcaagctgaggggaagactgaactgtccgtttctttctgctctaaagtgtcctctggagaggacgctggcggagctggtgctctcgtggtggcaggccaccaccctgtggaggtgtccatgcattgcaagtgctcgcaagctccaggaacaaacgcatccgcgcagccgtctggggtttgtcccgtcgctgccagccctctcgctgagtccccgccctcgccgataagagcccacttaggacccccattacatggatggcttcccaggacctgcccttaaagactcggatttagtaggttggaaatgacgcaattatttttatttttaattagtaccccaagtcattctttaccatcaaggaagtttgggaaacagatcacttttgtttcaatcacctgtggaactggagcagttatttttttccccagcgactttaccacgaagttaactttggaatacgttagtggttaatacacggaacgttcccgagatccctcaagaaagaagctacgaatacttagaagatactattccgcggcgtttacagcaacactgtccgttccagaaggattcaagtggcggcctgctttgaaggcgaagaccacagggcaacccaaacttcagaatggttctggccacgggagccacactggtcactgtcccctagtgctgggatgacggctcgagtgttagaggatcccactctctcctctggtagatgaggtcagagagctgagggggccagaacaagtcttccttatcggattctgggcggaaaaagataaagtcggggaggactttctctttttaataagattcctcgtgccgaattcttnnnnnnnnnnnnnnnnnnnnnnnnnnnnnnnnnnnnnnnnnnnnnnnnnnnnnnnnnnnnnnnnnnnnnnnnnnnnnnnnnnnnnnnnnnnnnnnnnnnnnnnnnnnnnnnnnnnnnnnnnnnnnnnnnnnnnnnnnnnnnnnnnnnnnnnnnnnnnnnnnnnnnnnnnnnnnnnnnnnnnnnnnnnnnnnnnnnnnnnnnnnnnnnnnnnnnnnnnnnnnnnnnnnnnnnnnnnnnnnnnnnnnnnnnnnnnnnnnnnnnnnnnnnnnnnnnnnnnnnnnnnnnnnnnnnnnnnnnnnnnnnnnnnnnnnnnnnnnnnnnnnnnnnnnnnnnnaactcaactcaagcggtatacggtnatcacagatcaggggatacgcaggaangacatgtgagcaaaggcagcanaggcccagacgtnaaaggcggcgtgctggggttttcaaaagctcggccccttaa

SEQ ID NO: 134947 - DNA, 874 bp, Homo Sapiens
  misc_feature (14)..(14): n is a, c, g, or t
  misc_feature (558)..(568): n is a, c, g, or t
taatatttgaaaancttttattttctcaaatgagcaccaacacagattggaaatatgacagaaacaatgcacttttctctaatactgaatcactatgtacaaatacaggaaaaggtgaagacaaattatttgaaaacaattacctttgttatagaagcaaagtgacctgaaaaatgccaccaaagaaaacaaaaacccaaacccaacaaatacagtttgtaaacacaagcataaatagacagattctgtattggaagatagtctctgcaggttgggaaagggaaccgactcccactgtcaccgaaatgttatacaaaaacatatgcgcagatagaatttggtaacatgagaatagctttcatagtttcttctaggctttaccttttctgccagatttcataactattttaatttttaaaaaagtaaatatctctttcctctatctagataactagcatattttctcatttgaggcagattcctttaaaatatgtaagttgattgtgttcaagatttgatttctcagcctctttctaaacctgaggcaatctgaccttnnnnnnnnnnngctgtttaccactaagatatgtgtattataatattaatgttcttttaatccaaaccagttaatgtttaacatgatgtggcttctaaaacagctggagccctgcgatacgtgattaatacactctcatctcagttagaagcacagatttgactctgctccatcttcacaaacaacacatctcctttacagtctgtaaaaactgagcacgcaaagcaagaaaaaggagcaaacccgcaacagctccatactcaaaacaaatcctcgtgggtgctgctgttggtccactcagaaacagaaacaaccaga

SEQ ID NO: 134948 - DNA, 1690 bp, Homo Sapiens
  misc_feature (306)..(363): n is a, c, g, or t
  misc_feature (564)..(588): n is a, c, g, or t
  misc_feature (906)..(968): n is a, c, g, or t
  misc_feature (1024)..(1472): n is a, c, g, or t
gcagcagctccccctcccccactgccataaaacattaagaaaatcatattgcttcttctcctatgtgtaaggtgaaccatgtcagcaaaaagcaaaatcattttatatgtcaaagcaggggagtatgcaaaagttctgacttgactttagtctgcaaaatgaggaatgtatatgttttgtgggaacagatgtttcttttgtatgtaaatgtgcattcttttaaaagacaagacttcagtatgttgtcaaagagagggctttaatttttttaaccaaaggtgaaggaatatatggcagagttgtaannnnnnnnnnnnnnnnnnnnnnnnnnnnnnnnnnnnnnnnnnnnnnnnnnnnnnnnnntaacaatataaaactgcgttaaaggctcgattttgtatctgcaggcagacacggatctgagaatctttattgagaaagagcacttaagagaatattttaagtattgcatctgtataagtaagaaaatattttgtctaaaatgcctcagtgtatttgtatttttttgcaagtgaaggtttacaatttacaaagtgtgtattnnnnnnnnnnnnnnnnnnnnnnnnntctgcagaaggaaaaatgtgtaattttgttctagttttcagtttgtatatacccgtacaacgtgtcctcacggtgccttttttcacggaagttttcaatgatgggcgagcgtgcaccatccctttttgaagtgtaggcagacacagggacttgaagttgttactaactaaactctctttgggaatgtttgtctcatcccattctgcgtcatgcttgtgttataactactccggagacagggtttggctgtgtctaaactgcattaccgcgttgtaaaatatagctgtacaaatataagaataaaatgttgaaaagtcnnnnnnnnnnnnnnnnnnnnnnnnnnnnnnnnnnnnnnnnnnnnnnnnnnnnnnnnnnnnnnngcctaaagccggggcggctccaacccccgtgccaaattcttggcctcaagggccannnnnnnnnnnnnnnnnnnnnnnnnnnnnnnnnnnnnnnnnnnnnnnnnnnnnnnnnnnnnnnnnnnnnnnnnnnnnnnnnnnnnnnnnnnnnnnnnnnnnnnnnnnnnnnnnnnnnnnnnnnnnnnnnnnnnnnnnnnnnnnnnnnnnnnnnnnnnnnnnnnnnnnnnnnnnnnnnnnnnnnnnnnnnnnnnnnnnnnnnnnnnnnnnnnnnnnnnnnnnnnnnnnnnnnnnnnnnnnnnnnnnnnnnnnnnnnnnnnnnnnnnnnnnnnnnnnnnnnnnnnnnnnnnnnnnnnnnnnnnnnnnnnnnnnnnnnnnnnnnnnnnnnnnnnnnnnnnnnnnnnnnnnnnnnnnnnnnnnnnnnnnnnnnnnnnnnnnnnnnnnnnnnnnnnnnnnnnnnnnnnnnnnnnnnnnnnnnnnnnnnnnnnnnnnnnnnnnnnnnnnnnnnnnggccccctgacgaccatcaaaaatcgacgtctattcaggggtgggaaaccgaaaggattaaaaaatacagggtttcccctgggagttcttcgtggctccccggttcgacctgccgttacggaacttgtcggcttcccctcgggagggggcgcttctcaaactaccttaggactattcgggtaggctccgcaactggttggtgacaccccttacccacg

SEQ ID NO: 134949 - DNA, 400 bp, Homo Sapiens
  misc_feature (327)..(351): n is a, c, g, or t
ttttttttggacttttcaacattttattcttatatttgtgcaggtatattttacaacgcggtaatgcagtttaaacacagccaaaccctgtctccggagtagttataacacaagcatgacgcaaaatgggatgagacaaacattcccaaagagagtttagttagtaacaacttcaagtccctgtgtctgcctacacttcaaaaagggatggggcacgctcgcccatcattgaaaacttccgtgaaaaaaggcaccgtgaggacacgttgtacgggtatatacaaactgaaaactagaacaaaattacacatttttccttctgcagannnnnnnnnnnnnnnnnnnnnnnnnaatacacactttgtaaattgtaaaccttcacttgcaaaaaaatacaaat

SEQ ID NO: 134950 - DNA, 932 bp, Homo Sapiens
  misc_feature (86)..(108): n is a, c, g, or t
tgtgttgtgttgttttttatcgaggccagtgccaagctaaattaccctcactaaagggaataagcttgcggccgcggctgtaggcnnnnnnnnnnnnnnnnnnnnnnncccatggcgctctggggcgcgggcgatttgtaggtaatggcaggcgttcggtcactgaggtgtatcagaggatgcgctggcggctgtgagtgcggcgacaagggcaaatgcagcgactcctcgctgttgggcaagagactctccgaagactcgagccgccaccagctgttgcagaagtgggcgagcatgtggagctccatgagcgaagacgcgtcggtggccgacatggagagggcgcagctggaggaggaggcggcggctgcggaggagaggccgctggtgttcctgtgctccggctgccggcggccgctgggcgactcgctgagctgggtggccagccaggaggacaccaactgcatcctgcttcgctgtgtttcctgtaatgtttctgtggataaggaacagaagctatccaaacgtgaaaaggaaaatggttgcgtccttgagactttgtgctgcgcggggtgctcactcaatcttggctacgtgtacagatgcacgcccaagaatcttgattacaagagagacttgttttgcctcagtgttgaagccattgaaagttatgttttagggtcctctgaaaagcaaattgtgtcagaagataaagagctttttaatcttgaaagcagagttgaaatagaaaagtctctaacacagatggaagatgtcttgaaagcattacaaatgaagctgtgggaggccgaatccaaattgtcctttgccacttgtaaaagctgaactctagtctgtgtcctccattctgcccccgcccttcctccccttatttgttaaatgaagcaacatagtgagacgtcgtctctaca

SEQ ID NO: 134951 - DNA, 1001 bp, Homo Sapiens
  misc_feature (59)..(89): n is a, c, g, or t
  misc_feature (759)..(759): n is a, c, g, or t
  misc_feature (796)..(796): n is a, c, g, or t
  misc_feature (819)..(819): n is a, c, g, or t
  misc_feature (831)..(831): n is a, c, g, or t
  misc_feature (840)..(843): n is a, c, g, or t
  misc_feature (919)..(919): n is a, c, g, or t
aaacattttttaaaagaatgaacatctttgcacccagagaaaaaaaactggtattttannnnnnnnnnnnnnnnnnnnnnnnnnnnnnngaatgtaattttaaagtaacattaaccccttttgtcctctggtttagaaatgttttaactcttccataaagtgaggaaaatagggaaaaatgtcaaccatctgcaccagtaaataataactattaatattacatatgttcattaatttaaaaaaaataataaaacctattggaggtgcaaggcaggagcatattgtttggcttcacaggcctcagcctcctcccagtgcacacttgaaccacacacacaaaggggaagaaaggctggtggtaaccagccataacaaaaatatattctttgtattctatcatccctcaggttcatcttgcatgtttgctttaaaccacaaacggctactgcacagttcttatgtgttccaaggaaaattgtcttttaggctacgaaagattcaaaaaaattgttttcagtacaaaaagtcttgttaagagaaaataatttttttgctcccaaaatactacaaggtgtctctagtgtatgtctagtgtactctgtgagaggtttgaattcaagtctgagttatcggtgctgagtcccaggtccgtggcgcttgcaccatggaggtttgccatgcctggattgctagcaagctgagaaagcattgaattctggtccgggctggcaaatgcctttgtccatggggtttggctgngcagctacagtccaggatgtggggaactgtctgtggngaacgtggtgtggagaagctgangtgctccttggngaagatggnnnnttggggggctggactgtggcgtggaaaaggacagtgggaaacgactgatggaagagataggatcgcggctgtagtntgggatggctgatgggacaagtgtgggtcagggtggctgaaaggaccacttgctaggatcctctaagcttaactgatgccgc

SEQ ID NO: 134952 - DNA, 616 bp, Homo Sapiens
  misc_feature (19)..(19): n is a, c, g, or t
  misc_feature (73)..(118): n is a, c, g, or t
acacggcatttttttcagntccttccgggggagaaacagtctattttctctctttctgtacagtatattttcnnnnnnnnnnnnnnnnnnnnnnnnnnnnnnnnnnnnnnnnnnnnnnggggtttcattcagtttgatcaatcttcttccccttcttcctcaccctgcagtagcagggtggcagcggcggtctcctcctgctgctgctgttgctgctggtgaagctgctcacaggcagcccgcttctccctctgcttctcttgaatcttcttcatctcctccgagtacttgcagaaggtgtgtccgaacttggcccacaccttgtagggcacggtgatggagttgcgataggtgggcttcacctcgctcactcgcataaacacgccgtacttgttggagcccacatcgaagaagaagcgcttgttgtccacagtcaaggaggtgccctcgggcagctcggccggctcctcctccactccgtagtcgtcgatgagcttggccagagcgtcacggaactcgatgagcccctgcgcgggcagcgcaatggtctggccctgcgtggagcccaggccaggcccccggttgaccgtctggcggatgcgcaggaagcggccgc

SEQ ID NO: 134953 - DNA, 1303 bp, Homo Sapiens
  misc_feature (1214)..(1243): n is a, c, g, or t
tcatacctggaccttctggaatgtatgctcctgtgtacgacagcaggcgcatctggcgcccacctatgtaccaacgagatgacattattagaagcaattctttacctccaatggatgtgatgcactcatctgtctatcatacatctttgcgggaaagatataactcattagatggatattattcggtggcttgtcagccaccaagtgagccaaggacaactgtgcctttaccaagggaaccttgtggtcatttgaagaccagttgcgaggagcagataagaagaaagccagatcagtgggcacagtaccacactcagaaagcacctcttgtctcttcaactcttcctgtggcaacacagtcaccaacaccaccttctcctctgttcagtgtagactttcgtgcggatttctcagagagtgtgagtggtacaaaatttgaagaagatcatctttcccattattctccctggtcttgtggcaccataggctcctgtataaatgccattgattcagagcccaaagatgtcattgctaattcaaatgctgtgttaatggacctggacagtggtgatgttaagagaagagtacatttatttgaaacccagagaaggacaacagaagaagatccaataattccctttagtgatggacccatcatctcaaaattggggtgcgatttccagatcttcccgtacaggttaccataccacagatcctgtccaggcccctgcttccccaggaagtgcgactaagcccatcagtgtatcaggtggagttcatatggcaacgaggccacatcatcagcacactatgttgaaagggacagattcattgttactgatttatctggtcatagaaagcattccagtactggggaccttttgagccttgaacttcagcaggccaagagcaactcattacttcttcagagagaggccaatgctttggccatgcaacagaagtggaattccctggatgaaggccgtcaccttaccttaaaccttttaagcaaggaaattgaactaagaaatggagaggtaaagaaactgaacctttcggcttcatgcttaatgtatttgttttctgctgctgcatcttggttataccattactgagtgcattttggtgtgcctatctctgatggatgattgattgcttttaaaacttataacagaaataaaattgtaatcccagatttcttaaataattctttnnnnnnnnnnnnnnnnnnnnnnnnnnnnnngcctacagccgcggccgcaagcttattccctttagttgagggttaattttagcttggcac

SEQ ID NO: 134954 - DNA, 1102 bp, Homo Sapiens
  misc_feature (61)..(76): n is a, c, g, or t
  misc_feature (564)..(982): n is a, c, g, or t
  misc_feature (993)..(993): n is a, c, g, or t
  misc_feature (995)..(995): n is a, c, g, or t
  misc_feature (1053)..(1053): n is a, c, g, or t
gtgccaagctaaaattaaccctcaactaaagggaataagcttgcggccgcggctgtaggcnnnnnnnnnnnnnnnnatattattcatcatgttggatccagttgcctctgttgaccaggttcttcagatagtgtgtgtaccatatcagtggcgtgtaactatgctcatcattgttcttgtcaatgcctttgtgtctatcacagtggaggagtcagtggatcggtggggaaaatgctgcttaccctgggccctgggctgtagaaagaagacaccaaaggcaaagtacatgtatctggcgcaggagctcttggttgatccagaatggccaccaaaacctcagacaaccacagaagctaaagctttagttaaggagaatggatcatgtcaaatcatcaccataacatagcagtgaatcagtctcagtggtattgctgatagcagtattcaggaatatgtgattttaggagtttctgatcctgtgtgtcagaatggcactagttcagtttatgtcccttctgatatagtagcttatttgacagctttgctcctcgtgccgaattcttnnnnnnnnnnnnnnnnnnnnnnnnnnnnnnnnnnnnnnnnnnnnnnnnnnnnnnnnnnnnnnnnnnnnnnnnnnnnnnnnnnnnnnnnnnnnnnnnnnnnnnnnnnnnnnnnnnnnnnnnnnnnnnnnnnnnnnnnnnnnnnnnnnnnnnnnnnnnnnnnnnnnnnnnnnnnnnnnnnnnnnnnnnnnnnnnnnnnnnnnnnnnnnnnnnnnnnnnnnnnnnnnnnnnnnnnnnnnnnnnnnnnnnnnnnnnnnnnnnnnnnnnnnnnnnnnnnnnnnnnnnnnnnnnnnnnnnnnnnnnnnnnnnnnnnnnnnnnnnnnnnnnnnnnnnnnnnnnnnnnnnnnnnnnnnnnnnnnnnnnnnnnnnnnnnnnnnnnnnnnnnnnnnnnnnnnnnnnnnnnnnnnnnnnnnnnnnnnnnncgtaaaaggcngngtgctggcgtttttcataggtccgccccctgacgagatcccaaatcgagctaagtcanagtggcgaacggacagactatagaacaagcgttcccctggagtcctctg

SEQ ID NO: 134955 - DNA, 1061 bp, Homo Sapiens
  misc_feature (45)..(63): n is a, c, g, or t
  misc_feature (703)..(703): n is a, c, g, or t
  misc_feature (846)..(846): n is a, c, g, or t
  misc_feature (876)..(876): n is a, c, g, or t
  misc_feature (882)..(882): n is a, c, g, or t
  misc_feature (899)..(899): n is a, c, g, or t
  misc_feature (926)..(926): n is a, c, g, or t
  misc_feature (1026)..(1026): n is a, c, g, or t
ttaacctccactaaagggaataagcttgcggccgcctgctcaggnnnnnnnnnnnnnnnnnnnctgcgctccagacacggggcaggttttattgtcacagcagctgacggcttccccggtgctgggttgccagggagtcccaggcagtcctggtgctgctgagatgggcgctgcctcctcccacccacagcgcgtcatcccctcaccagccggcacctgcaggctcccctcctgaagcggactcgggctcacagggaacacccgcacccagaccgtgccgtctggcaggcactttcggcctcagtgccacggccccctccccaggccactcacactcctggggggccacagaggtgtctgcacagcagggcttcctccttccctgggaggcccatgaagggagacagatttggccgcaggacctgctgctacggggcaccgtggacgaataggtacggctgggtcagtgggcgggcccttgacactgaggctgctcccgcccccacagcagcctggcgatgctcacagcctgctgatggtttcttcacaaagcgacctctccagggaacatccgcaaataaaccccgtgtggttcagggagtgagggcccgggcccgctggggacgggggtcagcgactgcttcaatcccccagatgcagggtgctgttcggctgagggagctagagggtgcctgggactggngggttcatcctggcaaggtcctccaccccacagccagggcagagcactggggagccccagggagacagcctccactggggctgtgtggtggcggacctctggactgggtaccagggtgggcatgggcatgctctggacactgnggttggctgtgctcgcacatggtgacgcancagtgngaagcggtcccaggcangcatgcatatggattggcgcagctggntgcaccccaatctgtcatcccatgactccagccaggtgtgtacaggctgcgtgtccgagaacacacgtcacaacaaagatggcactactgtgcactgganacaatgtggttggcttgggggtcagcgacacatct

SEQ ID NO: 134956 - DNA, 532 bp, Homo Sapiens
cattctgtttattcaggtgggcccttgcatgggcccagcctttaggatgggttttttctgccccaagtaggggtcatgggtaggatggaagctgccagaagcctcttaggcctggccctgggtgggggtcactgctgcgggggtggcagatggggtcctggctgttcctcagggaggggcaggtaattggggtcttctgcaggggcatccaggagcagctttaggaagccaggggtctgcaggagcctcttgcctccaggctggttggggaagacgtcctccaggaagtagtagatatggcccaccgcaatccccagcaggtccacgaggatggagttgcccagcagcagcgagaagcccatgagcgcccaaggcaggaacggtgcctggaaagtgagcaggccgaagaagttgaccctcacccgagggctgcggcggctccacacgtacaccagcatggccatgagggcctggcccaggaagaacaggctgcccaggagtcccagcagggtcataaggacgcccccgaaga

SEQ ID NO: 134957 - DNA, 1285 bp, Homo Sapiens
caatttcttcaacaggtcatgttcaatttcttcaaagttttaacataaaaataatgagagccaggagtggggccggggcctggggggacgaaggtggtatgtgaacaaggttggcacacaggcctcaccctcctctgcctcagattcccaagtgggcaggtgggggtgaatggggctccgggtagcacctcagctcctctcagctcccctcagcctgttctccttccagacccagagagctgagaagagtagctgtgaggctcagggcagaggctctctgcctttcaggaacagccctaaccctgctccccttgcttggcctcaggaaggtgccgcgagctctcctgccgtccctgggccgccctggctctgctgtgtccagatggtcaggctactgccagctggggccttgctgctctgaagtcccctgcggagggcccagtcctgtgtgggcacttctgggctgtcgccagccctggttgcaggagggctgttctagctccagtggcacccatagccaggtcacgctggggccctttcccaccccagcaggtgctgtggcctgggccagctcctgccttacaagccagctgtgaggaatatgggaatagccctcccggcctggtgccagctcttggagttgacacggtacagggaggagacacagcccagggtcccttcccagccctgccctccaaggagttcatgtcccctctgttctcatctgtaatagggaggtgtccccattcttcagaatggacacaggatctgggagggcagcaaactggctcgcagctccagccttactgaagagaatgggcacagatccgggcacagattccagcacagactgctgccaccctcagctgttggcaggtcccatgctgccagggcagggctagggtcagaggctgctgtgcttcctggaagtggggtagggccccatgtggggcagaggcagagctctgattagggattggggttcttggtcgctgagatgtgagaggagggctcctttgagcacatgttagcatgggactcttcccagggagtttgcactcagggcctctgccctccatcaaagagtggaactccccagagccccatgcacagcaaggggacagctgggccttactggaaggccttgaacaaaggggaagattcccagcccagctgctcttagacatgaacaggtttcattgctgaggtgtttgttctgtccatgaggtaggaacctcggcaatgaaagggtgagcagcctatactccacaactggggggatgga

SEQ ID NO: 134958 - DNA, 983 bp, Homo Sapiens
  misc_feature (647)..(647): n is a, c, g, or t
  misc_feature (670)..(670): n is a, c, g, or t
  misc_feature (750)..(750): n is a, c, g, or t
  misc_feature (814)..(814): n is a, c, g, or t
  misc_feature (820)..(820): n is a, c, g, or t
  misc_feature (823)..(823): n is a, c, g, or t
  misc_feature (835)..(835): n is a, c, g, or t
  misc_feature (903)..(903): n is a, c, g, or t
  misc_feature (906)..(907): n is a, c, g, or t
  misc_feature (919)..(919): n is a, c, g, or t
  misc_feature (970)..(970): n is a, c, g, or t
ttaaatatttaaatgtttattaggtattatacttatgaaaagtgcaaaaacaaagaactacagcttactgatttatcacaaagcaaacaccacataggccaagaaatattacattggaagcaccttacatactccactcatggccctttcccatcaccagcctctccctccctttgaaaagtagccattagtcttaatataatgcagtcatttctttactctcctttataattttaccacctaagcattcatatatatgcatgtgtataatacagtttttatctacagaagtgtaaataaaactattgctttgctttgcctatatttgaactttataaaattaaaatcacatagtgtatggtattcttctgtgctgtttttcacgtatattcatgaaatcaatccacattgtggcatactgctgtaatttgcttatttcattgatatataatattgtacaaaatgttacaatttatcaatttctatttataatggacatttgggctgtttcagtttggggctattaagaaaaatggtgctatgaacagctttatacatattgcttagagcacctgtgctcacatcagttttaggtatacaactgggagtaaaaattctaggttgcagggcatgtatcaatttcagtnaaatacgccaagctatcatccanaatgattataccaatttacacacccaccagcaggtcacaaagtttctgtttgctccatatgctcaccattccttagtatnagttaatttaccttgcaggtttctgtgaacagactcagctccatacatcaggaatagcaattanatcacncangactcatgatanggtgatatatccatatgtttatggcatgtgatatcatttttatagtgccatcagtctctgccattccnacnnggtgttgtcttnccctcgtgcgatctggctcgaggcaatcctaaggagtcgataatcgatcangcaactgttctgg

SEQ ID NO: 134959 - DNA, 2107 bp, Homo Sapiens
tttccaatataatattttcatctccttttattgacagaaatagaaatttgtgctgcagaggcagtagtacctcagagcatgagaaggtagtcaatggggctgacatgacaagccacaatgctggccaggggtcctaccatagtgggagaaccaaaaccacaaaaatagcaggaggtagcaaacatccccaacacccagtgtaagcatttccatttgcagagagcttggccatgcatcttaaaaacggggtcccctcacagctggcagggtatcatgtcaggccaccaaatccatccagaactaacatgcagtctctaatttggagactctttattgtgaccaaaagatttggaccattagaagatccaagttaatctttcagctccttatcctaggcagaaaaaggggctgagttcctgaaacatcacacaagtagagctggacaggtgctgatgcccagccttgctctaaaagtagtcaccattttccccgacttctcaacactgctctcactcagtatgtgccctagaaaacctctcaatgttataaacaagggacaggataggggcagcagcctagggtatgcagggaatcaaaagctgctacatagccgagagcatttcacaagaaacagcatgggaacactgttgggtcacggtcctcccgaacagctgctagaagcacacacaaagaaaaatgtggttgttctcccatgtcaggatcagctgagccaaagtcatggtccaggaagctgagcctcttcatgtccctggcagattatcaaaccccatggcattcccaagctgttccagttttcaagtacaatgaggtgtctgggcagttgagtcacagaaaagcaagcactaaagaaatctcaattgattacaaattgataatattatcaaaccataaatttatatagtcaagaattaattgtgggagatggttatgaaggaggtgaggattttgacacacggaagactagaaacatttatttatataaacccttaatcataaaccaccctcatatccatgaattgggaggaaattccttatttagaaatggccatcatctgattagtcattcagttgcagttctcttcaatgctggacacacggtttccaaggatcaaagtcttgaggagtgctagatcaggaaatgggagaagcaaggcaaggagaagagggcatcaggagttggaatttctgaaatgtgcatttatctcacagaaggcttggcacaatgaggctggggtgagtgtggttttagtgattgttctttgttgcctccttagctgcagcaatcagtggagtgaggctggagaggggcttggcaatcttcaggaattgatgctgtagcagctctttagctgaacctctcttctccacatccatctcgagacagcggttcagaaagtcccggaagatagctgacagcttctctgggttctgaagttctggggtcccattggtggcaatgaggtacaaggctctcagagggttttcattgaggtatggaggctccccttcaatcatttcgatggccatgatgcccagggaccagatgtcaaccttgggcccataggcctttcgtgtcacaacctctggtgccatccagtatggggttcctaccatggtgctccgtttgctctgctctggggttatctgtgcacagaatccaaagtcagttagcttgacagagccatccattcccaacagaatattgtcactcttgatgtctctgtgaatgacctggttcgaatgcaagaactccagagcctgcagacactcacggcacacagctgcaatttggccttcatccatgcaagtttctgtcaccatatctgtcaaggagcctccagccaagtattccataacaacccacagctcatctcccacgaggtaactgtccaagtaattcacaatgtttgggttcttgttttccctcatgaccaggatctcattaataatcagctctttcttgggctgctgctgaagattcatctgcttaatggccacctcctgtcctgtggccaggcacgaggcctcgtgccgaattcgccacccaggcctcgctaccttagaaccgttatagtactggccgtcc

SEQ ID NO: 134960 - DNA, 984 bp, Homo Sapiens
  misc_feature (502)..(518): n is a, c, g, or t
  misc_feature (741)..(741): n is a, c, g, or t
  misc_feature (746)..(746): n is a, c, g, or t
  misc_feature (757)..(757): n is a, c, g, or t
  misc_feature (848)..(848): n is a, c, g, or t
  misc_feature (868)..(868): n is a, c, g, or t
tttacatgtgaaagtctagttttttattagttttacacaaccagctattcatgaactgtagttaaaacattgtaaatctgtatatttactgctactcaattacaaaatcttcagatggcattgaaaaaacatatccaaagtaactcaagaaaaaagtaccatggcttcttaaacaaaaaatcaaatgaagtatgtcacttgataggaagtttaaaacacacatttaccatactttaaagtaggttttcccctacttgtagcacagttcaagtgcctggaaactaacataataatttactgttaaccatttcaaacttaacattttgcatttatcactttaaaacacatgctgtctaaacattttaatacatgatactttaaagcagaatacttgccagtcagtaccaatgagtctcaacaaataacctaaatatcagagttgtcttgggttaacttttgagatatacagctgttggcttgttttgggaccacactttatttnnnnnnnnnnnnnnnnncggtcggtgggggaggtgtcttaaatgcctgaggttcactgcacattcttggtgtgttaggtatttactcgttataaactgacctacttttaaatttttaaaatactcaatattttgaagtctcttttaagtcatatttagtcccttctttaaagcaaaccagtatattattgttcaaaaacaaaagcatatttctaacctgtatactgaagtttcttggcanaatangcatcctgaangacctgcaaccagtgtttttatttagaatgagatattattaactgttttctgtcatgagtgtttttaaaaaaagataaagtaatcctcgtngcgattcttggctcgagggncaatccctatatgagtcgtataatcgtatcatgtcaactgttctgtgtgaaatgtatcgctcacattcaacacatagagccggacataatgtaagctgggtgctatgatgactatc

SEQ ID NO: 134961 - DNA, 651 bp, Homo Sapiens
  misc_feature (115)..(115): n is a, c, g, or t
  misc_feature (495)..(522): n is a, c, g, or t
tgaaagtctagttttttattagttttacacaaccagctattcatgaactgtagttaaaacattgtaaatctgtatatttactgctactcaattacaaaatcttcagatggcattngaaaaaacatatccaaagtaactcaagaaaaaagtaccatggcttcttaaacaaaaaatcaaatgaagtatgtcacttgataggaagtttaaaacacacatttaccatactttaaagtaggttttcccctacttgtagcacagttcaagtgcctggaaactaacataataatttactgttaaccatttcaaacttaacattttgcatttatcactttaaaacacatgctgtctaaacattttaatacatgatactttaaagcagaatacttgccagtcagtaccaatgagtctcaacaaataacctaaatatcagagttgtcttgggttaacttttgagatatacagctgttggcttgttttgggaccacactttgattnnnnnnnnnnnnnnnnnnnnnnnnnnnnaggtgtcttaaatgcctgaggttcactgcacattcttggtgtgttaggtatttactcgttataaactgacctacttttaaatttttacaatactcaatattttgaagtctctttaaagtcatatttagt

SEQ ID NO: 134962 - DNA, 1387 bp, Homo Sapiens
  misc_feature (46)..(46): n is a, c, g, or t
  misc_feature (68)..(68): n is a, c, g, or t
  misc_feature (72)..(447): n is a, c, g, or t
  misc_feature (503)..(528): n is a, c, g, or t
  misc_feature (530)..(530): n is a, c, g, or t
  misc_feature (782)..(810): n is a, c, g, or t
  misc_feature (1050)..(1065): n is a, c, g, or t
ggacttgtggaaccccagcacgcgccttttacgtctgcccctttgntgcttttgctcaatgtcttccntcgnnnnnnnnnnnnnnnnnnnnnnnnnnnnnnnnnnnnnnnnnnnnnnnnnnnnnnnnnnnnnnnnnnnnnnnnnnnnnnnnnnnnnnnnnnnnnnnnnnnnnnnnnnnnnnnnnnnnnnnnnnnnnnnnnnnnnnnnnnnnnnnnnnnnnnnnnnnnnnnnnnnnnnnnnnnnnnnnnnnnnnnnnnnnnnnnnnnnnnnnnnnnnnnnnnnnnnnnnnnnnnnnnnnnnnnnnnnnnnnnnnnnnnnnnnnnnnnnnnnnnnnnnnnnnnnnnnnnnnnnnnnnnnnnnnnnnnnnnnnnnnnnnnnnnnnnnnnnnnnnnnnnnnnnnnnnnnnnnnnnnnnnnnnnnnnnnnnnnnnnnnnnnnnnnnnnnnnnaagaattcggcacgagggttaccattctgatgttggagcggccgcggctgtaggcnnnnnnnnnnnnnnnnnnnnnnnnnntnttttttttggagagtagaaaggcaacttcattggagcttttggggaaaaaagccttcaaagtcaccttctggcagctctggggagggtcatttggggtggactgagagtgtagggcaggtagggtgtgtgccgggcagcagctgtgtccgtgcagccagcacccagcagggcagtctcacaggagccgttgtgagcactttggacttgaagcagctatgaaccaccccccgcccccaccgtctctccctctnnnnnnnnnnnnnnnnnnnnnnnnnnnnnccgttttaccattttctcagtgctttttctgctttcattcctttgattttagttagaagcacaagccatgatggatgtgggactcttctcaattgctctttaaattgtcactttttaaatcctattaaatgaagtgtcgattcctgacaaatacattaaaagtgttttattcctagaagagttgggaaaagaaattattttcagcaagagtaggatgtttgttaaactgattccttggcnnnnnnnnnnnnnnnngcttttgaattgtgcaaaaaattgcccagtattatggtgtcgccccagttgtcaaactgctgtgcagatggctccagcccagtcaacttcaccttctttttaatttagaagataacaaaattgtaatcacttatcctttccagagccaagggggaaaaggaaggtataatctacaataaaaagcgagcgttctgtgtactgaggccacttggtgataaagagatggagcgctcccctcacagacttcaattaagaacctccctttggacagggaagaaaggtgtcaaagaggaaaagaaaattaaatttgcttccttccagg

SEQ ID NO: 134963 - DNA, 391 bp, Homo Sapiens
ctatatctataccacagcccccaatcctttcaaaggctttgcatgtatttcagctacaagtgacaaggatattaaggatttaaaaggataagagagtgggaaagatgtataaggaagtgcctttgtcaaaaggcagcaaaaagtataatgatataaacataatatgaaataagcaaattttagaatactttgaaacagatttatagaggaatacatagtaaatagttatagacacacacacacccgttttaccattttctcagtgctttttctgctttcattcctttgattttagttagaagcacaagccatgatggatgtgggactcttctcaattgctctttaaattgtcactttttaaatcctattaaatgaagtgtcgattcctgaa

SEQ ID NO: 134964 - DNA, 1168 bp, Homo Sapiens
  misc_feature (565)..(586): n is a, c, g, or t
  misc_feature (617)..(1018): n is a, c, g, or t
  misc_feature (1027)..(1027): n is a, c, g, or t
  misc_feature (1046)..(1046): n is a, c, g, or t
  misc_feature (1070)..(1070): n is a, c, g, or t
gcggccgcggctgttggcttttttcatggtgatgattttatttgtagcattcataacctgttgggaagaattactactttggtacaggctatcaggataacttcctatatgaatgaaactatcttatattttcctttttcatcccactccagttatactgtgagatctaaaaaaatattcttatccaagctcattgtctgttttctcagtacctggttaccatttgtactacttcaggtaatcattgttttacttaaagttcagattccagcatatattgagatgaatattccctggttatactttgtcaatagttttctcattgctacagtgtattggtttaattgtcacaagcttaatttaaaagacattggattacctttggatccatttgtcaactggaagtgctgcttcattccacttacaattcctaatcttgagcaaattgaaaagcctatatcaataatgatttgttaatattattaattaaaagttacagctgtcataagatcataattttatgaacagaaagaactcaggacatattaaaaaataaactgaactnnnnnnnnnnnnnnnnnnnnnngcctacagccgcgcctcgtgccgaattcttnnnnnnnnnnnnnnnnnnnnnnnnnnnnnnnnnnnnnnnnnnnnnnnnnnnnnnnnnnnnnnnnnnnnnnnnnnnnnnnnnnnnnnnnnnnnnnnnnnnnnnnnnnnnnnnnnnnnnnnnnnnnnnnnnnnnnnnnnnnnnnnnnnnnnnnnnnnnnnnnnnnnnnnnnnnnnnnnnnnnnnnnnnnnnnnnnnnnnnnnnnnnnnnnnnnnnnnnnnnnnnnnnnnnnnnnnnnnnnnnnnnnnnnnnnnnnnnnnnnnnnnnnnnnnnnnnnnnnnnnnnnnnnnnnnnnnnnnnnnnnnnnnnnnnnnnnnnnnnnnnnnnnnnnnnnnnnnnnnnnnnnnnnnnnnnnnnnnnnnnnnnnnnnnnnnnnnnnnnnnnnnnnnnnnnnnnnnnnnnnnngggcaccanagggccaggaccgtaaaanggcgcgttgctggcgttttcatangctcgccccctgacgagatacaaaatcgagctcagtcagagtggggacccgacaggctaaagatacaagcgttcccctggagtcctcggtggtcctgg

SEQ ID NO: 134965 - DNA, 2687 bp, Homo Sapiens
  misc_feature (1665)..(1665): n is a, c, g, or t
  misc_feature (1733)..(1733): n is a, c, g, or t
  misc_feature (2668)..(2668): n is a, c, g, or t
aaggagaaaaaagtgttttatttcggagaggtgggctcctggagggggaaggggcgggagaccaaggaggtttttgggtggttttatcatgggctttatttttatcgttgtgtttttggtggagagaaagaagtccaaaatttcgcgaaaacccaggtaagtttttcagttccccccgttttttattttccgctttccttggccccgcggccgccaaaacccgcgggcccatgaccttttctttcaagggagggccaaagcaacaagcttacaaaaggtttgggtttacaatccatggggtttacccccttggcccacccgtatttcgtacccaaagggaccaccccatttttatcttttccctaaagctgcgcccttggaccattctgtcatgggttacggggtggctccagcctgttttgaccatcaaccataaaatatattctaagtcccactgtaactagactttttgtactttcatactctgaagaaagtcttaataaatactttattattaagcataattattcatctgttggtgactgagaaatgaaaaccacaccttcgaagatttcttttaaaaaatgaaattcctttaactacaacaacgacaacaaagggacaagtacacagaaccaggcacttctgggaaacttgtcttctcatccctttgccctcccttcctccccctttagtaaagctggttgggcacatttgctaggatctgtgggtttcatcacttcaagccttactgcttaaaaaaatgaggtaagaaatttctatcggaaaagtgaaactgacacataaaccaaaccaaggtcttccctggctgctgcggcagccgttattgctctaagttggagtgttctgtttgcttttattatgtattcggagtccttattgccattctggctggcctcgtcgttggccaaggagaaatgatggggaaggagctcggtcgcctgctcccagctgctcagtcccaactttctgcccgcatgcggcccgtcctacccttgctgggagccagctctggttctggggcccccagggcggctctaacagctgggagaggtggtgatggggctgtgcaggtagggcaggctgctgggggccgagtgcacgcccacggagaccggaaagctgaagacgaactgcgaggtgggggtggcgggggtcttgccccgctcccgccggggtcccgaggggctagcagcctccgcagcacaggacgtggccagcacctgggactcgaactgcagcagctgccccatgaagctgaagttgggcgagatgatgctgcggcgctgcttaacgaactcgaagggctccctcccagcctcacccgtttcttcatcatcaggtagggcaggcagatggtggccgaccgcgagatgcccgcctggcagtgcaccagcacgcgcccacggcagtccttcacggcatcgatgtactctatggcttcccatgaaccaggagctgatgtcggcctttgtggttatcttccactgggatgcacttgtactgatagtgtccttcaaagtggtttggggcagtccggaggagacattcaacagagccgtgatgcccagggcgtccagcatgtctctccgggcagcatggtaggcactggcgaggtagaggaagggaaggatctccacaggnacccccctggtcgtgtagtggggtcccacaggagctgcagcgcaggtccaagggctctgtggcgctgngggggaaccgggggtgggatggctgccagggccttggttttagaacagaattttgggtactcggaggaaaacctctcatagccgcctttgagcaggcagatgtcggtgcgctcggcgttgcggcgcagcgcctgcaccaccagcgacacggtgctgtcctcgcggaggctctcggcgcgcgggctgcgctcgtcgtagacgatgaccgccgagtagaggccggagcgcaagcgggcgcgtacctccttcctccggcgggcaggatctgctccaggctcacgggagcccttagcccgcccgccgcacgatggtgttacagcgcacgttgaccgaacctaggatgtagcccgcgctgtgcgccaggaacggtctgcagtccagcagcaggcacttgccgccgctcggcagccccagggtgccgtggctgccgctgccgcccgcgccgccgccattctcgtcccggttcatcagccttttgagcacactgcagtccatctcccgcagctcctccatcgtcaccatggtcgccgggaaccgaggcggctgggcgcgcgaggaagagaagagaacccgggccgcctaggctgcagaaaggggcgggcgagagctaagaagggacgcctgcagaagtggccgcaaacttggtcctcaagggctcccgcgggagagcctcttcttccctgtccccttcctcccgcagcctcgcggtcacatagcagtcggagcggcctcgggcgcccagccgggcggcgcgcagagcggagggggaggcgccggtggaggagagtgtgtttacgagagaggaccgcggactcttttcggcgacggcctcccgtgtatttttgccggtcgcgcggctcctgtcgccactggcgccagcgctgccctgcctacgctcctccggagcggacgcgtgggtcgacgatatccggagnattccggaccggtaccagc

SEQ ID NO: 134966 - DNA, 1289 bp, Homo Sapiens
  misc_feature (1046)..(1046): n is a, c, g, or t
  misc_feature (1243)..(1243): n is a, c, g, or t
  misc_feature (1260)..(1260): n is a, c, g, or t
tctattacatcatgctacctagaagaaaaagaaatgaaggtaagcagtcagccaggaaagtcaggaaaaatgatatgctacttgtaaagagctcccctatattgtatcattctgaaatgtccaattttcaaagagtcagagtagtacagaaatgttcaatgttaaatcactactcaacataagcaatctgactttgatggttcacaagctcttccagatcttgtcgtgccttaaagttctcactaacaatatcaattatcagtgcactacagatatataggaaaagaaaatcccaggtaacagaaaagccagatcacctgcctccaagatgccgggcactgcacggcttttatcagtttttattacatcaggtcaaggaaacaaatggaatctatccacatggtcctgcctcgttgggcatatattctaaacatacatccattttcatacccaatgagaaagaactcaattccaaaggatctcacctttcacaaaattctacccttaagatcctaaaacagtcatatcactgtgcacaaaatttttggcagtcacaagctctaacacaaagcagagcttaaaaacaaatggagaatataatcagtgttcaaatgcaccctcactgggtgggtcagactgcatgaggcattgtggctgtgtggagggagaggtccggacctgtggcaaactgctgctcctgccaggaggctaccaaagccaaggctcttaacatattgaggttcctcagctgccccagtgcctatatctctaacaacagtaaacagtgaaatacctgcaggcaaccatgtctaaataaagagataaatatttgaatcttcaagaagtgggcaacttccgaaaggcatctcttggcaccctagaggagactgggatgaaagttgtaccggagactggagaagagcccgatgtgtttcacgaggttcggctccactacataggccctctctcccttggccctcaacagcgagtacagtgccatgtccttgccaaagcccttgtggcagtacacttgggacaggtaggtnagggtccggcgggccgcaagtgccgggaagagcatggctggggtgcacactgagaggcaggaacacactgtacaggaaggactcagcgcgcagttccagaatagtgcgaccacagctcacagaccatgctatcaggagaagaacatacagcagctaccctggcggtgcaactcagtaatccagtagtagggccaaanatgctaacaaccatcangatcgcagggctggatgattatgctgacc

SEQ ID NO: 134967 - DNA, 507 bp, Homo Sapiens
tgcctcgttgggcatatattctaaacatacatccattttcatacccaatgagaaagaactcaattccaaaggatctcacctttcacaaaattctacccttaagatcctaaaacagtcatatcactgtgcacaaaatttttggcagtcacaagctctaacacaaagcagagcttaaaaacaaatggagaatataatcagtgttcaattgcaccctcactgggtgggtcagactgcatgaggcagtgtggctgtgtggagggagaggtccggacctgtggcaaactgctgctcctgccaggaggctaccaaagccaaggctcttaacatattgaggttcctcagctgccccagtgcctatatctctaacaacagtaaacagtgaaatacctgcaggcaaccatgtctaaataaagagataaatatttgaatcttcaagaagtggccaactttcatcccagtctcctctagggtgccaagagatgcctttctgatgttggagcggccgca

SEQ ID NO: 134968 - DNA, 1150 bp, Homo Sapiens
acgcaaaatttcacattttaatatgcttagaaggagtttttaaagaagtagaaatgatttccttggcctctgactttcagtgatgaaaatgcaaccatgcagtcccccctttgcagaagggcagttcttcccaggctttctggaagcaggggcttccgaggagtctccacccacctcacagaacactcactatgagccctgcacagacagcaggattcacaatctccaatagggatggcaggggcagcccttaaaacttgaagaggtcgatgaagtgctgcggagacacaggcgtgaagcagctgtcagggtcggccgccgtgcaggggtgtcctgagtccttccaaaagagaatgctgcagtgccgacagaaatgcagtgtgtctccgtactgctccttcgctgggtaatgtttctgaagtgcaaagtacatcaacttccattcaatatgacctttttctgaaaggatcaaatgtctacaaaactgcttttcagcaaaatggtactgacaaagcttcttccacagctgtctgtcttcactaagcatatacaacgtgggggtcacctggcctaaggtgatgatgtcccatccgtctgagaaccggtataggatgttgttcagcatgtgcagaggaaggtcactgagggtgaggccattgttcacttgcttagtcatctgaagatcctgtagctgttgttgccaggcgagaatagtttctaatcggcaaatccaaatattgatgtttcccactaatacagacttccctactcctctaataagaatgcagagggtagagcttaggtcttgcagaagatctttgattaagcgaggattgtggtggtcatcaagaaccttttgaacgattttatccaaaatgttgaagtaattcttctgtgccacgccactcaatgaagttaactgggattttgcaattagctgcaacagtttgaccacataattgaaccttcggatatcttgaattgcacttgagaagtctaaccgattaaaggcttctcccaggtgcaatagccatgcctttcctttgtgctttctttatggacatagatccggacgcgtgggtcgacgatatcccgggaattccggaccggtaccacctgctttttgtaccactggtctaagtcacctaaa

SEQ ID NO: 134969 - DNA, 1331 bp, Homo Sapiens
  misc_feature (55)..(300): n is a, c, g, or t
  misc_feature (760)..(777): n is a, c, g, or t
  misc_feature (797)..(797): n is a, c, g, or t
  misc_feature (819)..(819): n is a, c, g, or t
  misc_feature (826)..(1239): n is a, c, g, or t
  misc_feature (1245)..(1245): n is a, c, g, or t
  misc_feature (1288)..(1288): n is a, c, g, or t
tttgctgtcacatttcagaagccatcacctaatccaagatcacagagatttacannnnnnnnnnnnnnnnnnnnnnnnnnnnnnnnnnnnnnnnnnnnnnnnnnnnnnnnnnnnnnnnnnnnnnnnnnnnnnnnnnnnnnnnnnnnnnnnnnnnnnnnnnnnnnnnnnnnnnnnnnnnnnnnnnnnnnnnnnnnnnnnnnnnnnnnnnnnnnnnnnnnnnnnnnnnnnnnnnnnnnnnnnnnnnnnnnnnnnnnnnnnnnnnnnnnnnnnnnnnnnnnnnnnnnnnnnnnnnnnnnnnnngttgcttatgcttttgctgtcacatttcagaagccatcacctaatccaagatcacagagatttacacctagtttctaataagcattttataatttcagctcttatgtgtagatctttgatccattgtgaattaagttttgtgtgtggtgtaagagcccacattcttttgcatgtggatatccagttgtcccagcaccatttgttgaaaacattatttttccccattgaattatcttcgcaccattattgataatcagttgaccaaaaatgtacaggcttatttctgggcacttgactctattccattgacctgtttaaccttatgccagtgccacagtgccttgatcagtgctgctttgttgtgagaagttttactttgttctgcttcaaggctgttttgactcttctgcatctcttgcatttccaaatgaattttaggatccactcatcagtttcttcnnnnnnnnnnnnnnnnnngcctaacagccgcgcctcgnttccgaattcttgggcctcgangggccannnnnnnnnnnnnnnnnnnnnnnnnnnnnnnnnnnnnnnnnnnnnnnnnnnnnnnnnnnnnnnnnnnnnnnnnnnnnnnnnnnnnnnnnnnnnnnnnnnnnnnnnnnnnnnnnnnnnnnnnnnnnnnnnnnnnnnnnnnnnnnnnnnnnnnnnnnnnnnnnnnnnnnnnnnnnnnnnnnnnnnnnnnnnnnnnnnnnnnnnnnnnnnnnnnnnnnnnnnnnnnnnnnnnnnnnnnnnnnnnnnnnnnnnnnnnnnnnnnnnnnnnnnnnnnnnnnnnnnnnnnnnnnnnnnnnnnnnnnnnnnnnnnnnnnnnnnnnnnnnnnnnnnnnnnnnnnnnnnnnnnnnnnnnnnnnnnnnnnnnnnnnnnnnnnnnnnnnnnnnnnnnnnnnnnnnnnnnnnnnnnnnnnnnnnnnnggcgcngtgctggcgttttccataggtccgccccctgacgagatcaaanatcgagctaagtcagaggtgggaaccgacggactaaagatcag

SEQ ID NO: 134970 - DNA, 1108 bp, Homo Sapiens
  misc_feature (431)..(440): n is a, c, g, or t
aagccctaccccagacattggaaataggtgacccaagtagggggagaaagtattattgttgatagcttctgactaggtgttaagggatcttcattatgaacaagatgaatttttttctggaaacactagatgttatcaatcaaacactaaaatgtaccatacaaatcccttaagcctctcaaatattgagctttagtacattcatggatagacattctggtgatgatttaggggctttttatacaccacatactagcttctttctctataagagtgcctctttcataaaaccaaatgcttgtctgctagcatacttttcaaagggaatccactgttttctcactttcctcccatatctccgtccttcatccaaaaccttcccagaatccatcagcaagcatgtttgaggcctgtggtgtaggggactgaannnnnnnnnnaacttctattccattttaattgtaggatatctttgtccatatacccaggtgtcctgatttgaatgtactatttgatcctcattgtgttcaggcaaaaaataggaaatgagtaattttgagtttgaaatctctcccagaagacaaactacttcagtgagtaaaagctttgacattttatgttttattcataaagggggttaattatttgctacaaagaagcacgatctattttcatcatcgatttgaaaatatctgtaactcctatagatcctataggcagagagttttcctttctgactttttccctttgctttcgtgtgaccacatgttttctgtaccagtcactggggaaagaagtgagtttatctcgtttgttttaaaagttttgcttgtctatttagcattcctttttgggtctcaagatttatggaacaataaatgtcatttaatgctgtgtgcttattttgaattcctcatcaggttttagaagcggggtaaaaatacttagatgcttatcagacttgaaattatactgagtggcattgaacgtgagtttgtcccagtgaaacaggctaaataaattttggcaccagcaaatttgttactttgtttttttaatagtaggatgtacacatttcagtataataaatgttttctgattgttttgc

SEQ ID NO: 134971 - DNA, 1152 bp, Homo Sapiens
  misc_feature (470)..(479): n is a, c, g, or t
  misc_feature (774)..(774): n is a, c, g, or t
  misc_feature (839)..(839): n is a, c, g, or t
  misc_feature (885)..(885): n is a, c, g, or t
  misc_feature (935)..(935): n is a, c, g, or t
  misc_feature (958)..(958): n is a, c, g, or t
  misc_feature (978)..(979): n is a, c, g, or t
  misc_feature (992)..(992): n is a, c, g, or t
  misc_feature (1068)..(1068): n is a, c, g, or t
  misc_feature (1086)..(1086): n is a, c, g, or t
  misc_feature (1093)..(1093): n is a, c, g, or t
aagagcgtgagccaccacgcccggcccaatcccgtcctcttttaacacgtgaagatagtataaggctatgtcagaccgttcttgcattgctgtaaagaaatacccgagactgggtaatttataagaaatgagatttattggctcacggctttgcaagctgtcaactggaagcatagtggcatctgcttctggggaaacctcaggaagtttccaatcatgatgaaaggcaaagggggagcagtcacatcacatggcaagaataggagcaagggccgggggaggtgccacacacttttaaatcatcagatctcactcacgatggtgaagacagcaccaaaccataaggaatctgcccccatgatccaaacatctcccaccaggcctgcttccagcattggggattacaattcaacatgagatttgggcagggacaaatatccaaactgtatcacaggccctgcttccaaaannnnnnnnnncccaagttaaacatacatttttttcttaactttccttcacaggtcattttccaggcagatctagccatactaatctctgctgcaaatttttctaaaccaattttataatgtattgctcagaccaggacaaatactccagatgtcatctgccacaacaggttataacagttatgaaggtaatgctctgtattcatctgtgtggcaggaaatctcattagcttcattgaaataattacaccaaattatgttcttttgtatctttttccaagtaatcataaaaaatgttttatagaanaaaatgtaaggattaaacgctgtgatactctaaaagagatatcctgccacatagatacttaggtnattgtgttggttcagccagctgtgactccacctcacagttcaatanagagcagcatctctccagctcttcagaaggctgcgctggaggacttccancatgctagtcatggtacatatangtatggcatccccagatgcnnacaatcatatgangatatttggctgtctacattactgactactttttgactctagcgatactcttttctatgtcttccacatctgttanatgactcttgattttcangacaganacatctatggattgacttttgaatctgataaggaggtcccatttcctacacactacccc

SEQ ID NO: 134972 - DNA, 1326 bp, Homo Sapiens
  misc_feature (42)..(77): n is a, c, g, or t
aaactgacgagcgcagcagaggtcattgagcgaggaagcggnnnnnnnnnnnnnnnnnnnnnnnnnnnnnnnnnnnncagtcgacggtaccggacatatgcccgggaattcggccattacggccgggggtctccaaacccagagaaggggaaacaggaatcgagttaggaataaaggattataatccactttccttctgaggaaaagctgggaaccttctcattttgccttatgaaaactaagctgaatcgactgctgccaaacatctattaggcaaaattggcctcttgcccatgatttgactttccagcacagccagttctttttgctcctctgcagctgattggctctggagtgtggccagaagcctctctcctgcaattaaaggagtcgggtctctaactgttgatctgtttttttcccttctgagcaatggagcttaccatctttatcctgagactggccatttacatcctgacatttcccttgtacctgctgaactttctgggcttgtggagctggatatgcaaaaaatggttcccctacttcttggtgaggttcactgtgatatacaacgaacagatggcaagcaagaagcgggagctcttcagtaacctgcaggagtttgcgggcccctccgggaaactctccctgctggaagtgggctgtggcacgggggccaacttcaagttctacccacctgggtgcagggtgacctgtattgaccccaaccccaactttgagaagtttttgatcaagagcattgcagagaaccgacacctgcagtttgagcgctttgtggtagctgccggggagaacatgcaccaggtggctgatggctctgtggatgtggtggtctgcaccctggtgctgtgctctgtgaagaaccaggagcggattctccgcgaggtgtgcagagtgctgagaccgggaggggctttctatttcatggagcatgtggcagctgagtgttcgacttggaattacttctggcaacaagtcctggatcctgcctggcaccttctgtttgatgggtgcaacctgaccagagagagctggaaggccctggagcgggccagcttctctaagctgaagctgcagcacatccaggccccactgtcctgggagttggtgcgccctcatatctatggatatgctgtgaaatagtgtgagctggcagttaagagctgaatggctcaaagatttataagcttcagttttacatttaaaatgctaaatgggaggcccaaggccgggtggattcacaagggaggaagtgggagaacgggcctgggccaacatgtcaaaaaccctacttaagattcc

SEQ ID NO: 134973 - DNA, 1383 bp, Homo Sapiens
  misc_feature (52)..(52): n is a, c, g, or t
  misc_feature (61)..(61): n is a, c, g, or t
  misc_feature (117)..(151): n is a, c, g, or t
  misc_feature (590)..(598): n is a, c, g, or t
  misc_feature (1308)..(1308): n is a, c, g, or t
accaaacacacaaccacaccaccacaccacccgcttagacgtaatagacctnatatggcgnattcgcgcttagtccgaacgaccgagcgcagcgagtagatagcgaggaagcggcgnnnnnnnnnnnnnnnnnnnnnnnnnnnnnnnnnnncagtcgacggtaccggacatatgcccgggaattcggccattacggccggggtcctttaaaagtttaatgatacttctgatgtttcggaacagtcatttcacctactatttctgaatatattttgcaaattgaattggaataggaattgatatagcagtcttaaacattagtagtgggatttggctatggtccagactgtgctccttatagagaatttgatctgctcagtgtgagcggtttgctgttagccaggctatttatggcaaacacatgcttttgtatcttgtcatagttatccacaaatggcaaaactggacttgattctactggtatgcaaaacaggcatgctagtaagcagtcagtcgtggctcagaacttaaccccatagctcagaggaatgcttttagcagaaaacaggaaagaaaatatcccttaaaannnnnnnnngaatgtgtggaagtaattttagtataattagattttttccatatttttgaaagatttttcagatgtgaacattaaaaatagggattaaatgtctaggcttccatttaaaattatatgaatggtttgggatctttttgcactgagcaattttatttcaggcttccagctgtccctgtgagttatcctggacatttcgatggtttttggtaaggccaaactctgataagcaaaacagagaatactgacgtatacttaaccatatgtgtaactgatacttggcaccatggaatttttcattgagttatttcctcattcttttaaaaaataagggactataaatcagttatttagtatcttttgtttttgtagctgattccttaactttcttgtatgcctctagtaatttcagagattaaatattgctttaaactgtgatactttgatttgctagattgacagaactgatactaatataattaagttcatctttgaaatacatctttgtgcgtagagccaaaaaaagagataaaattaataatagttcacttgttatttgagattaatttggcatttgaaatgatcattttattttacaatcatttataatgaatcaatgttccagttagctttaaaaggtatacggtgctaattagtaaaatattgaaggcactattttactgctagcttgcacagttatgagagtttataanatacatatatgaaaatatgtcaagctgttgagatgtgttacttatacttcagaacattaaaagttcaaaactggt

SEQ ID NO: 134974 - DNA, 1029 bp, Homo Sapiens
  misc_feature (425)..(927): n is a, c, g, or t
  misc_feature (964)..(965): n is a, c, g, or t
ggtgtgctattgtccatccctcaatcatcagtactaatttaaaaatgtgtgttaagtggagcagagaatcctaatctaattccatatttagagaatctcttggtaatataaaaaaggcacatatcaatacctagtgatttgaaaaattacatagcatatgctattacatatttttcgtgtagtcagttgtattaacatataactgtgctactgttagacttgaaatatttatacattggcctacataaagtacctggacttttggaaacttaaatacaaaaacagtttgacagctaataaaaatattctacctaaagcagagtatataattagtggtggacttcatgggtccaacaggcactgtctgctggtggcctctcattgacggggactgctgcaggattgcgcctcgtgccgaattcttnnnnnnnnnnnnnnnnnnnnnnnnnnnnnnnnnnnnnnnnnnnnnnnnnnnnnnnnnnnnnnnnnnnnnnnnnnnnnnnnnnnnnnnnnnnnnnnnnnnnnnnnnnnnnnnnnnnnnnnnnnnnnnnnnnnnnnnnnnnnnnnnnnnnnnnnnnnnnnnnnnnnnnnnnnnnnnnnnnnnnnnnnnnnnnnnnnnnnnnnnnnnnnnnnnnnnnnnnnnnnnnnnnnnnnnnnnnnnnnnnnnnnnnnnnnnnnnnnnnnnnnnnnnnnnnnnnnnnnnnnnnnnnnnnnnnnnnnnnnnnnnnnnnnnnnnnnnnnnnnnnnnnnnnnnnnnnnnnnnnnnnnnnnnnnnnnnnnnnnnnnnnnnnnnnnnnnnnnnnnnnnnnnnnnnnnnnnnnnnnnnnnnnnnnnnnnnnnnnnnnnnnnnnnnnnnnnnnnnnnnnnnnnnnnnnnnnnnnnnnnnnnnnnnnnnnnnnnnnnnnnnnnnnnnnnnnnnnnnnnnnngaacccgacagactataagatacagctttccccctgnnagtcctcgtggctctctgttcgacctgcgctacggaactgtcggctctccctcgggagctgggc

SEQ ID NO: 134975 - DNA, 1437 bp, Homo Sapiens
  misc_feature (57)..(67): n is a, c, g, or t
  misc_feature (157)..(166): n is a, c, g, or t
  misc_feature (227)..(314): n is a, c, g, or t
  misc_feature (339)..(349): n is a, c, g, or t
  misc_feature (372)..(402): n is a, c, g, or t
  misc_feature (409)..(521): n is a, c, g, or t
ccccccccttttcccgggggggaaaatatttttcgccaaggggttaaagtgttttannnnnnnnnnngatttagggtcccccaggcggcctttaatttatttccatctccgcgagaatcccttataaaattccccccaaacccccacgaaagccccnnnnnnnnnnttaattaaaatgagggtcccccggggtcctttttttatggtccgaaaaaacccccaaactnnnnnnnnnnnnnnnnnnnnnnnnnnnnnnnnnnnnnnnnnnnnnnnnnnnnnnnnnnnnnnnnnnnnnnnnnnnnnnnnnnnnnnnnggggaccgggggggccccggttccnnnnnnnnnnngggccccgcccccaaaaaaatgnnnnnnnnnnnnnnnnnnnnnnnnnnnnnnnccgcaannnnnnnnnnnnnnnnnnnnnnnnnnnnnnnnnnnnnnnnnnnnnnnnnnnnnnnnnnnnnnnnnnnnnnnnnnnnnnnnnnnnnnnnnnnnnnnnnnnnnnnnnnnnnnnnncccggaaaaccattttaattataatagcttacacaggctgcagagagggagacgcagagccggacctgacgggctgtgctttcaaaactgtgcagtctccttcctggctctgaacaggttagcaagagttccaagaggcctcaggcctcccaaccacaaaggcagagaagttagccccagaaagctgacagctgaaggcggggaggctgagagtgcttggtgtttgacagatgagtgttgtggtgggaggagtatggagtcacacagaggctccacccagcaaggcctctggccaggggctatgtttaaggctggggtcaggcagaggtgggagccgcaggggagagaagtctggccggcaagccccaagggaaggacaaaggcactggggcagatgtgaccgtggacaaccgcagtgcaggcagggcccctacaacgctacagcaagcaaggctgtccacgaagctccctgagctacattctaacagaatgtggatgtggggctgggtcagcatgtggccccaccatctttagctcagtggcagttctgacagcttgggtggaaaggaatcccatttaccctgcagcggcagcccccgctggtgtctcctgggcccccagggccccagcgtgggcccttggtgacccagcagatctcggtgtggcagacggtgcagcggatccagtcgcagccgtccttcttctgtaccacgatctggcactgggggcagcgcatggcctcgccctgctgcagcatcaccttcagcatctctgtcgtctgccgggcagccacatcggttcttgaggcgcagggccaggtcctcctgatactccttgcagttcatctgctcatggatggccttgcagagcaggcagttgacgtggaaacacacagggcaggtgaactcattgacat

SEQ ID NO: 134976 - DNA, 1010 bp, Homo Sapiens
  misc_feature (564)..(584): n is a, c, g, or t
  misc_feature (593)..(631): n is a, c, g, or t
  misc_feature (678)..(752): n is a, c, g, or t
  misc_feature (790)..(798): n is a, c, g, or t
  misc_feature (807)..(924): n is a, c, g, or t
atggtttagagtcataagatgacctatttttatataaaagttatattatagaataaaatgttcatacgcatagactgttaagataaaaaaataggaatcttgcaaggtaattcttatttgcaagtgggttatgtgttcactctcctctacctttatggtattttggtgttcacttacgaagcatacaactagaaccatatccaagcagactctgggttgctgttaacccagggcctagacttctagtgcctctgaggcagaaccaaaggagcctgcactgggggaaatcccttttcctgcctgcctgtctgcctgtgacctgtgtacgtattacaggctttaggaccagctgattgttatgcttgcaggatggttttgaaacagaaacaatacttgtttactgtaggaatcctatttatattatttttcagtcctgtgaatgctgtgaaaagatttattcctttgaggccaggaagctcccaggcatatatgcttctaggttaggattgtcctgactcactaaagatgccaggatattggggctgaggggagtttgaggtgttnnnnnnnnnnnnnnnnnnnnnctcgaggcnnnnnnnnnnnnnnnnnnnnnnnnnnnnnnnnnnnnnnncatggtcatagctgtttcctgacccagctttcttgtacaaagtggtnnnnnnnnnnnnnnnnnnnnnnnnnnnnnnnnnnnnnnnnnnnnnnnnnnnnnnnnnnnnnnnnnnnnnnnnnnntgcagtacccgggaatttacccgcctaatgagcgggcnnnnnnnnngtgatcccnnnnnnnnnnnnnnnnnnnnnnnnnnnnnnnnnnnnnnnnnnnnnnnnnnnnnnnnnnnnnnnnnnnnnnnnnnnnnnnnnnnnnnnnnnnnnnnnnnnnnnnnnnnnnnnnnnnnnnaaagtaattggctttccgccgagcgcaaataccaaataccggttccttccaagggaaccctaagtttaggcccaccatttcaaaga

SEQ ID NO: 134977 - DNA, 1318 bp, Homo Sapiens
gtttaattttctaggaactcacagactattttgggacctcaagttgtccacccacttactggatatttaataccatctttcgcctcatttaaagtttgttttttttttccctttttcctatgatctgtgaagaacaagcacactgataattacaaagtgcatccatgtgatacccagatttgtgcagtgtgatactcatgctttggttcttatggccatcattgccttttcatgttaataaataatgacagctaacaaaaataagtcaccttttttaatgtaggacatctttctttgacaggctactgtatctataatcaccgttaatctagctcactgcaatgtcattcacacatcagttttacatgaatatgcaaagaacacaataatcaactgtcaaacctaaacgattaattacttatcacagaatctgttgaatatttttgttttctaactgagcaagggaaatcctgtcagcttttaaaagtaagggctagattcttagtcataattactcatcatctgtcaagttgacacctcatatggatgaaataagccttacacatttgatttaataacaaaaataggtaattttattcccctattgtaagtacttcatagtaacaatttatttatttcacaactctgctataggcagattgattgttttatctttctatacttttggatttttaccctttagagatgtgaacttcatctgactttaaaatgaggacacttaatttaatgcttttacaaatcataactaacttttgtgagactttgaaataaaagaatgaattaaaaactgttttgacatactcaacaactgttaaataaagcagaagcttagtctctaattttacggctgtgctatccaatatagtttattcaagttgaagtgaagtgtacttttaaattaccaactggattttgaaaacttggttcaagaaacagatgtaaactatcaatcaatcaatcaatttttttatattgatgacgttgaaataacatatagtgtttttaaaaaatcaaaattcattttaacaaacaaacatttatttttactttttaaaatagggctactgtgaagttaaatatttgtatctgtggcctgcatttgtggctgttgtgtttctattggacagcactgtattagaggaaccagatgaaaataaatataagacctgataacagttctgtgggtatttaacagagctaattatatccgaacattttctgaaaatcttttgcgtgacttaaacaaacataattaattccaaatatcaatgtcttcaaatgtatattgcatctattt

SEQ ID NO: 134978 - DNA, 597 bp, Homo Sapiens
  misc_feature (44)..(52): n is a, c, g, or t
acctatttatatatgtatgtatatcttagaaaagcactttgttnnnnnnnnnttgcattttatatgattcctgccatttgctgctaaatctgggctggtcagaatgctgcagcgatacttgatctatataaaaacctggcagtaaaatgtagagtgaaagttaaatcctcttgctgttttaactttatcataaagatgacataggcaagctgtgcagctttacattttaaccaggggactctgtggcatttaaaaccgtctagaaatggttgtactttaatgccagtaataatctgcttcctctattgtcattaaaatatatacgtttagtgtatcacacaaaccaatcttataagggtaatgtaaaaaccccaacaattgtacatgttctgtttttgaaaattgtggcatgtatttttgggtgaagatcattagagaagagttctctaaaggttttctgtgttcatacatggtatacagatagctcataatgaagtccagaatcttacttttaagtgaaggcattgtgaattcacctcaagtaaacccattgttccaaagcaattataaactttgactctagtactactatgattt

SEQ ID NO: 134979 - DNA, 976 bp, Homo Sapiens
  misc_feature (11)..(11): n is a, c, g, or t
  misc_feature (23)..(23): n is a, c, g, or t
  misc_feature (54)..(54): n is a, c, g, or t
  misc_feature (198)..(198): n is a, c, g, or t
  misc_feature (205)..(205): n is a, c, g, or t
  misc_feature (214)..(215): n is a, c, g, or t
  misc_feature (222)..(222): n is a, c, g, or t
ggtttcacatnaatgtttgtctnaattggacgtttttataaaaagtaggacatngggattatttgataatactgtttggaatacagtgcctctgcagttcacaaagtgcaagtgtatagtgtcattgcatacagatctcatgctttgcacatgagcataaggaactccaaacagatcacatgaggttctaaaatctgntgggtcntgtctctanntgggtcntgtgaagcaaaccactgtagctttagctgggttcagtcatatgactcgttggtggaatgcctaggtttttcatcttacatgcagtcttgggggtggatgaatacataatttcttatgtattcgtgtatccattagtgaatagttcaagtctgtttaagagtgtattgagatggcattctctgcatgttaaagatcttaatggcaaccagcacctcttaagtatggtttaaacatattcttagctaattttttccattagtttttgaaattggtggcagttgtctgatccacaagggcaagatcttctgagtactctggggtgtgagtatgtgtgcacacgtgtgtgttggagtgagtgagagaatgtgtctgtgcatgtggccatgctttcctagaatgtcaagtagatatttttacactttgagttttaaagcaattactatcagactgagatcttgtatgccaaactttaatctgcttttatgttttcaggctgaaggtgtgaaaatcctaagaggatttcatattgaatatgtgtacacaatcttaactatcgtggtggaaaacatactactataatttattattatatcttccagataatgttattcatttagaacaaataaggtatattttttagaatcaactttgtaagcactataaaatctttaataagttataaggtctatgatgtgtttactttaaaaattgctgttaaaagcaacacgtattaaatatgtaattatcatctgga

SEQ ID NO: 134980 - DNA, 991 bp, Homo Sapiens
  misc_feature (314)..(786): n is a, c, g, or t
  misc_feature (792)..(792): n is a, c, g, or t
aatattttaagaaatctttcacggagaaaaaactctgcattacaaaatgtggtggcttgagtaacagttacttctctttcatgaatttctttcagtgggcattaactgtccatttagcttcattaacagttttaccacgagaccagcctgttttgtatgtactataaagctcattttattttccatgctatggatctgaaaacaagtatcagtatctcccaattgccacataaaacaaccatacttaagactgatgagtaaagccttagtttccatgttgaggagatgaagtccttcctcgtgccgaattcttnnnnnnnnnnnnnnnnnnnnnnnnnnnnnnnnnnnnnnnnnnnnnnnnnnnnnnnnnnnnnnnnnnnnnnnnnnnnnnnnnnnnnnnnnnnnnnnnnnnnnnnnnnnnnnnnnnnnnnnnnnnnnnnnnnnnnnnnnnnnnnnnnnnnnnnnnnnnnnnnnnnnnnnnnnnnnnnnnnnnnnnnnnnnnnnnnnnnnnnnnnnnnnnnnnnnnnnnnnnnnnnnnnnnnnnnnnnnnnnnnnnnnnnnnnnnnnnnnnnnnnnnnnnnnnnnnnnnnnnnnnnnnnnnnnnnnnnnnnnnnnnnnnnnnnnnnnnnnnnnnnnnnnnnnnnnnnnnnnnnnnnnnnnnnnnnnnnnnnnnnnnnnnnnnnnnnnnnnnnnnnnnnnnnnnnnnnnnnnnnnnnnnnnnnnnnnnnnnnnnnnnnnnnnnnnnnnnnnnnnnnnnnnnnnnnnnnnnnnnnnnnnnnnnnnnnncacaanatcgacgctagtcagaggtggcgaaccgacagactataagatacaggcgttcccctggaagtcctcgtggctctctggttcgaccctgcgctacgatactgtcgccttctccctcggagcgtgggcttctcatactacgcttagtaccagtcggtgtagcgtcgtcaactggctgttgacgaccccgtcaccgacgtgc

SEQ ID NO: 134981 - DNA, 1266 bp, Homo Sapiens
  misc_feature (111)..(125): n is a, c, g, or t
  misc_feature (134)..(239): n is a, c, g, or t
  misc_feature (241)..(241): n is a, c, g, or t
  misc_feature (243)..(244): n is a, c, g, or t
  misc_feature (981)..(981): n is a, c, g, or t
  misc_feature (991)..(991): n is a, c, g, or t
  misc_feature (1034)..(1034): n is a, c, g, or t
  misc_feature (1048)..(1048): n is a, c, g, or t
  misc_feature (1065)..(1065): n is a, c, g, or t
  misc_feature (1113)..(1113): n is a, c, g, or t
  misc_feature (1130)..(1130): n is a, c, g, or t
  misc_feature (1162)..(1162): n is a, c, g, or t
  misc_feature (1181)..(1181): n is a, c, g, or t
  misc_feature (1187)..(1187): n is a, c, g, or t
gggggggatcccagccctatttatggcccggattttcttgggaacaagtttggcccagttccctttccttctggggccgggcgcccaaagaaaggttttgaaaaatttttnnnnnnnnnnnnnnnccgacaagnnnnnnnnnnnnnnnnnnnnnnnnnnnnnnnnnnnnnnnnnnnnnnnnnnnnnnnnnnnnnnnnnnnnnnnnnnnnnnnnnnnnnnnnnnnnnnnnnnnnnnnnnntntnntacaaaagaaaacacaaaaccagaatttattgaaagtaggtaccagctctgattagaacaatcagctcaaagataccattactcagaacaatatatacaaaaatctcagggaaaggagaataaaagaacttaaaagaatacaacttgaacaggactgttttactaaaatggtcttgttgcaaaataataacaaataccacagagagccctacatgagaaagccatgtgccttcaagcctggggatgaggactctagttctcaaattcttagaacatagcacatgattctccagggcagagaggctggctggagaatgaggacctcactgctgactctgcttaacaaagtccatgccccaggcacaggcacacatggaatgaggccaccaagcaagtcacacccgcccctgttcccatgaaccccataagagagaagtgctctctgaagtctacagacttggcagggaccactggaccatggatagcttagagacagttattctgtggccaatgacataaaacctccagaatctgggccctacagttcccttatccaaatttccactaactagggaggtagaagagcaagacatggaagttgtctccaaaccagtatttggtcttcagtaaacagggataaacataaaacactgctccacaagcagacttcagaactactgggcacagcaggtgaaagattcctaagtcccactgaccacctcccacaggaggaggangaggaggaanaggagggctggtagggggaagtgtcatgagtgcgaaagggtanacggacatgttccntactgaggtcactgctngcaactgtcctgctctgctgatctgtacagttccccccacttctgganctacctctcatggccanagctcactatctgagcctaactccccgtctcngcataagagcaaaatgcanatgcanagtctctggtacggtgtggagcatcttctgagaacaggtcttctcccctcactctgtgcgattctggctgaggcaatcc

SEQ ID NO: 134982 - DNA, 1081 bp, Homo Sapiens
aaaaaggagctgattacttttaaaggtcatgtagtggtctgtaagccgtggcctgcctctggctacttcccaacaaggtaatctgcctgcaactgctcattggttattttcattcgattccaagccttacgatggccttttaaggacatctctgctatctccactttcctttcccacatcctgatgctcttctccaggtccgcatttaaaatcttctcccggacgtaagtcatcacctgtggtgcccggaactcggccaactgcttccggagcctcttattcactgcctcggctttggcccggtcctcctccacttgtagtgtttctttttcaattttttcaagtagctcttttctcaacaagatctccttgtccaaattgaggtatatttccattgccttgtgaagcttgcttttgtaggcattgaaaacctgcaaagtgtttccaaatgacagcttaagctgggtcagttcttgattccttgcttcaattgtctcaagaaattgagcgttctctatcttcaactgctgaaaatcaacatcgtgaagggcctcactcacctcttccttctgcctcaattgtaaaagcattttttcctctgaactttgagagaaacatttttcaaacgtaatttctccttcatattatccctccggcggttcatgtcctcaatgtatttcatcactttctgagtggccaaaatactccctttcttcttggatatggcttttagaatatctttttcaaactcatgcacttctctcgaaacttcactccatcgaatttcagcctcctcaatgatcgcctcgtgatgctgcaggtcgcgttccgcatttgcccttgtgtgtcgtaagtcatccttcatgtccgcaacctctttttgtaccagctcaagtttttggtcggcagtcaggcctaccccacggtccatacctgtccgggatttggatctacgcctgcctcgaaactgtgcataatctgctgctgatattttaatttctgataatcgtggaggtcgctgatccctgggctccagtttagcgtaatatttctcaaacatctcagtctcagttttgagacc

SEQ ID NO: 134983 - DNA, 479 bp, Homo Sapiens
tttggttcaaaagtaaaaatgccctttcttctaaggacagtggagttctcacttgtggctccttgcgtggaatcgaaccaaggggaatgcagcaaccaaaggttgctggatttacaagatctatctacggttaacagccaagaactaataagggtggacaaagatgatcaaaataaaagcagacatcagtgctaaattatgatgcaacagtttggctcatgcatataagaaaatacatagtatatcacaacaaaggccacacactcttaatgcaattcagttcacattactacttacaaatgaaccttccctgccttatagtagatcattcaagaacccatttttcacaatctccagcacaactccctctgaccaaccaaacttaccccaacttccgtcctgaccaaccacaactgtttcctgaatcccatgcagtagatttcaccttcctcccctcctccattaatatggcgctgtgg

SEQ ID NO: 134984 - DNA, 1558 bp, Homo Sapiens
  misc_feature (81)..(112): n is a, c, g, or t
ggttggttaaagaacgggccaagtgccatgctcgaaattaaccctcactaaagggaaaaagcttgcggccgcctgtcaggnnnnnnnnnnnnnnnnnnnnnnnnnnnnnnnncattgttcattttgcttagttactctgagaaagattttttctaagtaattaagttgctgatgaaacgtctaagaccaattaataccttccatttcatgaatttaagcttcaaatgaatccattctgctgtgtagtccatcttctgagtgtttcagtttcataatcaaatttttaatttccagaaactctaaatattttttttcatggcatcctattctttatgaacacagtatctttatgaattgctgaagattttgattcattaatttaaaaatttcatgtttctcctagtaactatcttcttgaacaggttaattttaatttcatgcctccttttatgttactggttttcttcaaatttgatgattcttggttgtccatatttataaatgagggcctaagattaaagttggaagtgttattttttcatccaaatgggaattctggttcacttttaatgaacacaaatgattacaggcacttatatggtgattataaacggaagtggcaggtcatcatagttagagagatcatgtgggcagcttaacttcagttcctcttcggagccattttggataattcccttattctccgatcccagcatttcttgggtcagagctcccacttcagatagctgctttcttagcctggtggcaaactccagaatcaggatgttccaaagatgagtggaatggcttagctgttccatcctttaattaactggtgcttaaatcatctgcttcttatcttccagaaatttcactgttcaaatttctggttttccaactctgctattatttttattttaatatttctccagtcatttcaatggggttctgttttggtctttttctctgaagaagatctgctatttctggacaactcctcttcttttctttgacttccagtttccagaagtcgcatctggtgaaggagaacacattctagcaatgaatccttcaaaagactcctgccgctgctcagtagctgggactcctaggttgttgctggaagttcctaagccctctggagtagaaactgggacaggaaaggagtcgagaggcaaaggaattctagcatcacctgtaattttctgaaacttcattagtgttccttcattgtaagctgactgcatacaaatagaaacctggatattttgcatttgccctagggcattctgattcggttctggtttttcatcttcaagcgccttcttttcttctttaggtggattactaacagtagaagtcatctggggatgacctagtaattgaaaatctgactgatctatcccagccattgtggcaagctgcccaagcccagcatctttaaggagatccaagaaagcatgaaacttctgaaaagaattctcaatgctgcccaaaacaccttcatcatcccggacgcggggtcgacgatatcccgggaattccggaccggtaccac

SEQ ID NO: 134985 - DNA, 578 bp, Homo Sapiens
ccagggttcaattcagagggcttaggaactccagacaacaactaggaagtccaggctactgagcagcggcagaagtcttttgaaggattcattggtagaatgtgttctccttcaccagatgcgacttctggaactggaagtcaaagaaaagaagaggagttgtccagaaatagcagatcttcttcagagaaaaagaccaaaacaggtgaatataccaaaaaacactctgataagcaacaccctggaaaggacctgcattcctgatctgactgtcctgaaaaccagaaaagcaaagaaactagggaaactagttctttggttaatgaaccaattaaaagtaggtctttgaaaaaatatgtttctgtcaagaaagaaaatagaatagtgactgtttcatccaagacaaataaaagtaaatccagtccactagaacattctgaaagtgatactcttggatgtgattttgaatttcaagaaagcatccattctctatcacacctttcatatgactaaatcttttgaaactatgtttttacctttaaattttaataaattttcttatgtttttattatggaaa

SEQ ID NO: 134986 - DNA, 1202 bp, Homo Sapiens
  misc_feature (72)..(92): n is a, c, g, or t
  misc_feature (535)..(544): n is a, c, g, or t
acgacggccagtgccatgctcaaattaaccctcactaaagggaaaaagcttgcggccgcctgctaggtttcnnnnnnnnnnnnnnnnnnnnnaatcgcaatttcctctttttattcatttcagacattaacaaactaaatgcagataaatgtattctacttcacaggacagtaagtgtcctagataaaaacaagcactggctccaagcagtcgcccattctagtcccgcaacggtaatctatttttcttcaaatgtcagttcttcacagtttcaatactgcagcagcaagttcttccttagatcaagaaagccgtggtccgtatttcagaaaatcttaagtagagataagtgagcaagcttctggtgccacgtgcagtttgggtgggacaattttacctgaagtcctgcagactggccgtggggatgacgggggccccgtcccttgcggtgttcttcatatcgattcagggaagcgaactgtgcagtgctcgcattctatttattggtccctgtcaccccgtggggtgtcacagnnnnnnnnnngtcaatgcttcacagaggagttgttcagagcaggtcaggcaggacgaggccaggaggctttggttcgacacagttgatccagaagttggcacagctggcgtgatactggtgccctccataggccagcttgaaactgtctgtttctgagttgaatgcttttttaggatgttcttctgcaggcttctcttctttccggctcctcgagtccacattcaagaggcacactccacaggcaagctcctgagcatttttaatcccaggccgtgacatacaggagggaaaatccagcgagttttcatctggtgtgagtgtggcgagtgacatgaagccgattaggttattccatactttatcgatgtccttcagcaactgctggagtttctcactgcacactgcagtggcttttatccccagctccacacgcttggttaccctgtacacttcaacaacacctaataaatattccatgccttgagctgactgaattacttctgtgcaaacagaactactactgattccatttaaggtatcatttgccttcttaatgacattcagggcactccccaggcatctctggccattcatatgcatatctctcatttttctccacctctcccgtcaggtctttgtacttgtctcggatgacgggcagggcggg

SEQ ID NO: 134987 - DNA, 983 bp, Homo Sapiens
  misc_feature (642)..(642): n is a, c, g, or t
  misc_feature (827)..(827): n is a, c, g, or t
  misc_feature (835)..(835): n is a, c, g, or t
  misc_feature (837)..(838): n is a, c, g, or t
  misc_feature (846)..(846): n is a, c, g, or t
  misc_feature (854)..(854): n is a, c, g, or t
  misc_feature (867)..(867): n is a, c, g, or t
  misc_feature (877)..(877): n is a, c, g, or t
  misc_feature (885)..(885): n is a, c, g, or t
  misc_feature (898)..(899): n is a, c, g, or t
  misc_feature (933)..(933): n is a, c, g, or t
  misc_feature (959)..(959): n is a, c, g, or t
acaggcccaaaatccatgggctttgtactggcctctctttattcagggcccagcagcagccaggctggggaccccaggctggggcagccttgagcgggatgcaggcacaggcccaggcctcccacgcagagtgctgacagctccattcccagcccagccacagggtcctgccagctctccagccgggaattcaaaagtggcagatgtgcctcagccggagtccccgaggacagccaaagaggaaccgaggcactgctgctgtggggaccaacgggaggcttgcaggcaggacgagtgtaggcagggacctcagggctcctctgtagaggcgccagcgcccgaaagtaggccttgtctctccaggtcgttgctgtccacatcattgctgtctggggtccctgtgacaggctgccaggcccgggtctcgtctctctccaggtacagcgcattcagcaggaagcagccgccccccagggcgattacaaaggcgcagcacaggaagctctgctgcaggctgcggaagcgctgcagataggagtcagggcgcctggcccgcaggacactagagataagtcctgtgagataggggctgccagcgtctcccaggatgtggcccacgtgatctgagtgcctctgccgtcncccggcatctgggcacaccacagactggaggttcgtgtggacatcagacaaaatacgctctgagacaggatgctccaggcccttgactcagctgcgcttctgcctggcgtgccttcactctctggtccagctggagcacagcaggatgtcggcaccactgcccagttgcaggacagagcagcccnccaagccnanngacactgntgaggctncactggggatcanaggaaccccnaatggganggggccctggaannagtgggccagggaaacccttaggcatccggatangacgggccagaaacacaaacacccancgggacacggaagtggggcaagaa

SEQ ID NO: 134988 - DNA, 763 bp, Homo Sapiens
  misc_feature (560)..(600): n is a, c, g, or t
aaccatgcactggtgaatggctgtttgcaagttgtacatgtgtagctgctgggctcatctttacaaataccctgcggggcatattctgcactcatcccaggcgtggggattagagctccatgtgcagaacgaggggaggagaggcccctccagtgcagaagtttatctgctatgtgttcctgtttggggcaaattcctctagatgacgttgataaacaatcgtcatcctctggcgtgacctggatgccaacctccacgggattggatgcttttttcatctcgattggtgaaggggaaggtggcttatccacagctttttctaagcagaggctgccattgcattgtttccgtttgtgctcgataaaaataagaatgtcccccaatgggaagttcatctggcactgcccacaggtgaggaggtcatgatccccttctggagctcccaacgggccgtggtctggttcatcatctgtaagaatggcttcaagaggctcgggcgagaattcccgtttgcttaagtgctggggtttgccttgcttgcggcgagacatggtgggctnnnnnnnnnnnnnnnnnnnnnnnnnnnnnnnnnnnnnnnnnacgacggctcggttcacatcgggagagccgggttagaaagaaggagactccagagaaaatatcttcatcagtgccttttgacatccaaaataaattagaaataatacaaagatggcgcagggaagatgaattgtgggagagccgtcatggcttttttttaagc

SEQ ID NO: 134989 - DNA, 469 bp, Homo Sapiens
  misc_feature (136)..(136): n is a, c, g, or t
gggcatattctgcactcatcccaggcgtggggattagagcctccatgtgccagaacgaggggaggagagggcccctccagtgcagaagtttatctgctatgtgttcctgttttggggcaaattcctctagatgacngttgataaacaatcggtcatcctctggcgtgacctggatgccaacctccacgggattggatgcttttttcatctcgattggtgaaggggaaggtggcttatccacagctttttctaagcagaggctgccattgcattgtttccgtttgtgctcgataaaaataagaatgtcccccaatgggaagttcatctggcactgcccacaggtgaggaggtcatgatccccttctggagctcccaacgggccgtggtctggttcatcatctgtaagaatggcttcaagaggctcggctggccgggctgtaacttcaccaaccgccgcgccgcgtctgat

SEQ ID NO: 134990 - DNA, 439 bp, Homo Sapiens
ttttttttccagatcagcacaaagtttattagccatttctgctcagaagagcccctttctgaacaggactgttcctctgacataacagacaagaaacagccacctgtgcagggcctttcctttatatctcaagctacatcaggagaacatcttggagcaatgtcagttgccccctggggttccctgggaatagctaaggtgtgagattgtccagagtcctatgacagaccttcaaggttttaagttccacagacttggactttgtccaggtccacaaccaacgaatagaaaccttcctttcaggtaaacaacatattgtacaaaaaagggaggatgataacataatagagaaagagctaagacccattgcttctcctctgtaaaaacaccaaactttatccaatactataaaaaagaaatctactctgagtggtaccga

SEQ ID NO: 134991 - DNA, 640 bp, Homo Sapiens
  misc_feature (596)..(596): n is a, c, g, or t
taggttaacatcaaccaccgcaccatccaggcactccccagccaccacgtgtgggcacaaagacacacacacccctcttggtaggcagatttccctgtctgctcccctcttcctgtgggagaggcatgccttctgggcagtttaaaggtgggaagttacaggggcctaaaaaggtaaaagagcagcagctctgcactggccagctgtaaacagtaaataggccagtcatggagggtcctgaatccagatcctcaggaaggttttcaccaaacaccacagtcccatttgatgtgatgcccagcctctatccttaaggcatttcccagcgtccctgaggcgctctgcttagacaactggcacagaagtggtcagggccttggctgtggctctgcctcctgcctcacgggaagccggggagtggagcagagaccagcattagggagccttgtggcagtggtgagaggctgctcaggaaggagctgtgcctctcccctggtcctggccccatgccctcagcatccttaagaaacacggctgtccacctttttccctgcaagaaaactaagtccatcccttatgactgtctcgggccccanaggtgaagggcagctccggcaaggcctcgtgccgaattctttgg

SEQ ID NO: 134992 - DNA, 1470 bp, Homo Sapiens
  misc_feature (30)..(30): n is a, c, g, or t
  misc_feature (363)..(442): n is a, c, g, or t
  misc_feature (596)..(609): n is a, c, g, or t
  misc_feature (627)..(1371): n is a, c, g, or t
  misc_feature (1430)..(1430): n is a, c, g, or t
catgtccttttgtagcagtctgtaacttanactatagtataatgaaaagaatgacctataatataggtgttttgtagattcttgtgtcactgcaaacaatatgaactcctttttcgtattgccatcgggttgcatggaagttttattctcttgttttgctggaaaccaagaggatccaaacttcctgcaacattttcttagaggagagagagaaatattaaaagagaaatgaaacaatagagtattttgggtttttaattaaattattgttaataatataacatataagaatacttttattaaaataaccatgcaacaataacactatcggtctatctgacagtttttcccccagggaagtgnnnnnnnnnnnnnnnnnnnnnnnnnnnnnnnnnnnnnnnnnnnnnnnnnnnnnnnnnnnnnnnnnnnnnnnnnnnnnnnnaacagcaatggaggaagttaacaatttttaatggaaagagcatgttagagcaaacaaatgcataagcaagactgagcagcattataattaattttcagggttttgaggctgaacataatttcattatccctcaaaaagttaccaccacatcagnnnnnnnnnnnnnncctcgtgccgaattcttnnnnnnnnnnnnnnnnnnnnnnnnnnnnnnnnnnnnnnnnnnnnnnnnnnnnnnnnnnnnnnnnnnnnnnnnnnnnnnnnnnnnnnnnnnnnnnnnnnnnnnnnnnnnnnnnnnnnnnnnnnnnnnnnnnnnnnnnnnnnnnnnnnnnnnnnnnnnnnnnnnnnnnnnnnnnnnnnnnnnnnnnnnnnnnnnnnnnnnnnnnnnnnnnnnnnnnnnnnnnnnnnnnnnnnnnnnnnnnnnnnnnnnnnnnnnnnnnnnnnnnnnnnnnnnnnnnnnnnnnnnnnnnnnnnnnnnnnnnnnnnnnnnnnnnnnnnnnnnnnnnnnnnnnnnnnnnnnnnnnnnnnnnnnnnnnnnnnnnnnnnnnnnnnnnnnnnnnnnnnnnnnnnnnnnnnnnnnnnnnnnnnnnnnnnnnnnnnnnnnnnnnnnnnnnnnnnnnnnnnnnnnnnnnnnnnnnnnnnnnnnnnnnnnnnnnnnnnnnnnnnnnnnnnnnnnnnnnnnnnnnnnnnnnnnnnnnnnnnnnnnnnnnnnnnnnnnnnnnnnnnnnnnnnnnnnnnnnnnnnnnnnnnnnnnnnnnnnnnnnnnnnnnnnnnnnnnnnnnnnnnnnnnnnnnnnnnnnnnnnnnnnnnnnnnnnnnnnnnnnnnnnnnnnnnnnnnnnnnnnnnnnnnnnnnnnnnnnnnnnnnnnnnnnnnnnnnnnnnnnnnnnnnnnnnnnnnnnnnnnnnnnnnnnnnnnnnnnnnnnnnnnntactacgtctgagtcaaccggtagaccgactatcgcacggcacagcatggtacagatanacacgagtagtaggcggcacaagtctgattggggctacac

SEQ ID NO: 134993 - DNA, 1341 bp, Homo Sapiens
  misc_feature (183)..(183): n is a, c, g, or t
  misc_feature (469)..(469): n is a, c, g, or t
atttccctttattcccccccgtggaaagtttgaagtggggcccccggaccaaaactacaaatggtccttcctgccttcctccaagcaccccagttgattcctggggctcctgagaggcaagcatcctcgggcccccaaacttcagggacggtgccccaagccgcgcctcctccccagcgccgntgctcctccccaggggctcctgattcctcctccactagatccacagctcgggctggctgtcctcgggtttccttgggcatgtggtagcgattggtggcctccagcttctcctgctccccagctgcccggtactcccgggcgagatcccgcactcgccgcttatatttgagctcctgccgctcgtgccggctcagctccacgtccccaaaaaggaactcctcatcagccagctccgcctccaggtcctcaagcttctctcgctcccgcttagccaggtactctcggncgagatttcttccgcagctcaggggaccatggccttccgggtcttcctcggccatcttgaggcgcttctgagcctcttcataagccttcttgtctgaccgttccaggacatttcgagtccgatccttgtcccgctgtcgaacccgctcagcaaaggcatcacgctcctccaggtcctgaaggcgttcacgctctgtccgttcccactcatcttccgactctggcttctctgtctgctgtttactcccccctgttttcttcttccctttctcagaagcctcttcctcctcttcttcctcacgcttcttcctgaggtgtttccgctttttacgtttcttctggaggctgcttccagccctactcacagtctcctcactgctctcttcactgtcttccagtaacctataagatcggttcttctccagcagggcccgggcctctcgctctgctgcccgagctggcttttctaccactgcctttcgtggtaccttgttccagagtctcagggcgaagtcccgggccggcccactgagatccaaggtatcagtgtctcgtaggcgctgcacgaactcctcggcagaggtgcagcgctgtgcggtaccgatcagaaactgggcgacgtgccgctcgctcagccccaacaccgagtgcagctcgtcctgaacccagcgctccagacccgccggcgtcgccatggcgactcacgctccctgctcccggccctgaagcgtcgggcagccgcgctcactgctgggccggtcagaggcctggagccctcggctggagcctcagcttcgcaagtcagctaccttgggacctctaggatcttccgacatcccaaagctgtcatcccgggaattccggaccggtcca

SEQ ID NO: 134994 - DNA, 1045 bp, Homo Sapiens
  misc_feature (943)..(943): n is a, c, g, or t
  misc_feature (989)..(989): n is a, c, g, or t
  misc_feature (1016)..(1016): n is a, c, g, or t
tttttttgaaagtaaaaaaattcattttgttttctttcacatgaggtttgttcctggcaaagcgtgtcaggctgaatacaagttccgctaaacagaagcatttccgagggcagtcctttaaatacaactttaaaatgagcctggaagtacaaaggaacaggcaaggatgggagagaaggctttgtggacagagctgccatagcccagcctttactccttaatctctagggaaattattgggggtgtaggtggggaaaggacaaagataactgcaagatattttatttataaaaagggtaactaagctgcttttcaaagaaaacaaaaagatggcaaacccagcacccagctctgaaagatctatttaaaccagcaagacaaactgacttcagctgtggcacccacagcaactaattcctggtccagaagagacagtggagaactggtgggtttgggagaagcaagcccattccccctatactgtgtctatctgcctccagcctgagtccagtccagtagtatggtaaaggagagtatggcctgagggagagggaagacagcaaacctagcagggagctaccagtctccgtttccggatacatgcccaaatccactctggggagacctgctgggccgcagggttcttgtccctgctacccagcacgtgcgtggctgaagtcatatcaaattcctgtaccaggtccccgtcgaatgccacaaagtagcgtctgagacggctgaagtctggtgtggagggtggcaagtaaagccgcaccccagtgaagatgtccagcaatacctttgtttggcacagcgtctcatcagcagctttccgcttctcccctactttcactggagaagactttgtgggcagcttctcccccaccttcatagcggaaggctttgcagtctgcatgttgcatctttgctgttggagtaccanctgggtgcagttaaatgcactgaaagctcacatctgctatcgtaangttgtacagtctatgaccctggagcancactcatgttggtccacacgtggaacacc

SEQ ID NO: 134995 - DNA, 1125 bp, Homo Sapiens
  misc_feature (260)..(270): n is a, c, g, or t
  misc_feature (373)..(988): n is a, c, g, or t
tgcctagaaaaatacatgggacgtttaggactaatgtgctgggcaatttgctacttagtgatagtaacacaatcctgaaaaagcaagcacaattattctgtactttttaaaagttttattcagcaataagaccataatttttcatatttaaggagtatgaaaaatttgtggagttttaaaagctgaatacatgtagcgttggatcaaggcacatacaagactggccaaagggcgtacaatgcactttggttttttgttgnnnnnnnnnnntcatggcaacagaaaagtgatatggtttttcaacaagtaacagctcacaattcagtaggaagctagaaggaaatgttacattacgcctcgtgccgaattcttnnnnnnnnnnnnnnnnnnnnnnnnnnnnnnnnnnnnnnnnnnnnnnnnnnnnnnnnnnnnnnnnnnnnnnnnnnnnnnnnnnnnnnnnnnnnnnnnnnnnnnnnnnnnnnnnnnnnnnnnnnnnnnnnnnnnnnnnnnnnnnnnnnnnnnnnnnnnnnnnnnnnnnnnnnnnnnnnnnnnnnnnnnnnnnnnnnnnnnnnnnnnnnnnnnnnnnnnnnnnnnnnnnnnnnnnnnnnnnnnnnnnnnnnnnnnnnnnnnnnnnnnnnnnnnnnnnnnnnnnnnnnnnnnnnnnnnnnnnnnnnnnnnnnnnnnnnnnnnnnnnnnnnnnnnnnnnnnnnnnnnnnnnnnnnnnnnnnnnnnnnnnnnnnnnnnnnnnnnnnnnnnnnnnnnnnnnnnnnnnnnnnnnnnnnnnnnnnnnnnnnnnnnnnnnnnnnnnnnnnnnnnnnnnnnnnnnnnnnnnnnnnnnnnnnnnnnnnnnnnnnnnnnnnnnnnnnnnnnnnnnnnnnnnnnnnnnnnnnnnnnnnnnnnnnnnnnnnnnnnnnnnnnnnnnnnnnnnnnnnnnnnnnnnnnnnnnnnnnnnnnnnnnnnnnnnnnnnnnnnnnnnnnnnnnnnnnnnttcgggagcgtgggcttctctagctcacgcgtaggatccagtcggtgtagtcttcgtcagctggtggtgacgatcccgttagccgacgcgcgcctatcgggactacgtctgatcaccggtaggaagattacgcatgg

SEQ ID NO: 134996 - DNA, 1575 bp, Homo Sapiens
ttttgccattagttacgtttaattttaaatataccatctttggcagcaaaaatcaagctgggctttccctctcctttataaattgcatatatttttaacatatattaacactttaaaaccgtggggtggaaagtttaaaatgccataaaataagaatcatatatgcattctttacactgtaaagcattttaccagacattagaatctgcattcagaattctttctcagaacgtaagtgttcttgaagacatatattttgtcttactaatctgtttcttccaagcactactgtactaggcatacggtaaagatatacattcaagttttaaaagtaaatactttttcctggtagtggccagggcctgcgttcctcagaccaaaaggcgcaaactggcattgctgtgatttcagaagagaagtgaaatgtataaaacgaagtaattctggggaaggaaaatgtcacaatttttcttcagtgttgtcaggcacactaacccgggaagccgtctctgggcctgaactatccaaattagtgtccgaggaagtgtgacaaatgcaggcccttccaagtttgaccctgattctcaaaggtggccaaaagccgtctctagaaacggcggtggcagcggcgtgattctgggaggtccattcaacttttaacaggtcctgggcagtgaccgggttgctgggcagtgcaaaggcatagagattggcgagaacaggcggcgatcaagcttcccagcgagggtcaaagtccagcagcttggaactagtgagccgggcttgtaggagtgaagcggctcgcgcgggcccggccggcagccgctccccagacaccggggatccggcccgactgtttcctacccacgacggcgaagacccgctacagcgcgtccacgaagccccagtactgagccaggacggggctctccctctcgatgtaggggactacgaactgctccgccagccggtgagtcagctaattaagaaagccaccttcaggatgtctttcgagaatctagcctcgaagaaagtcatgtaagagaacgcctgcatcaaaaagtcgggaggccgggcggagtcgccgttaaacgtccagggaaagccaccaggtgggccggcgaacgctcccgggccagcaggtaggctttctcgcacagcagcccccgcacccggtccataagctcgttgttctccctgcgccgggcatggttctaggtcaggaggtcctacatcatgacagccaacgcgtccatcctgcgcctccccgcaggcctttctccccgctcggtccctcccgcccggcgctgccggaagtgcgttcggccggggcggatcccggtgcggcgagggcgggactcccgggacaaggccaggcctagcctcgagctcctcgggcaggccgccgggattggtgtccggcagagcgtgagcccagcgggctggagtcgggagcgggagtgaaagaagaaaagctagagagcgaaggcaaagcccgaggagagaggaccacgtcgcggagaatctactgcacggtggcggcgctcacatcccataacttcctcgccagacagc

SEQ ID NO: 134997 - DNA, 574 bp, Homo Sapiens
  misc_feature (366)..(376): n is a, c, g, or t
ttttaggataatgctgtttattaaaaatatagtcagggagaaggaagtcagtgcatttatgcacattttacatacacatctgtagtttgaggttccattattccaacagttcatataaatcactgtttcagataaaaggaaaaaaatgctttacacaggagatcagcaattggttataggtttggaaatatgagtcggcttgtagtaaaaataaaaccacctcttccattattaaagaatgtctccttcatgcagaacaagtctttagcattaagaacttttccttgcataagaattgttaacttgaagttcttggagaacagccaatcctgttttctatatttataaatgctattttgtctggannnnnnnnnnngaggtaacaaaggaagcatcttcagtgatttgtcactaggttatcctttaccgtgtatgtcaactactgcaatgtcaaacctaagacttatacaaaagcatttctcagagaatcataaatacagatgtgtatgtaaaattgcataaatgcactgacttccttctccctgactatatttttaataaacagcattatcct

SEQ ID NO: 134998 - DNA, 643 bp, Homo Sapiens
  misc_feature (415)..(430): n is a, c, g, or t
  misc_feature (492)..(559): n is a, c, g, or t
aatcttggctgaattttatttatgagttctcagaataacaggttcaggagatgagatggaaaacataaggcaaattcctaacactgctaattaggaggctgctgataggattttaaaaattaaaaacaatgttaatagtggaacaagagccatcagaaaataaggacttagattatctactatttatagagaattgctatacaataaaaatttttatttttcacgtggcatttttgttacacggttaaacagcccaaaggtctgcttttaataacatgacaaagtgtaacaaaagccttgctttatttaaagatccagtatgacatacttaaaaaggccatttaaccttgtatcttagcttgggatgtgccagtggttcctcaactttgttgtctattggaatcattttggggannnnnnnnnnnnnnnnaatagtggtgtctgtcaggctcccactcctagacatgttaattaatgtggagtgcaagttgnnnnnnnnnnnnnnnnnnnnnnnnnnnnnnnnnnnnnnnnnnnnnnnnnnnnnnnnnnnnnnnnnnnnagctacatgcttatttagtgaagaaggcagggttgggggaagcagggtacatgttataacttgatcatatccctttaaaagaag

SEQ ID NO: 134999 - DNA, 1034 bp, Homo Sapiens
  misc_feature (708)..(708): n is a, c, g, or t
  misc_feature (742)..(742): n is a, c, g, or t
  misc_feature (793)..(793): n is a, c, g, or t
  misc_feature (817)..(817): n is a, c, g, or t
  misc_feature (839)..(840): n is a, c, g, or t
  misc_feature (865)..(865): n is a, c, g, or t
  misc_feature (873)..(873): n is a, c, g, or t
  misc_feature (883)..(883): n is a, c, g, or t
  misc_feature (892)..(892): n is a, c, g, or t
  misc_feature (1000)..(1000): n is a, c, g, or t
gcattcaaatgtgcttaacaagcagttttattcctaacagacaaaaataagaagcaataacatatccataagcagatgaattcgtatacagtgatttccatagcatgtcatattctaagataaaaagaatgaactactcatatatcatgattgatgaatgtcaaaatatgcatccctgctatgtgaaataaaaataataataaagaaaaaagaagaacatctaaataaatagggctcaggagagtactcaggtatgaaaagaggaaacatgttatatcagtcatataaaattccagaaaattgacattaatctactgttaagcaaatattgtaattcagtgattgtctggaggatggagaggccagagagaaagatagtatttattttttaagagacagggtcttactatgggacccaggctagtctcaaacttcttacctcaagcaatactcccaccctggactcccaaagtgttgggataacaggcatgagtcaccatgcccagtcttattacagctttaaaaatttaatttgaaagaactatctggatttaacattatttttgacaaataggttatgtgattttacattgactctcctaactctcatcacgccctaaggggggcaattagcctgtgtgataccaaatacttatgagccaggaagatcatttccacctgattaaattggaatgctggctggttgcnaaggcacatcactggactaagagatttctttctncctatcctcttcctcctactaattcagggatggctttttggtatgcagccnagataggctacagaaatccacaanacctttagatttagtctgacanntgactaagctacactagattcatanttatgggngggtctgacnatttctgtnactgcttggtcatcacagacatagtgactgaatcactgtgggatgctttttaaaaaagtatatccactattctgttgcagtctgcttccactactagaatgctattcnacaaattatttttgggctggcatgtgctcaactg

SEQ ID NO: 135000 - DNA, 424 bp, Homo Sapiens
  misc_feature (397)..(397): n is a, c, g, or t
ttttctcatgcatttcaaagtactttatttaaaaaacaacttgaggcagcaaaagtattaattacaattgtctgactttatctgtgtgatgtgcggggcctccctgtctcctgatctcagtaagcctacaccgaccgtttcaaataggcttagttctaaagagactgtggtttggaaaacatttccaaatagctgcagtacttgcccgagttttgcttatttgttgaaaccagaacgactgtgcggagccctccggtgacacgggccttagctgtcccagacgtctgcgtccctttgcacctgtcccgattccagcgtcgagcaggtgagcaggcgaggaaggcattgggagttccgaacagggttccagcaccgcatgttcctttcgcaagcgggngggggagggcccttcgcacatccacac

SEQ ID NO: 135001 - DNA, 1057 bp, Homo Sapiens
  misc_feature (106)..(129): n is a, c, g, or t
ccgctgtttgtctgtgtagtgtggtgattgtgtatctggtaaaataacacaggaaaaatctcaaggtaaagtttaatttaaaaactgctttagtttcatcttgaannnnnnnnnnnnnnnnnnnnnnnnttgctctagaatgatcatattgcagcatgattctcatgcatttcaaagtactttatttaaaaaacaacttgaggcagcaaaagtattaattacaattgtctgactttatctgtgtgatgtgcggggcctccctgtctcctgatctcagtaagcctacaccgaccgtttcaaataggcttagttctaaagagactgtggtttggaaaacatttccaaatagctgcagtacttgcccgagttttgcttatttgttgaaaccagaacgactgtgcggagccctccggtgacacgggccttagctgtcccagacgtctgcgtccctttgcacctgtcccgattccagcgtcgagcaggtgagcaggcgaggaaggcatggagttccgacaggttccagcacgcatgtccccttcgcaagcgggggaggccctcgcacatccacacacccgaggtagccttgcggcgggacttgggaggcagggcccgctgggagctctgctctcaggaatccccagcaaatggtttagagacgaatcaaagtgcagtgaaagtcaacgtttccttccccctgacgttgggaggggtctggaggggcaacctggcctcctaggagagtccttcagacgggacgagcagggtcacatggctgggcgcagacacactcacacgcgcacgcaggagctcgtctggagctcacgctccgcccccaggtggtgcccagcccatccctgggcagggtgtctgggagccacccctgcaaatcactgtcttctgcccaggccccccggaccagcctcctcccagctttggtgtgcggtcgctgcccaaggacagggctgccctgggcacaatgtgtccaactcgctgaggaaaagaagatacgtcattcttctaagagaaccacattgtggaaaagaaaattaattattct

SEQ ID NO: 135002 - DNA, 1239 bp, Homo Sapiens
  misc_feature (875)..(875): n is a, c, g, or t
  misc_feature (956)..(957): n is a, c, g, or t
  misc_feature (993)..(993): n is a, c, g, or t
  misc_feature (1026)..(1026): n is a, c, g, or t
  misc_feature (1047)..(1047): n is a, c, g, or t
  misc_feature (1193)..(1193): n is a, c, g, or t
  misc_feature (1205)..(1205): n is a, c, g, or t
gaaaggttaattacattaaaataaaatagcttctgatttaaattattgctcacttaggaagtataatgaatattctctggctaaggatgctcagattagaaatggtgtgacatcaatatttagtgtgtacaaaagttctaagattcaaatacaatgcaaagtttataataatcacacaaaaagtgttccttttagccaccatttagcttcacacaacgaagactggaaaatacgtggtttatttagatcttcaatataaatttgtaccacatatgttgaagtgttcctcttagctttaatgttgcagtcatttttctatgaaatactaaggagttaaggagtgcttactgaaccattactattagagggagggaagagacactgaagctccagttttaaacgacaacaaaagaatataaaatactagtataagaaaacatttaaatagtactaaatgcacaatttaaacatcagttatacactgtcattagttttcctcttaaaaaaatcagttcctgggcttttagatgtgttttctttttaaaaaaaataagcatccttctcatggtcacacaattggtccatactgacaccatttggtaacaatcctatcaaagatccacatgttcttgctctctttcaggccactccatggccagcgggagtcttaagtcctctctgcgtgttgtgtggcaggaggccatggtcccgggactctgcctagagcaggacggcctgggctacctccttgatggtggacgcagctctctccagttcttcctctgtttgttccaccgtgaccacaacccgaatgctgggaggagggagaacttctcttctttctccaagtagcgcgcctgagttaatgcaatacntctgttcatgcattgatctacaatttcctgaagcagtctgacatcttgctcgcgagacccagtgctctcttccagttgtanngtgaaggctggagaaagggatcccccacacttttantccaagaatgctttgtaagttcatgatttgtcngcactttccttcacactgcanaatactggatctcttcatgatgtgagggctcaatgctgcagcactaaatggaagtacgaagctgaatcatatcctggccgaagtcgctatggtcattaaagactgccaagataactcaatagagcagtgatctccatgtggacganaatcatacacanattgatcaaaggtcatgatcctcgcagctcccag

SEQ ID NO: 135003 - DNA, 1129 bp, Homo Sapiens
  misc_feature (1011)..(1045): n is a, c, g, or t
  misc_feature (1114)..(1114): n is a, c, g, or t
tttttttaataatcaggattataggtttatttcattgaaaaataaagcaaaacaaaccagactcatcccccaaagagtactttatcctttaaagcagcagcaatcacaaggcacatatgtacaaaatacctcaagcaaaatagaaactgaacattcaaaaagtatgtgttgtttaaaaagatgttgaagaccatttgagtaataagcacaggttataaaaatcacaattttattcttctacctttaacaagagaaggaatgatggcataatatttatatgctatattgtggcacgtataacaaacctttacaccacataacctggtttgctaaagaaaaaacaggtaaagtactgcttaaaaatggtatttttagtgctttcacatcttttgtagatatctggaatttgtaagatgaaaagaaaaattctctttttccttggcttagtaaaagcctgtagttacacgtccctaggcaaacccaccatacaaaaaaggaatacatttgagatattctaaaatataaaggatatgatttatattatgggatcaacataataaccaactctcttcctaaaacagattagaggtgaacacataagaaatgtaaagaaaggttaattacattaaaataaaatagcttctgatttaaattattgctcacttaggaagtataatgaatattctctggctaaggatgctcagattagaaatggtgtgacatcaatatttagtgtgtacgaaagttctaagattcaaatacaatgcgaagtttataataatcacacaaaaagtgttccttttagccaccatttagcttcacacaacgaagactggaaaatacgtggtttatttagatcttcaatataaatttgtaccacatatgttgaagtgttcctcttagctctaatgttgcagtcatttttctatgaaatactaaggagttaaggagtgcttactgcccggccgtaatggccgaattcccgggcatatgtccggtaccgtcgactgnnnnnnnnnnnnnnnnnnnnnnnnnnnnnnnnnnncgtccgcttcctcgcatcactgactcgctgcgctcgtcgttcggcataaaaccgcgctaggccctatantagtctagtacatgc

SEQ ID NO: 135004 - DNA, 1032 bp, Homo Sapiens
  misc_feature (32)..(32): n is a, c, g, or t
  misc_feature (34)..(34): n is a, c, g, or t
  misc_feature (80)..(80): n is a, c, g, or t
  misc_feature (94)..(94): n is a, c, g, or t
  misc_feature (181)..(181): n is a, c, g, or t
  misc_feature (198)..(198): n is a, c, g, or t
  misc_feature (290)..(290): n is a, c, g, or t
  misc_feature (309)..(309): n is a, c, g, or t
  misc_feature (320)..(320): n is a, c, g, or t
  misc_feature (323)..(323): n is a, c, g, or t
  misc_feature (368)..(368): n is a, c, g, or t
ggtcttcagtagtacacgttgcgattgagctntntgttgataacgcaccgtagcacgcattttaactcatcacacagatntcggagaggatatntatgcgacttgtcgagataccgcacacgtggtatagcaaactgactctagtcagtatgatcctaaatcgccacagataggcaccccnactgcgtgcacgtgtantggtgctcccaccctcgcacgcaccctcagtacccacggtcaccctggaagccgctacatctgggctggtagagtcgtggccctcttctccntgaatcagatgcttgtttntgatgtcggcntgntgtggaccaatgtgagaagatgagcttcctgggaattcattcgtntgcttgtggcactaactctagtcacttagggaaaatatcgttgcacctgacttcatctcatgtggctgtgggtagacctgtgcagttagtcagctcccggcctggaaattaacacaaaggaaaaacctgaccacacaggccttccctagaggccacagctgcacagccttcagggaagctgtggtctgagggtggctggtagaactgccagagagtagggcattttccatggctccagatcaccttctgaaaatgcgactatagcccctgcctattcccggggtccaactggtctgcagaccccataataccaggaagagctgggtgttctggcaccagtgaaacaatacctggttttttattttaaaccagcccatcttccccgctgcagttggaaccgttctacgtggatttgggatcaaccagcaggcctttcctgagctgttactgtgtggagtgggcgctgaggctccagccattgatgcaaagaccccaatcctgacctgaaggcgctcacaatctctccccaacggcctggtgtgaaacgcagacgcaacgcagcaggcattctccccagtggctgcctgtagagcaaatggtgcagaaatggtcactcctcaaaaagcaagccggctggagccagcccagctcccagttttgcaag

SEQ ID NO: 135005 - DNA, 1096 bp, Homo Sapiens
tttttttcgggtgaaattacttttattgatggtgagcgcaagcaggtgtgagtgactgcacctctttcagaggacacaggactgggcttaaggaagggagggccagagcgcccgccttggtggatgtaggattcgctccttattagggcgtgagtgctacattctgaaaggatttattttgggacaaggcacaagcacaggggaggcaggcaacaccagccctcaggctacactctccatttggagcagagcttcttcggcagccccaggtctcccgggatcttcctcggtgtcctgcggaggctctggctccagcgtgggctccagcgcaggctgggcttccggctgggcttctgcgctccggccaggcccaaggcgaggcggcttgaccggggtgggcggtggcgctgcagggcctttccggcccgaaagggcccttcggaggctctgtaccttctgcaatccggtgcgccgcagccgctgggccctggactccaccggctcctcgtccgagctctctccaacttcggcctccggctgctctgggcccagctcggactggtccgccgggcccaagggctctggtgccttctggaaagcgctggctgggacttcaccctcctccttgaagagcagaacgtggagcttcccgcgcgccaccagcagcccgtggttggcctccagccgctgcacctgggctgcgcggcgcaccgcgcgctcttgggcggcgttggcgtgcgagctcacgcgctccgccttggccagcagctgcgccaaggtgttgctggtggtgtcgtggctgcgactcagagcgcccaggccgctctggatgcggcgcacggaccctgccaggcctccctgccttcgagccaggcctccctgccgctcccgcagagtctccagcatggaggccagcttctccagcagggtcaccaccgtcacggcgtgcacgggaccccccgccggcgcctcgggcacaggccccggctccaacgcactctccctcatgatccctgaccgctctgctccgtctgcctgcaactgctgctgcactacggtaggggcccctcgtgccgattacaccaggcctaccata

SEQ ID NO: 135006 - DNA, 1059 bp, Homo Sapiens
  misc_feature (706)..(706): n is a, c, g, or t
  misc_feature (767)..(767): n is a, c, g, or t
  misc_feature (823)..(823): n is a, c, g, or t
  misc_feature (854)..(854): n is a, c, g, or t
  misc_feature (882)..(882): n is a, c, g, or t
  misc_feature (924)..(924): n is a, c, g, or t
  misc_feature (930)..(930): n is a, c, g, or t
  misc_feature (940)..(940): n is a, c, g, or t
  misc_feature (949)..(949): n is a, c, g, or t
  misc_feature (952)..(952): n is a, c, g, or t
  misc_feature (1020)..(1020): n is a, c, g, or t
  misc_feature (1032)..(1032): n is a, c, g, or t
tttaacttttcaggtaggcacaaaagagaggatttttatatccctttattaaatgcctactgtgtacaaggtattgtgcactaaaaaaatctgaaaataatttcctaagaacataaataactaaagacaaatgagcatatcacaagaaaatacatgtaaaattagtgaaattagaaatctatgtctcagagataaaacattcatcatttgatacaatttaagtttggaaattttaatatatttcaaattggacaagatttttcagatacatattaatgacagtagtagcagtgctcaaaaatgttaaggccttgaactccatttacattcctgcttacctcaggctgcattaagaaagagtcctgcatgtgatctcgaacctccttcaggaagcttggatggctacctacctgtttgtattcactgacacaactttgacagcaaaatcttttctgttgaccatcaatcaccagaacattatttccagcacctttactgggcaagtactctccacactgttcacagcaattcattattaaaccattggccattctatatctattaaagcagtggtcactgcacagcttatgagtcatatttttaaagctgacttcatggcgaatctcagttagtttaccacagattgtacatcttgatttatttagagctcctttagtaggattctgtttgtcttcatagagagatnaaccagatgtactacagaattcctggaaggactcacttgaatccacttgagcaacaatggntcctttcattgtagttatatcttttttacacataacacagagtttccttggagcangctgtgggagacagaagaaggcacgtggtanaacaaagaggtgagctgatccttttcgntgatacgctgtctggcccttctgtaaaggttttttgcagttngcacangtgactttanctggtttantangctgctgttggacagacggctggaaatctgtttacgagtgaggcactggtgataagagtcaccctggntgttctgatacngggaatgagctgactggaattcagata

SEQ ID NO: 135007 - DNA, 1045 bp, Homo Sapiens
  misc_feature (629)..(629): n is a, c, g, or t
  misc_feature (726)..(726): n is a, c, g, or t
  misc_feature (749)..(749): n is a, c, g, or t
  misc_feature (762)..(762): n is a, c, g, or t
  misc_feature (764)..(764): n is a, c, g, or t
  misc_feature (799)..(799): n is a, c, g, or t
  misc_feature (808)..(808): n is a, c, g, or t
  misc_feature (914)..(914): n is a, c, g, or t
  misc_feature (929)..(929): n is a, c, g, or t
  misc_feature (948)..(948): n is a, c, g, or t
  misc_feature (953)..(953): n is a, c, g, or t
  misc_feature (961)..(961): n is a, c, g, or t
  misc_feature (969)..(970): n is a, c, g, or t
  misc_feature (981)..(981): n is a, c, g, or t
  misc_feature (987)..(987): n is a, c, g, or t
  misc_feature (1019)..(1019): n is a, c, g, or t
  misc_feature (1026)..(1026): n is a, c, g, or t
tttttttaaaataaaaagacatatttctattttatttccggatgtgattttccagcaggcaaataaatacaatggggagagggggaaggagggggatccttataaattagaaacaatctcaggtggggggaaggtgggtgggctggcaggggaggtggcaggcagggagcccactgctgggcacagtgcctggctttgcaccctgtgcccccaggctctgccagctcccctcagtggctggctcggttccggggtcataaggcgctgcggtgttggtggatccggcttgctgctgtctgagccagagctcacaggtcagtcactttgttttccaccagggcggcgacctgctgcaggcggcaggccagctgcagcttctggcccacagggtcctcctccagggcactgataatctgatcatagtacctgtggatgtggttgtagagttcttgcagagcctccagacagtggggagcagaagtgtagttcccggagagctcagccaaagcagagttcatctcctggtagctcgccggagagctctggcgaatgtccgcatagtacctctccaccatctgcttgtagcgtggatctcccgggcgtagagcagtttgttcactggggaatcncggcccactttatgctccgaggtggtacaggagtcaatgaaggtctgggcgatgacagcaaggatggcgtccacattgtccgacacccgtacatcanagatgagctgtgggttcttcaanggcatcacccagnancgcagcagcagactgttggtcttccagatgtgcanggtccctgngtcctcgatgccgtgcttctctgctagctcatccagaaaggtcaacaagtacttgacggcaatggggaatgggcggttcacgctgagaatggctggaaggtgtcgntcacaacttctgcancgtgccttcaatgacaganacggntgaggtanattccggnnatggctggccntgctgntcgcctccggcagtgctgacgcacttggcccntctgtcncggtgcttaccagtgcaaa

SEQ ID NO: 135008 - DNA, 1368 bp, Homo Sapiens
  misc_feature (55)..(65): n is a, c, g, or t
  misc_feature (163)..(163): n is a, c, g, or t
  misc_feature (203)..(211): n is a, c, g, or t
  misc_feature (492)..(504): n is a, c, g, or t
  misc_feature (1078)..(1078): n is a, c, g, or t
  misc_feature (1146)..(1146): n is a, c, g, or t
  misc_feature (1159)..(1159): n is a, c, g, or t
  misc_feature (1214)..(1215): n is a, c, g, or t
  misc_feature (1226)..(1226): n is a, c, g, or t
  misc_feature (1233)..(1233): n is a, c, g, or t
  misc_feature (1241)..(1242): n is a, c, g, or t
  misc_feature (1250)..(1250): n is a, c, g, or t
  misc_feature (1269)..(1271): n is a, c, g, or t
  misc_feature (1342)..(1342): n is a, c, g, or t
cctctttggaggcttataaaattcttttaggggttattttgttccatattatgtnnnnnnnnnnnaaaaagtaaggggtccctttcccaaaaatttccccaaggttggccgttttttccccgttccggacgcttttaaaaaaggacgggcccatgccccaggnttttaaaaaggggcccccctattggggcgcccttttttcnnnnnnnnnttgggtacagggtaaagcttgggccccctcggggggaattttttaaagccggcccccccttttgtatcgggcccctttcggtgatgctgtagtagcggcccggcgttttgaggtatcttggaaacgcatagtcgtggttggcataaccaaatgttatttaatatcttaaaaagtaacacaatccaaaatggatatttcacacaacactacataaacaacatgaacacagtatcaccatagggagggactttcaaatatagacttacaaaaatccctgtccnnnnnnnnnnnnnaagttattatactaagcatgacaagtaatcatcatttacagtatggtacactgacacgataaaaaccatgttacaaatgtgctgttataaatcagtaacattagggaagacatttcatgaactgtaattatttcatatgaaatactatacaatataaacagaacatccatcttggatgacctttacagcaaccagagaccaagtaatttaaaattttttttcagtgcaaacacattttattcaaggcagtcttggctgcaaaactcctttctaacatacagtaaatcccacttgcacgtcttaattcatttaccctaatgcaatagtcacattcagtcactcagagaaagatacctgcagaattatgatccctttaaacttgacgtttaaatttaattctcttctagaacgtagtatctgtgtcaactgctctaaggactttaatttgtagctgtcaatacttgcatgaaggtgaccctagggcagctctattcctaacccagcaagtgtgcacgatactgcacagtgttctgcccttccaatgtggaaaccgtggcggtgtgtcagtatctangtgggagaatggaaaggaggacctcggaggaaaggacgtggaggagctgctgcatgtgtacttcatgnatagtttcccggnactgcagaggacagatattggaggagatctcaggtctcacatttggtactcctcnntggtggagcanggcacangttactanngacagcangcttctacctacatttcannnctcagatcacgctgctgactgaacacccatcctcctggcatgagttgtgtgtgttgtcacattgagcacantatgatacagctaactgtcagtcatc

SEQ ID NO: 135009 - DNA, 1195 bp, Homo Sapiens
  misc_feature (26)..(26): n is a, c, g, or t
  misc_feature (37)..(37): n is a, c, g, or t
  misc_feature (80)..(80): n is a, c, g, or t
  misc_feature (888)..(888): n is a, c, g, or t
  misc_feature (956)..(956): n is a, c, g, or t
  misc_feature (1017)..(1017): n is a, c, g, or t
  misc_feature (1071)..(1071): n is a, c, g, or t
  misc_feature (1080)..(1081): n is a, c, g, or t
gttttcaggcacctgaagaactcgtnttgcatttggntgtcaaagtcgccaaccaggcttccctgcctctggtggatttnatcatccagaacggtggtcacctggatgccaaggctgctgacgggaacacggctctgcactacgcagcactctacaaccagcccgactgcctcaagctgctgctgaaggggagagctttggttggcacagtaaatgaagcaggcgagacagctctggacatagccaggaagaagcaccacaaggagtgtgaggagctgctggagcaggcccaggcggggacctttgccttccctctacatgtggactactcctgggtaatttccacagagcctggctctgacagtgaggaggatgaggaagagaagcgctgcttgctgaagctcccggcccaggctcactgggccagtgggaggctggacatcagcaacaagacctatgagactgtcgccagcctgggagcagccacccctcagggcgagagtgaggactgtcccccgcccttgccagtcaaaaactcttctcggactttggtccaagggtgtgcaagacatgccagtggagatcgttctgaagtctccagcctgagttcagaggcccctgagacccctgagagcctgggcagtccagcctcctcctccagtctgatgagccccttggaacctggggatcccagccaagccccacccaactctgaaagagggcctccgagagcccccaggcacctccagacccagcctgacatccgggaccaccccttcggagatgtacctccccgtcagattcagctccgagagcactcgctcctatcggcggggggcgcggagcctgaagatggtcctcagccaggcagctctgcccagaggaacngtgcggttggatcactgaaggagatggtcaagactgggagtctccagcagttctgtgcacttttgcanactagctcttgctggccccaatgcccatgctaggcccatgttaaagtgggactgagtcaanactgggactgaacattgtctcctggttcacctcctgtccctgtgctctgtactngcctcgtgnncgatctggctcgagggcaatctataggagtcgataatcgtatcagtcaacgtcctgttgaattgtatcgtcaattccaacacaacaccggacataatgaagctgggtgctaggg

SEQ ID NO: 135010 - DNA, 718 bp, Homo Sapiens
aaactagaacattttaatacccagaaagcattcttaaagcagagactttcagatacaaggtgattcaaaacttcataaaaatatattagcttcaaactatacatttaacttaacagaatgtccattttcaatttttacaataagtagagaaacagaatcaagttttatgtagtaattcaagatatatataattgcaaataagtgaaaaatttccattttaccccaatttctcatctgaagcctcagatggcatcttgcccaccaggaacaaacacgtgaataaataatatggcataaatgtctttcaagttcccagagaactaactctaagcccatctcacatttgtcttttaagtttttttgttaaagaggagctgttcttaaagagatattccattttagtcactgctcttctcaggaaggatatgtgtgatccagtaactaaagaaagctgagattactctggcatggtcaggaggcatcgtgcaatgttctgggaacatttccagagcatgcttcaatctctcagtatcttgcaggagcagcagcgttttcatgtggtacaggatggacacgtctgagggcagcatgctgtgtgacgcgaggcggtccagcagctcctcagcggcatctgcgagggcagctgaagctgcatctctggagacaccgtcataaaaatacatttcctgtgttgacttcaaaaaatttagaatactgc

SEQ ID NO: 135011 - DNA, 631 bp, Homo Sapiens
tttgagatttcaagtgttttcatgtttatggagatcagagaaatgtgttctgtacatctttttcactgatggcaagtataaaataaaaccaaacaaaaaacccaacacatttattcaaagcaggcatttcagttaagttaaaatcctataatcaggatagccacaattccagacactccggtgcgaagtgtagatatgtcagtagccacatctggatgatgaacaagccattgactataaaaacgagaacaacagcacagtctcagcgcctttagagtgagtgaacagtatgttccaagcacttcaccatggttcacaatggcaaagcctgcagcttctccatttggagggtcacattttctactcggtttcctgcacttacaaaggccagctggcatggctgggggatgggcagagggaggaaatcaactcgtctatccagggaattgcagctgttattgcaaatggccccggagagcccattataagctgctgtgctaggctgtgtgtccctggagtgtccatcacatggcgtctccctagcccccaacccaggcccccaggatcccagagccacccgcttgagtaggactgcagagccgagtaggagaggaggaacccagggcccggt

SEQ ID NO: 135012 - DNA, 980 bp, Homo Sapiens
  misc_feature (365)..(842): n is a, c, g, or t
  misc_feature (860)..(860): n is a, c, g, or t
  misc_feature (890)..(890): n is a, c, g, or t
  misc_feature (901)..(901): n is a, c, g, or t
  misc_feature (903)..(903): n is a, c, g, or t
  misc_feature (955)..(955): n is a, c, g, or t
caactggggtagagggtgggagggatttacttttaagaggcaaaatgtgagtaaattgaaaccaagaaaacttgtttttagaatatttcgtctgaataagtacagtagccaaggaatacaaacataattgcatgtttttaaaaattccttggaggctggaaggggttaagccagaagtgcaatcaataggaattagggaatgttgtatatttatatatgtaaactttttttgtaagaaaagttggtgacaactaaaccaactttttccaaagtgcgctatgcatatttttaatgaaagatgacatgtatttgcacaaaaattctcaggcacattaaattattgtaaacctcgtgccgaattcttnnnnnnnnnnnnnnnnnnnnnnnnnnnnnnnnnnnnnnnnnnnnnnnnnnnnnnnnnnnnnnnnnnnnnnnnnnnnnnnnnnnnnnnnnnnnnnnnnnnnnnnnnnnnnnnnnnnnnnnnnnnnnnnnnnnnnnnnnnnnnnnnnnnnnnnnnnnnnnnnnnnnnnnnnnnnnnnnnnnnnnnnnnnnnnnnnnnnnnnnnnnnnnnnnnnnnnnnnnnnnnnnnnnnnnnnnnnnnnnnnnnnnnnnnnnnnnnnnnnnnnnnnnnnnnnnnnnnnnnnnnnnnnnnnnnnnnnnnnnnnnnnnnnnnnnnnnnnnnnnnnnnnnnnnnnnnnnnnnnnnnnnnnnnnnnnnnnnnnnnnnnnnnnnnnnnnnnnnnnnnnnnnnnnnnnnnnnnnnnnnnnnnnnnnnnnnnnnnnnnnnnnnnnnnnnnnnnnnnnnnnnnnnnnnnnnnnnnnnnnnnnnnnnnnnnnnnnnnnaaatcgagctaagtcagngttgcgaaactgacagactatagatacaangcgttccctgnanctcctcgtgcgcctctgttcgacctgcgcttacggaactgtcgccttccctntcggagcggcgcttccaaactagcg

SEQ ID NO: 135013 - DNA, 1022 bp, Homo Sapiens
  misc_feature (546)..(931): n is a, c, g, or t
  misc_feature (952)..(952): n is a, c, g, or t
  misc_feature (963)..(963): n is a, c, g, or t
  misc_feature (970)..(971): n is a, c, g, or t
  misc_feature (994)..(994): n is a, c, g, or t
tcattgataatgcttttattaaataccaactcgctgatgttaagatatgagcagatattaatgacttttccattctttatacaatttttctcaagtataaatgctttcctgtgcaataaggtatgagaattaattaaatgttttgtcacatttgtcacacttctgggagttttctccagtatgaattatcttatatacaatcaagtgtgacaaccgcttaaaggctttgtcacattcttcacatttctaggatttctcacccatatgatttcttttatgtctagaaaagtttggggtgttgtcaaaagcactggtcacatcttttaggtttgtatggtttctctccagtatgaattttcttatgtcgagtaaggtttgaggaccggttaaaagctttgccacattcttcacatttgtagggcttctctccagtatgaattctcttatgtttagtaagagttgaggaccagttaaaggctttaccacattcattgcatttgtaaggtttctctccagtatgaactctctcctcgtgccgaattcttnnnnnnnnnnnnnnnnnnnnnnnnnnnnnnnnnnnnnnnnnnnnnnnnnnnnnnnnnnnnnnnnnnnnnnnnnnnnnnnnnnnnnnnnnnnnnnnnnnnnnnnnnnnnnnnnnnnnnnnnnnnnnnnnnnnnnnnnnnnnnnnnnnnnnnnnnnnnnnnnnnnnnnnnnnnnnnnnnnnnnnnnnnnnnnnnnnnnnnnnnnnnnnnnnnnnnnnnnnnnnnnnnnnnnnnnnnnnnnnnnnnnnnnnnnnnnnnnnnnnnnnnnnnnnnnnnnnnnnnnnnnnnnnnnnnnnnnnnnnnnnnnnnnnnnnnnnnnnnnnnnnnnnnnnnnnnnnnnnnnnnnnnnnnnnnnnnnnnnnnnnnnnnnnnnnnnnnnnnnnnnnnnncatgtgagcaaagggcagcanaaggccagacncgtaaannggcgcgtgctgggtttttcatangctcggcccctgacgagatacaaaatcg

SEQ ID NO: 135014 - DNA, 734 bp, Homo Sapiens
ggtatgagaattaattaaatgtttttgtcacatttgtcacacttctgggagttttctccagtatgaattatcttatatacaatcaagtgtgacaaccgcttaaaggctttgtcacattcttcacatttctaggatttctcacccatatgatttcttttatgtctagaaaagtttggggtgttgtcaaaagcactgtcacatcttttaggtttgtatggtttctctccagtatgaattttcttatgttgagtaaggtttgaggactgtttaaaagctttgccacattcttcacatttgtagggcttctctccagtatgaattctcttatgtttagtaagagttgaggaccagttaaaggctttaccacattcattgcatttgtaaggtttctctccagtatgaactctcttatgttcagtaagggttgagaattccctaaaggcactgccacattcgtcacatttgtaaggttttgctccagtatgaattatcttatgtttagtaagggttgagaatacactaaaggcttttccacattcttcacatttgtatggtttctctttagtataaattctcttatgtttagtaagagttgtggaccgtttaaaggctttaccacattcttcacatttgtagggtttctctccagtatgaactatcttatgtctagtaagggttgaggactggttaaaagctttgccacattcttcacatttgtagggtttcccagtagg

SEQ ID NO: 135015 - DNA, 892 bp, Homo Sapiens
  misc_feature (76)..(96): n is a, c, g, or t
ggttttaacgacggccagtgccatgctcgaattaccctcactaaagggaataagcttgcggccgcggctgtatgcnnnnnnnnnnnnnnnnnnnnnaagttttaaaacttttctaagtttaatgttgtcactgtatgtttacatattcattggtacaatttacatcaagttttgtacttatccatttttgcaaagatatgtacacaaagatacatatccaataactgagaaacaagtgaaacttctgatctatactttcaggtttgttcgatcatgatacttctgataaggatcatcaacgtaccagtttcgcctcttccagaaggacgtcgtcattttatctaagagtttactctgggttttattgcagaatacaaattccctcaatcgcttcttccttgcaggtgtctttttccataattttttcttatagccagcctttctcctcacccaaaggccacaatgaagtcgaagaaacctatcgatgacagctttcacggtctttctcttgccttttcttgcactgaagtatgttagagatctgactggcagcttcaggacacttggaagcacgggggccattctattaaggatcactgaggtatgcccacatgtcaggtttctctcagatgtggtaagtctgggagtggaggaaacaactggtgtctgaatatgactaaaacgtccagtggacaatgcagaaataagagaggcattcttgacacagttgcggtaggttgaagatgccaaaatattcagggaccgtaggattcctgaagctgctctcactgcaccagcaaaggcagaggcagccatcttcaccttcgcctacggcggccgcccccggccgtaatggccgaattcccgggcatatgtccggtaccgtcgactg

SEQ ID NO: 135016 - DNA, 560 bp, Homo Sapiens
ggaaacagttatgttccatgttctttttctttttgggcccgacttaataatgtaatttatttgaaatacttccagaaaagtttaaggccattatacaaaaacattcatttcatcaaaacattcattgaccaccttcccataggccaacacttgacaaacctcttttcccaacacactggctgatggcttctaaaagtggctgatggcgcctacaaagaatcattcattcttttcttcaccaataaaggctgttcttggctttcctctgcttctgtctgcagcaggttcacttgctgtatcaataacgacttgagaaagcagttttaaataaacttgtaatagaaaaaattcatcatgtttaagacctataaatacagaaatatgttttacagggtaaaattgatcacaatatccttgttttcaaaaaataataaagtatataccttgtttttatattgatatatcttgtcacacagcttgaatgcacatgatatatgtacataataaaatgacatcaatgcatttactgctttcttttctgtaaacttgaaagacagatt

SEQ ID NO: 135017 - DNA, 538 bp, Homo Sapiens
tttaaaaaggcaaatgattttattgttcgataatcttttaaaaaaataagaggaaggagtaaaattaaagatgaaagatgatttttatttccttgtgacctctatatcccccttcccctgcccttggtaagtaactcttgatggagaaaggattaaagactcttatttaaccaaaaaacagagccagctaatcatttccaaaggttagtatctccctgctgacctcttctttggtttaattgaataaaactatatgttcatatatgtattaaaacaaactcagaataacatcttttcttccttagttaaggcattataagggctataactatcatccataataaccaaggcaataacttagaaagctgctttgatgggagtagaaacttacaaacaaataaattcaatagacctttgtcataaaaccggtatgaagagacaaaggtaatacccatattgttaaaggttacctcttacagtgaaaaaagatctctgagcattagcagtgagatttcatctgtaatatatataacaaaat

SEQ ID NO: 135018 - DNA, 1117 bp, Homo Sapiens
  misc_feature (840)..(860): n is a, c, g, or t
  misc_feature (1022)..(1040): n is a, c, g, or t
  misc_feature (1081)..(1081): n is a, c, g, or t
ccaccgcacacgaggaggctgcaaaaagaggagggagaaagtagaaaggagtaagaggagataagagggagagacggatactggcgcaaaaaggagcgagaaagcacgcaaaacagaagcagcaagagcacaaaagtgcagggacaggatagcaaacaggaacagagaagagacacaaaaaccagagcacgaacaaaacacggagcacagattcaagaagagagaagtatagaagaagaaacgcaaacaagaaaaagtgaagaatgcaccaagaagacatgtggcacacacaattgacggagcatctcaacaaaaaccactcaaaagagcatcaacacacatcatggaagatacagtaccaaccagcacaaatgtgagtataaaaaggatataccacaaaacagcccagacagaagatatcgcagactcgataaaatgaaaccgataaccgaaactgaaagaccgagcgagcggagtgaatgacgacagacgcagacaagcacttactaaaaaaccctctataacgagcgcatgaaacgactagcgtctaaaattgtcataacagatatccccaatggaaagccgagaaagaaaacaaaatacttattctgaaatagacacataattaataacaccaagcatgtcacatactgaataaagaaataataatcaatcagacatattggcggttaacaatttaacacaagaaacagaattgaagtgttttaaaatataataggattccttaataccagaaactgccctgtaaatccacgatcagtgccaaacgaaaaatgtcgtcttcccaattgaataatcgagcggctgctgctgtaggcnnnnnnnnnnnnnnnnnnnnnaaataaccgcatgttctaagtgtgcatttttgtcaatctttgcaacagttatttcatacagatgtttaatacttaagttattgtgctcttttctgttatgtattctgattttcaaggattacttttttgtattatcaaaaaaatacatgttaacttcgcatnnnnnnnnnnnnnnnnnnnggcatacagccgcggccgcaagcggtagtccctttagtgangttaattgcagtatgacactggccgtctttaccagc

SEQ ID NO: 135019 - DNA, 1135 bp, Homo Sapiens
  misc_feature (357)..(357): n is a, c, g, or t
  misc_feature (422)..(430): n is a, c, g, or t
accccctttcctgttttccaacggttgacttccccggatgtgccctaagtcttctttccaactgtggtttaaattttcagccggttaactacccgacccaacctttcctggttaattaaaccgggattgtaagtacccaaacctaattttcttggaatagcactccccctgaaccgttagtattcaccaaagttaattggtaaatacatgaaaatcagtacctgatttgcataaatgtgagatctttttcactagtaagtgctttaattaagacacatttttccactattagatttaatttgtcaaagcacaaaatatctttgtctctctctttaaaagtattagttttttaaattnatggtactgcccatttaaattttacttaatcagaaagctttactgtttttttctctcagcaattnnnnnnnnnctacttgaagaaaaacatttaatttttattttcaaaatgttgccataaacatacatacaacactgaatttgatcccctccattggctgtctgtgtgccaggaagcacttgtgacagaaaacatatataagcttagggtaaaagtttataaggaatcaaaatatcttccaaaaagagggggtaggggcaagaggaatcaataagtttaaaaatcataactttcattttataaaaaatagtttgaataattttcttataaatctttaatgcttacaaaagcaggaaatacatttaaaatagtctttttaacacagattcatttgtacaatgtggtcataagaaaaataactaaaatgacatttcagtagtctatattcttttctcagcaaattccacataaaatttaactaatttacaattcaaaataagattttaactgccaacaatgtcagactagttgtggttagtacctgaatatcaagctcttctccattttatatattgtaccaaaattttaaatacagctcagcagtgataggtcctaataacaatacctgactacatggttaccacccgtgactactgcattgcagcttaaaacatgctttggtcagtaaatttaaaagatatacatcaaataacaaggccagaaaagttgttttagaatttcctgaccttaagtaaactttaaatacattgacaaggc

SEQ ID NO: 135020 - DNA, 960 bp, Homo Sapiens
aactctgccgcattttagtgtacagtgatgcagactgttttgtgccctgtagaggcctcgctgtgtgcaccgccgctctgtattttagatcctcgccactccaacaggtacacatcgcggtgttcaccccaccactggtgactgtgtgtctccccctctcctggggcaactcccctgatggcctcgatttttgggccagggtcccccacaggttccctcgccgcttacgccgccttgaactcacctgtttatttcccttcggggaaccccgaagtttcctctctcccccattctccgagcttgtccccctggtgttcgatccggtttgccaggtctgatatgatggctgtgaggtcgatgttcttccggctcatagccctgcagttggtcttggcactcagccagcttcggcctccgtgatcttcaggaatgtcagggagctgctgcaggtcagccagctgagactggaactgccttcgtgccgcctcaatctctttgttcatctcatctttaaggatcttgttctctttgtcacagcgttctagctgggcagctacttcatcagcctccaatctggtcttcatcacctgactcttatagttgtcaatcatcccctcatagttcttcactgaggccttcagctgctggacctcgaggtgtgcctggttgagtttgtcctccattggagcaaagctggccttcagcctctcattctccagcttgaatgcggaatactcagcagtctgacggtgtagtctctccaccaggctatcccggtcttcccgcatcttctcctccagggtttgttgttggtttacaagatctgttacccggtcattcaggacaataatttccagctcaaggtctcccttttcttttacaacttggttgtagcggctcctcccctcgtgccgaattcaacacgcggcactgtaccttgaccgaatttgttcttccttc

SEQ ID NO: 135021 - DNA, 728 bp, Homo Sapiens
gggggggaatcccaggcccctagtcctttcccaggatttccttggaaccaagtattggcccattttcctttaccctgggggggcccgggccccaaaaagaaggtttttggaaactttttgagggcccgagggcgggccgacaagaagattgtcggggaaacggaaggaatttttagcacaccagacttttatttcacagcactgatgatagctcactccttttaaaaagcagcagccaagaaaaaggaagtagtcctcccttggggggcgtgcagctcatcttggtatgcgggcccctgctcgggtcagttcgtgggaccctttctgccagtcccttacccggctgcgcaggtctgatatgatggctgtgaggtcgatgttcttccgctcatagccctgcagttggtcttggcactcagccagcttcgcctccgtgatcttcaggatgtcagggagctgctgcaggtcagccagctgagactggaactgccttcgtgccgcctcaatctctttgttcatctcatctttaaggatcttgttctctttgtcgcagcgttctagctgtgcagccacttcatcagcctccaatcttgttttcatcacctggctcttgtagttgtctatcatcccctcgtagttcttcactgacgccttcagctgctgaacctccaagtgagcctggttgagcttgtcctccataggggcaaagctagccttgagcctctccc

SEQ ID NO: 135022 - DNA, 1301 bp, Homo Sapiens
cagtcgacggtaccggacatatgcccgggaattcggccattacggccgggcagaacacgatgaggcagacgagataagtgatgaaaacagagaaaaggtgaatgaccaggcaaaactaattgtgggaatcgttgttggtctcctccttgctgcccttgttgctggtgtcgtctactggctgtacatgaagaagtcaaagactgcatcaaaacatgtaaacaaggacctcggtaatatggaagaaaacaaaaagttagaagaaaacaatcacaaaactgaagcctaagagagaaactgtcctagttgtccagagataaaaatcatatagaccaattgaagcatgaacgtggatcgtatttaagacataaacaaagacattgacagcaattcatggttcaagtattaagcagttcattctaccaagctgtcacaggttttcagagaattatctcaagtaaaacaaatgaaatttaattacaaacaataagaacaagttttggcagccatgataataggtcatatgtagtgtatggttcaattttttttccgtaaatgtctgcactgaggatttcttttgggtttgccttttatgtaaattttttacgtagctatttttatacactgtaagctttgttctgggagttgctgttaatctgatgtataatgtaatgtttttatttcaattgtttatatggataatctgagcaggtacatttctgattctgattgctatcagcaatgccccaaactttctcataagcacctaaaacccaaaggtggcagcttgtgaagattggggacactcatattgccctaattaaaaactgtgatttttatcacaagggaggggaggccgagagtcagactgatagacaccataggagccgactctttgatatgccaccagcgaactctcagaaataaatcacagatgcatatagacacacatacataatggtactcccaaactgacaattttacctattctgaaaaagacataaaacagaatttggtagcacttacctctacagacacctgctaataaattattttctgtcaaaagaaaaaacacaagcatgtgtgagagacagtttggaaaaatcatggtcaacattcccattttcatagatcacaatgtaaatcactataattacaaattggtgttaaatcctttgggttatccactgccttaaaattatacctatttcatgtttaaaaagatatcaatcagaattggagtttttaacagtggtcattatcaaagctgtgttattttccacagaatatagaatatatatttt

SEQ ID NO: 135023 - DNA, 1229 bp, Homo Sapiens
  misc_feature (413)..(430): n is a, c, g, or t
gcaattgccaagataaatcacttttatctctataggaaagggaggatctaaaaaaaatataaattacattagtaacacaacataagaaaaagacagggacaaaaacaacagagaagtctgaatgatgctaccctaacctatttataaaaaggccctgcatcagaaattcacaatcctacccacttctaaaaatatatttagacatgtacagaagcggtgggcttgtttttaaattgtttgctttttttgtaaaaatatattaaaggtgaatagaaatcctctctcccttccccctgtccagcccccagctagggactggagatcaggggtaactatctcatggtgttctaaaccttgattactaacactcccaacccctccccaactcacttcacttagaacctgaaacattnnnnnnnnnnnnnnnnnngacatcagcctctttggaaaagcataactctgagggtaaacttgcttttcattggaaacaacacaaaacaacaaacagggggctctaagaacccaactaagctaaatgaaacccagtcaaacagaggctgggtttcagctccacagaaaacttctaacaaagaaatagagggaaaaggccggaatcggggggatttgctagcaattagctgcctttgaaagatcaagaaggggtgttaatggacaaaagggctggggacctgatcttggttacagcagtcaccgcatagtcaggcagttgcctatacaggacagaggcttctcctgctctcccctcactaccctctgctgccttgaaatccccaagataagcaagctgggcagaaacagaggggaggggagtagggactcacgtgctaggggggaggtagccaggctttttgcctttggtgtgactagatggagaactgcttggcccctggggtccccaaggtagagaaagcaaatgggctaaaggaacccctgattccaaggaaggaaagtagaggcagggctatggagaaaagaaagacaaactggagatacaaagatgacaaaagaagcctcacaaattccctgtggcctgcatggtagctattaaattccccagaagcattgggcaagctggggtgaggttggagtgggtggtacacggtggaaagggcaagggtacactccacttgggtagtgccaaatggaggtggggggatgttctccatcgagtccagattgccagtgaggcaaggcggtgggaggtgggg

SEQ ID NO: 135024 - DNA, 1057 bp, Homo Sapiens
  misc_feature (42)..(65): n is a, c, g, or t
  misc_feature (681)..(681): n is a, c, g, or t
  misc_feature (705)..(705): n is a, c, g, or t
  misc_feature (751)..(751): n is a, c, g, or t
  misc_feature (864)..(864): n is a, c, g, or t
  misc_feature (919)..(919): n is a, c, g, or t
  misc_feature (982)..(982): n is a, c, g, or t
  misc_feature (1046)..(1046): n is a, c, g, or t
acctcactaaagggaataagcttgcggccgcctgctcaggtnnnnnnnnnnnnnnnnnnnnnnnngggatttaaaaaaacatatttataattaattggtaagtgagggatgtcagacaaaccataagtagttcattgagttagtggtttagtttgaagtttcatgttacaggcagttaagtccttatttagaaaaaaggccttttatatctatttacaatatacatagttacttgcaaagaagtcagatttacaaccattttctaaaagccttttttgttgttggtttttccaaataaggatgagtagctctataaaaatgagatgcaagaaaagagagttaataagtgaggatttttctcttggagacagctactgtcatcagggagaactggaggtcgaaagtgttgctcctaggaaccacctcatattcttcttgtgctgttcacctgaatcgcgtctgccccattcctgtactctacacccgttttattcaatgatccctttgaattttaacacttcaaacacgtggtatgaagagatgtgtaaacggagactgttttcaatgccttccaagctgggacaggagaatcgggaaggggtctacagaccatggtctccactcagcttgttgaatcttcaacaatttcgaggcccatcttctgaacctctctcatgctgntagttataataacagttctgacanacacgcaccggggatgagattttcaagcgtttgatttcagattganagcgactgcacttctggcagaagagctgaccacagtacctgcaatggtgtcgtctttctgtgagtgaaaactcaacgagcagcctgagcagctgtcacaacttcatcgttcanccagtgatcagcagcagaccctcgtggcgattcttggctcgagggcaattcctanagggagtcgtataaattcgtaccatgtcatagctgttcctgtgtggaattgtatccgctacanttcacacaccaaacagcgggagcataagtgtaagctggggtgctatgagtgagtactcacatantgcgtgcgcca

SEQ ID NO: 135025 - DNA, 469 bp, Homo Sapiens
  misc_feature (206)..(270): n is a, c, g, or t
aaatttttaacttttaatagttaaaatagttaactattggtatggtaggaaatgataaagtagactagtatctgtatacattttctgcatttatgacatacctttttcttcatttttttcaatattttaattgaaaagttcatccgagtttcatctaagttttttcaaagtgatacaaatctccaaaaaattttccaatatatgtnnnnnnnnnnnnnnnnnnnnnnnnnnnnnnnnnnnnnnnnnnnnnnnnnnnnnnnnnnnnnnnnntgtatgaatccaagcgaaagcttttcttaacacctcataagaactattttttaaaaaacaggaactagcatagagtaaccatcacaggtaaagtgtaatttgttatcagccatcttttgcccatttcagtactggtagaaggctcaatggtaaaaataaaaacgggacagtcagaagatctggaagtcctgaccctttc

SEQ ID NO: 135026 - DNA, 1007 bp, Homo Sapiens
  misc_feature (135)..(146): n is a, c, g, or t
  misc_feature (512)..(534): n is a, c, g, or t
  misc_feature (565)..(830): n is a, c, g, or t
aatttttggttagaaagttctccaatccatgaagcaatcctgaaaagacagtgttttattacaaaattaggcaaatgttccgtctccatcctttctttctttttctggtatgtgtgtatgggtgtgtgtggttcnnnnnnnnnnnnctcccttctttcctttgccctcacaacacggcgagaggaagccaatcacatttttcagtttattaacctggctggcagtccaatcacactgcagagtgaaaaaggcttctggcagcccagctctgcccagctcactgggccttggaggcggtggtggtggtggacgcagccccgctggcagaggccactgtgaagagaagagttctggatggactcagccgaggtggaggtggcgtggaggctggctacaggtgcagagttccctgcagatgctgcggcggcagagaccaagctaacagggttgctggtgagcagagagaggttctgagggttcaggaacagaggggcagtcacgatgttgggggnnnnnnnnnnnnnnnnnnnnnnngcctacagccgcgcctcgttccgaattcttnnnnnnnnnnnnnnnnnnnnnnnnnnnnnnnnnnnnnnnnnnnnnnnnnnnnnnnnnnnnnnnnnnnnnnnnnnnnnnnnnnnnnnnnnnnnnnnnnnnnnnnnnnnnnnnnnnnnnnnnnnnnnnnnnnnnnnnnnnnnnnnnnnnnnnnnnnnnnnnnnnnnnnnnnnnnnnnnnnnnnnnnnnnnnnnnnnnnnnnnnnnnnnnnnnnnnnnnnnnnnnnnnnnnnnnnnnnnnnnnnnnnnnnnnnnnnnnnnnnnnnnnnntccgttctcgctcattgatcctgcgtcggtcctcggttgcggaagggtacaactcatcaaaggggtatacggtaccaaaaacagggatacgcatgaagacatgtagcacaggcacaaaaggccagaacgtaaaagccggtgtggggggtttcaaaggtcgcccctgtaagcataaaa

SEQ ID NO: 135027 - DNA, 691 bp, Homo Sapiens
  misc_feature (85)..(85): n is a, c, g, or t
  misc_feature (189)..(189): n is a, c, g, or t
cccggcgtgcggatcatatgcactgcagacagttcccgactgaagccgcagtgaggccacgcaataatggagtactcactcatangcaccccagcttacattatgctccgctcgtatgtgtgtggatgtgagcggataacaattcacacaggaacagtatgacatgatacgaattaatacgactcactntagggatttgccctcgagccaagaaatcggcacgaggtttttacagtgaaagaaacaagtttattggaaactactcctttacagagtagagtgtcctcagaaagcagggggagaaacccacagccctttgttagtatttctacttataagaaactataaggaactatagttaaacttggagtgtgcagataagctcactaaaggtaggggctattggtgttatccacgaccattaatcctgcaacctaagcttgctcatttatgttatatttaagtaatgggggctgcattcttaggacatttggacattctgcaggcttggtggaacatgttctgtatggccataaatattctgtaattataattggtggtcagcctgggatgtggttattttcaggccataagcatgaaccttgtaagtgcctagctactcactttaagatggagtcactctagtcatgttttattaaaaaccagaggccagccaggcgcagtggctggt

SEQ ID NO: 135028 - DNA, 1102 bp, Homo Sapiens
  misc_feature (682)..(682): n is a, c, g, or t
ttttgttttcaaaaaaatattgatctggatcagatgggctgataaggcccaaacacttataaaccaaagctgcaggtctctaaggtcttcagagaagctacacaaaatactatgatttcattagcatccacatatgtatcattttccacaacattttacaattctcttgtttcacagggaaggtgaactaattataatgaaatatcagtaatgtatcttaaataagtaacatgttgctggaaaaaatttaagttaaaatgcactacataatagtgcagaaacaaagtgcaggtggcaattttaagacatgaaaacaatgctgaatcagtagtgtttggagtgatacattttgcccatttttggccagtcctagaacagtactcaccacaagctgcatgccaaatatgaactaatgaggctaaaacactgaagaccaaatagaaccactctagagtctgtttcacaatgagatactcctccccgttctggaaacagcgatctgctgtagttcctatcctcctgtggcacctatccctgctacagtacctataaccagatgtcctccatcatccagcctccaggacaagtggtgctcagtgagtcacaacctgaggaacagctgctggttaccgatttgtattcctgtatatactcgacttgggtagccaggattttctcgttntgtcttgaatatatttacttctaaaaagactgttagtcttgttgggaggtgagcagaggaatgtttacttgctggagaacatagtaacaaacatcacttctcacccctcataaacagaaagcccattgtctgtgccgtgaaaagaggactaccttgtcaggaagattatacttacctctacaagaaaaaggactcgtattaaaatcgacctgtggttaccacccttagaaatgctgttttcagatattcctattcctagtcttagaggcagccatggaatatatagtctcctctgaccttggggtcaggaagaaagggaaatctattcataaaaggaatttaaattctggcctaggcctctcaaacctgcttcaagtgaaagaagatagcttaactaacaggagcctcaagttgaatgtc

SEQ ID NO: 135029 - DNA, 769 bp, Homo Sapiens
aagaattcggcacgaggtcaccctgaagaaacttccagttcctctcaaactcaggatcattctgtaaggtcctctgaagacaagacttctaaatcctcttgtaatggaacctgtggtgatagagaagacaaagagaatatcccagaggatagcagcatggtttccaaaagatttcgtttcgatgactcattacccaatccccatgaacttgtttcagatttgctctgttagcacttttttctttgactcatttggactgaatttgaaattttatatccactccagtgagattatgatttgtagcttcatatatgacatgtttatattgtaaatgcacttttccatggaataatttagggaagtgttttaatgttaaattactagttgctagcatgttatgatttcatatcctgagatagctctgcagataagaaaatatttaaatatatgacaaaaagtaaaattgtacatgtgagtttacatgttaatgaaataattcaacttcaaatgaacttaccagaatgttttgcatatcaacaaaaaaagtggcttgagttttattatagttggtgtaaactgaacacagtgaagacattggaatttaataggttctctctctaaggtgactcttataccatgcctctatcaacataatttgtttaggaaagcagtatgaagtttaagccaaaataatttctactttatagatgctcaagagacattttacagttgaaaatgtctttcaattacaaatattttgaaacttaaa

SEQ ID NO: 135030 - DNA, 1567 bp, Homo Sapiens
  misc_feature (671)..(672): n is a, c, g, or t
cccagttgggtgttttattatttatttacttgacaggtaacatcgatttggtcctacaagacaccatgctataggcttagctacttgctgttgcacaagagaactttcctgaactctcaggaagcccttgcatggcctatcgaggacagctcagtcactgaagggaaaaattccataccaaagaagagagaagaaattccataccaaagaacagacttcccccagggaacctccgtcctacagcccttcagggccatcacacatcacacacatcagaccatcatcaagaatagtgtgccatgctgggaagaacaggagtcctgaactagaaggtggtcttcaagaccatggcgataccgatttatgtatattacagatagataaattaagaggtctacatgaataaaaaatctctcaaagagggaacgaattccagttactgtcgatgccatgtgtttgtcagaaccgttgaaaacgaaggtggttttcagctggagcttgtattaaaaatagaaggtatttatacacagtgccctgcttcctctcaatggccatgaaatcctctggtgttgtcaggacccctgggcaacctcagcacccctacgggtagcccatctgcagtctgcatcttccgggagagcaggggactcgtaccggggcttttctcctgnngtcccatctcggcttggcgacgcctccggaccccagggctgcccagagggagtgacgctgctgtcagaggaataatccatacacttgcggaagatctcaggggctggtgctgcagttcagtctaccttcctccggccagtggggactttctgggaacgcttttgcgttttgggccaaggggctgctccaaggacttgtgcacggggaggcatttggactcagaaagagattctggtggccagacgggctgagcttgttggtggccgcgtgccgtcggcccgccataggggatgtggggttgctctcggggtcagaggagctgttggcagaagactcatcacccatgtactgaagctcctcgactctcttgttcagggacttgttcaggtggatgctcgcagtgggctcctcgtcatgatttttgtctttggcaggtttctttttgggtggcttcataccaatcaggacagctttcatgttctctttgccctgagattctgtgatcatgaactcatgggctttgatggctgcttccacctcctcgaactccacgatggcacactcctgggtccccacttggctgtagcggctgctgatcctccggatgtcagggggcagctctctcccaggtttgaggatccgcactgatgagatgactccaaaagtcccgaaaagcttgagcaggtgttccatcaccttctcttgcacccttccattcttctggggggtggccagagcccacagcttaggagacaagtagagatcatagaccaggagcatcttgctggggaggttctcgttggggaacagtgggacgggggtggtcctcctcaccttccggtggtcctcattcaaccggacgcgtgggtcgacgatatcccgggaattccggacc

SEQ ID NO: 135031 - DNA, 978 bp, Homo Sapiens
gttttagttctaactcaagctggttccgctgcctggtgagctcctcgacttccagctgcagactgttgatcttgtctccaaagtcctgtttgaagagccggttgtccaactcagcagattggcggcttcgctcagcctggcgcaatctttgttcaagttgtttaatggtagcagccatctgattagtcttctcttccaagcgactgtttagttcacttttctgttttactcctaagtctgaactctgcagcttaaaggcaagttcatgcttgagagctctgaggtcatccagctgctgccgaagagataccagggcatcctgcttctcacagacatccttctccagcatcttcatagccaattccatctcctgcctcatgctgatctgcatctccagttctttctcaacatccaatcgtaattgtgtctcttcttttaaatgctttcttgcttcacttagtgcttgcccttctgcagttctgtcttgcttgggacccttccgattggattccagtatgtatgaactttcctctttaactcgttccatttctttttgtaaggtaatgatcctgttgtttgcaactgcaagctcctctgtcattttagggttggatttttctaatgcatctacttttgcttggaggttgtgtaagtagcattcagatggttgttcagttcttcgaaatagttcttcttgggccagaattgcagtaatctgaccgtctccttcagtacctttactgctgttcccgtccttgcaaataattgaaaatctataattccacctgggagtccactcggtgcgattcttggccccagggccaattccctagaggggtcgtataaaattgtaccatctctatttgtttcccgtgggaattgtttccggctaaattcaaaacaacgaggcgagtaaaagttcaaccgggggtgtcaaggggtgttatcaattcattctgggccacatgccgtttcatg

SEQ ID NO: 135032 - DNA, 2246 bp, Homo Sapiens
  misc_feature (1921)..(2127): n is a, c, g, or t
  misc_feature (2145)..(2145): n is a, c, g, or t
ggtgtttacttctcagtttgttttgaagttgttggtatgttctgtcgctggtatattgttgggttgcggagaacgtagattggctgacgaggtgttgtgatttcgcggtaataccggttatgaggttcaaggccccgtcccattgtgacaacgggccctgccggagtgtgccgtttccgagtttgagtcccggttcagggtcttcccaacaggaaaattgaacccagtttctccggtgacttgcaactcatccagttatcacctgtaagttcaagcaagatattggggaagtcattcattataacccgctttgctaaaattaaagcaaatgaaaggctgtctgaaaatgcaaactactgatcaagaataaaatcagcaacagcaaacagaccttaaattacaaatgtaatttaatacatgtacattttaaaatcaatccctgttatcaaagataaattcagagtttaaatctctttcccaggttcagtgctgtgcaagggttctaattccaaatacttatgattttatcaccttttctaagagaaaatgtttgcctgttaactttttaccttccttgctcttggtctcagcttttcagtttgaataaacacagaaaggcaattttcagcatttcaaaaaatgtactttcctcttagtcattcaaataattacagttatttttagatctcaaagtttcaaaaaaagcagctcaatttccctttaaatatattactagatattttttggtgttgtatatgttgttctattcttattttaggcactgtaattattcacaacattacaatgactctatatctaacctatgcaacaattataatcttaataccttctaaggtattatttgattttgtgtattatattactattgaatttttccttcaagataaatggttggaagagaattttaaagccctgcagcacttttgctttgagtagtgttaatacatattttctgtcatgcttaatatttaaacttctgaaataggaagacaagaggcattggaagctgcaaatttcctcaaactacattctactccaactccaatttattttgttcaacattaaatatttttctttacaaaaacaagtatatcttaggctaatttttaaaaacagaatttctgctctataataacacagctaaagggaaataacttttcaatttcagctgcactagaactatgcaaaactaagttaaagtaaaccggacaacaattttaataacttttggttttgttttctttttactctatctttagaatgatataccttacattctaacagttcaacaaaggcttaaaattctagaggttgaaaaccaccaggctacctcctgcacaactgtcaataagacaacaacattttatttgcccccatacattcgttcaatgtctttgaggtaatggttcctcagctccttccttttcagtttgaaagcatcagttaccaaaccagtttcaggggtccatggctctgggcttaatcgaaccttgattggaatttcaaatcgctccaatttcatggcatttgcagcttctcgaatttctttcagtatttcagcttccatagcaggattattgcagatatcaacccaagttccttctacccctttctgttgtgccaaaagtgtcaaccttttctggttaggaaccacaaaactgatcacataggactgatcacttttggcaaaagcacagatgttgtcaataagtggacaattcttcagtgcagcttctactttcccaagagatacatactctcctgcttgtaacttcactagatctttcttacgatctataatctgtaaacatccatcgggatggaattctccaatatcaccagtgcaaaaccacctttgtccattttcatccacagaataatccctcgtgccgaattcttnnnnnnnnnnnnnnnnnnnnnnnnnnnnnnnnnnnnnnnnnnnnnnnnnnnnnnnnnnnnnnnnnnnnnnnnnnnnnnnnnnnnnnnnnnnnnnnnnnnnnnnnnnnnnnnnnnnnnnnnnnnnnnnnnnnnnnnnnnnnnnnnnnnnnnnnnnnnnnnnnnnnnnnnnnnnnnnnnnnnnnnnnnnnnnnnnnnnnnnnnnnnnnnagctgcattatgaatcgncaacggcggggaaagcggtttgcgtaatggcgctctccgctcctcgctcatgacccctggctcgtcgttcgctgccggacgtacactcatcaaggcgtatc

SEQ ID NO: 135033 - DNA, 1072 bp, Homo Sapiens
  misc_feature (417)..(430): n is a, c, g, or t
  misc_feature (448)..(924): n is a, c, g, or t
  misc_feature (1024)..(1024): n is a, c, g, or t
caaaggtatgctaagaatgaatgaatgcaggatgtttttgaaaaaaagtaaatattatatcctatattatgattgtcatgacacaaccaaatggctgttttcagttttatttgttgcattcaaaatccactgtatatttaagcatacatgacaaagaacacaaccattcttcctaaaacaataaagatactatccttagagttcacagttctacaacaactttacattaaatgttcaaaacattgtacaaccacagatatttgtgaacagtcttgagagctgtattttggtacattaaggcagcttcagccaacattttaagagattctgaatatttgttacaacacaggacaagtttgatatttgaatacttgaggtctcaagaaatattaaatgccacctatcacaccccatccnnnnnnnnnnnnnncctcgtgccgaattcttnnnnnnnnnnnnnnnnnnnnnnnnnnnnnnnnnnnnnnnnnnnnnnnnnnnnnnnnnnnnnnnnnnnnnnnnnnnnnnnnnnnnnnnnnnnnnnnnnnnnnnnnnnnnnnnnnnnnnnnnnnnnnnnnnnnnnnnnnnnnnnnnnnnnnnnnnnnnnnnnnnnnnnnnnnnnnnnnnnnnnnnnnnnnnnnnnnnnnnnnnnnnnnnnnnnnnnnnnnnnnnnnnnnnnnnnnnnnnnnnnnnnnnnnnnnnnnnnnnnnnnnnnnnnnnnnnnnnnnnnnnnnnnnnnnnnnnnnnnnnnnnnnnnnnnnnnnnnnnnnnnnnnnnnnnnnnnnnnnnnnnnnnnnnnnnnnnnnnnnnnnnnnnnnnnnnnnnnnnnnnnnnnnnnnnnnnnnnnnnnnnnnnnnnnnnnnnnnnnnnnnnnnnnnnnnnnnnnnnnnnnnnnnnnnnnnnnnnnnnnnnnnnnnnnnnnnnnnnaaatcgagctaagtcagagtggcgaaccgacagatataagatacagcgttcccctggagtcctcggcgctcctgttcgacctgcgttacggaactgtcgnctctcctcgggagctgggctttcaagtcagcgtagtaccagtcgggta

SEQ ID NO: 135034 - DNA, 929 bp, Homo Sapiens
ttttgttgaatcttttactgatctggattttccattcttgctatggctgcctcttgtaacacaattaggagaaggaaggtaggagaaaataaagtagggaaaagaacatacagtggtttgggtggaacacatttttacaagaattgagtcagttatactccagaaatgaccaagagaaagttggtctgaatcatggaaaaagggcagaacctcaaagaaccagtccctcaaccctacccactcattttttatcctgagcatggacaactaacaactacaaaatcagaaatagaattgagtagagtatgtatatgtgtgtttggagaaggtggggaagaaaaggtagggaaaaccaaagtagaagatactatgcttgtgtaagactttctatctaagcccaagtacaaatatagtttgaaaattgaagatattaaagtgattggaagacagagaagaaaaagacagtaagtagaaatttaaggcagaataacaaacatgatgctctgtcacaccccccacccacccactaccatgcttcaatcacccaaatggtacgaaaccaccaaaaaattcaactgccctacccattttccagcctctaacagctgtttatcattgaccccattttatattttcctggcactggctgttaaatttaatgcccttgccaaacctttcccagtcccaatgacaaagtgttctgtcatgatcacttgtccctcattccaaggacaaagtagagaacagctggtttaaaatggaggaaaggtacaaggacttcccagggcccctctagtaaaaagggaaaaccaatcattacttaaagccaaatactatttgggaccctgaatgaagactgttaaaacagcgggtccccaccccggccgtaatggccgaattcccgggcatatgtccggtaccgtcgactg

SEQ ID NO: 135035 - DNA, 1183 bp, Homo Sapiens
  misc_feature (125)..(133): n is a, c, g, or t
  misc_feature (157)..(234): n is a, c, g, or t
  misc_feature (296)..(304): n is a, c, g, or t
ccccgaaaaaagaaggtttttcttctcccgcaaagaattccccccagtaggaacggtttttttcccaaccccagagagttggtttaaaagaggggggacaaggcccaaagagttttaaaaaaagnnnnnnnnnaataggggcgccctttttttcacnnnnnnnnnnnnnnnnnnnnnnnnnnnnnnnnnnnnnnnnnnnnnnnnnnnnnnnnnnnnnnnnnnnnnnnnnnnnnnaaacctagacccccattggagggtattttcatagatggtcggcgtggtgtggggagtgtgtnnnnnnnnnttgtggttgtttttgttttggccgcaaaccacaagtgtttattgcagaaatctggccaacattccaattgcagggccccagcacagggctgggcaggtgagatagggaggggtggaggaagtaatctggcccagggcctcagagctgtgagatgatattgggtgccaggctgcaggtgaggcctgtgccatctggttccacattcagggccttcactatgccatcctgtaccaccatggagaacctcttgagacgtcgattcccaaagatggacaccagcgaatcatctagtaataagtctgtctccttcccaaaggccccagtgggatcagccaggagccgaaccttgccttccgccttgtgggctcggccccactcgccagtcacaaaggcatcattaacactcagacaggccaccacctggactcccttggccttcagagcctcagcctgctccacaaaccctggcaggtgtgtcttggaacatccaggggtgaaggccccaggaactccaaacagcacacccttcttgcccttgaacagctctgccaggttcaccttgttccctggctccccttcaaacacctccactgctgggatggcatctcccaccttgattggggccatggctgcagcggctctgctgaaactgcggaccccgccagacgcccactctccttcactgcaccgtcttgctgccgctgccgcagactgaccgccggccccaccgacgagtatatagcccgctgagcgtctcagggcgcacacgccagctagtcccatacccgccccacggccacttccactccgcctcctggctggtgccaccgcagcaggcggggcaccgctagccctcgtgccgaattcgccacccaggcc

SEQ ID NO: 135036 - DNA, 871 bp, Homo Sapiens
ggggcccgcaaaacccacaaagtgtttattgccagaaaatctggcccaccattccaatttgcagggcccccagcacagggctgggcaggtgagataggaggggtggaggaaagtaatctggcccagggcctcagagctgtgagatgatattgggtgccaggctgcaggtgaggcctgtgccatctggttccacattcagggccttcactatgccatcctgtaccaccatggagaacctcttgagacgtcgattcccaaagatggacaccagcgaatcatctagtaataagtctgtctccttcccaaaggccccagtgggatcagccaggagccgaaccttgccttccgccttgtgggctcggccccactcgccagtcacaaaggcatcattaacactcagacaggccaccacctggactcccttggccttcagagcctcagcctgctccacaaaccctggcaggtgtgtcttggaacatccaggggtgaaggccccaggaactccaaacagcacacccttcttgcccttgaacagctctgccaggttcaccttgttccctggctccccttcaaacacctccactgctgggatggcatctcccaccttgattggggccatggctgcagcggctctgctgaaactgcggaccccgccagacgcccactctccttcactgcaccgtcttgctgccgctgccgcagactgaccgccggccccaccgacgagtatatagcccgctgagcgtctcagggcgcacacgccagctagtcccatacccgccccacggccacttccactccgcctcctggctggtgccaccgcagcaggcggggcaccgctagccctcgtgccgaattcgccacccaggcc

SEQ ID NO: 135037 - DNA, 1226 bp, Homo Sapiens
  misc_feature (1029)..(1029): n is a, c, g, or t
  misc_feature (1048)..(1048): n is a, c, g, or t
ttacccgggatatcgtcgacccacgcgtccggtgggtatctacaatggcaacatcaatactgagatgccgaggcagccaaaaaagtttcagaaagggcgaaaggacaatgactcccatgtgtatgcagtcatcgaggacaccatggtatatgggcatctgctacaggattccagcggctccttcctgcagccagaggtggacacctaccggccgttccagggcaccatgggggtctgtcctccctccccacccaccatatgctccagggccccaactgcaaagttggccactgaggagccacctcctcgctcccctcctgagtctgagagtgacccgtacaccttctcccatcccaacaatggggatgtaagcagcaaggacacagacattcccttactgaacactcaggagcccatggagccagcagaataacttgatccattccagacgctttgctgagtttcataaagcagggcactgagacacccgtccgtgttcctaaccagaaatcctaaagaagaggaattatacagaaggaacagcaggaggttttcctggacaccgccaacttcacattgctcagtggactcattctaagggcaagacattgaaaatgatgaattccaatctggatacagtcatgacagctcatgtgctcctcaacttaggctgtgcggttagccagcctgtaatgagaggagagaggcctgagtcacctagcatagggttgcagcaagccctggattcagagtgttaaacagaggcttgccctcttcaggacaacagttccaattccaaggagcctacctgaggtccctactctcactggggtccccaggatgaaaacgacaatgtgcctttttattattatttatttggtggtcctgtgttatttaagagatcaaatgtataaccacctagctcttttcacctgacttagtaataactcatactaactggtttggatgcctgggttgtgacttctactgaccgctagataaacgtgtgcctgtcccccaggtggtggngaataaatttacaatctgntccaaccagaaaagaatgtgtgtggtttgagcagcattgacacatatctgcttttgataagagacttcctgattctctaggtcggttccgtggttatcccattgtggaaattcatcttggatcccattgtcctatagtcctagcaataagagaaatttcctcaagtttccatgtgcgg

SEQ ID NO: 135038 - DNA, 985 bp, Homo Sapiens
  misc_feature (705)..(705): n is a, c, g, or t
  misc_feature (737)..(737): n is a, c, g, or t
  misc_feature (825)..(825): n is a, c, g, or t
tttttgcactggacaataactttttattttttatagtaagaagtcgatgtaattaacattccattttaaatgaattcaagtatatcaacataaacatatgccaagacatagctttgatgtcaaataccatacgttctggttcacacattgttcatatattgacccaaaaaactgaaatacgatccaatggcagatccgcctgcaaggaaggtgattcagttttcactgattaagctttatgttcatcagattaattgctcgcaatagaggacaccctacaaaaaattattctccttatccttcgtcttgtctttgcaaacaggactttcagacacagaacgccccagaagtatttcgaaacagttacctctcctaagaggagctgctgaaagaatttgttactaaacatgcttcgtgtatattctggagcaagctctcacgcctaacagaaacaagagctacttgatgtgagacactttgtcacttaagtgtgataattgccacaacttcggagtccgagtaacttggaagacagcccctctgggggatggcacacttttctctctgcagtcatttcggcttcacaaaatacctcaacggtagagaaacactgggcccaccctttccaggagcagccggtatagaagaatccgcggagcacagagggttggggagcggaggccccacaggagaaggtcagccgancagggatcgcctgagacaacttgggtcctccnagggacacatgggaggagacgtgggagaaagtctaactgagaggcgcggactttgcacagcgggaacagcttggggctgaagcagcanggatacggctactcagcgtcggaagagaagaggtacgacgggacgcaacgctgcaggcgctcgtgcgattcttggccgaggcaatcctataggagtcgataatcgtacatgtcaacgttctggtgaatgtatcgccacatccaaacaacagccgagcaag

SEQ ID NO: 135039 - DNA, 972 bp, Homo Sapiens
  misc_feature (676)..(676): n is a, c, g, or t
  misc_feature (717)..(717): n is a, c, g, or t
  misc_feature (826)..(826): n is a, c, g, or t
  misc_feature (843)..(843): n is a, c, g, or t
  misc_feature (847)..(847): n is a, c, g, or t
  misc_feature (850)..(850): n is a, c, g, or t
  misc_feature (906)..(906): n is a, c, g, or t
  misc_feature (909)..(909): n is a, c, g, or t
  misc_feature (919)..(919): n is a, c, g, or t
  misc_feature (923)..(923): n is a, c, g, or t
ttttttagcaggcaacacaacctttagtataagttacagcctcacactggctcctagcccatgggagcctccagatgggtctatgatattagtccccagatgttcatctcttgggctgggggtactcctcagagctaagtccaccgtggcacccagtccattccagaccactgtgcaaactcagccctcattacttaccagggttttctggccaacctgtgacttggcccccaccccaggtagcttagctccagactctggtatgtgatcttggtaagccaccttcctctctgggcctgtttctccatttgacttgattaggctggactccaacctaggtaccttggcagtacagccagctacttgcatgggagtcaggccaggggtgtcattgaccttgagctcttgcctttcttgaaacttaattcccccaacttatacacacaaacgatgactaggggttatgggaacagttgactctggaccacagagtgaatatcctgagcccctgtcaaatgacggagcatggggtcatccagcatgagtcactgatggtccatatctggggagactgtggcgtctgcacaagtcctggtcctctacagcttcccaatataaacctgcacaggctgaagtgttctgctcctacagccgaatgtccttagtgttctcgctnacagcggcgtggactctgtccgcctagagtcctcactgctngccacacatcttctatcctctgcatgtcagttctgtcggatctgcgcaggcccagcctgcggcgagcggggtggcaggctgggggcatggtggcttggatctcgggcangcgtcgagctctgccanggantanagacgggtcaggcactgttagcactggcacggcgggtacttgtagcatgttatgcnttnaggtgtgcantgangtcacgagcggagatataaggtgcggttactgaatggagaacacagcga

SEQ ID NO: 135040 - DNA, 1313 bp, Homo Sapiens
  misc_feature (22)..(22): n is a, c, g, or t
acacccaggttgttcaaatctnccaggcccgcagaaaggcagggtccagaagatttggttctgttggtggctccattcacaaacacatcctgagtgctgtgcagccccatctagctcggcaaggagctgagacaccaccctgtccatcactcctccagaatctccacttcgccccccggcttgggcccaaagagtccagttcatcaaagaagataatgcatggagctgcagccctggccctggcaaacacttcccgcacattctcctcactttggcccacatacatgttaatgagctctggccccttcacgctgaggaaggtaaggctgcactcagtggctactgccttggccagaagggttttgccggtgcccgggggcccatggagcagaaggcttgagcgtttcaggcccaggctcagtagctcagggtgctccagggggagctgaatggtctcccaggatctctttttttcacctcttgcagcccacccacatcatgccaggacactgaggggatcttgggggctccaacggcctgggagtgagctgtctgcagttgctccagtgcctgcccaaagtcctcagccaggagaggaaagccggcagcacacagctccccctcatcctcctcagtcaagccacctgccaaacctgagttcttgatcctggtgcaggctgcccggctgctgtgggtcagaagggcatagagatcccctaccacaaagcctgcacaccgccgtgctagctgtgccaagttcacctcctggcccaggggaaggtgggcagtgagggcccgcaggatgctgagccgctgcccctctgacagagcaggcacctcgagctcatgaggaaatgctgtctgcacatcagcaggcaggtcctgggcccggcttgtggtggccacaaccatgaggggagggcagctgttgagggggtcctcattgaggaggaggtgacgcagcacagccatcacacgggcatcctcacccagcccatcacggtcccggcccagaaggtccacagctgtgagcaacaggactgcaggccggcaacggcgggcccgggagaagatggcctgcagttttgtctccacagccccactactttctgcacagaggctggagcagggcaccttcagtaagtggagcccaaggtgactacaggcagcagcaactactgtggtcttcccacagcctggggggccccgtagaaggacactgctagttcctgtcagcagggcaccccctggctggaggcgaggttcagcctcgtgccgaatttaacacccaggcctcgtactgaccaatagtt

SEQ ID NO: 135041 - DNA, 1124 bp, Homo Sapiens
  misc_feature (509)..(517): n is a, c, g, or t
  misc_feature (554)..(571): n is a, c, g, or t
  misc_feature (590)..(998): n is a, c, g, or t
  misc_feature (1003)..(1003): n is a, c, g, or t
  misc_feature (1011)..(1011): n is a, c, g, or t
  misc_feature (1073)..(1073): n is a, c, g, or t
aaccaaaaggtacaaaaggcataatcggaaatagagactacatacttgagtttatggggtttgtgttgtttggaggttcaaagcttgcaagtgtttatttattttcaagagggaaagtggtctgtactgctttcatccttgccactgtcttgcttttattttttactctcccactgagcaagcgtctgtggtcctatggtatcaaccagtatctttatagcaataatttctttaattccctttttctctctctttccaattatttaaccagttacttccacctggacatacgataggaaattcaaactcaaaatatgaaaattgatcttaataactctcccttcatatcttttcacctatttccagtccttatcatagttgataaaaacctcagactcatccagaaagctatatgatgcactagtataaaaaacaaagatattcaaactgcttgggttcaatatggtatacaatttgcctagctgttactgaaccttctatgcataacnnnnnnnnncctctgtgcaattggaataataaaaatactactcccnnnnnnnnnnnnnnnnnngcctcgtgccgaattcttnnnnnnnnnnnnnnnnnnnnnnnnnnnnnnnnnnnnnnnnnnnnnnnnnnnnnnnnnnnnnnnnnnnnnnnnnnnnnnnnnnnnnnnnnnnnnnnnnnnnnnnnnnnnnnnnnnnnnnnnnnnnnnnnnnnnnnnnnnnnnnnnnnnnnnnnnnnnnnnnnnnnnnnnnnnnnnnnnnnnnnnnnnnnnnnnnnnnnnnnnnnnnnnnnnnnnnnnnnnnnnnnnnnnnnnnnnnnnnnnnnnnnnnnnnnnnnnnnnnnnnnnnnnnnnnnnnnnnnnnnnnnnnnnnnnnnnnnnnnnnnnnnnnnnnnnnnnnnnnnnnnnnnnnnnnnnnnnnnnnnnnnnnnnnnnnnnnnnnnnnnnnnnnnnnnnnnnnnnnnnnnnnnnnnnnnnnnnnnnnnnnnnnnnnaacanagggcaangatcgtaaaagggcgccgtgctggcgtttttcatagggtccgccccctgacgagatcacaanatcgagctcagtcagaggtgcgaaccgacagactatagatcaagcgttccc

SEQ ID NO: 135042 - DNA, 1966 bp, Homo Sapiens
  misc_feature (1681)..(1681): n is a, c, g, or t
  misc_feature (1686)..(1686): n is a, c, g, or t
  misc_feature (1706)..(1706): n is a, c, g, or t
  misc_feature (1754)..(1754): n is a, c, g, or t
  misc_feature (1782)..(1782): n is a, c, g, or t
  misc_feature (1808)..(1809): n is a, c, g, or t
  misc_feature (1836)..(1836): n is a, c, g, or t
  misc_feature (1875)..(1875): n is a, c, g, or t
  misc_feature (1889)..(1889): n is a, c, g, or t
  misc_feature (1893)..(1893): n is a, c, g, or t
ggattggacggctccccccctgtgggtcccaacagcatgggctgctccaatcccactgcctcccccagatcttcagagttgggtacaccagactttcaggggctggcaaagctgcaggaactgtgcagcttaggtgaaccctggattctgcaagccccagtggagttttttctcagctttctggaaccacaggccagagctgccggggcaatggggctcccagctttggtaaggctgttggcattaagtggcacccggtggctggaggggtctcccagggaggacggagcctgccccacactctcccacagtttcctggagtgctagaattggggttctcccacgcaggctcagaaaggcaccaggagttcctcctcttgctcaaaggacacactccctcctcccaggtcctccaagtggccaaaacactcagtggcctggaggggcaggagaggcaacaggactcctccaggagggcccgagtcactggggagccagggtgtccccggacccacctttcggccggcagatagtcatcggggtcgggctgctggacaggggtgagaagaggggccgcagcgtccccgagaaggggatctcgggaaagatgaatagcagtgacccatcggtggcactgtagaaagagagatgtccagcctcgtagtccagaaagatccccacgcgcctgggtgggtcccggagtggagccaaggcccgttccgaggaattgtaatagctccccaggaagaccaggatccagaagccgttgcccgcggacagctcgcccttctccttcctgttcacgttctccctgcacacccccagggcccagctggtgcggtccccaacctccacctcccagtagtggcggcctgaggtgaagcgctcctggcccagcacgcaggggccggggtcaaagcgctctgggctgtccggcagggcctgccgtaggtccccccgctgcacgctccgcctgtcttcagacaggatcagctcagggttggcggtgtccgggtccaaggtcacgtcccctcgaaacctccgcagtgtctctaccagtcccgggaccctgcacacggtcctcagctccataggcacaacttctgggggctgcagcttcacatcctggaccctgcgcagggcgtccttgatgtcctatgtggggaggagaaacagcacactcggtgtcagtgaccatcgcttgctcctggagtcccctccccgcccctggagcctcgccccgtccccctctcctacatttgagcgtcaggcagcaaaaacacacacagggggccataaaccacccgcagcaaggctcagacacaggaatgctggacagaggctctgacatgtgtgccaggaggcatcaccaatggggtgcagcccagccctgcggaccaaggcccacttctgcctgacacttggatgtagggcatctggctgttggctcactcacccagagccccaagtgggcgcctctgggtgccaaggacaggacaggcacacatcccagccttcagcataggggcacctccaccccagctggagcccaaccctgtggttgcactgcttcctctcccagctccacctgccctgcaggctccctgctcagccccactcttgggcgtgcgtccttcctgtgtcactgcctgatacgtgatagcatctgactccatgttanggccngaattttgtgtcatccgcanatccgtatgtttgagccagaactcaggacttcagactgactattaganaaagggcttttaagaggaatcatagtanatgaggcatagggtgggtgcatccannatactgagtctcatagaggggcgacangcacagcaccacagaggggagacttgtgagatcaggaangaaaggatctacangccnagagatagctcaggggaacagcctcgtgcggattctgctcgagggcaattcctaagtgatcgataattcgtac

SEQ ID NO: 135043 - DNA, 1018 bp, Homo Sapiens
cgcgaccgccggggacgagcttggaggaaaaggaaccgggagccgcccacccgggggcgctctccggacccccagggtcctagcgcgcggcccttaccgagcctgggcgcccggatttcggcagcggatcgcctttccgggttggcggcccgcctgattgggaacagccggccggttgccgggggaacgcgggagtcgggcccgacctgagccacgcgggcttggtgcccacctgtgcgcgccgcctgcgaagaaggaacggtctagggagaaggcgccgccggccgcccccgtccccaccgcggccgtcgctggagagttcgagccgcctagcgcccctggagctccccaaccatgaagcccaacttctccctgcgactgcggatcttcaacctcaactgctggggcattccgtacttgagcaagcaccgggccgaccgcatgaggcgcctgggagactttctgaaccaggagagcttcgacctggctttgctggaggaggtgtggagtgagcaggacttccagtacctgagacagaagctgtcacctacctacccagctgcacaccacttccggagcggaatcattggcagtggcctctgtgtcttctccaaacatccaatccaggagcttacccagcacatctacactctcaatggctacccctacatgatccatcatggtgacttggttcagtgggaaggctgtggggctgctggtgctccatctaagtggcatggtgctcaacgcctatgttgacccatctccatgccgaatacaatcgacaggaggacatctaccttagcacatcgtgtggcccaagcttgggaattggcccagttcatccaccaagatcaagaaggcagacgtggttctgttgtgtggagacctcaaacatgcacccaagaagacctgggctgctgcctgctgaaggagtggacagggcttcatgatgcctatcttgaaactcgggacttcaagggactctgaggaaggcaacacaatggtacccaagacc

SEQ ID NO: 135044 - DNA, 1446 bp, Homo Sapiens
  misc_feature (406)..(511): n is a, c, g, or t
  misc_feature (1278)..(1278): n is a, c, g, or t
  misc_feature (1290)..(1290): n is a, c, g, or t
  misc_feature (1326)..(1326): n is a, c, g, or t
  misc_feature (1372)..(1372): n is a, c, g, or t
tgtacgagacgcgacgaacgtgtaggacggccgccgaaggggacgacgtggtaggtacgggcacccacgcgcccgcgaagacgaagtgagaccagctacagacgagcggtatataacgtccttgagggaagcgtagagcgccggtgatgttaatgggcctcctcggccctggatggagggtgcggtctctaccagactagagaagcacacgaaccagcgtacacttgtcttctcacataccacacaggtatgttttttcgtatgtcctctcccaccgcggttctgttttatatatagacagtcgcgtctcagttagagtagcgccgcccattcaatcaacatcagaacagtaagagatgacatagggtctggcattggtgaggtattgtgtgaggcgcactgtgannnnnnnnnnnnnnnnnnnnnnnnnnnnnnnnnnnnnnnnnnnnnnnnnnnnnnnnnnnnnnnnnnnnnnnnnnnnnnnnnnnnnnnnnnnnnnnnnnnnnnnnnngttgtaaaaaaaaccaagttttttttctttcctaatagctagttccaatgatgttaattacccgccctgagctgaaataacagtagacaaagatagaagctagcctctggttttacaaagcctttgtataagtcctctctgtcttttctgtccatgccagggaaatgtattgctggtgctagagggagaggaaacgtggacggccaagaacagggcggcacagtcctctgggctggaggcctgtgttccttcccataagcagggcctgtggggtgtatggggcagaacataggcctccacaccaaactgacagcagagaaaagccaggcaacctgttcaatcgccccagcagtgacctgggttctatgtgtgggagtgaactgctgcggccctggagcgactgctcccagccttggggctgatgtggtctagaaggacacctcgccacacagtggcagggccaggaccctggccaggcagagaggttgggtgggtggaggactatgctacgctgtacttgactcagggaagaagtcttgatggggactctttgtggactctgcccccaggggctggagcagccggaaggagcaggccttgggcagcaggctccacgttcctgctcatcgggagcccccaggaatctgtctgttgtccctgggcactcacagcaaaagaacccgcttccctactctggagggtgctggggtcccagcagcaagcatggctcccttggtctctcagtgatcgtgatcaggctctcctangggtatgcacanagctctgcacacaggtagccagcactcagggatcanaactggtaactgataaactcggcgatctggctccagcaatcctaangagcgataatcggacagcaactttctggtgatgtttcgacatcaaaaaagacggagaaatgtagcggggcataa

SEQ ID NO: 135045 - DNA, 1287 bp, Homo Sapiens
aagttttccttgcttggcaaccatctttttaattatctatttttatactgtatccaggctatgctgggtgtggatggctaactcgcatatagaaaatatcaagcatcacatctggaagaatcacaaacgagacaatgaacttctcaatcagtacatcaacagtcaaggtaagcaagaaaaggactttaccaagaaactaacatttacactttctgacggaactgaaatacactgaattacaggcatattcactgaaacaacaaaaaaaattctgtccatgtaaaggctatattttttacccccaaaaaagtgtttcaattctgatactcacaccacaactggttaagaaaataaagcgcagtgtttagcaactgagcatcctaactaccgtaagaggcactctgtgctcaccccttcctggcaaccgctgaggtcagcaaggccaggagcaaggagagcctcctatttttcaacacaagctgctgccgtctccttattaaagccccggatggagagatcatagaccacttcctctactttcttcacgtcatatttcaatccgtcgtagcgcttcctcagggagtcatttttcaggttgagaaggcgaaaaccggaatccagctcattgatgaaggtggagatgtggaggggtcgggagtagtctccagcagtcacgctgttgacagacagcctcgacagttcactggcaagaattagaactcctgagagataatcttctacatccagatgaaatcctttctcccgatctggctcaatgccaagaatttctgtaactgcttctcgagtcactagtgtttctgtttccaaatacacaacaaatgctgccaagaagaccaagcgctgcaacacaaacctccagtgctcatgaaatctgtaatactgttcagcaggaaatttggtcttcaaagatgttagatgtgtttttactgtaccaaatgttctcgagctttcaaacacctctttggaatgtcctgaaacccagcaccctgatggaccccttgcagtagagttaaaatctctcgagctgtttgttctaaactctgtacaacttttctgatttcctctcggatgtcctgctcggcagccaaaaagccctgcagctccacgaagatctcgctcacagacatggcgccggctgcacaacaatcagccagtgtagcaagggcggccaaggaagtggacgccgcaggcaaccagcgcaatcaatcgcaacggccgccgctaccgccgccctcgtgccgaattcgacacccgcctcgctaccta

SEQ ID NO: 135046 - DNA, 734 bp, Homo Sapiens
gtcttctgcaaatttgacttggaaagtaaggtcttgatctttgatttctttttcttgtctttaaccacagactcattcatcactgtcgaccgaaggtgtcgtgctagggatgatggcggaggcggtgtctgacccactgtccttattcttccccttgatcttgtccttcagctttccaaatggattccgagacttgtctttcatagaaaggtcaaacatgctggcagtcatgttgtttctcataaactggatgtcaacctcaatttctcctcgctccttgtccttctttcctggtttggatttcaacttataccactgcgtcttcctgcggccctggtcgcggtgcagatcccgcaggtccacctcggcgcggcccaggaacttgtcgaggccgagcagcgcgcggtgcagcacggtgagctgcagggtggcggcggccgcgggtccggaggacagcagcgatggcagctcgaaggtggcctcctcgcgccacacgggcgcgcccaggctgcgctccgacacggaggtggcgtacttctccttgcccacctggatcaccgcgtacgcgtcgctcgtgcccccggggcccttggcccgcaggccccgcgcctgcagcaccgtcacctgcacgtgggttggggaccacacggcccccaggccccggccagccgagaccattagggacatggtgacgataacactccagaagcgaggagaagatcgccgcgactccc

SEQ ID NO: 135047 - DNA, 969 bp, Homo Sapiens
  misc_feature (117)..(140): n is a, c, g, or t
  misc_feature (768)..(768): n is a, c, g, or t
  misc_feature (825)..(825): n is a, c, g, or t
aaagcaaatatcactattttaataaggtaaccttattactggttttttggcaaatatctgaaatatttcctgagcatttttttccaccatcaaccaacgaagcctaaattaaagtgnnnnnnnnnnnnnnnnnnnnnnnncttaagataaactgtaggattattattaaagaacttaaccggaaactttcttggcctcactggggaccacgcttttaagtacttgtaaatcaatttacaggtaatacaataatctctgtgcatatataagcttacttatcctaatcggtactacccaaaacctattgtccaaacaggcagaaatctttctatattaaattgcacatactaaaaaatttttttcacgtgccttgaaattgatatagatcattgctcatacattagtgataaaatactgaaattttcactgtgaaaataattattattcagagaagaaaatattcttttaccaaactctcagttactttgccagataaagtgtcattcccacaaaaacaatcagtgcaatccaaaagaaagtaaaataaaatagaggaatgctatctctggggttcttctaatgatacgaagaataagtcaaaccatttaacttgaggttgaacttttcctcctctaaacgtgttgttaacattggccttactgaacagccaaagtgacttctgttcgtccagaggattttcaaccctctttcttttttaagaaagagttgatagtttcccaggctgagagaacctacagtggcactganagtgtgactcactctatctgctaatctccttggactctcgtgccgatctggctcganggcaatcctatatgagtcgataatcgtatcagtcaagcgttctgtgtgatgtatcgccacatccaacacaacagcggagcaaagtgtagctgggtgtatgatgacaccacatatggtggccatgcgctttcatcgaactgctgc

SEQ ID NO: 135048 - DNA, 1140 bp, Homo Sapiens
ttgggaggtaacattttattaccaccccagcacttacactaaaagctacaacttggaagccttaccaaatcctgaggaattgtcatataaaaatgtttaaaaggatgtaaacattatcttccatatgatggcaacaatgacaaaagcctaattgtcatctgttaagttacagagccactagcagggatacttctcccaaagttccattttcaaataagtgcaggcgcccagtggtgctgccttttgaagtgccacatgtgggaagactcccagctaacatgacatctgtaacccattctcaggaacttcttcagagctgaggcacacacaagagaagcagaagccatatatcagcaacactgggatttgttctctgctctcaaggtctcttgatctagcttaattttgtccacatcgttttcttcattaggaaagctttggtggtttacaagaatcttctccactaggaaccgggcagcttcctctatgtttatgttatcctttgcagaggtttcaaaccatccggcaaagccatgttctttgcagaattggtccacctgggaaggactctggctactgtccttgttctggtcacatttgttagccaagaggacagcagggatagggctgccatttggaagatgaactttactatccagatcacttttccattttaagactgcctcaaatgtggaacttcttgatatatcaaagactacaaaagcaccaacagcttccttgtagtatactcgggtcatgttgccaaatcgctcctgccccgcgatgtcccacagctgcaggcgcaccagagtcctgctgtcccagttgaggaccttgagggcgaagtccaccccgatggtggcccggtagtgctgggagaagagctggtggacgtagcgcttgatgatgctggtcttgcccacgccaagctcgccgatcaccagcaccttgaagaggtgctcgcgggtctcgggcgctggggcgcggccgcccccaggccggggtcccccgctcctccgcccgccatgagcgctgcggctgtcgggcgcgcctcgactccgagtctggccccctgcccggcctcgcgctccccggccgtaatggccgaattcccgggcatatgtccggtaccgtcgactg

SEQ ID NO: 135049 - DNA, 1083 bp, Homo Sapiens
  misc_feature (31)..(31): n is a, c, g, or t
  misc_feature (80)..(80): n is a, c, g, or t
  misc_feature (271)..(279): n is a, c, g, or t
  misc_feature (407)..(415): n is a, c, g, or t
  misc_feature (507)..(524): n is a, c, g, or t
  misc_feature (541)..(541): n is a, c, g, or t
  misc_feature (545)..(546): n is a, c, g, or t
  misc_feature (553)..(553): n is a, c, g, or t
  misc_feature (555)..(555): n is a, c, g, or t
  misc_feature (573)..(573): n is a, c, g, or t
  misc_feature (592)..(609): n is a, c, g, or t
  misc_feature (612)..(612): n is a, c, g, or t
  misc_feature (616)..(618): n is a, c, g, or t
  misc_feature (626)..(690): n is a, c, g, or t
  misc_feature (693)..(695): n is a, c, g, or t
  misc_feature (933)..(967): n is a, c, g, or t
cttttttgggcgcatagatggggagagatantgttgtttttggggaccacgtgtttttttcttcctcccgcggggtccgntatttttatagtgcgaacaaaggaggggaaccaagcgatgtcgggcggcccgcgtgtggcgggtttacagggatgggctaacattcccaccgtgtattataatgggcgttctgttggtggggcgggcgaatatgtgttatggggatattttttatcaacactaattcttccgccaagatttctcatggttnnnnnnnnncgaaaggccgaaatttttgaaacctccagttcggccaccccccctcttttaattttctccctgttaaaaaacctctccaaaaaaccccccttcccggggttgttttttataaaactatttgtctgggnnnnnnnnngggcggggtttttatggggggggtgtttttgccgaagccctaattaccaaggccccgggtttttcctgttggaacgcggtttgtgggcacgnnnnnnnnnnnnnnnnnngggccccccggcccggngggnngtggttntngtaagtttttttgtgggngtgggggggcgggcggggnnnnnnnnnnnnnnnnnnggntttnnngttttggnnnnnnnnnnnnnnnnnnnnnnnnnnnnnnnnnnnnnnnnnnnnnnnnnnnnnnnnnnnnnnnnngtnnntcatcaagaacatttaattataacatattaatcatattcatacaatagaataccacatacatggcagttgaaacatagattttggcaggacaaagcataattgaatctcaaaaacagaacccggtgaaagctgcaacataaaatatgacatactttgatttcatatacacaaggttcaaaaacacaaaactggacaatgtattgcttgaagatacatatgtctgctaaaactacttgnnnnnnnnnnnnnnnnnnnnnnnnnnnnnnnnnnntcagaataacttttacctctgaggagagcagggagaagatttttaaagattttaactttttaaaaccccggccgtaatggccgaattcccgggcatatgtccggtaccgtcgactg

SEQ ID NO: 135050 - DNA, 530 bp, Homo Sapiens
ttctttaaaaacgttgatgctgtgacagtgcaaacagcattgattttattgctcgacttcggcatgggcacatacatagttaatttttaaaaaccatttatacagatgttactgataaagctcatgtaacaaatgaatgaaaatacaaagaatatcaaagctaaaacactctgtaataaatactaatacaatgaaaatgataaaactttgtttttaaagtcagtctgagagaagaatattacataaagtgaactaattacatctagaaataaaacaactcagcatttggaacaatcatcctaacatgttaaataccacaaatggcacccgttgactgtacgcttagaaaacaagcagaaggagccactctcccaaactaaggatggttggaacagcctctaactcccaacaatccaatcagtccaatgcactggaaattcaaagcccagatttagtgttgtaaagtaaagcgaattacattgtatttgaaagaagagaatcttgtgctccggactgtaaatacatgaaag

SEQ ID NO: 135051 - DNA, 954 bp, Homo Sapiens
  misc_feature (558)..(558): n is a, c, g, or t
  misc_feature (637)..(637): n is a, c, g, or t
  misc_feature (672)..(672): n is a, c, g, or t
  misc_feature (885)..(885): n is a, c, g, or t
  misc_feature (888)..(888): n is a, c, g, or t
  misc_feature (934)..(934): n is a, c, g, or t
ttgccggcccctccaggtttattagtgttgcatcagcaccttgaaatagtccacacggtcacatacgtgacattagaatccgttccccaaaaagctatttacattaatccagggtttcattaaaaaaaactagcaacacatacatcctagaaaccaaacaatgcacaatgaaccgcatgggggtctgcagaaactacagtggtgcttctttggcccacagggtcagattccagaggtgcccagcaagcccagctctcagtcccctacaggccacacacccgcggacggcaggacaggtctcggggagggggcggcctggccctcggaagaagtggcctggtcattttcatgaggaattcattcccggaggaaggcgagaggcactcaggtctttccatctgggaatgaggacagtgtggcaaggctgccagtaccctgcagagacacccccagctctcacccagaggcccctctcctgccccagctctggccgaggcactgaaccaggacactggcttgcatgcccagagacagtggccaaggggaccaacatggaanaggaaggcaccagaccagatggcagggcgggactggccacagctggccggggtgaggttggggtctgtctacgtaatantggacagtggccaccaagcctgaggggtgcctcgntggtgactggtggcttaactttgagatgatggggctgagcctatctctaaaggggtgctcctgtcctgtaggcatccaggtcagttctcgggggtgtgaacctacaaacatcccgccttacgcatggtgtcaaggtttgttctatttcttggtgaaaaatgcccccagactccaaacctttagtaggagaaatgacacctgggacatggaaanganaaaaggcggagccagtcttcgccaccctcgggtgaggtggggaggntggggtctgtgaggaacaca

SEQ ID NO: 135052 - DNA, 1021 bp, Homo Sapiens
  misc_feature (615)..(615): n is a, c, g, or t
  misc_feature (781)..(781): n is a, c, g, or t
  misc_feature (797)..(797): n is a, c, g, or t
  misc_feature (810)..(810): n is a, c, g, or t
  misc_feature (830)..(831): n is a, c, g, or t
  misc_feature (847)..(847): n is a, c, g, or t
  misc_feature (856)..(856): n is a, c, g, or t
  misc_feature (866)..(866): n is a, c, g, or t
  misc_feature (870)..(870): n is a, c, g, or t
  misc_feature (902)..(902): n is a, c, g, or t
tgaaagctaacgcgctgtttatttgggggactggggggaagcaccgtgccgctgctcactggtagccagccagctgcaggatggtggggtagcgagtacgatgggccatgcacttctggcggtcgatgaagagactgttggtcatggcggcaatgtccttctccaggctcatgtggatgtcctcgaggttgcgcagggactgctccgcttctagaagcttctctcgcagtgctgtgagggacatgttcagctcctccacctcactcaacagccttgtgcaggtggtgatgcagcttgtaccgcgcgtcctccagctcctcacagcggcgcccgaaggccaggttcacggcgtcgcactggagccgcaggtcctcggaggtgtcgcgaaggatgcagtccaccagcacccgcaggttggccgaggccaggcgctcgcgctgggcacggcacagattgtcctgcgtgaacttggcccgggtctccggggtggaggcgctctcttggaaggtggtggagtacggatgagcctgcacctcggtgctctggctgtggtggcgcccgcaggtctcgtcgatgttgtaggcctccatcttgtctgaccagtccatctcgcangtctccttgtgctcccggttcagtcggatctggctcactgcttgcatgatggttctcttcagcagctcctgaatgttcgggatgagctcggcttccttcagcagctccgtttccacatggtcgcgcacgaggtgggggtgctcgcggcgctaaggcactgcaggtngtcagtggtgatgganaaagggcactctntggcgtccaggcgcgctcanncgttgcttctgggcangagcagttngtctccgcancagngctcatctcacgctgagtcgacttcaccgtgngtgtctgaatcctcgcactgtggcggggtcttcttagcatgggcacgcgggcctttggcactctgctctgccctccccccacggcgcgcgggaagcgggggtggagaaaaatttggcac

SEQ ID NO: 135053 - DNA, 621 bp, Homo Sapiens
  misc_feature (27)..(27): n is a, c, g, or t
cactcaccagcttgggggtgttggggngtgtgagctggggctgaactgggctgcatcgcggcacagctgcatgttgggccggtgtgagagcagctacagccgggtctgggctatgtgcagaggttcctccttgtccttgatggcctccttcagtgccaccacgttgtgttcctgatctgtgatttcccgcagcatcttgtgcaggtggtgctgcagcttgtgccgcgcgtcctccagttcctcacagcggcgcccgaaggccaggttcacggcgtcacactggagtcccaggtcctcggaggtgtcgcgaaggatgcagtccaccagcacccgcaggttggccgagtccaggcgctcgcgctgggcgtggcacagattgtcctgtgtgaacttggtccgggtctctggggtggaggcgctctcttggaaggtggtggagtacggatgagcctgcacctcggtgctctggctgtggtggcgcccgcaggtctcgtcgatgttgtaggcctccatcttgtctgaccagtccatctcgcaggtctccttgtgctcccggttcagtcggatctggctcactgcttgcatgatggttctcttcagcagctcctgaatgttccggat

SEQ ID NO: 135054 - DNA, 983 bp, Homo Sapiens
ttttgaaagctaatgcactgtttatttgggggattggggggaagcaccgtgccgctgctcactggtagccagccagctgcaggatggtggtgtagcaagtacgatgggccatgcacttctggcggtcgatgaagagactgttggtcatggcagtgacgtccttctccaggctcatgtggatgtccttgaggttgcgcagggactgctccgcttgtagaagcttctcccgcagcgctgtgatggacttgtacagctcctccacctcactcaccagcttgggggtgttggggggtgtgagctggggctggggagggcagaagtatgcacctactggggtggaggggacccaaaactcccaatgggagctggcaggaggtcctgggaagacgccatgaaaggatcctaccaggaaagcggctctagggcagagcataaattacgagggtcctcccagggagcgcgggcctgagtgggaatgagtgacccgcgtgcaatctcgaccctgacaggacaggactggcctcagccgaccaggctcagttctttccattcctgatatttgacggaaggaggcacccagttccttgaaggaactgaggggcagggaaggaagacaggtacttaggctcagaaggggccaccaggcatccgtttacatgggacacagaagggcgggccatctatgcctgttagccaggggtaggtcatactttcaccacaggtgtggacaccacctcagggcagcagggaatgggctcctccgggctctctgggccggttgcctccagtagtcaccttggctgaagagctcctccgggacgataggctacaagggtgggtggaacccttgggcaagggcctgggcaggggaggcgccctccatgacgggccatggcaagttaaattgtttgcggttagttggtggggcaggtggccgaagtgttcacggtatggccctggcattgtggacgttcttgttatcg

SEQ ID NO: 135055 - DNA, 956 bp, Homo Sapiens
  misc_feature (174)..(350): n is a, c, g, or t
  misc_feature (405)..(550): n is a, c, g, or t
  misc_feature (891)..(891): n is a, c, g, or t
tttccaagttttctggtatcatgatcttggaacgtatacccatgataatgaccgctccccaccgagaccgagccagggatcatggcgagaagcgagagcgccaatacgcaacgccttttcccgcgggtggccgattaataatgcaactgcacgacaggttcccgaatgaaagcnnnnnnnnnnnnnnnnnnnnnnnnnnnnnnnnnnnnnnnnnnnnnnnnnnnnnnnnnnnnnnnnnnnnnnnnnnnnnnnnnnnnnnnnnnnnnnnnnnnnnnnnnnnnnnnnnnnnnnnnnnnnnnnnnnnnnnnnnnnnnnnnnnnnnnnnnnnnnnnnnnnnnnnnnnnnnnnnnaagaattcgcaacgaggcgcacagagggttggagcggccgcggctgtaggctttnnnnnnnnnnnnnnnnnnnnnnnnnnnnnnnnnnnnnnnnnnnnnnnnnnnnnnnnnnnnnnnnnnnnnnnnnnnnnnnnnnnnnnnnnnnnnnnnnnnnnnnnnnnnnnnnnnnnnnnnnnnnnnnnnnnnnnnnnnnnnnnnnncttatactttttaacagagcctttaatatacttattttctcctgtcccaggtacagttacacaaaggcaggggcctgggtctactctttgcactgctgtattcccaagacatggatgagtaactgccgtgtagtaggtacatgttcagtaactatcccttgaatgaatgaatggacctgagttttctgattttttcattcatttatttattgcaatattttattcaacatggatatatagtgccaaccatgcacctgacatggatataacaatggacaagacagatagggtccttgcccacttagagtggacacagggtctggatgccaggcctgaccccnccactgtggtatgaaaaccaaacaatgaaaccttttttacccaccacttatagactagtggaagt

SEQ ID NO: 135056 - DNA, 867 bp, Homo Sapiens
  misc_feature (518)..(518): n is a, c, g, or t
  misc_feature (612)..(612): n is a, c, g, or t
  misc_feature (628)..(628): n is a, c, g, or t
  misc_feature (641)..(641): n is a, c, g, or t
  misc_feature (701)..(701): n is a, c, g, or t
  misc_feature (733)..(733): n is a, c, g, or t
  misc_feature (763)..(763): n is a, c, g, or t
  misc_feature (830)..(830): n is a, c, g, or t
agctaattcttgaggcctctctgcagcctccaaaagacagaagaattaaggatgcgctacacgggggagtcagggcctcaggcctaccctaccccattttatgtaagaggcagcagaggctcagggagcagaagaaactttctcacaatcccacaatcattagtggctgaaccaggctgagaaaaggggtctccagcatgttttctaccatgatgcgttcaagtcagcgctgtggtgaggatgctggcagtacaatgtcaggccctgctccaagcttgctctctcagatgcactctgtggaggccccgatgagctcacggacagttgctccagggtgcacaaagcacagttttgtccagatgtgaaggattagtgctgagccatgttgggagtgacctcagcccagccttttccctggaggggttttggagccaagttagacctcatcacagacacgtagagaacagggtggtttaggccagtggaggggagcaggctctggttgttctgacttccanagcagccagactcccaatttggctggcagggtcacactgcatccccctggcctgagcttacacgggagagtggctagggtctgggagagggcangtgagcctcaaagaanaggctttggcaanggctctggacagagcagcagggggtatgtgtatcacagatcatgacacagggctccctangacggcatctgtgggtgacacagagccctcanagttttctctccagctgagcagcaattaanctgagagatgagtaaattgggtccaactggtgcgtgttctctatatccagactttggagcggacagngtacttagcaaggttggctactgggactatgatctac

SEQ ID NO: 135057 - DNA, 884 bp, Homo Sapiens
  misc_feature (483)..(705): n is a, c, g, or t
  misc_feature (743)..(743): n is a, c, g, or t
  misc_feature (826)..(826): n is a, c, g, or t
  misc_feature (855)..(855): n is a, c, g, or t
agactccatctgaaaaaaatacaaatagtctaaagaaaagtctaaaaagcagaccctaccaccagctcctccttacagacgtagtaatggagccaggtatgaagactcagctcgagaaatttagtatttccaaagcgactgacgcagtgactggcagagttaacgctacacgctcaatacccctctctcattaactcggatctgccccgaggacctcttcccgcccgaggcctcgtggggtcacgctggcaggcagagcaggcaggctcctctccaaaacggcgctcgcctcctgggccccggtctgggctccgagccgtggcctcgcgagccctgcccagccaccctgccgagactggcccgcatgagccagctcagggccgcctcttctgccgcccaggcccctgcagcctcccgcagcccccaacccgctctcggcccggcgcgaacccgcacgaccgccgccctcgtgccgaattcttnnnnnnnnnnnnnnnnnnnnnnnnnnnnnnnnnnnnnnnnnnnnnnnnnnnnnnnnnnnnnnnnnnnnnnnnnnnnnnnnnnnnnnnnnnnnnnnnnnnnnnnnnnnnnnnnnnnnnnnnnnnnnnnnnnnnnnnnnnnnnnnnnnnnnnnnnnnnnnnnnnnnnnnnnnnnnnnnnnnnnnnnnnnnnnnnnnnnnnnnnnnnnnnnnnnnnnnnnnnnnnntgaaatcggcacgcgcggggagaggcggttgcgtatgngcgctctcgctcctcgctcatgatcgctcgctcgtcgtcggctgcggacggacagtcactcaagcgtataggtatcaagatcngggtacgaggaagaattgagcaagcacanagcagacgtaaggcggtgctggtttcaag

SEQ ID NO: 135058 - DNA, 1044 bp, Homo Sapiens
  misc_feature (401)..(411): n is a, c, g, or t
  misc_feature (487)..(487): n is a, c, g, or t
  misc_feature (510)..(893): n is a, c, g, or t
  misc_feature (922)..(922): n is a, c, g, or t
  misc_feature (929)..(929): n is a, c, g, or t
  misc_feature (938)..(938): n is a, c, g, or t
  misc_feature (947)..(947): n is a, c, g, or t
  misc_feature (950)..(950): n is a, c, g, or t
  misc_feature (955)..(955): n is a, c, g, or t
  misc_feature (960)..(960): n is a, c, g, or t
  misc_feature (995)..(995): n is a, c, g, or t
ttttttttgcttgtgcaggtgatttattgcaactatttgccttcgcattctaatgcacctagaggtcactttattaagcagcaaaagaattcacatcaaattcagctcaaaccaaggcataagaaaactgctctagatgagagggagatggtggcaatgctaccgcttcagatggccctgctctcctgcagctgtaccagactcctcctcctatgactcaagccagtcactgaaaacaagctcgatcttaggggtagcaggtctcagggcttcgtgagttacagctttccttaccaactcaagccatgctcaagaagaggcaaaaccctcctttcacacatgcaagtgccaaggacagcctactccattaagctggcaccacagcctggccatgtgtcagnnnnnnnnnnnctgcaattcaaactgggtgtcctaaatccattttattcccacccctgtttctttaacaaggagaactaaataggtngtaaacctcgtgccgaattcttnnnnnnnnnnnnnnnnnnnnnnnnnnnnnnnnnnnnnnnnnnnnnnnnnnnnnnnnnnnnnnnnnnnnnnnnnnnnnnnnnnnnnnnnnnnnnnnnnnnnnnnnnnnnnnnnnnnnnnnnnnnnnnnnnnnnnnnnnnnnnnnnnnnnnnnnnnnnnnnnnnnnnnnnnnnnnnnnnnnnnnnnnnnnnnnnnnnnnnnnnnnnnnnnnnnnnnnnnnnnnnnnnnnnnnnnnnnnnnnnnnnnnnnnnnnnnnnnnnnnnnnnnnnnnnnnnnnnnnnnnnnnnnnnnnnnnnnnnnnnnnnnnnnnnnnnnnnnnnnnnnnnnnnnnnnnnnnnnnnnnnnnnnnnnnnnnnnnnnnnnnnnnnnnnnnnnnnnnnnnnnnngacatgtgagcaaaggcagcaaaggcaangacgtanaaggcgcgntgtggcgtnttncatangtccngccccctgacgagatccaaaatcgagctaaatcanaggtggggaccggacaggacaaagatccacggttcccctggagtcccct

SEQ ID NO: 135059 - DNA, 387 bp, Homo Sapiens
  misc_feature (196)..(208): n is a, c, g, or t
cctcctcctatgactcaagccagtcgctgaaaacaagctcgatcttaggggtagcaggtctcagggcttcgtgagttacagctttccttacccactcaagccatgctcaagaagaggcaaaaccctcctttcacacatgcaagtgccaaggacagcctactccattaagctggcaccacagcctggccatgtgtcnnnnnnnnnnnnnctgcaattcgtaccgggagtcccaaatccgttttattcccacccctggtttctttaacaaggagaactaaataggtagtaaagattcagctgttttttaaaagacaaactgagaggtgtgctgagtccaggaagccctgacatgatgctacagcagagcagggccatcaacaacagttg

SEQ ID NO: 135060 - DNA, 1054 bp, Homo Sapiens
  misc_feature (65)..(84): n is a, c, g, or t
  misc_feature (434)..(571): n is a, c, g, or t
  misc_feature (602)..(764): n is a, c, g, or t
  misc_feature (771)..(771): n is a, c, g, or t
  misc_feature (776)..(776): n is a, c, g, or t
  misc_feature (805)..(805): n is a, c, g, or t
  misc_feature (816)..(816): n is a, c, g, or t
  misc_feature (841)..(841): n is a, c, g, or t
  misc_feature (857)..(857): n is a, c, g, or t
  misc_feature (892)..(892): n is a, c, g, or t
  misc_feature (906)..(906): n is a, c, g, or t
  misc_feature (969)..(969): n is a, c, g, or t
  misc_feature (991)..(991): n is a, c, g, or t
  misc_feature (1018)..(1018): n is a, c, g, or t
cgggcagtgccaagctaaaattaccctcactaaagggaataagcttgcggccgcggctgtaggcnnnnnnnnnnnnnnnnnnnncaaagagacacattaatataatttattaaattcgccatacaaagaatatgccacagacaacaatatcagaaagggaagaaacatggatatcacctgctctgaccccctcattttacaaatgagggaactccctgaaatcccagagcattgttatggacaaagccagaatgtgagcccagtcttgagacacagaaacacacagacttaaggattctggctgcgtgagccacatagagcctaaacacttaatccacatttgttttgaatttttctgattcctatagtaccatactctgatgcctatctacttctcaaggttgtaggaagagccctaaagaaaaacaccatgnnnnnnnnnnnnnnnnnnnnnnnnnnnnnnnnnnnnnnnnnnnnnnnnnnnnnnnnnnnnnnnnnnnnnnnnnnnnnnnnnnnnnnnnnnnnnnnnnnnnnnnnnnnnnnnnnnnnnnnnnnnnnnnnnnnnnnnnnngcctacagccgcgcctcgtgccgaattcttnnnnnnnnnnnnnnnnnnnnnnnnnnnnnnnnnnnnnnnnnnnnnnnnnnnnnnnnnnnnnnnnnnnnnnnnnnnnnnnnnnnnnnnnnnnnnnnnnnnnnnnnnnnnnnnnnnnnnnnnnnnnnnnnnnnnnnnnnnnnnnnnnnnnnnnnnnnnnnnnnnnaagtggnttgcngctaatggccgctgtccaatcctgaatcntgtcctgcaanttgcattatgaatcggcaacgctgntgaaaggcggttggcnattgtgcctcctccgttctccgcagtgctcctgcntcggtcgtcggctntgggcgtgggattactcaagggttgaagtgtaccacaagcagggaacgcgggatacagggtanagtcataaagcgataattacgntgttggtggtttgcgggtgccccctanacaacaaatcaccaataaagtgaaactaagaattat

SEQ ID NO: 135061 - DNA, 1040 bp, Homo Sapiens
  misc_feature (26)..(27): n is a, c, g, or t
  misc_feature (52)..(52): n is a, c, g, or t
  misc_feature (58)..(58): n is a, c, g, or t
  misc_feature (63)..(439): n is a, c, g, or t
aaacgcagcacgcgccttttacgtcnntgctttgctgccctttgctcacatntcttcntgcgnnnnnnnnnnnnnnnnnnnnnnnnnnnnnnnnnnnnnnnnnnnnnnnnnnnnnnnnnnnnnnnnnnnnnnnnnnnnnnnnnnnnnnnnnnnnnnnnnnnnnnnnnnnnnnnnnnnnnnnnnnnnnnnnnnnnnnnnnnnnnnnnnnnnnnnnnnnnnnnnnnnnnnnnnnnnnnnnnnnnnnnnnnnnnnnnnnnnnnnnnnnnnnnnnnnnnnnnnnnnnnnnnnnnnnnnnnnnnnnnnnnnnnnnnnnnnnnnnnnnnnnnnnnnnnnnnnnnnnnnnnnnnnnnnnnnnnnnnnnnnnnnnnnnnnnnnnnnnnnnnnnnnnnnnnnnnnnnnnnnnnnnnnnnnnnnnnnnnnnnnnnnnnnnnnnnnnnnnaagaattcggcacgaggtatacttcaaatttagaacttaactttaaaagtttttcttctgtaattgttgaacgggtgattattattaactctagataagcaggtactagaaaccaaaactcagaaaatgtttactgttagaattctattaaattttaagtgttgtattctttttcattgggtgatgtcagggtgataaccagacattcatggaaaggcatgcagtttgtccattgtgacagtttgtttaataaaaccacatacacactttatttaagattaaaatctaactggaaagtcagcttggaaaatggacatttccaagtatgtttggtgagtcacagatataaaaatagaaattctgatgagaggtttcagtttttaataccaagtccttaggagtcttaacattggccagcatctgtttatcaaatgacataaatacgtaaacctataagaattaagtttattaattaggcaatttatgtctgtgataattcttacgggagaaagaggatttgattggaaagcagtttgggaagaaagtgctgctgaaatttccagaatttaattgattggttacataaactttttgacttcaa

SEQ ID NO: 135062 - DNA, 1455 bp, Homo Sapiens
caggggtcagtctcctttattacactttttgtaagaataagccacagtttaccctcacaaacttccattcttggctcaggtattagagtcaggtgccacaggtatataatgaaccggcagatctggagaggactgcggtgactgccccctcctcctcttgcacagcacataggaaagggctgcggtgaggatgaagatgatggccaggaggcacaggaccggcactgtggctgatgtcctggctgtgggaccagcatttttttccggctgcttctggttctccccagcctcaggcccaactgccagactgtggcccgcagtgtgaatggtggtttcattgggacgagtgagctctttgtccgaggacagtgatcctactgggagggtggggcgctgagtggactgcaaggtggacaggagcatctgggcaggggtgtggatatctgaagatgccccctctgaggcctgagaagttggggggctggtaggaagtaaatgcttctggtgggccacaattccccggagtaagcatgtccacattctttgagatcaagacagttcatcaattcctgaaacccatgggtccttgttgcctccacacacgctccaggaaaggagctgtaacctcgtgtagtatagacaccgatggtaagctctcaggtgtttccggagacgattcatgaactgaaccgatggcggggagtcggaagaaattcttttaccacaataacaacttccagtgacgctgccctcgttgccattgcctggctgagtcaggtacaccagcaggagcagaagcaggagcaggagcacgcgggacccgggccgcaagtcccgtcccatctcggggctccgcggactctgcggggatggagccacctcgctctgactcccagacatgctccggcgcgtgacgtccagctggtgtctcaatggctttcgccggggaccggaggagacggcggccggagaggaggcgcgagccagctgcaccccccggccctgctgtgccccgaccgtgcgctcagtactcggcccgcgccatgccagcctctggacgcagggaaagccgaggaggtggagctcccgcgccctgcgcccccgcactgggcccggctccgtcgagggaaggccaggaatcttggaagaaaccgaaagaaaactccggcggcgggcgaggaggggcgggaggacgacggcccgaggagccgattcggttcggttcaggaggccgcccgcctggcccgtccgccgacctgtgaggcggctgcactgccggaccggccctcctcctccgaggcactttcacttccccgatccgggcgccgcgggacccagccgcgctgcatgagcctcccgggcggcccggtggagagagtcgccgccagccccggccgcgcgcacctgcggggcagccaccctcgtgccgaattcgccactcaggcctcgcgtcct

SEQ ID NO: 135063 - DNA, 1240 bp, Homo Sapiens
  misc_feature (74)..(75): n is a, c, g, or t
  misc_feature (178)..(210): n is a, c, g, or t
  misc_feature (212)..(212): n is a, c, g, or t
  misc_feature (364)..(422): n is a, c, g, or t
  misc_feature (1127)..(1161): n is a, c, g, or t
aaaaaatcccaaaaaatttggcctggggtgtggtggtgagccccctgtagtccccagttactccaggaaggagnncaggagaatcgcttgaacctgggagaatgggggtttgcagtgagcccgagatccatgccactggcattccaagcctggaatgacagagcgagactccgtctcnnnnnnnnnnnnnnnnnnnnnnnnnnnnnnnnntncccatagaatttgtccaagttattatcacccagtgtgaaaagcagattttatagttaaccgtttttaaatgaggggcctaagagagggcagtggctggttagtcctatgttagatattaacaaatacgtgtaggctggatgtggtaggtgannnnnnnnnnnnnnnnnnnnnnnnnnnnnnnnnnnnnnnnnnnnnnnnnnnnnnnnnnnccataacagcctgggcaacatagagtccgtctccttcacaagcttccattcttggctcaggtattagagtcaggtgccacaggtatataatgaaccggcagatctggagaggactgcggtgactgccccctcctcctcttgcacagcacataggaaagggctgcggtgaggatgaagatgatggccaggaggcacaggactggcactgtggctgatgtcctggctgtgggaccagcatttttttccggctgcttctggttctccccagcctcaggcccagctgccagactgtggcccgcagtgtgaatggtggtttcattgggacgagtgagctctttgtccgaggacagtgatcctactgggagggtggggcgctgagtggactgcaaggtggacaggagcatctgggcaggggtgtggatatctgaagatgccccctctgaggcctgagaaattggggggctggtaggaagtaaatgcttctggtgggccacaatccccgagtaagcatgtccacattctttgagatcaagacagctcatcaattcctgaacccatgggtccttgttgcctccacacacgctccaggaaaggagctggaacctgcggaggagagacctgggcttagctgcggcgccttctttccttcccccgcccggccgtaatggccgaattcccgggcatatgtccggtaccgtcgactgnnnnnnnnnnnnnnnnnnnnnnnnnnnnnnnnnnncggccgcttcctcgctcactacttcgctgcgctcgtcgttcgctgcagaacgagtagcgcctatagtgatctatacact

SEQ ID NO: 135064 - DNA, 1618 bp, Homo Sapiens
tttgatttttaaatgagaaaatttataaaagaaagaaattcatggtcacaaaattttaacattttaatcctaaacattacagggtaaatagatactggaccctatctccatactccataaaatcctaacttttagtttccatttcaaatgttgctgtaaccactaaaacactagtggttttacaacctctggattatggaaatacacatttctgaaataaatgctacaaaaacaacaatggaagaaagccaaacaaacagtctccatgaaggaaaaaaaagtggaacattttgaagcttttagacacttctctttccatgtcttatgattaacctgtcaattcagtgcattgtatggtcatatgtaatggtccccatggtgaacaaacatctaactagtgtccattgattccaagttagtagatgatgaatctttctggatactttcaaagatagccgccagctcagggttagaactgatctgtgactggaattcactcatcagtggactcttctctgcttctggaatggttagtagtgctgctactgctctcatggcagatcgctttaattcatcttgtttttcaaactcctgctttactgagtttgcctttaccttagttgtacatgttgcacgtaatggctcaacaagtcggtccaacctctgcagtactgcacttggacaaagggtagacagtctcaccaacattaaaaatgtcagcatcttaatatcataatggtccttcaaacccatcttcaacatgatttagaaattcaaagatatcaagtctatcaagacaactgtctagaagtgtgtacatacactcaaatgctgccttttctaatatccagaccatcatcaaccgtatgtttaaatggacccatttctacctctcttataagctcctttctaacttttgtttcattgtaaagatgtggaagaacagtatccaatagatcccttattaatgatggcttgttatgtgctgctgaattaaatgtgaccaaggctactcttctcacattcaaatctgggtcttccaaagtttttaggaaatcacctatgcagttctttaacagtggatcaataggttgtggatggtcagaaattgtaaatttcacagccgtaaccactgagcttcgggcatatgatgagcctgatatcaagtaccccttaagccgtggaaggagagtttctggatcaattagagtgagttttcctagacattcagcaacaacatttctggttccttcctctgcacactcacagtgctttagtaataaggcccagatgttttcaacatatggtttaaggcccaccactgatgcagagctaataatttccttcaaggaatgaagtaaaagatactgccttttgggttgactagttatttcttgcaggacaaacggcagatattcaggaaggttgcccacactaatgctgcctaatgcataggatgcagctgatttgacttcttcactaggagatgagaaagcttctagtattacagattttagttccaactgtccacttaagtcaatatgatgcccaacttctccaagagaaagtagagctaagagacgaatggaatctgtagaccttgagttcttgacatctt

SEQ ID NO: 135065 - DNA, 1374 bp, Homo Sapiens
  misc_feature (1264)..(1264): n is a, c, g, or t
gagaagcaacgtcaagctgaagacattggggtgcgatggctggccaggacagcttgtctcctcgtccgcacacggaacgctggatttcactctgtgacccagccagcggtctcatctcacagccacagctttcagcaggaagaagcccactggtgcctgcctgacctacgagggcccgcaccgttttgccctcctaacattttgtatttgaagtgcttgtcacagtccacaaaataaccactcagaatctgttactattttgtttatatgttgtatcaagtgaatgttaataagtcatctaagtgtatgctttagttataaatcttggaaaaataaaaacttccttttggaggaaaagtgaacttactttggtatcaaaatcacacaactcccaggttggatttttttgtgctttaatgttcgcagtcacacgaaagtggcatctccatcagcactggggcggccgcctcctcatcagccgacagctgcacggtccccgcctctcatccatttggtctgtttgcaagttactagatcatacaaaaataaccgctacaaattctctgtatctggcatataaaaactgagcaaaaagtatctcttaaagcaaaacatctcagaaaaaatacaacacaggtttaacttctgcagtactttgttcatataaaacactagtaaaataggcttcttaaaaattaaatagtgaaataccaaccaaattatatacattgttacagtacaagtgaatgaggcaaaatatccagttcttagtttcccaggtgggtgggggtggccttcagtgcgtggcacggagggggtgacaggaaggccacgttccgatgtcacagtcagcgcagaaagaggcttgcagcgggacaaacagatggaaagaactgagtcacacagggaagaccaggggctcctttgaggaagagtgaggtcatgtttttattgcttgctaatccgaggttttccctggcccgatgcccctctaggtattctggatcccaaatgctgcagcccacgtagcgctaatccatgtcaccaagcagccactgggaagccacagctgctccagagaagacagaacgaggctttcatagcctcaatatctgagctggaccgatcctggtctttcaggtccatcagggtcccacatgggtcaactgacacacacttttcccgctgatggcattttccctgacatctgaggggggcatgtgggtcatgcactggatggatccttgggcacggggtggactcnactaccattcctcacgaccaattctccttgttcttgcgcccaggcgagggcactgtcgcctttgcacatggatgcatgttctttgctccgcttttcttccgggccttctg

SEQ ID NO: 135066 - DNA, 1134 bp, Homo Sapiens
  misc_feature (91)..(91): n is a, c, g, or t
  misc_feature (104)..(104): n is a, c, g, or t
  misc_feature (241)..(260): n is a, c, g, or t
gtgaatgaatgaaaattattttatttttatttgagctttggttctgccatttgctagcagtgtgactcaagagaagccagtaacccccctngagcttccctagnttcgcaaaatgcttgtcatgaagtcgacagcttccggaggctgcgaggctcgcaagaaatgcccacatgaatgtgcgcttagggcgtgagtgctcactccagaaaactccaacacagtgaaaaggcagaagcggtgnnnnnnnnnnnnnnnnnnnnataagaatatataaaaaatgatataaatggacatttacggtagtgggggaaggcatatatctacgttaaaaggcaggacatttttaaaagctctattttctaaatgaaaactacgaaagcggggtgggttgtggcgggggcagttgtggccctgtaggaccttcggtgactgatgatctaagtttccggaggtttctcagagcctctctggttctttcaatcggggatgtctgagggaccttccgcggcatctatgcgggcatggttactgcctctggtgccccccgcagccgcgcgcaggtaccgtgcgacatcgcgatggcccagctcctcagccaggtccacgggcagacggccccaggcatcgcgcacgtccagccgcgccccggcccggtgcagcaccaccagcgtgtccaggaagccctcccgggcagcgtcgtgcacgggtcgggtgagagtggcggggtcggcgcagttgggctccgcgccgtggagcagcagcagctccgccactcgggcgctgcccatcatcatgacctggtcttctaggaagcggctgctgccctagacgctggctcctcagtagcatcagcacgagggccacagcggcgggcgcccctggcgctgcccactcccccgtgagccgcgggatgtgaaccacgaaaaccctcactcgcggcgggccgcacgcgcgccgaatccggagggtcaccaagaacctgcgcaccatgttctcgccgcctccagggccgagctcggcagccgctgcgccgccctttggcaccagaggtgagcagcgccactcctgccacctaacgtgcagaccctcgtgccgaattaaccaccgaggcctcgtaccgacccgatttattcg

SEQ ID NO: 135067 - DNA, 711 bp, Homo Sapiens
tgtctatttacatgcccttgcatgaaacccctcttaaactgggatctgtgttctttttgttctggaacataccttattttttcaattacatcttccaaaagatattccacaaccggaaaggtaaaaccaggtatatgtatcattggacagttaccaaaatattctgaaaacttttctgcattcaatgttgcactcatcaatattactttcaagtcagatcgaaaattgagaaggtctttaacaacagtcattaaaacatctgactgcagatttctttcatggatttcatcaagtacgatatgactaacactggacaaatacgggtctgactggagccactgaaggatgattcctgttgtacagtataagatagaaccctgtttccttggcaaccgactctggagacgaatttgatatccagtactattaccactgccacaagattctgccctttctgcagctactctttccgcaactgaaatggcactaattcttcttggctgagtacaaactattctgcaagcagatccttttcctctttcaatgtagttatccaaaatgaactgagtaacttgagtggttttgccacaaccagtttcaccacttattactgttacctgatggttatcaattaaatttaccaattccttttgcattccatacgaaggcagcttttctctgaaatgctgcatttcaatataccgaaggtca

SEQ ID NO: 135068 - DNA, 731 bp, Homo Sapiens
  misc_feature (618)..(626): n is a, c, g, or t
ataataaaccaaaagatttatttataacattttctgaattcacttaaaaaacaaaaaggaatcccccttccctcaaaatagaaccgtttcctacagattccatccagtatgacttttcagatatctaaggagattttgctacacttattacaatggtagttttcccacagtgtaattctctgatataggtttgaaatattgcagaaagtcactctacattcatttatacagttgctttttctcctacaagagtattaaaatttaagtattgcattgtaaatgaaggcattcccaaatcactgtgtttgtatcactttgcttaaatatgaattttctgatctccaaagtgcatcatctttgtaaagctcatcccttgtccatgcattctgtcctggttgacagatgcggaatgagggctaatctctggctttctccaatctattggatatgtattctttcctggtaggaatttacacacgtaaagtaagggactcctaccaaatgaagtcttctcaacattaccagatggaagaatcttctcaacaatattgatttcaccttgttattgcaaaaaaataaaagagtggttattaatggcttttccacatattcctgggnnnnnnnnnctccagggtggtgaataaagtgtgggccatattacttcacagtcatcactttcacataaggcttctttccaagagttctctgaagtaaggcattatacttctttt

SEQ ID NO: 135069 - DNA, 908 bp, Homo Sapiens
ttttaacaggaataatccaaaagttttaatggttttaataagttaatttagtcataaatgagagatcactcaactgttttatttcttaagcttggtaatacagtcatagattttcatcatggtattctttatatgtttttgtatgccttaaatgttgcacaataaaaacgttttaagtaatagaagaggaactcttcaagcagtgtacggtggtgtttttcttaaaggatgaattatcaaatgcttgctccccatggaagcctcttaaggaaaagttaaaactttgaatatgtcttatgggaagagactgacgtagcacaaatcattaaaaaaccttcacctaattgtcttcctggtcattttcatatggaccaaatgttcactctagggcccaaaaaacatttgtttcctgcatgtattcaatcttctggaacttgatatttcccacgaggtttggtaacagtgtcccaaagtcaaggtgacaaaagaactttgcattaataaagacaatttcgagctgtagtcaaatttggagggaataaactaccccttttccttatactgaaagtcttttaatatgcctgtgccttagttgaataaaatctcctacgtgggggggagaaaacaatgctctgcagtgtcatttgcatacaagactgccaaaatttttcagtcaaaatattcgtttaaaactttaaaaagaaatctattccatttccatcactttgggtatggactgggtataagaaggttaaggtcaaatacaggatttctgaggtcaatggcaaggatagccagagatctgaaaaacagtgatatatgaagaactaaagaaactggatgaggagtctcaaaaggagaaggcttggtccatcagggaaacctaggacacaggctcaggggcactc

SEQ ID NO: 135070 - DNA, 1002 bp, Homo Sapiens
  misc_feature (646)..(646): n is a, c, g, or t
  misc_feature (666)..(666): n is a, c, g, or t
  misc_feature (828)..(828): n is a, c, g, or t
  misc_feature (841)..(841): n is a, c, g, or t
  misc_feature (849)..(849): n is a, c, g, or t
  misc_feature (861)..(861): n is a, c, g, or t
  misc_feature (873)..(873): n is a, c, g, or t
  misc_feature (913)..(913): n is a, c, g, or t
gctattcactttttcattattttattgttgttttagtagcattttgaggtgaatgtatgcataatcagtgaattagacaagcatgcacatacatgatatctgatcaaacatttttttgtctctcatcatcctcataaaatttattcagtgggagaagctttttcttccatcagatacattccagttgtatgccaacatactcaggtaagagcaacattttggtcattttaaatagtttggtaattatgactcccagtcgcctacaataagaagaaactacaataatttagtactaaatttttcttccctctccaactgagtcttgtgttgagttgcctacttgcgctagcacatcttcccttgctggttgacatttttgctaagatttctccctctccttccaccccaccttggacacggaggtttctggcctccctttccccaaggtccccaaaaaaagaaatctgtcttatgagatagggctgccttcacatggtgtcagggttctctggatagtaattgtgtgtaataagagagggagcattcacgaactcccatagaaattctcatagccctgacttctcatctttagcttgtgtagatttttttgtattccaggtggtcatttgtgactccttcctcatcncacaatctggcttcacctcncacttcttgatgctgggttccctccacctctttggacaacctatcagagaggacctaaagagcccatgctgacttcactcttgcatgtctcactatggttcatgggaaaccacacatccattgccctgacaacactagacatacaggctattctcaacacangactcattcaggnctctactnacggagctgtgngcacattctagngcagatcagacttcatcagcatgcatcctattgttgtggntctgagaatctgagctactgagctatctgagaatctctctcactaatttgaggtcaggagcaacattctcctttctcactttgtgggta

SEQ ID NO: 135071 - DNA, 1021 bp, Homo Sapiens
  misc_feature (108)..(121): n is a, c, g, or t
  misc_feature (453)..(492): n is a, c, g, or t
  misc_feature (582)..(582): n is a, c, g, or t
  misc_feature (797)..(797): n is a, c, g, or t
  misc_feature (839)..(839): n is a, c, g, or t
  misc_feature (858)..(859): n is a, c, g, or t
  misc_feature (894)..(894): n is a, c, g, or t
catgatttgaaatttttattttctgaaatgaaacaattgtacattgtacaaaccatatctactgatggaataaataagtgaaaaattatactgctgtacaacacaccnnnnnnnnnnnnnnttcttgaaaggggaaaaaattaggtaacggtgaaaaaaggtctttatgcatctaaccaggttcttggcgataatgaacattccaaaccatgacaccgttggctaatgggaggtcaccaccctagaggaatcggtccacagccttccgggttgtgggtgtaagtgccagcactttgtggaatgtgtagccgcagcttccccgacttcacgttttggggggaattaggtttgccctgggagcccttgaggccacggggcctgatgtccacggaaggcttttgctcgggatcccccgccccctggctcgaagctgaaaggtcttaaattcctgtnnnnnnnnnnnnnnnnnnnnnnnnnnnnnnnnnnnnnnnnaaccggctccgaggagcgactgcgccagggaaggaagcacatcggatttttgaagtcttgtcattctgcgtggaaggccttcttggccancgtggagtgcagggctgctggcgctttgcctggcgtggccgtgggtggggcccagctggtcccaatcgccggcccattcctaccttcaggcacttcagagaaatactagtgacaccttgggacgggtggacgtcgtctgagtcctcacctgcgccaactccccttgcctgtccagagaggctgcggtcaacggcagggcccactacgctctctgnttctgtggatgtgtggtgttcactctcctcagctgtcttggntgtagctctcgttttccannacagagaaggaataatatccaatcatctctaccanatggagttcgctgcaagaaaattgactctactctacgatctggaggtaagccctccaatgctgggaaggacgcacagtaggtcttcccagatcagaaaatttcacaaacctctgcgatctggctcag

SEQ ID NO: 135072 - DNA, 978 bp, Homo Sapiens
  misc_feature (306)..(435): n is a, c, g, or t
  misc_feature (825)..(826): n is a, c, g, or t
  misc_feature (872)..(872): n is a, c, g, or t
  misc_feature (878)..(878): n is a, c, g, or t
  misc_feature (881)..(881): n is a, c, g, or t
  misc_feature (926)..(926): n is a, c, g, or t
ccttctaaagctttatttttgtgagactttaaaccattaagtgtctgaaacctatttctctaattcatcacattaaattgggggcatgtctttactttcaggcttttgaggggaggtatgctacattttcaccatttgtatgaatgcagccacggaaaacttcacatcagctcagccctcggtttagttttcttcggaggagacattagttacagcttgagttctcagcctgccccactcgaaggcgccagcagggactctggatcacggggccatgaactatggagtgagtcttctgggtaattnnnnnnnnnnnnnnnnnnnnnnnnnnnnnnnnnnnnnnnnnnnnnnnnnnnnnnnnnnnnnnnnnnnnnnnnnnnnnnnnnnnnnnnnnnnnnnnnnnnnnnnnnnnnnnnnnnnnnnnnnnnnnnnnnncaagtctagaattcttaatccagccatcttcctggtcatctccttattctgtctcctgtttgttggaagtggcaggtgaaagtttaataccaggacaataattgtgtaaagatttgagcagtttggtcagatgatccagccgtgtccaaaacttttgttggccccgagatggcatcactcgagatggttagtcctagctctgcctcagcccagtctgtcacccttcgctggttctggaatgcagtttgcatttggccatcactgtactaacgctgtcagatacgccccagtttactctagatgcatgtgtgtcaggaataatctttatttttatggtgctgttcctagactgctctgtagccagtgggcaacatgacttccaaatctaannctgctcgtactgttcccacactgtcacatggaccaagcatcagcangcctgngcnatggtacgaagagcgtcaggctgtcatgcctcatcaagtgcctgnaagacagctccctggtacgattgggttgctctctcaactgtgcctgcattcc

SEQ ID NO: 135073 - DNA, 414 bp, Homo Sapiens
tttagaacagcaagtcttagtgtcttttattatttctctttctagaagactcactccatagttcatggccccgtgatccagagtccctgctggcgccttcgagtggggcaggctgagaactcaagctgtaactaatgtctcctccgaagaaaactaaaccgagggctgagctgatgtgaagttttccgtggctgcattcatacaaatggtgaaaatgtagcatacctcccctcaaaagcttcctcattaaaaagtttgctagtttcttttttgattgggtctataagctggacttggcctgcggaaaagcccactaggagagagacactttctgctgtggctgttaggtggttgaagtcatgacaagtaggctgtgttcctttgtatatccttttatctattggtttactcaag

SEQ ID NO: 135074 - DNA, 1261 bp, Homo Sapiens
  misc_feature (331)..(331): n is a, c, g, or t
  misc_feature (397)..(410): n is a, c, g, or t
gtaacggcaggagaggagcgaagaggtggcaagacgagaagcagcgagcttgctctacacacgatgacttccgtcgtcttgcgtggtcgaatcttctgcactcatacgtttgtgtctgccgtactctacttcgatcgcggctgctcatctgctctttgtcctctgtcctgttcttccctacttctctccacttgtagtcttgttgcgtctttttctgcccatttagtcccatgggcgcctgtgttcagcccacatgggatactagggtcaacccgctgtacccagacccacgtgatctttggcaccgtgcccgctggtatgtctgcgccgncgtcccaagggccggcctgtcaccattcttcctccccctgtccccatgtacttgcatcccggcttnnnnnnnnnnnnnngctcccaatagctttcatcttacccgtcagctcccattgagtccaaagtgaccacccgcagaaacccgtcctggctcacgcacgctaatgacttgccatctggggagaaagcaaactcgttgagggccccctcgccccaccgtccacttaaggagagggttcctcgtggatttgctcttgcaagtgtgcacggcaaagctctctccctgcttcagaagctggtagtggggggctgtggtgccacaagtgtgctccacattatataagtacatgttcccactcgagtgggctactaggaaaaggctttccgaaccgggaacccatttgacacaggtaactcgtgacttgtctattagtctttcctcattaaaaagtttgctagtttcttttttgattgggtctataagctggacttggcctgcggaaaagcccactaggagagagacactttctgctgtggctgttaggtggttgaagtcatgacaagtaggctgtgttcctttgtatatccttttatctattggtttactcaagtcagcagccttgcggacccccttgtagatatagaagtacagctcccggcccacattgaagcagaggcggtcgccgttgccagactggtcgttgaggtttacgaaggagacgcggacagggttggatccctgcgagttgaagggcacccggttgggccggctgtactccgagtgcggcagcagcttgtacagaccttcccgggtggtgaattgggtcttaatctcgttcatctccttccctcctccctccgtcgccatcttggaaagcagcgttcacctcgtgccgattacacaccccaggcctcgtacctagcccta

SEQ ID NO: 135075 - DNA, 1007 bp, Homo Sapiens
  misc_feature (737)..(737): n is a, c, g, or t
  misc_feature (752)..(752): n is a, c, g, or t
  misc_feature (775)..(775): n is a, c, g, or t
  misc_feature (778)..(778): n is a, c, g, or t
  misc_feature (809)..(809): n is a, c, g, or t
  misc_feature (832)..(832): n is a, c, g, or t
  misc_feature (834)..(834): n is a, c, g, or t
  misc_feature (860)..(860): n is a, c, g, or t
  misc_feature (865)..(865): n is a, c, g, or t
  misc_feature (873)..(873): n is a, c, g, or t
  misc_feature (913)..(913): n is a, c, g, or t
  misc_feature (935)..(936): n is a, c, g, or t
  misc_feature (956)..(956): n is a, c, g, or t
gctgtagcaggatattttctcgctcgaacttctcatccttcttccatttcgccttctgttttgaccacttctcttccatttcatcataaatactgtcctgatacgtacgaaacatattcttcaaatacttgtattcttttcccatctcctctagcttctcttgggcagccaacttctctgccttcaaggctgctttgtagttgttctccaactcactgagttctgcttcatgggcctctttgagctccctgttcttgttttcaaagttctgtttcatctcagcacagcggagatccatttcactggagagcaatttctgggcagactggtggtctctgttcatttgttcaattattgctgtcagctctgagatttgctcttctaggtcagaaatgatgttggtcctggaaaatctgcctttgtccgggatctccgattcccaccgctttttcctatcaaacatctcatcccctaaggtgacagaaatctgttcccgattccgaacaagttgatagccaggtgacacgttgatcacttcataaaatgatttattagtctcttcttgccttgctgaatggattttcatttttggggaaacaacaggttttgttggttggaggtaattgtgattttttggagctggtacaagaggaattagcttggaactccctgtggagttcttgcgtggtagttgaggggtcttgattagcttccgtggtcccaagttccaggggtcncagcaggtgcagtanatgagagggttggggtacatggncanaggtcagggggagtcttggctgctagatcangaggctcttgctttggactgccnanagatctgttattctcatgtggcccangtcanacatcttnaagaaaacacatgttagagagaatggttcccatcacacangatcagagttactttagatcannagcactttagtggcatccangtgggtgaatgcggaggagaaatcacataatgtctgcgggagacaactcta

SEQ ID NO: 135076 - DNA, 985 bp, Homo Sapiens
  misc_feature (596)..(596): n is a, c, g, or t
  misc_feature (652)..(652): n is a, c, g, or t
  misc_feature (719)..(719): n is a, c, g, or t
  misc_feature (731)..(731): n is a, c, g, or t
  misc_feature (865)..(865): n is a, c, g, or t
  misc_feature (869)..(869): n is a, c, g, or t
  misc_feature (875)..(875): n is a, c, g, or t
  misc_feature (890)..(890): n is a, c, g, or t
  misc_feature (920)..(920): n is a, c, g, or t
  misc_feature (922)..(922): n is a, c, g, or t
tttttccacgcaatcacaccatttattgctgtgctgtccggggaagacaccgtgcaaatgccaaagtgcactgaggagaggggagggtctgtgactcccaaaccctcgaatattttatgaatctaagagtccagacgcagttcatccacggagatctgcgccccgtccacaccaacacccacgtttgtgcacccacatgtgcacggtgctcttcagagcggcgaggtcctcccccgcggggaggaatgtgggagaggcagaggtcactgagtttcctcctgtttcgtgtcacctcttggcaacctgtgcctggcttctagaagcggcatgggcaagaaaaggaagcaaaagaggctctggcctgctcctccttgcccaggagcaaagccagcaactgtgtagtcccgctgtgaggtaatgcctggcgccgcccgtgtattcctgcaggtcaagacagattcgggccgggtggggtggcagcccagccacggagggcatgcagggagaacaccaccaggactggctgcctgggccgcagccacttcccgccaggctcaggggcctggagtcagggggcgtccttcccttatctgtcncctgagctccctggctcccagaagggtcttctatcaagaaactgggccctgggcanaagggagggcaaggcccggctcccctggtctctgaccctctgccaggtgctgtggactgctgagagngttcaaaaggcncagagaggaacagctggactgagctggctctgggccgctccctcctggtgcagctgcacaaggttctcatacaggggcccgctgggtgcggacagctttggcattgcatgaggcgtgggagttgcacagttcanggancaacangaggagggtcccganatccatcactgtctcccatggcagcagtangngggaaatgtcagcccacatcaaggactattggacaacagtcgagcactatggctgggctgcag

SEQ ID NO: 135077 - DNA, 1580 bp, Homo Sapiens
acaagttactacaatagaactgttttattaaacatatgactgtatttattttgtacaaaatgcagtaacacttcttcttttcctctgcccctggaggcactaccgcagaacttcatgttcacagaaacacacgtcatggcaagtgtgtcaaaaagtcatgacaagcaggaaagtgcaattctgaaagtaatgccacacaaccaaagtgggaaatgaaaacaggcagaggccagcaggtttctcggctagggctctgcctataacgccctggtcctgctcatctttcagcagtaaacattttaagaagagaaactcctgagcactatgtaagtactctcctggtagcatccttccaattccatctatcttgatgttgtaacaagcttatttgtaacttcctcaagaaatcccaccctggattgcatccctgtcaattgcccatctccctctgagcttcaaacaaaacaaaataaaacagaagagcagtaagtttcaaaaggaagtcagaggagacatttgatagatgaaacctacttcctagaagccccctggccagacatatgcagagctggagacaacagattgtgaaactaggtccagctgtaaaatatctcaggtacccagttagatccagttattctgcatctgtggatttaaaatggtcatcatccacagtagaatagatgtgcccctcattgctcagaaaatccacagcttgcttgattgaggatacagacatgtgtttcagctggttcttgagatcctgaaagttcaacccttcaggtcttggacaagccttaatcaaattcaacacctggttttgggccacagtgaggccatttgctggcatgaagctattcccaccaaagttccctgcttcactcattcctggattgctgataggtgctctccctgctgagggctggctgttggctttgcttagtaccatgtgtgcattgatcacttccagaatatgtgtggtgaactcattcatatcctccaggggcatgatcttaaaggctaccaggctctttttgttctgaaaagatctcaggtggcctgccactttcacatatgtttctggaggaaccacagtgttttcactgctggtgtcatctgtgtcaacccactggcgaacgtccatgggtgcagctgtcatgtcatctattttgtaaacaatgttggttggagccttctctgcatgtctgatgatccccacaatagtgacctgtgaaatctcaacattcccaattctgaacacttcatcaaccaaagtggcagaaagcagctgagatatagtacagggcacaatgtgctgggctcgggctcttgatttcttttcggcttgagaaggtgcgggcgatccaaagccccccggggactgcgtgtagccgccggctcccccgtatgaggagctgccatagctttcgaatccactgttccacatcttggtcacgattctccgcaaagaggccgagaaggtgcgggtctgggggaatagcggaaaaccacagaacgcggccgccactgcgccgctccctcgtgccgaattcgccacccaggcctcgtacctagccgtt

SEQ ID NO: 135078 - DNA, 671 bp, Homo Sapiens
  misc_feature (343)..(343): n is a, c, g, or t
  misc_feature (424)..(424): n is a, c, g, or t
  misc_feature (453)..(453): n is a, c, g, or t
  misc_feature (461)..(461): n is a, c, g, or t
  misc_feature (469)..(469): n is a, c, g, or t
  misc_feature (477)..(478): n is a, c, g, or t
  misc_feature (507)..(507): n is a, c, g, or t
  misc_feature (529)..(529): n is a, c, g, or t
  misc_feature (545)..(545): n is a, c, g, or t
  misc_feature (559)..(560): n is a, c, g, or t
  misc_feature (590)..(590): n is a, c, g, or t
  misc_feature (602)..(602): n is a, c, g, or t
  misc_feature (625)..(625): n is a, c, g, or t
  misc_feature (639)..(639): n is a, c, g, or t
  misc_feature (657)..(657): n is a, c, g, or t
ataacctattagcctgtatgtgcacatatggtgatagggattcaagaaactaagagcttcagttcagtgtcccaagttataccatgggattttgtttgaggcaaaactgtgatcatgtgtcatttgacttactctgtgaaatgacatttgctatatctgtagtgaggcatttttttcactatgttgcaatttatttgcacttagctggaatatctcttttataattttgtttccagcacctagcaaacagcccaaaagtttattgcagaaagctagcaccaaactcttattctcttcatcctgggcccacagactacatttcctagcctcctaaacttacacnttagtgtagccaagtgactgagttctacataatggcatttgaacagaagtggtatgtgccacctccagttctgacatatanaactttgtgggcaggtctccatgctgttntccatctngcagcttngagcagannagacgaatcctttgggagcacatgttgangctggcagggccccatattgangatacttaggtctctngatcaggacttggnngagagctgctgctcatcaggacatctgttnaggcttatgtgnaaatacattctacggtgggtaancctcgtgcgattcntggctcgagggcaatccntatatgagtcgtaa

SEQ ID NO: 135079 - DNA, 1452 bp, Homo Sapiens
  misc_feature (1282)..(1341): n is a, c, g, or t
acgaaacaaggctgccttttaattgctatcaaatattcggatatcccgtctgatgtcagcaaggcccccgcgccccgccggaacccgcagggatggagcagcaccgccgcctgactgcacaaaagggctggggcagggtcgctgtgcctctcggcctccttgctgccaccgtctcttaacctcggggcgcctggtgcaccgtctcctcttcgggtcagcccagcctctgtgttggcttcgtttgttctcctcctttgctaaagtgatcagatagtcctgtgaagcagctgccaaccaggtggacagggcagcggtgctgggatgccgcccgtgggctcctcggacatcctgaggccccgccctacttctgtatctggaacaggaagagccgcaggttgatgttcttggcagccagcagcttgttgcactccacgggagtcaatgatgggcagtggcacgtagtccgtctcgttgctctcgttggtgaagacaaagtggtagatgacggggctgatcctcacgtcgtcgtaggggcccttgagcagcaggaaggagcactccagcggtgccgtgaccttgctcttgaggaggagctggaaggagagcgtacgcttgcaggacaggttggggttacgctccgagtcgttgactcgagccttcaggacccacgtctggttcagcactgtgaacctgggcgtctcatagtacaggcgcgtgatgaagtcgtctgtgcggtacggccggaactggacctctgtgtagccaatcttctcgaagctgagcaggctgaagatgctgttgtacagctgcatctccttgcggtggctctggtccatcccatccaggatctccatcagctcactgcctgtcttggtcgggtgggcgcacgcagcctcgtgcaccgtcagctcatggaaggggccgtgccatgggcagccgatgcgtttgtacttgcactgggttaccctgtcctggcattcctctttctggtgcctctccaggagggagcggggaaactggcgcaggcagaagccacactctgaaggcagctcgctcacggctttctccacggccaggttccggcagcagaggctcttactgatctcacaacgacaattggggcacgtggcctgctcctccttcagccgggcatctgctagtaggtggataaaacagccagcgcacatcaagtgaccattagtacactggtacacggaggccttgggcaggtccaggcacacggtgcagcacagcaccgagtagagccgctcctccagtttcnnnnnnnnnnnnnnnnnnnnnnnnnnnnnnnnnnnnnnnnnnnnnnnnnnnnnnnnnnnnttcttgggcggcgcgtcggggtcgccggccgcctcctgcagctgtagctgccgggcgcccgccaagcccgcctcgtccgggagcccaggccccgccgcctcgcccagagcc

SEQ ID NO: 135080 - DNA, 773 bp, Homo Sapiens
tttaacttatccaagagcctgcaaggagtttaatctttttcctgggaagagacaatttcaccctgctttccgaaaatgcctgctgagccctggtggctgagtcctgtctccctgggagcggccggttggcagggcagccccgaccctacctggatcttcctgcccaagcctcagtctcaagaccccatgacagagcgtagggggaggcagtgtctctgagtctttcctcgggggacgtgtgcgggcacacagatgggggcggggcaggctctgaccccaggccaaaccaaagcccccacgctgtccattcacagccatgccttcccctcgaacaaaacagaaagtacgaaacaaggctgccttttaattgctatcagatattcggatatcccgtctgatgtcagcaaggcccccgcgccccgccggaacccgcagggatggagcagcaccgccgcctgactgcacagaagggctggggcagggtcgctgtgcctctcggcctccttgctgccaccgtctcttagcctcggggcgcctggtgcaccgtctcctcttcgggtcagcccagcctctggcggccctcggaaggaggggaggcaggggtcgggggggtgagccggaggcgggggccccgtcgcgcacgcatgcagacttgccctgtgttggcttcgtttgttctcctcctttgctaaagtgatcagatagtcctgtgaagcagctgccagccaggtggacagggcagcggtgctgggatgccgcccgtgggctcctcg

SEQ ID NO: 135081 - DNA, 797 bp, Homo Sapiens
  misc_feature (661)..(661): n is a, c, g, or t
  misc_feature (695)..(730): n is a, c, g, or t
ttttttccacaaaaatatattttttaagcttgttatataaaatcaaacacttaacattgtcaacatttcttcagttattcaaactcactgatatctaactgggagtagtttgtattctggaagacttcctaagctaaaagtatatttacatatttacaacacatgtaaatataactgaagaactacttcaaataatgttgaaattcacagaattctagagatttatagttatagtttagaagtatcaccaatttgtttgcaatcaaatgtacagcactaattatgaaaaatgttttaactattaaaccaaaaggggagaaaaactgggagggaaatatatggtgttaaagtcctgtgataaatacttagaaaattaaaaagtaataatatacattcgatttaatgaccaaaaattttttttgaatccctggttgtcatttttggtagcttaacccagtctgtcagaaggcagtatgctatgctgtcaggaactctccactgcctcgtcagagccatgctaaatgcagtaacagcactggctgaaaataaggaagatgatgttagcaactttgagtttcacgcaccttcccaatacaggctaagtattcctgcttatatgtattcctgaaagattaaaaggcccgtcacccattcataccanaaaatactttctcaacatgctttaaaaggattcnnnnnnnnnnnnnnnnnnnnnnnnnnnnnnnnnnnngagacaggtctggctctctctctctcaagctgcagtgcaagtggtgcgatctttgacctgcaactct

SEQ ID NO: 135082 - DNA, 1018 bp, Homo Sapiens
  misc_feature (703)..(703): n is a, c, g, or t
  misc_feature (727)..(727): n is a, c, g, or t
  misc_feature (886)..(887): n is a, c, g, or t
  misc_feature (895)..(895): n is a, c, g, or t
  misc_feature (926)..(927): n is a, c, g, or t
  misc_feature (971)..(971): n is a, c, g, or t
tttttagccacaaaaataagactttattgaaaaaagtacataattcaatataaatacaataaataatcctccccaaactgtccccaggaggataaataatccccaaatttcccttcccatctaataaatactcaaccttatcataggtcagcatcacatgtcagtcagtattggtaattttcaacatatgcaggtcccactaaaattaatggactaattaacctgttggctcacaggtgcctggggtggtagatttatcttggccttgctgggccatggagatctgagtgccatccttgagctgctgcctttagggactcagggttgctgctccatgggcaaagacccgggcggctacagccacaaaggcctggaggctgcgaaggattttgaagcggagaaggagacgctgccatggctggctgggactgaggcttggaatctgctgagtctcccagtggtgaccctcaggctgcaggagttggctgaggcccagtagggaggcatgaagctggcccacagggctatcagggagcagagaaggctcccctgtgaaaatatccgatcctagcagcttctcataaaaaatcagaccctggtggatcctttgcaagcagaactgactgttgtccctgagtccttgggggtcacagccatctccacactggatatggggaacatcatttgtagtctcttcatctcnctcttctcttagattcatgtgtcncactagtggatgtgcactccaaggcagtgtgcagagcttctgtgaaagctgctggcactgagtccaggcagggctgctgcccccggcacagctctgccctgagctgtacagggcagcagcacagcagcatacagctctgctcccagcatcttttttgcnntctctcanatctggctggctctgcgcctgcacaatctgnntggatctctgccacttcacttgctttgagctgatcctctgtaancgcgtcctgttgggtcctcaatgtcacgagttgtagctcgtgcgatc

SEQ ID NO: 135083 - DNA, 641 bp, Homo Sapiens
  misc_feature (280)..(307): n is a, c, g, or t
  misc_feature (641)..(641): n is a, c, g, or t
ctttatgcttttccctcaagctgtaagtactctttagcattaaattacatcgtgcatatacaactacacccatttagatttgccttggaatataatttcaaggcctttaaaatattaaaaaatatttttataacctatttcatagtttaatttggctcgttaaatagttttgctagggagggaaacattttgtgttctttaagaaaattgatatgtgtaaatgtgttcacttaaatcttgagaaaacctaaggatgaagtctgttgttttgtttttcctnnnnnnnnnnnnnnnnnnnnnnnnnnnntgttgaagaacaagaatatttaccattaaaaagaagaaacattatccaacaaaaaggagacatatagatttgaaaacacttattttactgtcttcaacaacaacaacaaacagataggcaggggaagtccagaggactcagaattgaagcagctctatacaataatgaaggtggtacaatgatgtgactgcaaagaaaatgactaaaacaaaactttacaaacatcttcatgtttgtaatgtattaatgcacaaaatatcaaaaatagaaagtactgagtttcttccccgcaggtttatgataaactatcaaccttctatttaatgcatttccn

SEQ ID NO: 135084 - DNA, 1033 bp, Homo Sapiens
ctttaatccgatcacccagagcactttttaacatccaatctagttcagaaagccgctgagagagtttttctgatacatcatgtaattcttgttctgttaatctctttcttggcctctgggggaaaggtgaattgcaggatgaggctgtagctctgttttcatttctttttcctttgggaggcttccttgtcctaggcccttggacctgagctggatatacttcccatttgctgcctttaggcaacttggaaattaagaaaagtccatcatctagatccccagaaaattccgtatgctctccagtagaatttacggctggggagcagtgacttgaatgcaagtattcttttcctatggggcagggtgctcgaggctctgaagggtggtagggtggatgtaaaggaatagctgctcggataggctcccctagcttcctagcatttggaatcccactcacagaaagggtttccgtgtcttcaacaaaggatgtcctactcttggacaaaacactaggagggtacaacatatcttcatgtgatttagaacttggtgaggctaaggcttttttagacagcatttcattaggacattgagcaccattacttcttagagaaaaggtgtgtgctgtgtctccaagtctaatgatttcaccagtggattctgcttcatctccatcccaagaggggcccaacatctcagaagacaaggagcacttttctcatgagatgtttcactgatgcgttctgtaagatactccaacaaaccatcaaatatttccaggagattcttaatagattctttatctcctttcactatattttctcctgttatgtgagacaagctgacctgcaagtagtccaaggccagtgaatcaattactgcttgtacattgtgtgcatcatcttcttgactcctaggaataactatgaggtctggtaccttttctcccaaaatagactgataaagagcaataaaaacattagcatcacagtcttgaagttcatgtattctcagcatgtatatgacacttaaa

SEQ ID NO: 135085 - DNA, 970 bp, Homo Sapiens
  misc_feature (693)..(922): n is a, c, g, or t
gtggcccacccgggggatttaggtgtttttaaaaggccatttcttgtggggccctttgggggaaaaaagggaacccaagggaatatttctcacagttgttcccctttttccaaggaatttgttttatgccaattttcaagaaggtccctttaccaagggcatttaaacagccacggtaagtttaaaagttcatttggggatttaaaaggaaggaattaaaatctcccttagagggggttacaaagtttattcaaccattttggaaaataatcaattaattccataggaatttagtgaaatctgtcaaaaccaatgtcaagtaacttgtttttaaagtggcaacgcaaatatagtaaagcaatggctttaatgactaaatgaaagaatcccaaagcacctagaaatattttttgaagaaataataaacaaattttcatgatttattttgtccatttgcaatttcagtattttagctctatctcatatcattttttggtaggtgctgttaacatatgaggttaaagtggtaagtctcacaataaagtagccatcttctttgaatatttcatctcttcatttctatgaatataatcatctttcagctgcatgattccttcagcctgattctcatttcatgtctcaataaacgtgtttttgcctgataaagagaactgtgcacatattgattctgcnnnnnnnnnnnnnnnnnnnnnnnnnnnnnnnnnnnnnnnnnnnnnnnnnnnnnnnnnnnnnnnnnnnnnnnnnnnnnnnnnnnnnnnnnnnnnnnnnnnnnnnnnnnnnnnnnnnnnnnnnnnnnnnnnnnnnnnnnnnnnnnnnnnnnnnnnnnnnnnnnnnnnnnnnnnnnnnnnnnnnnnnnnnnnnnnnnnnnnnnnnnnnnnnnnnnnnnnnnnnnnnnnnnnnncggccgtaatggccgaattcccgggcatatgtccggtaccgtcgactg

SEQ ID NO: 135086 - DNA, 1119 bp, Homo Sapiens
ggattgtgatgtaatctttatttcttactctgagctccagttagaaaagtttgacaatcattgttatagagctatgttcagaaagtggagactttctgactcactgtgagctctgctgtatctatgcgctccctggagagggagcaacttgctaaggtacagtcctgtccattggcatggatatttattgttccacatgttgggaaaaccatgtgcaataaaaatcaaacatatgaaacaatggctgtcattgtaccacagtatacattgtatcttggtgaaggttcttaaattactccttggagtttcctaattcacttcaggaaggatttgttgtgttccgtctttatgctgtcacttgcaaacacttttgctttgctagttcttgtattagatcttcatatacttgcaaaaagaggtcctcttcagattttgttccatccaggtacacaacttcccatgtgatgtcctgcatttcttgtctgtactttagatacatgggccacacatggccatcaaagtatcccggagagtctggaggctgatagacccttgtactcctcctccttgttacattcttcatatggaatagtcaggaaatagcttctattccatatagtgtcaaggggcttataattaaaaagaagaaaaccttcgatgattaaaatgggaatttcctcagcactttcctggtctgttgataccacagagtgtcttgcgctttccatccagcaggaaatggctgacatcattttttccatgttaagtgcttcaagcacatcgtactgcaaaaatccatttttatctgtctctatctcagactctggcttgaagaaatcatcctgagatatgacactgcaatttgggaggtgtttctgcaaattcttagccagtgttgttttgccactgtttgtcacaccactgattccaatgataaatgttttcataattagctttgaaaatcacagcttcctaatatttcctggcgccagttcgagtcctcccaaacacagcggcagaggcgacagccaagcgcgcgcctgtacccagtgcgccgctacccgcagctcgctccccgagaggcccacagcccctttccccacgctcctcctgggttag

SEQ ID NO: 135087 - DNA, 1102 bp, Homo Sapiens
catattgagactatttttctaattaagaatagggggtagccataaagagctgtatgttggagggggaaacatggtgggcgggcagtttggttttctttgtgtatccgcgtttctctcacacttcatttgtagcaactcaggccagatgttttcgtctgaaattctctgggcttgtcattccacctgtatcgtgctgcaaaccaggtgttatgctagtaggcatctgccctcacccctctgcctgagttttctgtaggcagatgttaacctgagaaaacaagtgccatgtggacaccaagtaagcatttttgataatgaattagagcaccagtttctactgaatggagcaaaaaccttcagccatggccaggctgcatccctttggtcctggagtttcatctacttactgccatcttccacggtctttgcactgtcccgtgtcccatccccctgggaggcagaagagattgcctcggagtggccttatttttctcgcaacttgtgaaatgatgtagtgctctatgtaatatggccgagtttccaagctgtcatccaatggaagtagaatcttctctttgaatcatatggtacaggtgccaatatgactgctgctatttagagtcagagaggtggaagtcactgggtccctttcccagtgacagagcccatgatgtctaacactactgcactttgtcagtgtgtgagtgatggcgaatacgcagtgttgtctctttgatttggtaattccgttcctgacagtaataaagccactgctctaaagtagtttatacagttcttcagttgtataaatagcacagagtagtttttgaaaggttaagaaaaataagtgaaaagacatacacgatatatgaaatggctccaaatgataattgttcaaacctttataaaatgtgttttcgtactcttatgctgccagaggtacttcttaaaactcttctcgtcttggttttataagcacaccacggaggtctgacagatgtgcttgcttctactacagagcaagagaatttgcactttagctatatgtgaaggatattattttaacaaattcctgattctaataaagttattttattacatg

SEQ ID NO: 135088 - DNA, 1113 bp, Homo Sapiens
tttttatttttatctctatttattcagatgaaaaaaaatcaaggcttaatttaagtaacttgtccaaggtcaaggagttgacaagtggctgagctggagttcagcatctcagacatcttcctttgaatccttgccttccttgtgaatttcagatgacggagcatgacggctgcatgattatggggtcaccgggcctgtcctggccctgagggaccaaggatcagaagggcagaaccaactcgctcagctagtgaagtgcaatggacatgatctgttcctggcttaccctccgctggccttcaggaggtttctgaatgcaccaggggcctagagaagcagcaactgctggactgtattgccaggtagccagtagcgtggggccctggaagaggctggaggatactgcgctgtcactgagacacctgccccaggtcctccatctcagccactgcccacaaacacagctccacagccagaaagacccagccacagaaatgccagcaaacaacacccctggctccccacatcccacggtaaagctccaaacgcttggagcacacacaaggcctgactccaggtcaccttctctactgggacagaaagggtgccctgggggtggggaagggcctggggctggcagagccaggctgtatttgggtcattttccaggaggcctgggttatttctaacaccccctcctccaagaagacaactttgcctcctgccccttgaggttcttccttcttgtggcatccagcattttctctggtaactgttgtgggtattttttgcagtttgggaaactaaaaaatatagaaaactgcaagaaataattacagtcaccaatatgcttgccactcagaatcaaacactgccagagttttccatattggcttttctaggcttctatatgcatctatatctaatctggatctgtggctggatctatatctgtagctatgtgtgtacctgtatcttgatctattgtgcttttgaaaggaaagtacgtactcaagtccccggtgaccagcaccctcatgctgacatcagatgtcaaatgcaactccagttcaggtcactcttctacaggggatgtgtatcctttctaccttt

SEQ ID NO: 135089 - DNA, 545 bp, Homo Sapiens
tgaacagtaattcatttaattgcaaagcattttgaaataaaaaaaatcaaacttaaaactgtgttctgttcctggaggtggcctgaggcctccccgacagcccagcacctgcgttcctggtgcgaacacgctagcacagggcctgccgcagggcctggatgcgggcaacgcaggcgccaatgggctggcgctgagcctggagctcctctgccagcagctggatctgcatttccacctggggccatggagggacaggcagggctgagagggagcacagcccggggcgtccccagggacacctggggatggcctggggcctcacctgttccagctctttctgcacctgctgctctacttcctggtcctcaggccccggctcctctctgttcagctccagccacctgcgcaggctgctcgcttgccgccgacaggaccagaggttctgcttggtggtctggtagtgcagtagttgctgctggatctcctcaagttcagcctcaaggtccaggctgcctgcagttgaaagtccaggcccagccctggtg

SEQ ID NO: 135090 - DNA, 1038 bp, Homo Sapiens
  misc_feature (127)..(222): n is a, c, g, or t
  misc_feature (330)..(330): n is a, c, g, or t
  misc_feature (584)..(584): n is a, c, g, or t
  misc_feature (654)..(654): n is a, c, g, or t
  misc_feature (695)..(695): n is a, c, g, or t
  misc_feature (735)..(735): n is a, c, g, or t
  misc_feature (768)..(768): n is a, c, g, or t
  misc_feature (791)..(792): n is a, c, g, or t
  misc_feature (857)..(857): n is a, c, g, or t
  misc_feature (911)..(911): n is a, c, g, or t
gaaaaaacaaagtacaaactttattttgtttctttacaaaggcacggtggcctcttggtttttttctccccactttcttaacaaaatataatagcttctccttgaacacgaagacctcaaaattgtnnnnnnnnnnnnnnnnnnnnnnnnnnnnnnnnnnnnnnnnnnnnnnnnnnnnnnnnnnnnnnnnnnnnnnnnnnnnnnnnnnnnnnnnnnnnnnnngagagagacagacatttttggggtggaagatgagacctggaggcagaggtgggggctggggggtgggagagtggcgaattctagtgccgagatggggaagggggaggnggggcccagcagcagcaaaccccaaccaagaagcaacggagacctccgggcccccagaatgccccagcctagtcttacccccaaccatgtaagtgcttaaaggagaaagaagaaaaccccaaaagaggaaggaaaggggatttaaggctgacaatcccaggctggctttgggcagggaaaaaataacctggggttttgtttaattttccctgttcttaaaaaacatatttaaaggaaaaaatgctttttggcanagagaggccaggcatctccgtgtcagcttcctccaccccggggcccaaaggccccgcctggggtggcccnatgctcaacacgctctgcgacaccccagcccgggactcggnttgaattggcttcgttcaaaggtcgatttacagtattganaaagaggtcataaaagagcccaaatgacatcgntattttgtaaaatttctcactcnnatcgccatgtctctccctgtggctgccccggtccctccagccccaaggaaaaaagaggctggggngggaattaaggagaactccccgtcccccgagggtcctcccggtctggtcatggngtcacttctgaggtcggatccgaggggttcaaggggggggctccgggacttcggaaggtaaaataaagtcccctgtcccccaacctgcttctggggcccattgtggatgctgaaaaggtcaattgcg

SEQ ID NO: 135091 - DNA, 1030 bp, Homo Sapiens
  misc_feature (224)..(232): n is a, c, g, or t
  misc_feature (449)..(941): n is a, c, g, or t
  misc_feature (948)..(948): n is a, c, g, or t
  misc_feature (991)..(991): n is a, c, g, or t
taagccattatatgcatcagtttattgttcattcataaaactaattttataagcacataaattgtaaatttctgttacagttaatgtttcattaccactgtgagaggagatccttaaaaaacaatagtaagtcctattggtataagtcctttttgattattcttctcaaaccagtaaagttttgacattaggcacgattattttatcactttgtatgttttagnnnnnnnnngtgaatatatccactccactctgttctttaggaaaaaagtagcttttccaagtacaagagatcaactaacttgatcatcttttttaggcaatgattgaacttttcatttcacagagcataatccatcattttttaaatttggttccttagattataaagctaaagatgctaactcttatgtaaaatttttttacataaacctcgtgccgaattcttnnnnnnnnnnnnnnnnnnnnnnnnnnnnnnnnnnnnnnnnnnnnnnnnnnnnnnnnnnnnnnnnnnnnnnnnnnnnnnnnnnnnnnnnnnnnnnnnnnnnnnnnnnnnnnnnnnnnnnnnnnnnnnnnnnnnnnnnnnnnnnnnnnnnnnnnnnnnnnnnnnnnnnnnnnnnnnnnnnnnnnnnnnnnnnnnnnnnnnnnnnnnnnnnnnnnnnnnnnnnnnnnnnnnnnnnnnnnnnnnnnnnnnnnnnnnnnnnnnnnnnnnnnnnnnnnnnnnnnnnnnnnnnnnnnnnnnnnnnnnnnnnnnnnnnnnnnnnnnnnnnnnnnnnnnnnnnnnnnnnnnnnnnnnnnnnnnnnnnnnnnnnnnnnnnnnnnnnnnnnnnnnnnnnnnnnnnnnnnnnnnnnnnnnnnnnnnnnnnnnnnnnnnnnnnnnnnnnnnnnnnnnnnnnnnnnnnnnnnnnnnnnnnnnnnnnnnnnnnnnnnnnnnnnnnnnngtcagangtgcgaaaccgacagactataagatacaagcgtttcccctggnagctcctcgtgcgctctctgttcgaccctgcgctacgga

SEQ ID NO: 135092 - DNA, 1192 bp, Homo Sapiens
  misc_feature (715)..(738): n is a, c, g, or t
  misc_feature (796)..(1084): n is a, c, g, or t
  misc_feature (1090)..(1090): n is a, c, g, or t
cttcgtctgaatgctcccgcccccctcttcggggggcctttgttaggaacaaagagaagaggggctttggggggcacaagagttggcgccccgggaaggcgatgtgtttttcggtggcgcgccccccccttgttgtcgttgcaccatatcttgcatgcttggtctgtcttctcgtcagtgttctttttgccatgttaaagttttattaagtttcaatacaaaacattccaaaaagtgaaaagtgatctataatacccaagttctatgttcaactaccagttaaacaaggaaaacattttctgtatcattctgttttacaaccagtataaacccagaagaatcaagatctgattccttttccacacatctgctaggtcagtaaactatcaaacaggtatctggtcattttaacatactccttatattcctatttggtacaatctctatatcctatactatcttcaagatatctaaatatcttaaatatttagggtatctcaagagccagaaggtcctcacagaagcgttaacccaagtaatcgtaagagtatagaaagattgggctaagacaactatggagtgcaaaaaccacataaatttggtcattacccttgtggtctgtgattagtagtaggttgtcaaatgagagttaaaaatgttgtattatccctagttgcaaatgttccaaataagacagtgccataactacacgacnnnnnnnnnnnnnnnnnnnnnnnngcctacaagccgcgggccgctccaacatcagaatggtaaccctcgtgccgaattcttnnnnnnnnnnnnnnnnnnnnnnnnnnnnnnnnnnnnnnnnnnnnnnnnnnnnnnnnnnnnnnnnnnnnnnnnnnnnnnnnnnnnnnnnnnnnnnnnnnnnnnnnnnnnnnnnnnnnnnnnnnnnnnnnnnnnnnnnnnnnnnnnnnnnnnnnnnnnnnnnnnnnnnnnnnnnnnnnnnnnnnnnnnnnnnnnnnnnnnnnnnnnnnnnnnnnnnnnnnnnnnnnnnnnnnnnnnnnnnnnnnnnnnnnnnnnnnnnnnnnnnnnnnnnnnnnnnnnnnnnnnnnnnnnntcgctngctggtcgtcggctgcgggagcgtacactcatcaaggcggtaacggtatcaagatcagggaacgcaggagaatgtacaaagcaacaagcagacgttaagcgg

SEQ ID NO: 135093 - DNA, 1042 bp, Homo Sapiens
  misc_feature (76)..(95): n is a, c, g, or t
  misc_feature (549)..(549): n is a, c, g, or t
  misc_feature (575)..(575): n is a, c, g, or t
  misc_feature (633)..(633): n is a, c, g, or t
  misc_feature (732)..(732): n is a, c, g, or t
  misc_feature (764)..(764): n is a, c, g, or t
  misc_feature (808)..(808): n is a, c, g, or t
  misc_feature (869)..(869): n is a, c, g, or t
ggttttaaagacggcccgtgccaagctaaaattaaccctctctaaagggaataagcttgcggccgcctgctcaggnnnnnnnnnnnnnnnnnnnngggctgttcctttgggttttattacatggtggggtcggacacagctgagaagcaaggacccatcccgggaagtcaaacacaggagggcccctggctcagccgccatacccactctccccgggcagttcctgagtcctccaccgcccctgcccagccccttctgctgcctctccccgccccccaggccaggcgctgggccagcaatgcaaatggctgggggtgggatcaccaaagagaaggccaagccaactacccctactctgccaggccagctccccacaacctgcatccccaatacctgaatctccatttgcaaacacagtgttatgcccaggggtcgggctgggtccttcccatcccagggcagctgaaggtgggcggcccctatatactgcctgagggccttcagggactttgctcctctgtgcaccctcacaacaaccctgtgaggtangtggggtgggaaggagtgaccccctnggactaaggctcaaggaggcaatgtgaccgggccaggaaggagacatccaccatgcancaagggagcccgggagaggggacgcaagtgccggagagacacagccagacattgccacacatctgccatgagcagtccactctgcccagaggtcctggnggccaacttgggcttaagaggtccaagggggncccgcccgccctggaggaagagtaatcaagcccacggtgcaacnaggaagcggggagaggtgctctccctctcaggccggggcacccatgtaaaaataagattcnatggaaccagtcctgagtgattgggccaatcagtgctctgtgtaaacagatgacctgggcgggaggccagaaactcacgactcaccagtcgaagggggggactcacgtctgcgatcttgtcagcaatcaagagcgttatccacataacgttcggaattatccaaacaaaaaaa

SEQ ID NO: 135094 - DNA, 1117 bp, Homo Sapiens
  misc_feature (396)..(396): n is a, c, g, or t
  misc_feature (593)..(856): n is a, c, g, or t
  misc_feature (1003)..(1003): n is a, c, g, or t
ctcttgctacattcatcacacttatggggtctgtctcccacggggagtctctgatgtgagataaggttggaattcacagtgaagctgttcccaaaatcattatatttctcgcttctctctcccctgggggttagcttctcctcaactgtcacttgaccaaaatctggcattttcctgttcagtctttctccaggggagttccccagcggccttttcagactgacttctcgttcataggcttctttaaacttgagaccctgagaaatatccttttgaaatcttcccagtaggaccccatgtgatcttgtgtcttcagaagtttcttgatcattttcagtcctggtctcacgatccagtgagaacacattcccgtaattctccagcatcacatctctntagaggtccctctgagcaggttccaaacgcttccactccttccggatgaagtacacagctacatcctcaaaggttaccagctcctgggacttggcctttaggagcgcagccgccaacatctcatcccccaagggaagagagaagcgagaaatataatgatttttgctgttcccaaaatcctcccgtgccgaatcttnnnnnnnnnnnnnnnnnnnnnnnnnnnnnnnnnnnnnnnnnnnnnnnnnnnnnnnnnnnnnnnnnnnnnnnnnnnnnnnnnnnnnnnnnnnnnnnnnnnnnnnnnnnnnnnnnnnnnnnnnnnnnnnnnnnnnnnnnnnnnnnnnnnnnnnnnnnnnnnnnnnnnnnnnnnnnnnnnnnnnnnnnnnnnnnnnnnnnnnnnnnnnnnnnnnnnnnnnnnnnnnnnnnnnnnnnnnnnnnnnnnnnnnnnnnnnnnnnnnnnnnnatgggcgctcttccgctcctcgctcactaatcccttcgctgggtcgttcgggtgggggagcggtatcactcactcaaagcgtatacgttttcacaaatcacggatacgcaggaaaacatgtgggcaaaggcagcaaagcacgacgtnaaagcgcgtgctgggttttcataggccgcccctacaagacaaaaacacctaataaaggggggaccgcaggtaaaaataaaagtcctggaaacccctgggtctgttgactccgtc

SEQ ID NO: 135095 - DNA, 1001 bp, Homo Sapiens
  misc_feature (671)..(683): n is a, c, g, or t
tttatttttacaaaaacagaagcatgttttatttcaatcctgttaagggagagggatggaaaacacaaaataaggggaggggtctctttatataatacacacaccaggatcaactacaatgaataatacccattccatccctcccccaccaactcctatgtgggttccaaggccagctgagaatagatgggacaagaattaagacactttggcacagtaacatggccaatgcaccgaaagatggagagaagagaatttcccagggagcaaggccctgggcctcagctgcttccccagtggaggggtaatgagaaaactttggctcagcaggaaggcggttgtcaaaaatctgggttaccttaactggactctccagatcacagactacgggctgaatagagtcaagatgtctatccagtccattctgttctctgctttctctaagatcacttctcttcaggcttgcaattattgagggttggcctgcttctcctcttcatcttggaaggcagggggagtaagtgcttattctgcccttcctatatctaggccacttaattactattttcttggctctaaagagacagaagccaactaacaagtccggctctctttgtgaaagtcggcttgaaagagcccttgtgttggcaaaactgcctctgcaaatgggnnnnnnnnnnnnngagcctaccccttatagaccctccccaagcttgttcagacacctcaattgtgtgagatgtgggcagaaaagacttggtccctctccagagttggattaagcaatcccatctttgactggagatagggatgagaaagcaggtgctagcaggggaaagaaccggggaaagcaaggcagtttacactaggttgcagattcaagcctatggattgtgaagagccacctaagctccagagaagaggaaatctctgacacgatatgaacaagtgaatattttagcggcaaccctgtaattcccatagactaaaagagaatggtc

SEQ ID NO: 135096 - DNA, 1510 bp, Homo Sapiens
  misc_feature (58)..(58): n is a, c, g, or t
  misc_feature (85)..(85): n is a, c, g, or t
  misc_feature (155)..(155): n is a, c, g, or t
  misc_feature (180)..(180): n is a, c, g, or t
  misc_feature (206)..(206): n is a, c, g, or t
  misc_feature (299)..(344): n is a, c, g, or t
  misc_feature (1036)..(1046): n is a, c, g, or t
gctacattatgctccgctgtatgtgttgaatgtggcgatacaattcacacagaacagnttgactgatacgatttatacgatcctntaggaattgccctcgagccaggattcgcacgagcagataccactataaaatgtgtatatatctagacttntatgtgatctgatcgtatatttttntaattgcacatgctatgtacaacttntaaattgaattaacaacttcttgaacaaaaatatataatgcatatcttttaagtattgtgtgtatatatgtaaagatatgtattgcatacatnnnnnnnnnnnnnnnnnnnnnnnnnnnnnnnnnnnnnnnnnnnnnnattctaagtgagctatactaaaaagaataactatgatagttttatttagcacatcagtgaatatattctctatagcacaagaaattacttgcttgctcattgatttctttttcttccctgctgtatttgcagaagatgaacaagtttctgctgtttgaggcacagacttttctggaagcagagcgagccacctgaaaggagagcacaagaagacgtcctgagcattggagccttggaactcacattctgaggacggtggaccagtttgcctccttccctgccttaaaagcagcatggggcttcttctccccttcttcctttcccctttgcatgtgaaatactgtgaagaaattgccctggcacttttcagactttgttgcttgaaatgcacagtgcagcaatcttcgagctcccactgttgctgcctgccacatcacacagtatcattccaaattccaagatcatcacaacaagatgattcactctggctgcacttctcaatgcctggaaggattttttttaatcttccttttagatttcaatccagtcctagcacttgatctcattgggataatgagaaaagctagccattgaactacttggggcctttaacccaccaaggaagacaaagaaaaacaatgaaatcctttgagtacagtgcttgtccacttgtttacaatgtcctccttttnnnnnnnnnnntgagtttaaagattttgttcagagagtaaatatatatccatttaatgattacagtattattttaaaccttaagtagggttgccagcctggtttctgaaaaaccaaatatgccggacagggtgtggccacaccaagaagacgggaagacctggcttgtgaccctggcttcccatgtccttctggtctcacccgcgaagtgccctatcctggaagtatgaaatgttagccaattaataccaagacacctcatctgctccttccccagtggatggggttcttctgtaaaactgtttgcacatggccaggggagggaactaggacccttgtgtcctgtctgagccttatggaggcaggacggtgtcattggcggatgtgtcctgctccattgagatggatggcaaaccccatttttaagttatatttctttgatttttgttaatttagaggtgtaggttttgtttttt

SEQ ID NO: 135097 - DNA, 1031 bp, Homo Sapiens
  misc_feature (246)..(254): n is a, c, g, or t
  misc_feature (458)..(888): n is a, c, g, or t
  misc_feature (891)..(985): n is a, c, g, or t
ccattgaattttacattcctttattgtattaaaaacagaagtgattacaaaggaaaatgtagcaacagtaatgctttatatttcctttatcttgtttgtgtccatgaagtaattagtactaacaaaaaagcgttaatttttggcacatatattttaggtttgtaaattgcacattccatataccttcattgtgttgaaacagacagacattataaaggtgaatgtaaaaacaataaagctatagcnnnnnnnnnccaaaaaattatagaattttagagtgtttacataactggaaatacttaaatatttttatttataaaatccttgagttttcaaaaccagtacaactgagctgcctttgagtcatttgtatctggaatatagcacttccctttctcttattttgtgtagttgctgaggaaatgggttttcagtatacacctcgtgccgaattcttnnnnnnnnnnnnnnnnnnnnnnnnnnnnnnnnnnnnnnnnnnnnnnnnnnnnnnnnnnnnnnnnnnnnnnnnnnnnnnnnnnnnnnnnnnnnnnnnnnnnnnnnnnnnnnnnnnnnnnnnnnnnnnnnnnnnnnnnnnnnnnnnnnnnnnnnnnnnnnnnnnnnnnnnnnnnnnnnnnnnnnnnnnnnnnnnnnnnnnnnnnnnnnnnnnnnnnnnnnnnnnnnnnnnnnnnnnnnnnnnnnnnnnnnnnnnnnnnnnnnnnnnnnnnnnnnnnnnnnnnnnnnnnnnnnnnnnnnnnnnnnnnnnnnnnnnnnnnnnnnnnnnnnnnnnnnnnnnnnnnnnnnnnnnnnnnnnnnnnnnnnnnnnnnnnnnnnnnnnnnnnnnnnnnnnnnnnnnnnnnnnnnnnnnnnnnnnnnnnnnnnnnnnnnnnnagnnnnnnnnnnnnnnnnnnnnnnnnnnnnnnnnnnnnnnnnnnnnnnnnnnnnnnnnnnnnnnnnnnnnnnnnnnnnnnnnnnnnnnnnnnnnnnnaagcgttccccctggagctcctcgtgcgctctctggttcgacctgg

SEQ ID NO: 135098 - DNA, 1454 bp, Homo Sapiens
  misc_feature (24)..(24): n is a, c, g, or t
  misc_feature (32)..(32): n is a, c, g, or t
  misc_feature (50)..(50): n is a, c, g, or t
  misc_feature (68)..(68): n is a, c, g, or t
  misc_feature (95)..(95): n is a, c, g, or t
  misc_feature (159)..(160): n is a, c, g, or t
  misc_feature (229)..(230): n is a, c, g, or t
  misc_feature (326)..(326): n is a, c, g, or t
  misc_feature (1131)..(1131): n is a, c, g, or t
  misc_feature (1161)..(1161): n is a, c, g, or t
  misc_feature (1184)..(1184): n is a, c, g, or t
  misc_feature (1202)..(1202): n is a, c, g, or t
  misc_feature (1214)..(1214): n is a, c, g, or t
  misc_feature (1237)..(1237): n is a, c, g, or t
  misc_feature (1262)..(1262): n is a, c, g, or t
  misc_feature (1264)..(1264): n is a, c, g, or t
  misc_feature (1311)..(1311): n is a, c, g, or t
  misc_feature (1319)..(1319): n is a, c, g, or t
  misc_feature (1323)..(1323): n is a, c, g, or t
  misc_feature (1332)..(1332): n is a, c, g, or t
  misc_feature (1342)..(1342): n is a, c, g, or t
  misc_feature (1353)..(1353): n is a, c, g, or t
  misc_feature (1374)..(1374): n is a, c, g, or t
  misc_feature (1414)..(1414): n is a, c, g, or t
gtgggaacttcttcccactttctntcagtttntggtagttgaacctccanctgagtagctgctgctcnagcattcttcttttggacttcttctgnctgtagcttcctgtgttctcagtcagctcattcaccaacctagcataatcctggcgtagttatnntagttctgcagactgctgcttttccagttgatttgtagtgttgctgactgcatctctcagtataccatnntcctgcttcaagtgagctatctctgcctccatctgctcacgaacttgctgaaacttcatctgcatctgttgagtctcttgataactgacatgtatnttgttttgaaatacattatgttccttttctaatgttccaattcgatctttcatccttgttataaccacattgcttctttctttctctgtcatcatttcctgggttaactgcttacaccgatcctttgtagcagcagcatcttccttcacagcagcgagtaacttgtccttttcttgaagctgatgtataagcgtagtcaattctcccttacttgacttctttaaagcatcttgtattacaccagacttctcctttagcaagtctacaacacaaagagcctcatcttcagaaaacatcatagtcttcaaggacagaagaaaatctttaaacttcacttcagcattttctttgtcagtttcggtcttcagttttttagtcccagatttctggatcccttctacttggtcaggtttaagcaaatcaataacctctctcttatctaccacaggacttgagtcagcattatccatcaaaggaatataagtagttgcatgaataaggggttcatctacgaagacattttctgtcttttgtttctttgatgaagctttcttcttccctgatccactttcttgtttagtctcttggtggaggggcaatgcttcttgcctttttgatggtaccatgagagtttccacctttttatcctggtcatcgcttccatttttagacttcttctgccctggtttcttcttcgaggcagctgcttcagagggaggggtgggctgtttagtaactgggacaggttctacttttttgccaggaatctttgatgcgtcactttctttgatgacctgctcttcangcacaggcttttgtttcttttccttctttnttctttcccctacactacttgangtttcaacgacattcaantggacaggtgcnactttgatcatctctactggcanagcatctgataattttaagtctcgnangacaccctcagagtcggatcatggaggttcccatctgggatctcgtngcgattcntggnctcgagggncaatccctanagtgagtcgtnataattcgtatcatgtcatanctgttcctggtgtggatttgtatcgctcacatccacacancaacgagcgggagcataatgtaaagctgggtgctaagatg

SEQ ID NO: 135099 - DNA, 952 bp, Homo Sapiens
  misc_feature (433)..(463): n is a, c, g, or t
  misc_feature (600)..(649): n is a, c, g, or t
aaagcaaaattccaattgccctttctcttttttgtaccgccgggagcttgagttcagccattatcccctccaaagggaaatataaagtagttgccatgaataaaggggtttcattttacgaagaccatttttcgttccttctgtttcctaggaggaagctttttttcttcccctgatccactttcttggtatagtctcctggggggagggggcaatgctttcttgccttttggatgttaccatgagagtttcccccctttttatcctggtcatcgcttcccttttttagacttcttctggccctggtttctttttcgaggcagctcttccagagggaggggtgggctgtttagtaactgggacaggttctacttttttgccaggaatctttgatgcgtcactttctttgatgacctgctcttcaagcacaggnnnnnnnnnnnnnnnnnnnnnnnnnnnnnnnctaacactacttgaagtttcaacgacattcaatggaacaggtgcaacttgatcatcttctactgccaaagcatctgataatttaaagtctcgaggtacactctcagagtcggattcatggaggtttccattctggannnnnnnnnnnnnnnnnnnnnnnnnnnnnnnnnnnnnnnnnnnnnnnnnngtaggaataagcttttgttctcttttctgttttgcaagaacttcatcatataatgtttctttcatgaaaagccagaagaagaggaaaattactgtaataactattgaaggaataagaacaataaaatatgctgactcataaaactccatggtacttttgtcaatgtgatcctataaaaccctgtgcggccgggaaaggagaccgggaagacgcggcggcgccggcactacagcccgggccgcccgctccgaggcgccgccgccgcccggacgcgtggtcgacgatatcccgggaattcggacc

SEQ ID NO: 135100 - DNA, 1232 bp, Homo Sapiens
  misc_feature (344)..(365): n is a, c, g, or t
  misc_feature (719)..(859): n is a, c, g, or t
  misc_feature (897)..(992): n is a, c, g, or t
  misc_feature (1000)..(1027): n is a, c, g, or t
cctttttgatcccggaacatttatttccagaggcttttgatagaagagcacaatcttgaataaaattacaccactgtacttaagggcaacactacatagtaagcaaaatctgctctgaaccctttcacagaagagacacttcagaaaggaattttacatctcctgacagttttacaacattcatacctctgatgcacttcaagccccaacccatctctcattttctaacttctttaacagaaatgtgtgttcacaagttgtgtgtgcgtgcacatgtgcctctgtgtgtacacaaaaggctcattttacctacttgataaatgagctgagacgatgttttgggnnnnnnnnnnnnnnnnnnnnnntgttaccccaacacgatggagaagccaatccaaaaaagcttcatgctagagctagctttctcctcagaaacttacatcctaaaaacatccctatgggtgcctaaaaatggaaatccagtgagttcatggccttgagttcactcctgtcctgaatttctcccagtgcaggtccagaagggcgagatgtggcagaaaggagaatgtgggaatgtgtgagtatcccacagccagctcacagtgcagcttgcactcagaaaggagactcagggacacaaggtctcaggatgcacagttcaccttggcctcatgtacctgggctggggagagggagaccattcaaaagcctgtgcttgnnnnnnnnnnnnnnnnnnnnnnnnnnnnnnnnnnnnnnnnnnnnnnnnnnnnnnnnnnnnnnnnnnnnnnnnnnnnnnnnnnnnnnnnnnnnnnnnnnnnnnnnnnnnnnnnnnnnnnnnnnnnnnnnnnnnnnnnnnnnntgtggtggtatgcacctgtaatcccacctactaaaggnnnnnnnnnnnnnnnnnnnnnnnnnnnnnnnnnnnnnnnnnnnnnnnnnnnnnnnnnnnnnnnnnnnnnnnnnnnnnnnnnnnnnnnnnnnnnnnntctgtctnnnnnnnnnnnnnnnnnnnnnnnnnnnngcctgtgcttcaacctgactcttcagccttggtttctcccagtactgtcactgggtcttaggaactttaatgctcataactaatccctgtgccccaggaactccattatgagcctcaagagtcctccttaaggtattcagctggtgacttcagtctgaccactagccacctgcatagttccatagcccttcttggcatctcgacc

SEQ ID NO: 135101 - DNA, 1325 bp, Homo Sapiens
tatgaaaagttcaaggtgtcactgatgagctcaacaaactgttgatcttgaccacgtggagttgcggaccgtgggaccgaaggcgcgcttgcaggcccgtctctggcggtacccgggccccgtaccctttgcgtgggactgtgcgcgggtggggccaccacgcaccctggggctgctgccgttggcccggcttcaggctcaggaaaataataataacgattttaaaactatgttgagcgagacacttttttttcccggaatgataatgagaaggctcggcgtagggaggggaagaaggagccccccacttatataacgacttgaagttatatcacttttgcttggggagattccgggatttccgcccgcgccaggtctgaggctggttaaagatcttcaaacttttttcccttaagagccaataaacaaacagacgccccaggggccgacttaaactctggtagagcccgagttcgctggaattctcagattcgaaggaatgcacacgcctgcggtgctcgcagagaagtccctcggaagctaggcgggtcgctttcgcaactgggactccaatgttcccagtgggagcggagctctcaccgcggcagcccccaggttcccgtaggcgccttagagcaaaggtggcgggggatcgcgctgcccttcgcccgccggctcggaaccatgaacttgtattccgggcgccgcgctcctgccacagtgctcggctaaagagctctaaggaattcgggatctgggtacacttcgggatctcaggcggcaacctgtgtgcgccgcgcattcctgcccagatgtaccttgtttccccctgggctggcctgtggactcttgggcagctcccgggcggggacgaggggatgcggtctgggggctagtttagaagcttcgagcgcagcgagaaaacaaagggagcctggggctgggaggctctgcggagtccccgcccgccctgcagattagcaggcgcgtcgcgtcggggcttcccgggcagctctgctctggggaattagaacgaactctagcggccgtttgcaactcggctgtgggcgcgagggcatcaacaggtggccgtgtgcagcggagaggccaatggcgaggacccggactggggtgaggacggctggccttggggctgactgggtggcggatgcgctgggtgaccttttggctttttcatttccgaggccggggagaaggaagtagctaaaaggtttttgtaagttctgccctagggctctaatttctgacataccccttgactccccagaaatcctttgcaacaaaaattaaaacagctcatatgc

SEQ ID NO: 135102 - DNA, 1034 bp, Homo Sapiens
  misc_feature (352)..(466): n is a, c, g, or t
  misc_feature (637)..(645): n is a, c, g, or t
  misc_feature (668)..(748): n is a, c, g, or t
  misc_feature (751)..(769): n is a, c, g, or t
  misc_feature (821)..(869): n is a, c, g, or t
  misc_feature (875)..(875): n is a, c, g, or t
  misc_feature (883)..(884): n is a, c, g, or t
  misc_feature (903)..(903): n is a, c, g, or t
cattcatccaacaaatatttattggataccaagtatgtgcttggcactgtaccaggccttagggacacagaagaagaagtatacagcagtgtaaactgacatttcttaaccactatataaataaaccccactttactactaatgtgacatttcaacatgttatacctgataagacatatgtaaagagggcacgattttgaggtatatagcttctttttctctacaattaccatgtgatataaattcctaaaccccttcaaatagctttataaatgaagagcttccactaatgaaaacctcccaaaattacagttcagttttagggagacaaaggaaatgaacttcgggtatnnnnnnnnnnnnnnnnnnnnnnnnnnnnnnnnnnnnnnnnnnnnnnnnnnnnnnnnnnnnnnnnnnnnnnnnnnnnnnnnnnnnnnnnnnnnnnnnnnnnnnnnnnnnnnnnnnncagcaaaaccttgtctctaaaaaaaattttaataaaataaatagcctaccctattactatacacatcaagcataaaacgggcaacaaaactcaaaaagaactttagattggaacttgaaagtattatttattctaaggcttacagtattatagttccagaattgtgggagnnnnnnnnnctgagaaaatcatttttagtaannnnnnnnnnnnnnnnnnnnnnnnnnnnnnnnnnnnnnnnnnnnnnnnnnnnnnnnnnnnnnnnnnnnnnnnnnnnnnnnnttnnnnnnnnnnnnnnnnnnnacagagaaagcatgaaagatacagcacgtatgaacactttagtgatctgggnnnnnnnnnnnnnnnnnnnnnnnnnnnnnnnnnnnnnnnnnnnnnnnnnatatanacctcgtnngcgattctggctcgagggncaattcctataggagtcgtataaatcgtatcagtcaagctgttcctgtgtgaattgtatcgtcacatccaacacaagagcggagataagtgtagctgggtgctatgatgactatcaactatgcgtggctac

SEQ ID NO: 135103 - DNA, 910 bp, Homo Sapiens
cttctcggacgtgctggtccgctgcgaggtgtcccgcgtgctgctgctgctcctcctgcaagcaccgcccgccaagctgctgccggagcacgcccagaccctggagaagtactcctgggaggcttttgacagccacgggcaggagagcagcggccagcttcccgaggagctctttctgctgctccagtctttggtcatggctacccacgaaaaggacacggaagccatcaagtcgctgcaggtggagatgtggccactgttgactgctgagcagaaccacctccttcacctcgttctgcaagaaaccatctccccctcaggacagggagtctgatccatcccattcacccagtgacttctttttgcccaggcctggactttttgcatcagtcacgttaaccagatgactttgcctgttaccaaacctcatgcatccacgtttgcgtctggggaggaataaaaagacatcgttcccgcttctgcgttttgttattcctactgccgccataggaattatttcgttggctgaacgttaccagcaccccgagaacacattttgatagaatcagagtagaggacatggctgtcttctaaaaagccacgacatgaaaatgacaatccctttcgtctccttcctccgctgcttccacctaacgcagcctcctgcctccgcctttgtttcatagtgaggattttattttgcacggcgccctccctctaaatacctaccctagatgatttcatcctgcccctcacttcttaacatattcctgtgtctttgtaatggccaaatttctccttccactcgtccgcacggtacgtcttcatgggagtcattttattccttacagcttccttgtaaccacagccctaaatccatgataaagctactcttgtactcctaaaaaaa

SEQ ID NO: 135104 - DNA, 795 bp, Homo Sapiens
  misc_feature (587)..(587): n is a, c, g, or t
  misc_feature (645)..(645): n is a, c, g, or t
  misc_feature (687)..(687): n is a, c, g, or t
gatttgacattctgtgtttacttgtatgaggaaaaacagcacatagaggcatccacagtatttaatttgtttggataacagttacagataaataggtacaccccatatacaattaccaatactttttatacagttcatatttcagtacatcaacactattttatttacactctatttatgcacattaacatctttctaaagtcagtgcattgtcaacaagttttatacagtcatttacaaggtgaatgtggttaatagttaatttaataaattttccgctagttcatgaattaaaaaaattaattacaaccagtataacaaacacagatcaaacaacattagtagattgtgctacctgcttaaataaaacatctgtaaagaaattatttaaaatcttccactttttaatgggacatgtccaggtaggaaaggacagattttatatactgaaaatcttgaaactataaagtatgcattttgtctgactttattacattagataatttaggccagtcctacctatttgcaattatattttttctgaaaaggatttcaatttaggtagccatttacagatacctttccanatgctctgagaactagatattaatagttactgggcctcagaatatcagacacaatacnttaggtacattgggaattaccaactaagaggaacaagggtangggaactctgcacattaaggaaaaccattttcggggtccattttaaaaacacgcccaaaagggggggactttctcccttcttttttaaaacccccccgaagggggcgc

SEQ ID NO: 135105 - DNA, 1725 bp, Homo Sapiens
  misc_feature (58)..(69): n is a, c, g, or t
  misc_feature (1455)..(1455): n is a, c, g, or t
  misc_feature (1559)..(1559): n is a, c, g, or t
  misc_feature (1591)..(1591): n is a, c, g, or t
  misc_feature (1595)..(1595): n is a, c, g, or t
  misc_feature (1648)..(1648): n is a, c, g, or t
  misc_feature (1650)..(1650): n is a, c, g, or t
  misc_feature (1690)..(1690): n is a, c, g, or t
  misc_feature (1706)..(1706): n is a, c, g, or t
tctgatcaactttggctcctttttattcaggaagcatacactaattctttttatacannnnnnnnnnnnacattccagaaataagcgaaaatagcagttttaaatatgttacaaagttggcttttcaggcttaataagctttttgagagagggaccagccaactgaccttttcatcaaagcaccaatgtatcttcagtcttttaccaagctctaccacagctgtggttgccttggatgtgctgcacatccaaaccgtgtgaaagctataatggagagttgctgtgagtctctctgcaaggcaccaagaacaaacagttcaagcttcctttcttcagattgaaccaaagtttttgaaactttcaactgctctctcaagtagtgctctctcagcgtgaagactagaatttgttaaaacccatatatcacaagatacagtaaatcacttccaatagtctggaaatcacatggtagaagttataaataaatgaacactaaaattactttaagaaaagttttacatcatttagttggtaaggacatttacgtgtacagcacaatttattgtcaaacattctataactggcttcacacaaagatgaaaatagattaatacaaaatgatctgacattttcagtaaatctggaattaagactggatttttattgtagtcaatatcaactttacatattgttgcagattgctgtgctatgccctttaaaatgataatttctcagggtaaaattccatttggatatgtgttcttgcttgtcaaactactaaaatctgagggacacagcaatatcaaagacacaaacagtaactgcacaatatcatctgctggattaagctaatacaagtggacagaattctttaggttccaatatctaataaaccactatgtgaaatgaacaaggtgagacatcttatgaatatactctgcaaccggaacatgtagcatttctttaattcaaaaatctgcctcattaggcatttacaaaataaattagtaagatctcaatttgcttgaggcataacaagctcgtaatggcccacttggccttcctgtttgagctgatctagtaggtcttccttccgtctttttctacctaccactaggtacctatcatggcccaccccatgagacttactcttaagaccatacttctgggcaatctgatgtatttgcttccgttcatcattagtcagctctctagagaaagtcaaatctgtgtggctctcggagcgggcgtagtttctgatgatctgttcaatatctctcttggcaattttattcaccctctctacatccagaccaagcccttcccgcttatgctgctctttcactgagataggctcccgtatgccctcaccagatttacctaaaccaaccaccagtccaatccatctttctcagcagctgatttccaatattatcttcttttgatttgatgttngagcgggcgttcaatcatagtcagctctctagagaaagtcaatctgtgtggctctcggagcggcgtagttctgatgatctgttcatatctctctgggcattttnatcacctctctacatcaagacaaagccttccngctnatgctgctctttcactgaagataggtcccgtatgccctcaccaaattttactnancaacaccagtccaaccatctttctaagaagtgatttcaanataactcctttgattngcggtgggaagcccccccg

SEQ ID NO: 135106 - DNA, 1195 bp, Homo Sapiens
  misc_feature (446)..(446): n is a, c, g, or t
  misc_feature (1086)..(1135): n is a, c, g, or t
ataattaaataaataactttatttatgatacttcagattttataaatgccaactacatagcaaagtcccataaattttaaccgagacacaaccaccaatcaaggccctttgaaaaatcaaagataataaagtgtcaagggagaaaagttttgttctcccaacagagaatttaatcaatgaacttacttctctgatcatttaaggttcacaatgggaaaacttcttttcttttaagggtaccctgaatcaattaacagtcaatcaacccacatttagaaaaataaaccccatagttaagaaaaatatatcaaatgcccttcacacccataatgtaacaaaactttgacaccagaatgaaaaacttctcagtctctgtaccaaaccaggtgttagtccacccatgagcaagttcgcctgaataacagcatctatacaccatgatgtanctgagaactacagctgatatccttttattgcctgtggctcggactgaagccaatactataaataccacagtgaattccaatggtgaagagcagcagtgtagatgttggaagtctacaaaccaggctgtagttcagtaagacaagtcatgaatttacagaaactaagaaatggttaactcgaaaagaattctggtggctggcttaaaatctgtcactgtccagggatggtaacagaagacaggtgcagagagagacagattttgccacatgcaccctcaacagtgagaccattctctggatgtttggaaatgcttaacagatttggaatgaacagattttcacagaactcaggattcctggtacatcaggcagtagtccttaaacttttgcccatacgttgtggagcatttacaaaagcaattctttggacagtgagccctcaatgcctttttatatgtggcttcttgaatagatcacattagaaattgagcagtccccttcctcagctaccagtgtcaatgctggtatgaggaggagcagtgggggcactgacagacactggtgattcgtttcttttatcatagtggaactgagatttcatttcttttcagtagaaaatattaatccaagggaagaattnnnnnnnnnnnnnnnnnnnnnnnnnnnnnnnnnnnnnnnnnnnnnnnnnngaccgcgtatgcggccgcaagcttattcccttgtagtgagggttaattttagcttggcac

SEQ ID NO: 135107 - DNA, 1102 bp, Homo Sapiens
  misc_feature (689)..(690): n is a, c, g, or t
gtgattctccacgtttattaggaaaagcttgcacaattaataatcaaaatcacaccgtgaaactcattaaaacacagatccaaatcaccacaaattattgatttctatgcgacgtaatgcccagaaggaacccctgtcctgtgtaggaaccgtcacttctctgcggctcagcagctggcaaggggaggtggcagtccccttctgtgtgtttggctggctgctgggactgggcgaggggttggaggcgggagccccacgcacagtgggctcaggggcggagaggcagggctcctctccagctaggaagagctggcagtctaacccatggaagtgggcgttccccccactcaaccacgtgccctggggaaatggtgagactgtccctcctgctggaagctgggggctcaggagcagtctccacagtctcctgcccatgggtcagcatttcctgagagtgagggagccaaggcccaaggccctccaaatgggctcctgggcttttattgccggcggccctgtagtcagcgtgggctggtcctgccctgcctgtgcctggcagggtcctggatttgaggctggggtccaggggttgctctgtctcccctcaggaagccccctgggccaagcagggtgggcctgcactcagcctgtgctacttcctggccatacatgggccaggccctgtgccnnctgccactgggtcccaaccaccatggcagtgatgtcaacatcaccatgtgggggccagggcgcttggggtaacaactcagacctgagacggggcccccacaccggccaggaagaggtggccttgctgagcccccaagtgcaggctgtgccagacagcatggtccatggggtattggggcctctgagagtggggctcttctctctgggccttttaggaggtggcctccttcagagagggccaggtggggccactcttggcctcccctctcactcaggcccatcccccagccccatcccctcctcaggacccctcatcggggcccctcctgggcacggtcagctgctcgtaggtgggcagggtgcccggccgtaatggccgaattcccgggcatatgtccggtaccgtcgactg

SEQ ID NO: 135108 - DNA, 362 bp, Homo Sapiens
agcgttcctattccacagccacctgggcactgcttccaggggaactgcaggggtcctgtctgtgagagaccccatggatgccccaggaaccaaggtgagagcagtgcccagcccagcctgtgattctccacgtttattaggaaaagcttgcacaattaataatcaaaatcacactgtgaaactcattaaaacacagatccaaatcaccacaaattattgatttctatgcgatgtaatgcccagaaggaacccctgtcctgtgtaggaaccgtcacttctctgcggctcagcagctggcaaggggaggtggcagtccccttctgtcgtcttctcacagccgtatagtagtagtaggcggccgc

SEQ ID NO: 135109 - DNA, 1081 bp, Homo Sapiens
  misc_feature (300)..(952): n is a, c, g, or t
ataatgcttccaggaagtttttctttttatatttaaaatgttacttttctgtatgatgtgcatgcaagtttaccgtaacttttcttaaactttttagtgccgtttctagtatattcctgtaaatgtcagttactgaaaatgagtccaatgtaagtagtttagcttgtttattgcaatgctggcctcaacacaacagaataaaaatggtagaaagtactctttgatgtttctggtaatcatggacccttctcctggggcatttgttttgttttcataataaaacctcgtgccgaattcttnnnnnnnnnnnnnnnnnnnnnnnnnnnnnnnnnnnnnnnnnnnnnnnnnnnnnnnnnnnnnnnnnnnnnnnnnnnnnnnnnnnnnnnnnnnnnnnnnnnnnnnnnnnnnnnnnnnnnnnnnnnnnnnnnnnnnnnnnnnnnnnnnnnnnnnnnnnnnnnnnnnnnnnnnnnnnnnnnnnnnnnnnnnnnnnnnnnnnnnnnnnnnnnnnnnnnnnnnnnnnnnnnnnnnnnnnnnnnnnnnnnnnnnnnnnnnnnnnnnnnnnnnnnnnnnnnnnnnnnnnnnnnnnnnnnnnnnnnnnnnnnnnnnnnnnnnnnnnnnnnnnnnnnnnnnnnnnnnnnnnnnnnnnnnnnnnnnnnnnnnnnnnnnnnnnnnnnnnnnnnnnnnnnnnnnnnnnnnnnnnnnnnnnnnnnnnnnnnnnnnnnnnnnnnnnnnnnnnnnnnnnnnnnnnnnnnnnnnnnnnnnnnnnnnnnnnnnnnnnnnnnnnnnnnnnnnnnnnnnnnnnnnnnnnnnnnnnnnnnnnnnnnnnnnnnnnnnnnnnnnnnnnnnnnnnnnnnnnnnnnnnnnnnnnnnnnnnnnnnnnnnnnnnnnnnnnnnnnnnnnnnnnnnnnnnnnnnnnnnnnnnnnnnnnnnnnnnnnnnnnnnnnnnnnnnnnctcaattcgggtaggtcgtcgcccaactggttgttgacgaccccgttaaccgacgctggctaaccgtatacgcttgagcaccgggagaaaactacccctgaaaccatgtaaagatcaacgagatggggg

SEQ ID NO: 135110 - DNA, 588 bp, Homo Sapiens
ctattgcaagaactctaagttttattgtgtaatgttgaatattgaaagtaatttttaaattcatgctgatagacaactgaaaggattattcacactgttggttctgaaaaaaaatttatcatacattcattcaacagtaaccagccagccatttaaagccgatctctgtattaccatgtattaaagcaaactgcagactactactcagggcatgaacactgaaaacctaaaaaggcatttttatatgatcatagaaatctcttgagcagatacaagaactgttaacagcagctgcattagcaagtagattccaaggtatggtccaaccatgtatatttgtaaataaaattgtatttgttatggtactctcttgtactgttcatattcttgacttttaatcttcacatcccatgcatgttttatccctagtttcatggatgacactgaagcacagtgattaatgagttgcccaacataaaccatatactaaatcccaaactcacgtttctgggtaagtgaacacaagatcctgttctcatactcaagacaggaatggcttgccaatgcaaaccctcgtgccgaaatctt

SEQ ID NO: 135111 - DNA, 1777 bp, Homo Sapiens
  misc_feature (114)..(122): n is a, c, g, or t
  misc_feature (1505)..(1506): n is a, c, g, or t
  misc_feature (1513)..(1513): n is a, c, g, or t
  misc_feature (1570)..(1570): n is a, c, g, or t
  misc_feature (1576)..(1576): n is a, c, g, or t
  misc_feature (1579)..(1579): n is a, c, g, or t
  misc_feature (1583)..(1583): n is a, c, g, or t
  misc_feature (1588)..(1588): n is a, c, g, or t
  misc_feature (1596)..(1597): n is a, c, g, or t
  misc_feature (1599)..(1600): n is a, c, g, or t
  misc_feature (1606)..(1606): n is a, c, g, or t
  misc_feature (1609)..(1609): n is a, c, g, or t
  misc_feature (1615)..(1615): n is a, c, g, or t
  misc_feature (1633)..(1633): n is a, c, g, or t
  misc_feature (1640)..(1640): n is a, c, g, or t
  misc_feature (1645)..(1645): n is a, c, g, or t
  misc_feature (1657)..(1657): n is a, c, g, or t
  misc_feature (1689)..(1691): n is a, c, g, or t
  misc_feature (1708)..(1708): n is a, c, g, or t
  misc_feature (1717)..(1717): n is a, c, g, or t
ttttaaccggctttcaccccgtgagcaaacctttttggggagccctctccgccccccccgtgtttgtgcccggccctggccccttccaaccgcaccccggccatttgggaaaannnnnnnnntgagcctagcgccatccaagtgcctccccaggaaagctgaactcctggagatagagtccctgagttttatgaccccaggacacactgtgctggctgctctgctgggaggcccaaagctgggtcccagtcaccccccaccttctgcactcagccttctccatctctgacccacacggcggctcccagcagtctcctcgactccatcctcaccccatgagttctctggctctccctttaacgtaccccgcatctgtccccgccgtggggcgggtcttcctcttggtcactcggtgactgccccggcttcctccccacccctcctgttccacccttacctgcctcatcccagctcagcagccagaggacccttcaaagccacatcactccatgccatccctggctccaaacccgccaagaacttcctgtcaggggaactgggggtagaagccatggctttgctggggccttggagacctcgtgccgtctggcctcccagtactcctacatcagctactctggcccccctgccccaaccaatcaacgtccttgctgttcctggctcactctcaccctgtggtctctctctcctgaagaaccaggaccccagcaggaaatgcagctgagcacagagggatggaacaagccctgtctactgctttattaagccccagcagaaaatatactgaagccaggttctcagtcacttcagcgtttcatttgggcttcaaactctgatgaagtgagccccacgaatcccctgtggacaggcatgacacaacgctggcaggcatgtgccaggcagggagagggtaggatggctggtggaccctcagaaagacccgacctgagctttccctgtagggactgagcagagtggagaattgagccccctaaagtgagcagcacagagccatggggggcaggggcatccctggctgcatagtgggaaggcaatggcctggccgccagggacaggcacagggatgcccagccaggcccgctgtcttcccgtgtgaggagtgaggcgccagggtatgcggtgggcaggaagctacatcctgaatgtcaaggggcagcccaggctgctcctccttccctcccctgcagttcagctgcagctccttggggtctccactgaggagggggccagtgggtacctgctgtgggcacctccacttctgctccaaacctaagaggggcagggcaggtccccacaggcagtgtcctggggaccacccaactgagacacaacaggctctggctgtgatgcactttaatgagtgccctgcccctatcaaccatgcctggctagctggctcttggatccctcagtgagggaagagatggctcttgggagcaaagcagtggatttccaagatttannacgagantcctactctagaaatcaggcaaagtggagtcttcccctactttgcgggaaacgcttncagtgncanacanggcanggaatccnntnnctggangcntgtggntgtgggaggagcataccnagcacanattcngacagcctcgtngcgaattctgggctcggagggccaatccctannnggagtcgtataattcgnatcaagtcnaactgttctgggtggatggtttccgtcacatccaacacaaagagccgagataagggtagg

SEQ ID NO: 135112 - DNA, 996 bp, Homo Sapiens
  misc_feature (738)..(738): n is a, c, g, or t
  misc_feature (794)..(794): n is a, c, g, or t
  misc_feature (895)..(895): n is a, c, g, or t
  misc_feature (897)..(897): n is a, c, g, or t
  misc_feature (924)..(924): n is a, c, g, or t
  misc_feature (964)..(964): n is a, c, g, or t
tcagatttagtttattacttgcacagacaaccaaagaaagaatggccaaaggtgcccagtccccatggaccttgcgcagggcaatgcccaaaagtgaccacatgacggccacatggatgacaggacacggggctgcaaagagctgcagccacgctaagtgcccaaggtgacctcagcggagcctggagaggcatcaggagccgcagggaggcgagagggcctggctgtgcccaggagcatggcgatgccctctgctgagagccgggtgcagctgtggcccatgtggatacgtgcaagggcaccatggcagagctctcccctgactcgtccctgggcttttccctcaggttcctccactcccaagacgacaccatcagggcctctgggcaagtgcgggcccattccccggctgtcctcctgctgtcccccgcaggtctttctcagcatggtgaacatgggagccggggctctgtctgcatgagggaggtgctcagaccctctgtacccccagcacataacaggtgctcaacacattcgccaggggagcgctgagcaaagcggaggcccgggttccctcctggagaaacctgcttcccctccaaggcctcaagcgtccgctccttcactgacctcaatcgttgatttcggctgacttcctatccctgggggagctttcacgctccgccgtccaggccgccaggcccgcagccgcgtccgctctctagggctgggccccangggctggacgactctctcgcctcgcttctcaagcgtaatcgggcggcggggctgcnagcctcactctccctcgtccgggattcggaaaacggagccacctccgcacgcaagctcttacggcacgcgatcctcggcacgtttgagcgtgtcacgttgnantgcttagagcacagattcatgtcatcngaaagtcaagtctctgcgatcttgcccaggcaatcctaangagcgataatcgaccagcaactgtctggggat

SEQ ID NO: 135113 - DNA, 973 bp, Homo Sapiens
  misc_feature (828)..(875): n is a, c, g, or t
  misc_feature (934)..(934): n is a, c, g, or t
cccacccccgcccccaccgagtctgtcctcctttcccctccactctgtcaagcacaaggcaaggccaaggctgacagattggccggtgaataaattgaagaccttttcagatttagtttattacttgcacagacaaccaaagaaagaatggccaaaggtgcccagtccccatggaccttgcgcagggcaatgcccaaaagtgaccacatgacggccacatggatgacaggacacggggctgcaaagagctgcagccacgctaagtgcccaaggtgacctcagcggagcctgggaggcatcaggagccgcagggaggcgagagggcctggctgtgcccaggagcatggcgatgccctctgctgagagccgggtgcagctgtggcccatgtggatacgtgcaagggcaccatggcagagctctcccctgactcgtccctgggcttttccctcaggttcctccactcccaagacgacaccatcagggcctctggaaacaaacagattgggggtcccctctagctttgaggaaaacacaaataagtcactcataagcttaagaaaagatgctctgtgtcactcaggaaatgggatttaaaaatcgtcagacagcttggaaaggcttaagagaaggaggggcgtcgcagaggccctctcagggtgcagctctgtcaaggggtaacaagtgcagtttcagtttttaaaatcacagtgaaacaccagagtaaggacagagtgaagagagcgctgccctccctgatgagaccagacccactcctggagggtagggacagtggcaagaacacagacacaggtggctgcgtgggggcnnnnnnnnnnnnnnnnnnnnnnnnnnnnnnnnnnnnnnnnnnnnnnnnctgtctgtcctgtggaacctcctccccggggctgaacctacacaaacagaacacagcanaaacaggggagaattcccttcggctgcaggagcccgcct

SEQ ID NO: 135114 - DNA, 1023 bp, Homo Sapiens
  misc_feature (534)..(534): n is a, c, g, or t
tttttttaatctgtgttataataggttctttcactttattgcttattgtaaacactttggccatagcaaatgttagtttttaaataaccgtaattcaaaactttcacatcctatactatttttccccaagaagcatcatctatgaaaacaatcagtgaactccaacagtctatactggtaatgtgcacattgatgctattatgacacttaatacaaatagtaaaaatactcatctattgtaggcttatgggtttgtaaaatgccttaagggaggccataaacaactcaaagaagagatggtgtggactgaactggcttctatttggggaaaatttgcagaatataggaggtacgcaataaatgtttattgatggtgaagatgagaaaaccctatttctgctgatctttcctttccgttttccttaaagaatataaggtatatttgtattcagcattctcagaatcatcacagaaaccctggcactttgagagtcttagccacagtgtaattgggtctgaccacacgcagaaganaaataaattagagcatatgtactattaaaattgcactgaaaactttatgtaagtcagggagcccctcaccagaacaggctgaaactcttgaatgctttgcatcctcatatataagaaaatcatcagtgcttaaagatcaaggaactcattcaaaacaaattcagcctttggaccttactggcaggtaggttatatttcagtcagatcaatatctttctaatataggtatttgaaagtaatatatgctacttataataatgatatagtaagcttcttatctgcaagtacaggtactataacttacaccttaaaatgctttgtttgattgtttcattcagcaaaattcttggcactgttttgggatttcactgaattttgatgatgatattggattaagcattttagatttaattgtaaaatgacacaaaaatctaatcatctatttccaatgttcaatatacaatttttataaatacataaaaaaattca

SEQ ID NO: 135115 - DNA, 1018 bp, Homo Sapiens
  misc_feature (64)..(64): n is a, c, g, or t
  misc_feature (136)..(136): n is a, c, g, or t
  misc_feature (143)..(143): n is a, c, g, or t
  misc_feature (157)..(157): n is a, c, g, or t
  misc_feature (183)..(183): n is a, c, g, or t
  misc_feature (204)..(427): n is a, c, g, or t
  misc_feature (1018)..(1018): n is a, c, g, or t
gggcgctttggaaacccagcacgcgcttaacgtcctgcttttgtgctttgcacacatgtcttcntgcgtacccttgatgtggatacccgtatcgccttgagtgagtgatacgctccccgcaccgaacgacgagcgnagcgatnagtgagcgagagcnggagagcgccatacgcaaaccgcctntcccgcgcgtgccgatttcannnnnnnnnnnnnnnnnnnnnnnnnnnnnnnnnnnnnnnnnnnnnnnnnnnnnnnnnnnnnnnnnnnnnnnnnnnnnnnnnnnnnnnnnnnnnnnnnnnnnnnnnnnnnnnnnnnnnnnnnnnnnnnnnnnnnnnnnnnnnnnnnnnnnnnnnnnnnnnnnnnnnnnnnnnnnnnnnnnnnnnnnnnnnnnnnnnnnnnnnnnnnnnnnnnnnnnnnnnnnnnngaattcggcacgaggccgacatgctcccggagatcgccgccgccgtgggcttcctctccagcctcctgaggacccggggctgcgtgagcgagcagaggcttaaggtcttcagcggggcgctccaggaggcactcacagagcactacaaacaccactggtttcccgaaaagccgtccaagggctccggctaccgctgcattcgcatcaaccacaagatggaccccatcatcagcagggtggccagccagatcggactcagccagccccagctgcaccagctgctgcccagcgagctgaccctgtgggtggacccctatgaggtgtcctaccgcattggggaggacggctccatttgcgtcttgtacgaggaggccccactggccgcctcctgtgggctcctcacctgcaagaaccaagtgctgctgggccggagcagcccctccaagaactacgtgatggcagtctccagctaggcccttccgcccccgccctgggcgccgccgtggctcatgctgccgtgacaacaggccaccacatacctcaacctggggaaactgtatttttaaatgaagagctatttatatatattan

SEQ ID NO: 135116 - DNA, 783 bp, Homo Sapiens
ttttttgactgtttcttaatcagtgccatgccaggaaaatagggatgtttccttcccagagatctgtgtgtcttttttcagaaacgtctgtgacaggcccatcaattttgaaatatttggtttttgagcctgtcactctaaaccagcgtttaacgttcaaaaggcaaataactgatgaccaggcggcacattgttctgctccgtgagtgtctggcactgggaaaggtgtagattgtctagaatgacagcaattccgacgccccagtcagtcctgcgtgattgtggcgagggcgcgtctggcaccgggaaggtgtagatcatctagaatgacggcgattccgacgccccggtcagtcctgcgtgattggcgagggtgcatctgtcgtgagaattcccagttctgaagagagcaaggagactgatcccgcgtagtccaaggcattggctcccctgttgctcttccttgtggagctccccctgccccactccctcctgcctgcatcttcagagctgcctctgaagctcgcttggtccctagctcacactttccctgcggctgggaaggtaattgaatactcgagtttaaaaggaaagcacatccttttaaaccaaaacacacctgctgggctgtaaacagcttttagtgacattaccatctactctgaaaatctaacaaaggagtgatttgtgcagttgaaagtaggatttgcttcataaaagtcacaatttgaattcatttttgcttttaaatccagccaaccttttctgtcttaaaaggaaaaa

SEQ ID NO: 135117 - DNA, 450 bp, Homo Sapiens
agtcagaaacaggaaacgtttatttaaatagtgtggtctttttttctttaatataaaacccccccaaatctgatgaaaacaaagttttatataccatataaacaagatttgtcagatttgaaagtgaaagttaaagtaatttacagttagcttttaaccctctcgggacatttagatacatcctgataatccatcttgtattagtgtgtgtcaattttacaatacactggggaaaactcagctattgtatttaacggtacagtttcatttatcaagtgtttcccattaattccattattagtgacagctaacaagtgaccccatcaaatgaagtgaatgacattagactgtggccagagttaaccacatctggattgctttctataattcacccagtttgcggggaagtaaacattctttgatttgttcataatatactgaagttaccta

SEQ ID NO: 135118 - DNA, 1017 bp, Homo Sapiens
  misc_feature (163)..(164): n is a, c, g, or t
  misc_feature (169)..(712): n is a, c, g, or t
  misc_feature (808)..(849): n is a, c, g, or t
tgtctacggtgaccagcgtatacggtagcgacgtcgctaaggggtgtcaaccgccactgacgacgcttaacgaatggtactaaggtagttgagaagcccacgtcccgagggagaggcgacagttccgtagcggcaggtcgaaacagagagccacgaggagctnncaggnnnnnnnnnnnnnnnnnnnnnnnnnnnnnnnnnnnnnnnnnnnnnnnnnnnnnnnnnnnnnnnnnnnnnnnnnnnnnnnnnnnnnnnnnnnnnnnnnnnnnnnnnnnnnnnnnnnnnnnnnnnnnnnnnnnnnnnnnnnnnnnnnnnnnnnnnnnnnnnnnnnnnnnnnnnnnnnnnnnnnnnnnnnnnnnnnnnnnnnnnnnnnnnnnnnnnnnnnnnnnnnnnnnnnnnnnnnnnnnnnnnnnnnnnnnnnnnnnnnnnnnnnnnnnnnnnnnnnnnnnnnnnnnnnnnnnnnnnnnnnnnnnnnnnnnnnnnnnnnnnnnnnnnnnnnnnnnnnnnnnnnnnnnnnnnnnnnnnnnnnnnnnnnnnnnnnnnnnnnnnnnnnnnnnnnnnnnnnnnnnnnnnnnnnnnnnnnnnnnnnnnnnnnnnnnnnnnnnnnnnnnnnnnnnnnnnnnnnnnnnnnnnnnnnnnnnnnnnnnnnnnnnnnnnnnnnnnnnnnnnnnnnnnnnnnnnnnnnnnnnnnnnnnnnnnnnnnnnnnnnnnnaagaattcggaacgaggccattctgatgttggagcggccgcggctgtgtatgcagcctgcaggtttccatacactgaagcttttacctcaactttnnnnnnnnnnnnnnnnnnnnnnnnnnnnnnnnnnnnnnnnnnggagactttttttgtaaggttcggcaattttctacggaagtccagcccgctgtgagtccccgcctggctagcgctgcccctgctgctgctgccgcgccacccttgggaaccacttcccgagcttatgtgtatataaatagttatttattaacatcattggtcattttt

SEQ ID NO: 135119 - DNA, 1058 bp, Homo Sapiens
  misc_feature (53)..(53): n is a, c, g, or t
  misc_feature (64)..(65): n is a, c, g, or t
  misc_feature (84)..(84): n is a, c, g, or t
  misc_feature (86)..(86): n is a, c, g, or t
  misc_feature (89)..(89): n is a, c, g, or t
  misc_feature (118)..(118): n is a, c, g, or t
  misc_feature (160)..(160): n is a, c, g, or t
  misc_feature (174)..(174): n is a, c, g, or t
  misc_feature (225)..(225): n is a, c, g, or t
  misc_feature (262)..(262): n is a, c, g, or t
  misc_feature (268)..(337): n is a, c, g, or t
  misc_feature (352)..(352): n is a, c, g, or t
ttctccgctctttgctttgtgattgtgacggaaccaattccacacggcacagntttgcctgatnncgattaatccgactccttntnggnactgccctcgaggccaagatttcgcacgnggctccaagtgccaacacctgcagcagcagaactgggcaatnatagtgctaatgcntcatgactgaatgccatgtgtctcacgtgctgtcaaatgtcatcctcctangcactcatccagggagataactgtattttcacttttncagatnnnnnnnnnnnnnnnnnnnnnnnnnnnnnnnnnnnnnnnnnnnnnnnnnnnnnnnnnnnnnnnnnnnnnnccatcttagccactnatctggggacagtgcagactactgaatccttggatggaagacagactgaggtagacaccccagagagggttgggtggaggagcttgaggctggggatgggactggaggtggagcatgccagaggccctgggagcgctgggtgctgagcccgtgaaccccctggccagccggacgttgatgcaatatggctttgtccagaccctatccagctgctgccccatctccaagagcctcgccctgctggaagtgcactgctagtctggttcatcagccactctgcacaggacccctgcccaggacccagggtctgcattttaggccatccttgctggataggcccagagcccagggtccccacctgcctgtagaaggtgagtcctgggttggccttctaggggtccagggagggagtaaaaatggcctggacagtctctgaggggctggaaggccctgcatgtggggcccaaagtggcactggcttatgcatcacgtgcaggttaagtgcatccggctcacctagcacctcttcctgctaggagacaaatctgccgagggcccagccctctgtcactccactaccttctcactgacattgcccactgcaagtcctcagacttgaccaaagaatatagcccatccaggcgctgaggatatatcttctgaccctcaagggtctggtttgagaaatagacaaaaacaaaccaac

SEQ ID NO: 135120 - DNA, 924 bp, Homo Sapiens
  misc_feature (135)..(135): n is a, c, g, or t
  misc_feature (167)..(167): n is a, c, g, or t
  misc_feature (217)..(475): n is a, c, g, or t
  misc_feature (531)..(552): n is a, c, g, or t
  misc_feature (771)..(771): n is a, c, g, or t
caaccctgtttaagtcgcgggttccccctttattaggtgattttttctctaaggggcgaccttgaaaccccacacccgcttaacgtctgcctttgtgcctttgctacattcttcctgcgttccccgatctgtganacgtatacgcccttgatgagtgatacgctccngcagcgaacgaccagcgagcgatcagtagcgagaagcggagagccccatnnnnnnnnnnnnnnnnnnnnnnnnnnnnnnnnnnnnnnnnnnnnnnnnnnnnnnnnnnnnnnnnnnnnnnnnnnnnnnnnnnnnnnnnnnnnnnnnnnnnnnnnnnnnnnnnnnnnnnnnnnnnnnnnnnnnnnnnnnnnnnnnnnnnnnnnnnnnnnnnnnnnnnnnnnnnnnnnnnnnnnnnnnnnnnnnnnnnnnnnnnnnnnnnnnnnnnnnnnnnnnnnnnnnnnnnnnnnnnnnnnnnnnnnnnnnnnnnnnnaagaattcggcacgagggttaccattctgatgttggagcggccgcggctgtaggcnnnnnnnnnnnnnnnnnnnnnnacctaagaaagtaaagaagggcaagttgctagtagcttctctgtagctctcaccatttatctttttaatgtatgcagttgatcacaagtgtggtaaggtgagtgtgccaggtcagcacaaattcccgatcactgtgataaatggtcaaagcaggatctattgacggagcctccctcaggtggaggaactacatatatgtatgcttatgctctctagctnacctatagtacctctttaattttgaatacctgatagtacgagtacttttgtttcaaccttctgggaaagaatttttccactaaagccaatacaggaggaacctaaagaatgcttttagagtaccatagtgggtccgggtgcagtggctcacac

SEQ ID NO: 135121 - DNA, 608 bp, Homo Sapiens
  misc_feature (219)..(243): n is a, c, g, or t
tcatttttcatctcattattttaatcattttgtcaaaaaatctgaacatgtgtacataaatacttgatttgttaaaagaatgtgtagcatagaaatccctgagacacattcaaaaatgacttgacatcttgacatgtattcaatgcaagtattcaccaaactaaataccaaggacttggctcctttccctgatatttgaggcatataaagctttaaaannnnnnnnnnnnnnnnnnnnnnnnnatttacatctttaaagttaaaattatattttttttctctgattcctggttttctgccagtttactgctcctgcatattgtcagttccagactgtaaggaagccacattggaaagcagataagcactttcaaccttagggtgccagttagtagaatgatagcacgtggaactaggaggtcccaacagatgattttgtctaacccactcattttgcagttcaggtgacagaggctcaaagaggttgtgatttgcagaagcatggctggttctgccactgctattgtaatgttatgcaagtccttcagtgggcctggaccttggctccttcctcggtaaaatggactgatggtaatcacagcgaatat

SEQ ID NO: 135122 - DNA, 991 bp, Homo Sapiens
  misc_feature (423)..(423): n is a, c, g, or t
  misc_feature (450)..(450): n is a, c, g, or t
  misc_feature (862)..(862): n is a, c, g, or t
  misc_feature (881)..(881): n is a, c, g, or t
ggtgttagctgctattttttgttttcatcttgggaaaccccagagtaagatccccataatcccctgggcttccccaggggtacacctgccaatgtggggatgagaagtggccaaccctaggccctggtgagagagcccaggaaagtgactggtcccacaggcccggggtgccccgtggcaacctacaaaggcccagcagagccagacttgctggggccagctctcccggagtactgaggccttggccccataaacccggaaaggggccccggggcatgaggcgtgcaccaccttcccacctggatggagtaggtcgtgttgtagtcactgtagaagttttggacggggacctcagaaccattcacggtgcacgggctgtagggctcccccatgcgctgaagcttgtccacgagtaccccgatngacgtctctgtccccgacatggcgtanatgcccccatctctgatgaaggggtatgacctctgctcgtgaagcatcagcctgaccccggccgtggacgcaaggaaggggacgtagtcttcctggcctatgtccaggatcaacttcaggccgaattcagttccagggttggccgaaggaagtgccttctctgtcatgccccagttgaagatgtaacagttgccatagtgagggtagaagatggacgtgaagttccggtagttgcagggctcagctccgaataggcaggccaggatcatctgctcgccggggtagctcatctctactagctcctgctgtggcacctgtgcaaagatgttggtggcctgggtaggatgtaccactctgtcaatgcctgggtagcactggtgaagttccggaaggtacactgggtcctgttganggctacattagtctcatgngccattttgcacccgtgggcattacagatcttttctgatgctgagctgcttgttaagccattgtggttgtctccaaagagatcaaggaccatggggtggtgggggttctc

SEQ ID NO: 135123 - DNA, 1032 bp, Homo Sapiens
  misc_feature (517)..(517): n is a, c, g, or t
  misc_feature (695)..(695): n is a, c, g, or t
  misc_feature (727)..(727): n is a, c, g, or t
  misc_feature (968)..(968): n is a, c, g, or t
  misc_feature (984)..(984): n is a, c, g, or t
atcatggaaataatacatttctccactgatatacaataccatgtaatgcactggaaaagttggaccttggagtaatagcacaatttgtaacattacagatcacctcttcccactctttgttccactctgagactctttccttttcctcgtgtatccagatacactgacatacggatgattttaaaagtgtcacaagccacagtggagccatatacatgcagttcagcctgattttacccttattttcttctaatacagactccattacaattttggaccatctgcagagagtacagatacacaaaaccaaaacaagtatctatgataataaaatcttcagaaacttttcagacgtacctttcatggagccccctccctcccccgagtagaaccctaacagggacctcgtttgttcctgtgagtcctgccaggacttgtttaatgggtgcttggggttttggttttcctccttattcttcctcctcctcctcctcttcatcatcatcttcatcatggnagtgtgtaatttcctggggggccagtgggaagaggttgggaggtttaatctcactaattgaccgtgtcagctggtgccgcttgtagtcagtgtctttgaaatccactgatgtgcggttccgggtggcacgaggagactccatctcattgatatctacgtgtgtgtgctcaccgttgantcatgaggcatcatgacatgggcagtcctgangatgtacgctgaagggtattacagcaggttgatgaagatgctgcatagaggtcagcataccgatcacttgactgtcaaaaagggtctgcgggagccattggaaaacagcttccatcatccatagcaatgtcatgtcatgattacttcctacacgtcctggataactgatgtggacgtcatgctatgtgcagtagctgtgagtcagcagaaattcagctcgagtcttcaaaggaccttgcantcaacagttctcgggnagtcagatcacaaaagtgcacctgcgttcttgattaatgcccaaatgg

SEQ ID NO: 135124 - DNA, 1080 bp, Homo Sapiens
  misc_feature (894)..(894): n is a, c, g, or t
tcattgtttaaaactctttactgatgtacatgttttaatgaaacaaataaccaaaaaaaatacacaaatccatagttatttaaaaacttaggatttttaaaaaacatgtctataaaaatacaacgtttaaggcagtttggaaatgcatttgtacatttctacaacgtccataaattctcttgaaaataagaatgttaacttcaattctataaaatacactgtacattttaagactgttctaaatatagcacacttcacaatggactgtgggttttgattcctgatgacaaatggattctatacatttcaggggggaaaggtgtaatatggatgtgagtttaaaacttttaatttctttttaaaaataaattatttctgaagcatacaatttataaaaattctatatacaaagtacagcaactggtaacaaaccccagttttaatacattttatatacgatgtaccagggtttagcaaccctgataggagcagaggcaatatacattctccgcatatttaaacataaaatttcttgatgtaaagaacaaaaatgacaaaaaaacaaacatcataaagagactttcatacatggcagtgcagagcttttttaaataaaaagttgcattgttcaacaccatggcaaccccttagatcagcatttttggacccttaatcctaagaaatgtgctaagagatcagagtggtagcaatgaaattaaggtcaagggctcaaacttatccaaaaccaatttaggggttccctctaaggcaatcgccacccaccctcacccccacgtcactgagaattctgggcgcagatacaacagtgaaagaatgaatcggtaagtgggacttttctgtttaataggatatatatctcactggcacctcgtngcgattctggctcgagggcaattcctataggagtcgataattcgtatcagtcaagctttcctggtgaatgtatcgtcacatcaacacaacgacggagcaaatgaagctggggctagatgacaccacatatgctggcacgcgctcatcggactgctgcatgatatacgcacccggaaggcgtggatg

SEQ ID NO: 135125 - DNA, 1393 bp, Homo Sapiens
  misc_feature (392)..(406): n is a, c, g, or t
  misc_feature (709)..(1258): n is a, c, g, or t
  misc_feature (1331)..(1331): n is a, c, g, or t
  misc_feature (1382)..(1382): n is a, c, g, or t
agagttttctttttcttctttttaacataatggacaatcaacgaagtatgtaagaaccattactgtttgctagcctcctttaaagggaattctttattgagggctacaataaatatgcttattcaccttgggctgcttttaagctgtagatttaatattataaacgatctttaaggtgggtaatttctcagttgttcactgggtatgcatcaagagttttaactaaattttctattttccttaaattctagaaagcgaaattattattgacgatggacaatttggaatccacaatggtgttgaaactctggattctggatggctgacatgtcagactgaaataagattacgtttgcattattctgaaaaacctcctgtgtcaataaccaagnnnnnnnnnnnnnnntctagatttagggtgaagctgacactagaaggcctggaggaagatgacgatgatagggtatctcccactgtactccacaaaatgtccaatagcttggagatatccttaataagcgacaatgagttcaagtgcaggcattcacagccggagtgtggttatggcttgcagcctgatcgttggacagagtacagcatacagacgatggaaccagataacctggaactaatctttgattttttcgaagaagatctcagtgagcacgtagttcagggtgatggccttcctcctcttgccgaattcttnnnnnnnnnnnnnnnnnnnnnnnnnnnnnnnnnnnnnnnnnnnnnnnnnnnnnnnnnnnnnnnnnnnnnnnnnnnnnnnnnnnnnnnnnnnnnnnnnnnnnnnnnnnnnnnnnnnnnnnnnnnnnnnnnnnnnnnnnnnnnnnnnnnnnnnnnnnnnnnnnnnnnnnnnnnnnnnnnnnnnnnnnnnnnnnnnnnnnnnnnnnnnnnnnnnnnnnnnnnnnnnnnnnnnnnnnnnnnnnnnnnnnnnnnnnnnnnnnnnnnnnnnnnnnnnnnnnnnnnnnnnnnnnnnnnnnnnnnnnnnnnnnnnnnnnnnnnnnnnnnnnnnnnnnnnnnnnnnnnnnnnnnnnnnnnnnnnnnnnnnnnnnnnnnnnnnnnnnnnnnnnnnnnnnnnnnnnnnnnnnnnnnnnnnnnnnnnnnnnnnnnnnnnnnnnnnnnnnnnnnnnnnnnnnnnnnnnnnnnnnnnnnnnnnnnnnnnnnnnnnnnnnnnnnnnnnnnnnnnnnnnnnnnnnnnnnnnnnnnnnnnnnnnnnnnnnnnnnnnnnnnnnnnnnntcgtgcgctctctggttcgaccctgcgcttacggatactgtccgcttctccctcgggagcgtgggcttctcanactcagctgtaggatccattcgggtaggcgtcgctcagctggtgtgtgacnaccccgtcagc

SEQ ID NO: 135126 - DNA, 1219 bp, Homo Sapiens
aaggctaggtacgaggcggggtggaatcggcacgaggtagccgccgaacctgtggaggtctggggcgcagaaccgctactgctgcttcggtctctccttgggaaaaaataacaatttgaaccttttggagctgtgtgctaaatcttcagtgggacaatgggttcagacaaaagagtgagtagaacagagcgtagtggaagatacggttccatcatagacagggatgaccgtgatgagcgtgaatcccgaagcaggcggagggactcagattacaaaagatctagtgatgatcggaggggtgatagatatgatgactaccgagactatgacagtccagagagagagcgtgaaagaaggaacagtgaccgatccgaagatggctaccattcagatggtgactatggtgagcacgactataggcatgacatcagtgacgagagggagagcaagaccatcatgctgcgcggccttcccatcaccatcacagagagcgatattcgagaaatgatggagtccttcgaaggccctcagcctgcggatgtgaggctgatgaagaggaaaacaggtgtaagccgtggtttcgccttcgtggagttttatcacttgcaagatgctaccagctggatggaagccaatcagaaaaagttggtgattcaaggaaagcacattgcaatgcattatagcaatcccagacctaagtttgaagattggctttgtaacaagtgctgccttaacaatttcaggaaaagactaaaatgcttccgatgtggagcagacaagtttgactctgaacaggaagtgcctcctggaaccacagagtcggttcagtctgtggattactactgtgatacgatcattcttcggaacatagctccacacactgtggtggattccatcatgacagcactgtctccttacgcgtctttagctgtcaataacatccgcctcataaaagacaaacagacccagcagaacagaggcttcgcatttgtgcagctgtcctctgcaatggatgcttctcagctgcttcagatattacagagtctccatcctcctttgaaaattgatggcaaaactattggggttgattttgcaaaaagtgccagaaaagacttggtcctctcagatggtaaccgcgtcagcgccttctctgtagctagtacggctattgctgctgctcagtggtcatccacccagtctcaaagtggtgaaggaggca

SEQ ID NO: 135127 - DNA, 1299 bp, Homo Sapiens
  misc_feature (632)..(632): n is a, c, g, or t
  misc_feature (738)..(738): n is a, c, g, or t
  misc_feature (822)..(822): n is a, c, g, or t
  misc_feature (1275)..(1275): n is a, c, g, or t
gagtccttcgaaggccctcagcctgcggatgtgaggctgatgaagaggaaaacaggtgtaagccgtggtttcgccttcgtggagttttatcacttgcaagatgctaccagctggatggaagccaatcagaaaaagttggtgattcaaggaaagcacattgcaatgcattatagcaatcccagacctaagtttgaagattggctttgtaacaagactctgaacaggaagtgcctcctggaaccacagagtcggttcagtctgtggattactactgtgatacgatcattcttcggaacatagctccgcacactgtggtggattccatcatgacagcactgtctccttacgcgtctttagctgtcaataacatccgcctcataaaagacaaacagacccagcagaacagaggcttcgcatttgtgcagctgtcctctgcaatggatgcttctcagctgcttcagatattacagagtctccatcctcctttgaaaattgatggcaaaactattggggttgattttgcaaaaagtgccagaaaagacttggtcctctcagatggtaaccgcgtcagcgccttctctgtagctagtacggctattgctgctgctcagtggtcatccacccagtctcanagtggtgaaggaggcagtgttgactacagttatctgcaaccaggtcaagatggctatgcccaatatgctcagtattcacaggattatcagcagttttatcaacaancaagctggaggattggaatctgatgcatcatctgcatcaggcacagcagtgaccaccacctcagcggctgtagtgtcccagagntcctcagctgtataatcaaacctccaatcccacctggctctcccgactggaggaagcacagcctagcactagcacaagtacacaggccccagccgcttcccctactggtgtagttcctggtaccaaatatgcagtacctgacacgtccacttaccagtatgatgaatcttcaggatattactatgatccgacaacagggctctattatgaccccaactcgcaatactactataattccttgacccagcagtacctttactgggatggggaaaaagagacctacgtgccagctgcagagtctagctcccaccagcagtcgggcctgcctcctgcaaaagaggggaaagagaagaaggagaaacccaagagcaaaacagcccagcagattgccaaagacatggaacgctgggctaagagtttgaataagcagaaagaaaactttaaaaatagctntcagcctgtcaattccttgaggga

SEQ ID NO: 135128 - DNA, 999 bp, Homo Sapiens
  misc_feature (409)..(898): n is a, c, g, or t
  misc_feature (948)..(948): n is a, c, g, or t
agaaaaattccactttaattaaactgttcagtctggatttttttcccccgatactaactgaaattaaaaatagaaatcaatttctgcgacctttcaaggcagtctttgaaatgtcaaggttttaaaaattattttacagcaggaatttacatataaatacactctgtacaatgcgttaactgaacaatcactgggcttccatcatggaggagaaatgattctaggacgagccagggcagcattcaattactgccttcttagtggaagacttttcagccgtctcagcagctcctggggcgacacgtctgcggtttcctcgtcactctggctgtcgctgctgtcggaactctcggagctactacttttctctggttttttattcttttgcttgcctcgtgccgaattcttnnnnnnnnnnnnnnnnnnnnnnnnnnnnnnnnnnnnnnnnnnnnnnnnnnnnnnnnnnnnnnnnnnnnnnnnnnnnnnnnnnnnnnnnnnnnnnnnnnnnnnnnnnnnnnnnnnnnnnnnnnnnnnnnnnnnnnnnnnnnnnnnnnnnnnnnnnnnnnnnnnnnnnnnnnnnnnnnnnnnnnnnnnnnnnnnnnnnnnnnnnnnnnnnnnnnnnnnnnnnnnnnnnnnnnnnnnnnnnnnnnnnnnnnnnnnnnnnnnnnnnnnnnnnnnnnnnnnnnnnnnnnnnnnnnnnnnnnnnnnnnnnnnnnnnnnnnnnnnnnnnnnnnnnnnnnnnnnnnnnnnnnnnnnnnnnnnnnnnnnnnnnnnnnnnnnnnnnnnnnnnnnnnnnnnnnnnnnnnnnnnnnnnnnnnnnnnnnnnnnnnnnnnnnnnnnnnnnnnnnnnnnnnnnnnnnnnnnnnnnnnnnnnnnnnnnnnnnnnnnnnnnnnnnnnaagtcagagtggcgaaaccgacagactataagatacaagcgttcccctgnaagtcctcgtgcgcctctgttcgacctgcgctacggatactgtcgccttcc

SEQ ID NO: 135129 - DNA, 1214 bp, Homo Sapiens
  misc_feature (771)..(771): n is a, c, g, or t
  misc_feature (839)..(881): n is a, c, g, or t
  misc_feature (936)..(936): n is a, c, g, or t
agaggggagatgctgaggtcagggcacttatgtgcatcaagtgatggagacagagtaaagagaatttatggatatatatgcatatcttgctaataagtttggtttatcatcacatcaagataaattgcctttagcatagaacttgagataagtagacgttcactagcaagtgctaacatttggatcagggcaaaggcgtttccaggagtgtttttataccagacccctgcttagtccatggggctgaggcatgtcacataactcagagcaagagccttctatttgtgtaagacccaaccctggggaaggatgcccgagacaatagctatgcctctgccccagcctgatgccatgtgatctagagcctgggcagcaacaaccctgtggtcaaagacatggaagaaacactctgcaaatcccacagtctgttcgacggcttggaaaggaagcaagtggcattgggacaattgctctacatgcctacagcttacctgtcaactacagggggctgccaaggtgtgcaagacgacctgggggcagagccatgctcagggcacagatagatggggatgggagtcgagatggggcatgggaagtgatgagggctctgagaacacatgaagcaggtattggacatcagcagatagatgagactccttggcaccacagtccgagcctggggttgggggatagctggggagttgtcaggcaggaacattgatgtagtcatctgaatcactgtcctccatcatggcggcaggctggtggtanaggctcacgtattcacagctggtcttcagagatggggcatggagccagggagattcagacacctgcannnnnnnnnnnnnnnnnnnnnnnnnnnnnnnnnnnnnnnnnnnctcccctgtgcctgcagcgtccgctccacgagcgcgccgcgggcaggcgctgtanatgttgttttgggagcgcggtcgcggcgaccgcggggcctctgggagctctcagggcgccatctcacgccatcggcggccgctggagagcttcccaaagcagggaaaggaggaaatggatcaagcgtgcacctcccaacgaagtgctctgcgatctggctcgagcaatcctaaggatctataatcgtacagtcaacgtctggtgaatgtacgccaatcacaacaagacggacaaatgtactggggcaagatgacatcaatatggtgcccacgcctcaa

SEQ ID NO: 135130 - DNA, 1037 bp, Homo Sapiens
  misc_feature (690)..(690): n is a, c, g, or t
  misc_feature (812)..(812): n is a, c, g, or t
  misc_feature (821)..(821): n is a, c, g, or t
  misc_feature (843)..(843): n is a, c, g, or t
  misc_feature (853)..(854): n is a, c, g, or t
  misc_feature (894)..(895): n is a, c, g, or t
  misc_feature (915)..(916): n is a, c, g, or t
  misc_feature (928)..(928): n is a, c, g, or t
  misc_feature (1006)..(1006): n is a, c, g, or t
gagcctgatgtagcattttgctttatttatttagtgacactggcccactgcattggtgaagaggagaaaaaaactaagtgctttctacaaatacgctctaggttgcaatctcatctgagctcgtaactgaaaaaagcatggctctcaggagaagcactttttgagaaatcacatgctttcggctctgggttccatgtgtcatttacacgggtccattttccagctttgctagagacaagggtcgcttgcagttcaacctgaccattggtaatgtggctggggcagaaaagtgggaccctggtggagacctttctgccccttcctgagcagcgtgtctgccgagagaatgagaccatcatggatcgaaagggacacatatcctattggtgccaacaacagagggggaactaagcatgtctggctagagatctggggtaggaatgtgtggattcaacaactaaatacacctttcatgaagcgatcattagtctgagggtctcctaaagctaagtgaaattatttatgtgttagggcttagtgaactcatctaaccgaactgcttcaacatgaagcaacagaaatccaacttgcagtgcagttgcaagctacttcttcaattccagcagcactgtaattgtcattcttaaatgatattagcattgtctctgctgcattattttgtttccttcnccagtctgactgatctactaccctgctatgtatgtactagctattgaatacatacatgccgagtgaacagatgaatctactgcagactgctgttgagagctgcactcttggtgtcagtttanagtctgaanatgtggaaggctgactactganatgattttcnntatagcacgagtcagaagcagagggagaactccctcgtgnncgatttctgggctcgagggnncaattcctatantgagtcgtattaaatcgtaatctgtcaaactgtttctgtgtggacttgtatcgctcaaattcaacacatagagcgggngcataatgtaagctgggtgctatgatgacta

SEQ ID NO: 135131 - DNA, 1516 bp, Homo Sapiens
gcgatcccatttttacttctccgtatatctgttcttaccccaaccctctttttctccctgttagttttttccctcttccccgtttcccttgaaagtacccttggcctggctttttatagtttattctctcaagataagctggagagaaaggggatacacttgtgcaagaatggatattttggtgctagattcatggaattttctaagtgtccaggagttttggttttaagcaccggcaagagctccctttggaaatttcagtgtggccaaatgattatcaagcattgcagcatctctgccagcctcccacccttagaaaggtggcagagtgagagtttaaatacccttggaaatgtgtttcatctcagtaatatttccactgggtatccatgacatacagtatggtctgccagggctgcaggcagagagccataagcaaagagaatccacagacccgctgaacagggactcaagccttctcctaaatctaagctttgccaaaaggttatcaacttccaggaccagcctagagaaataaatttaaattccagagagtaggctaggtgatgtaagtgactgactgaaaaaacaagtatcaataactcttaaagttttcagttagaaatttctgtaagttagcctcaagaaactccactactaaactggaaaaccatgactaggaacaggaagcggccctggggtagaagcattctaaagaattgtgacccaactgcatcaatatctgatttcatcttttattaaaagctgagagttaaagaactgtagggataactaagtccacctcaaagtccagacagaaactgccctcccaaagaaacaatgtttctttaaaacaaataccacaccttcccagatattatgggtaggtaagtgactaggttttgcagattaatctatagctgcccatgtgcatgtagtccagaaaacatgccaagaaggaagagctctgaaccagacacagaaaggcagtgtggcttcctcgctcaaggggaatgcaaagggctaagagccctggcttcaagcagctgttatgctagatgaggaaaatgcaaacagattcaatctctgggatattgctgccaacatgctaagcccttcaccagttgccttgattcgaagcagttcctctatgtatactggctaaatgatggactccggcagtgaaacccacatactcagcaggctgcattctaatgagaatgaaggaatttaactaatggtgtttgagctggaaaggtaaggtctgagagtcccagtgagctggaaaccccaaaaaagagaagaccaatccacctcaaaataggaaagaaaaacaaaattcatttaaaggtactctaaagatgagttctttacttctggaagaagaatccttttcttatagctccctcaacagcaatacttcttatccaagtatactctcaagcaagcagggctacagataagaaaatgctgggaagaggcagagcataaatccaaacaagaatttgcatctttg

SEQ ID NO: 135132 - DNA, 919 bp, Homo Sapiens
tttagcagattgacatagtgctttatttaagctgtctgtacgaaggaaaatcatgttcatccctatcatatacgtgtaaaaatactaaggatgtacagtgtacaaaaacagtttctcctagttattccacatccttgtgggtcatatacttcaggaaatagacaggtttagtatgaccaacagtaatagtaatacagtttcttgggtttatagttgcatctgcttaaaatccttaaccagatgactagatcttgcgcagatctaatgaaagaactagcaaggtcaagaaatgtcacaaactataaagctacagggaggtaattcaattaccaatttagaggttttctttttatttaaataaatactttacatttcatgcttgcctgtaatgcactaccaggagcaagataaggaaattctactgtagacagtacaaacagtagcagcaaagtgtgtatggttgaggtgtaatagagagaccctgcagttagtaaggaaggcccttacttttggtactctaggagaagcaagtggcccctgcaagaacagtcagctttaagaagctggaaatcagggatgggaaatggaaaacaatacttgaataatgctatgtaattagtgtagaaagcaaagctgagcgcgaccctgccaaccatctaagcagaaatggccaatttcctccaagatggctgcattatgacaagaagtcaagcttcatgacagttagtatgggctggagtctgcaaagtctgaactgtattctcatagaatgattccaggtttcaggtgttccacctgccagaacccaaaactacaactatgggcgacacaagggaagttttagaaatctccctctacacgcatttctggttttctattattcctccatggcagctgacagatctggaagtgaaaatag

SEQ ID NO: 135133 - DNA, 1071 bp, Homo Sapiens
  misc_feature (90)..(106): n is a, c, g, or t
  misc_feature (228)..(250): n is a, c, g, or t
  misc_feature (502)..(914): n is a, c, g, or t
  misc_feature (924)..(924): n is a, c, g, or t
  misc_feature (928)..(1014): n is a, c, g, or t
  misc_feature (1022)..(1022): n is a, c, g, or t
tattttttaattctgagtcattgcatcctctaccagctgttaatccatcactctgagggggaggaaatgttgcattgctgtttgtaagcnnnnnnnnnnnnnnnnnattataattattaaaggcctgactctttcctctcatcactgtgagattacagatctatttgaattgaatgaaatgtaacattgaaaagacttgtttgttgctttctgtgcagtttcagtatnnnnnnnnnnnnnnnnnnnnnnnttggtaataggaaatggaggggctgctgaggtcctgtgaatgtttctgtcattgtactttcttccagaagcctgcagagaatggaagcatcttctttattgtcctttcctggcatgtccatccttattgtcactacgttgcaactggagtttgatttggatctggttttaaaattcttctgtgcaatagatgggtttgaggatttagcggccctgatgtcttggtcatagcctgcctcgtgccgaattcttnnnnnnnnnnnnnnnnnnnnnnnnnnnnnnnnnnnnnnnnnnnnnnnnnnnnnnnnnnnnnnnnnnnnnnnnnnnnnnnnnnnnnnnnnnnnnnnnnnnnnnnnnnnnnnnnnnnnnnnnnnnnnnnnnnnnnnnnnnnnnnnnnnnnnnnnnnnnnnnnnnnnnnnnnnnnnnnnnnnnnnnnnnnnnnnnnnnnnnnnnnnnnnnnnnnnnnnnnnnnnnnnnnnnnnnnnnnnnnnnnnnnnnnnnnnnnnnnnnnnnnnnnnnnnnnnnnnnnnnnnnnnnnnnnnnnnnnnnnnnnnnnnnnnnnnnnnnnnnnnnnnnnnnnnnnnnnnnnnnnnnnnnnnnnnnnnnnnnnnnnnnnnnnnnnnnnnnnnnnnnnnnnnnnnnnnnnnnnnnnnnnnnnnnnnnnngggcaagacncgtnnnnnnnnnnnnnnnnnnnnnnnnnnnnnnnnnnnnnnnnnnnnnnnnnnnnnnnnnnnnnnnnnnnnnnnnnnnnnnnnnnnnnnnactataanatacaagcgttcccctgatagtcctccggggctctcggttcgacctgcg

SEQ ID NO: 135134 - DNA, 1321 bp, Homo Sapiens
  misc_feature (1076)..(1077): n is a, c, g, or t
  misc_feature (1173)..(1173): n is a, c, g, or t
  misc_feature (1260)..(1260): n is a, c, g, or t
tttttgagagatcataggacttttaataaaatttttaaaactaaagctgaccatttcacatttgatcttatttcagaaacatcttctgcatgtgccacagctaccttctgaattaacgggcatcatacctgtggtacattttcagaaataagggtctaaaaaagactggtatttacccactgcttcttcttggtctgagaaatcagttgcttgtgctgtgttgccagcttcttgatttcttctacaaattcctccttacacttttcctttacttgcttaacattttctgtccatctcaccctgcatgttggctacagctttatttacagcttgtctcttttcttcttccatttcagaacgcagcttctccagagcttctcggacaacacgctctgtctcccgcttgtggtccgacttcatccggtctttgaagtcattgaagatcttggtgtatttgtcatggcacatgctctgacacacgccgtcgtttgtggtctgggtgctccgatgcagcattcttggtgaagaggcacttaacttctttgtctgagttgacacggagactttttcgatgggctgaggcatcgtgggtatttcctggctagaacttactgcttctgtttcaggctctggttcttcctttttgggctccacactttgattacgtcgtcctttctttgctcttggttcttgagtgacctttagctgctcattactggtggaggagatactggattctgcctcttcctcacctcggtcctcattcttagatttccaaaatctcccttctcgtaggaaacgctgatgcagctccagctcatcacaggcctttttccaacccatactgcgcttcacgtgcagccgatgaatgttgactgtgatatcttgaatgttttcagaacgaatccaggccctctgggtggtggtggacaaagaagcgaacgtcgacttgattgtcttctttctgcatgactttggctggccaaaacccaaacctttcattttagcccagacagctcatgattatgtatacaaggatgacagaccagttgtcaggacgagcatttgacaggtannagcattcttgcacagctgcagttcatccagctcatgacatgtgtctttatatagcatcctcgcaatgtcagcttgctcactgtctgctccataganatcacgtatttgtggagatgcattgggcatcagctctgactgctacatacctcgttccgattcttggctcgagggcaaatccctatnggagtcttattaatcgtatcaagtacagctttactggtgtaaattgtttccgtcacattcc

SEQ ID NO: 135135 - DNA, 1991 bp, Homo Sapiens
  misc_feature (956)..(956): n is a, c, g, or t
tttgtcattttaaatgtttattttattttgcacaattttaacagtagagtaattttgctgtggaaaataaaatttcatcttgcaagaaagagaaaactcaagaccaccaactggcgtctttatttacatattagagcgggtcagccaatgaaaatcctgggccttccgtgtggcttgtggctcaatcatgatgttgataagagaaggtttagttgtgtctgctaggctctgcctcagggatttttggagttcttctggtgtttgtacaaaataccctttgcctccaaatgcagtcatgacttgctcataatgtgaatttggcagcaaacacattggagggaccactgcagtagcatcttgaaattttaacatttctttccaagtatctgtatcaaaaccttggtaaattccattgttattcactaccaacagtatgattggcaagttgtacctgcagatggtttctacctccatgccagaaaacccaaatgcactgtctccttccacacagatgatccattgcccagggcttctatctttagccaccacggcagctgcaatagcaaatcccaaaccaactcccattgttccgaaagtaccagcatcaagcctgtgacgaggaaggtagttctgaagcacagtccgtccaatgtccatagtatttgctccttcacttaccacgaaacagtctctaggtagttgttcttgaacatggtagaatactgtgtaataattcataggcagggattttttagaagctagttccttggatgcagcttcattgctcttcattttttctctcagagttttccaccacttgctctctggaggatactgccatggtgttttatcaagttcctctaaaagctgcttagtgacagcatgtatgtttcctagcaaagtaacagcgggctttacattattccccaattcttctgcacagatatcaacctggnataaacttcacatctggctgatatcttggaggcagtccaaaatgtaaaatccaatttagtctggcaccaaataacacaattacatcagcaaattgcaaagccctggatctggctgcacctacacagtatggatggttgtcagggacaacacccttccccataggggtgggcaaaaatggcagtttatattgctccaccaatttcttgatactctcttctgcatgagcgtaagcagcacctttcccgatgataagaaggggttgtttggcattcctaataacagaagccgccgtgcacacagcagaggtttctgccatgctaataggaggtgacatgcagcgttccatgtactttatagaattcacattcacctgaaggttcacaaaatctgctggtatgtcaacatagcaagcacctggacgaccatagatactgcttctcactgccttttcaataacaaaaggaatagcttctatgctgcttgggcgggcagagaacttggtatataatctacaagcttcaacctgaggaaactcctggaaagctcccattgtttcttggtttctttcagaggaaccaccaatcacaagcaagggccagcagttcatgtttgcatttgccataccgcccaaggcatggatgagacctgggccagaaacaacaaggcagactcctggcctgcttgtcagatatccaatcgcggaggcagcataacaagccgcttgctcattcctcatcccgatgtacttgatgcctagctgctgggcagcaatggcgatttcggtcactgggatgcctacgatgccaaatatgtactccacatcttgcgttttcagggcctgagcgatgactttagcaccagacacctgctcctcgctgcgctctgcgaagttactgtccggcatcttccaccgaaaagctctaagcactcacgcagccggcaaacaagcggaatcatccagcaaggcaaacgcgaagtcggcagcacgccacctctggtacctcgtgccgattcacccccggcctctacctact

SEQ ID NO: 135136 - DNA, 1554 bp, Homo Sapiens
  misc_feature (1456)..(1490): n is a, c, g, or t
tttttttatctcaaaacatagttatttttactttttaagttatataaataatatacattttcaatataggaaaatgggaagatacagataagcagtggtcttatatatatccttgcagctttttcccttcggacatacatattttgttacagtaattcctgcatctcaaaaataatacaaaaagtgaaaataagtttagaccagccttaaccttagctcaggtgctaatttatatataaatctatgtgcattcatttcaattttgacttacaaaatctaaagtgatgctgttataatactaaaagattccactttaaacagcagcagtttcagaataattaaaaatttgattcaggcatgaggctgataaagaacgaagttttactttttttcattaaaataagtagctttctactattgcatcctttgaagagaagaatgttctgctggtttggccacaagctctttagatggttacttttagtaaactcttcattcatcctggcattcttgaaaatattcgtcaaacatagaggaagactcatcttcacgttcctttggttctttaaattctaggtcttctccatattgaatggcaaaatcaatatgctgcaatacaatgttcatgctttcttcatctgactgatcgtaaggtaaaaatcgaaccatgctgtagtcatcaatcagtccacatatagctttagtcagtttcttgaattttttgcttcttaagtcacttgtagaatcttctaataaagaatacatgtctggatctaaaaatttctcaatttccttttttgcttttttactcagcagatccatttttgtcatgatgttgacttgcggaatttctagagagatcatggcactcagggctgccaagatgccagaaataaacttgaatgactccaccatgaactgagaatcaacaagaaaaactccacagactcggaactcccactgctcgagctgctggaccagctgtttcatcacaggcaggtgagtgtacaactcaatctgacctggacaatcaaaaaggatatagtcgtcctctacatggccaagacagttctccagccagtcaaaattattggcaaagtactccatgcaaaataccaatcctccgttgggaccgaatcgcagagaatcatcctccattacatcatccacctcgatcagttcccggatgtcagccatcacggagtagttgaagtgttctgctgctggatccaggtttacaacttggacagaccggttgagggcttcacagtgctggaccatggtggcacagtaggtgctcttcccgctgcccgcggggcccatgaccagctgcgcataccgaggcatgttggctcccggagccgcccgccacactcccttagccttcgcgcgacgcccactgagccccggccgtaatggccgaattcccgggcatatgtccggtaccgtcgactgnnnnnnnnnnnnnnnnnnnnnnnnnnnnnnnnnnncggccgcttcctcgctcactacttcgctgcgctcgtcgttcgactactagcggtgcgcccatag

SEQ ID NO: 135137 - DNA, 1101 bp, Homo Sapiens
  misc_feature (135)..(253): n is a, c, g, or t
  misc_feature (301)..(301): n is a, c, g, or t
  misc_feature (1009)..(1029): n is a, c, g, or t
gggggagcgagaccccatagcaacgctttcccggcgtgccgatcataatgcactgcagacagtttccgactgaaagcggcatgagcgcaacgcaataatttagtagctcactcataggcaccccagctttacacnnnnnnnnnnnnnnnnnnnnnnnnnnnnnnnnnnnnnnnnnnnnnnnnnnnnnnnnnnnnnnnnnnnnnnnnnnnnnnnnnnnnnnnnnnnnnnnnnnnnnnnnnnnnnnnnnnnnnnnaagaattcggcacgaggcggcacgaggcctcatgttgttcctactttntaaataataaatggctctcagcatcttaggaactagatgggtcccatctgggtagaacctgctataatttttagaatcactcttgtaattcttacctcacttaaaatattaggaaacacagtaatagaaaagacagggagaactcgtctgcaggttttggcagtgaaatttgtcttccagtgaattgctattattttcaaattgcctatagtcaaaaagcttttccattgatggagacttactttcaaatgagcttgtgttgaattcagcactctagattctctctgacattttcctgtcttttgggaaaaaaaagcagatattccaaaaatggcagaaatctaatttttgtaaactttttcatctataggattgagccaaaaaacatacatactattttaaagaaaggtaccatctaattcttttattaaagatagctacttctgaaatgtcttaacagagtttcaagattgcaaagtagtattgcatagctggttttcttacatgtgatgatggaggagagaggaagacccagacttaggcatgtagtgaaatatgtacagtttctggcatcagtgtactatttatagtctatagcatacattacttgcaaatgggaaaagtattttataattatttttgtacctcaaaataattattatattctactgtattatattcaaattaaagtttattatttgattcttnnnnnnnnnnnnnnnnnnnnncctgagcaggcggccgcaagctttttccctttagtgagggttaattttggcatggcactggccgtcgttaaa

SEQ ID NO: 135138 - DNA, 1003 bp, Homo Sapiens
  misc_feature (693)..(693): n is a, c, g, or t
  misc_feature (742)..(743): n is a, c, g, or t
  misc_feature (754)..(755): n is a, c, g, or t
  misc_feature (763)..(764): n is a, c, g, or t
  misc_feature (773)..(773): n is a, c, g, or t
  misc_feature (783)..(783): n is a, c, g, or t
  misc_feature (820)..(820): n is a, c, g, or t
  misc_feature (829)..(829): n is a, c, g, or t
  misc_feature (833)..(833): n is a, c, g, or t
  misc_feature (886)..(887): n is a, c, g, or t
  misc_feature (898)..(898): n is a, c, g, or t
  misc_feature (904)..(904): n is a, c, g, or t
  misc_feature (907)..(907): n is a, c, g, or t
  misc_feature (914)..(914): n is a, c, g, or t
  misc_feature (918)..(918): n is a, c, g, or t
cattgagaggttatgcatttattaggccaactttgatgacatacagacatgtaggtttggtcccaaacctgtcttgggtcccccctcagcaggatgtgtgaagtgcctaagtcctcagtctttggagatctttgggcctgggtgggggtttgcaggaaggaaaggagagggcgacatcaagggggacagaatggaggaggtccagcctccatcacgaggagatgtagttggacacctcaatcagatttctgtcggggtctcggaagtagatggacatgataggcccttttgcccctgttctggggactggcccctcctcaatagggacatcacaagccttgaggtgctggatcatttcctccaaaggcacctctgtgatcagacatatgtccagggagccaggaactgggtgagcggctttgggttcaaattcctttcccacctcgtggaggttaaatttctggtctccaaaacacagtgctttccggtcttcctacttaaaagtcatgacctccatgcccaggatcttggaataaaacatggtggtgtctttgatgctcttcaccgtcatcacgatgtggtcaagtctacggataagacatgggggaggggtctgactgctgtccctccatgacacagcatataaaatccctatagtcagagtgcccggaacaccatgtccttcctcctttnggctcctctacagggaaagtgttctgtcttcctacagggtcctcttcannggtcccttcanngttgcagnnggctctganttcctctccntaagctcaaggtcagcgctgtgtttcctagcctctcntcacatggncttnatcatgacagctttgggggcacctgcgtgagccactttgtatctctcctcgtnngcgattctggnctcganggncaatccntatnaggagtcgtataaattcgtatcatgtctagctgttcctgtgtggaattgtaccgctacattccaacacatacgagcggagataag

SEQ ID NO: 135139 - DNA, 503 bp, Homo Sapiens
  misc_feature (276)..(285): n is a, c, g, or t
cctttgtagataatctactttttaatctctatgaaagctcttaggatctactttttcagtttgatgttctataattttagaaggatccatgttaagtgtcaacatgctggatacttggttaaccttttccatgtagagactgcaaagttatcttgcattgtttctatgataatttcctcctctcttttttctccattctctctctggaagtccaaatattcagtttggaatctcctctattgatctctttatattttctctcagatttcctgtggnnnnnnnnnnagagttaagttatatgttaaagtgttatcaacaaattttagcccacctgaattttggcatttggggaagtgcttaccttaaaagtcatgacctccatgcccaggatcttggaataaaacatggtggtgtctttgatgctcttcaccgtcatcacgatgtggtcaagtctacggataagacatgggggaggggtctgactgctgtccctccatgactaa

SEQ ID NO: 135140 - DNA, 1236 bp, Homo Sapiens
  misc_feature (402)..(430): n is a, c, g, or t
  misc_feature (448)..(1160): n is a, c, g, or t
ggatgagtattgtaccgaatctaaatcacaattgggtatataatcattgagcgatattcatttttccaatcagtatgggatttatatctatttatacatgtttttaatcattttgatcaatgtttatagatttcaaggtacaaacctcactttttatgtttattcctaaatatttcttactttaagttctttagcaaatggaattggtttttaattttcttttaaaattatttattgttaatgtatggaaattcaactaatttttggtgctgttattctattctgcaaataaactgaatgtgtttgttagttccagttgcattttggctgactctttgtgattttcttcacagaaggtcatgtcatctacaaacaaataaaatttgacttctttctttctgnnnnnnnnnnnnnnnnnnnnnnnnnnnnncctcgtgccgaattcttnnnnnnnnnnnnnnnnnnnnnnnnnnnnnnnnnnnnnnnnnnnnnnnnnnnnnnnnnnnnnnnnnnnnnnnnnnnnnnnnnnnnnnnnnnnnnnnnnnnnnnnnnnnnnnnnnnnnnnnnnnnnnnnnnnnnnnnnnnnnnnnnnnnnnnnnnnnnnnnnnnnnnnnnnnnnnnnnnnnnnnnnnnnnnnnnnnnnnnnnnnnnnnnnnnnnnnnnnnnnnnnnnnnnnnnnnnnnnnnnnnnnnnnnnnnnnnnnnnnnnnnnnnnnnnnnnnnnnnnnnnnnnnnnnnnnnnnnnnnnnnnnnnnnnnnnnnnnnnnnnnnnnnnnnnnnnnnnnnnnnnnnnnnnnnnnnnnnnnnnnnnnnnnnnnnnnnnnnnnnnnnnnnnnnnnnnnnnnnnnnnnnnnnnnnnnnnnnnnnnnnnnnnnnnnnnnnnnnnnnnnnnnnnnnnnnnnnnnnnnnnnnnnnnnnnnnnnnnnnnnnnnnnnnnnnnnnnnnnnnnnnnnnnnnnnnnnnnnnnnnnnnnnnnnnnnnnnnnnnnnnnnnnnnnnnnnnnnnnnnnnnnnnnnnnnnnnnnnnnnnnnnnnnnnnnnnnnnnnnnnnnnnnnnnnnnnnnnnnnnnnnnnnnnnnnnnnnnnnnnnnnnnnnnnnnnnnnnnnnnnnnnnnnnnnnnnnnnnnnnnnnnnnnnnnnnnnnnnnnnnnnnnnnnnnnnngttaagccgacgctgggcctatcggtactatcgtctgagtcaaccggtagaacgactatcgcactggagcagcatg

SEQ ID NO: 135141 - DNA, 625 bp, Homo Sapiens
  misc_feature (209)..(217): n is a, c, g, or t
  misc_feature (296)..(304): n is a, c, g, or t
  misc_feature (341)..(349): n is a, c, g, or t
  misc_feature (433)..(467): n is a, c, g, or t
cctctgatttattttgccatgtttccttcacatccagatccctgtcggtgttagttccactcttggtctttcacgctccccttgcctgtggaacattgtctggtcctagctgtggttcccattgttcccccttcacccttctctgttaaccttgtgcctgtctcctgtatgatcacatccccaaaaagggggaggggggagaagactcnnnnnnnnnggccattttgtaatcgtataaaaatagtagacaactgcttaatggttggggttttttcccaattttcaacattagtgannnnnnnnnctgtttgcaagttaaagggtttgtcattgtttctttnnnnnnnnntacaataatgccccctatccctatgcataaagtgcttcttctatttataaggttgaaaattttgaataaccctttttgccttgnnnnnnnnnnnnnnnnnnnnnnnnnnnnnnnnnnncccttgtattttgtaaatattttcttttcctgctttggagctgtgtaatggcagcgaaacatgtagctgtctttgttctatagaaatgcttttcttcagagaagctgatctttgttaatgtcttgattctgttcgcaaagcacagactagtgattaaa

SEQ ID NO: 135142 - DNA, 871 bp, Homo Sapiens
tttaagaaaaatacagtttatttcaggcttacagtaactttcatagcactgctgtgtcccgttcgttcatctgtttggttgtccaaagtaccaggctgctagggtgggcccagaaactgctcccttgtaaactctgaagctgagctcccagaaggctgattctaaggctactactcacaggtcaagccacagattaagcagtaaggtattatttattaagatcttaagcctcacccctgaactcaaatgggatgggataaggagtaaggaaagaggttagaggagacagaaaacaaagcccagctcttccaagctcaccacctagccaaggtcttcgaattcctgagggaacccaggactggaggctgggctgaaggaaggcagcattcctgggaggttccaagttctgggcaggggtacagagctgttgcgtgtgtgtggggtggggtaagggagaggctccagagctactttcattcacattttcaactattctctcttccacttgcatgttcatctcaccattcctgacccagccagccccctatcactgagtactgctgctgctgctgatcctctcctccccaaatccacctgcccactgtccaccggcatctagctcctcctccagccacacccacactcactcatccccttcctcacaatgaccgcacccaaaagacactgtactggggaacccggcttcgtcactcggatgttaactaaaggcccaggggaatatgctggaaaaggtccccccacccccaagaccaaggaccctaggttttccttgccctggagggagccagacagaggaacaggggagagggtggagatggggtaaccagtccacaggtctgcaatcctcaaa

SEQ ID NO: 135143 - DNA, 1685 bp, Homo Sapiens
  misc_feature (962)..(972): n is a, c, g, or t
  misc_feature (1006)..(1525): n is a, c, g, or t
gtttgaaacctttattagaaggaaacagtattctatggactcccaagaccaggatatatatggattgcagaggctgagggctgaagttgtcactctggtgatatgttttggagtggacgcccctaattttaatattcttcatctgtgacattctgctattcacagtataaagatcatgatctcctctccaagctgactttattgtttaacttccgaagtattccagaacaagcaacatttcaaaattgcatcatcagtattaaagggaaaaagtccatttctttcatcagacatttactgaatagtgtctatgcagcagccactatactggcactggagttatcaagtcagacagttgctattcagattaattcagcaaggttcattcaaattactcatgaaatctctttcaaagtctaagtaaaacgttaatttataacttgaatcttgacataatgtggtggggaatggggatgggaaatggtaaaattacatgaagctaaccctgaaggcaagttctgaagttcaccagcgaaaattatctttgcttttgaaaatgcttccactggggaaggaaggggtaaggccagtgggaggaatgaggtgaagccactgggggaaaatgttcaccattaacctgtactttaaagacacctttgagagtagtatacttccaaacatcatcagttttatttcataggagaaagctgctatagcatatccaaaaatatcaatcttcccttgttctgcttaagcctgcaaatctgtgggcacttgattcacttctgaccttcaaaactcttactcagtcctgaaggctctctattgcttagagtatataatcatgcagttatgttacatgctctgagatgtcctgcagtgaagaatgctgtttaactttgatcctagcatatcatctacagtgaaattattgtggtccaaagctgacttcaaggaaagcnnnnnnnnnnngcctacagccgcggcccctcgtgccgaattcttnnnnnnnnnnnnnnnnnnnnnnnnnnnnnnnnnnnnnnnnnnnnnnnnnnnnnnnnnnnnnnnnnnnnnnnnnnnnnnnnnnnnnnnnnnnnnnnnnnnnnnnnnnnnnnnnnnnnnnnnnnnnnnnnnnnnnnnnnnnnnnnnnnnnnnnnnnnnnnnnnnnnnnnnnnnnnnnnnnnnnnnnnnnnnnnnnnnnnnnnnnnnnnnnnnnnnnnnnnnnnnnnnnnnnnnnnnnnnnnnnnnnnnnnnnnnnnnnnnnnnnnnnnnnnnnnnnnnnnnnnnnnnnnnnnnnnnnnnnnnnnnnnnnnnnnnnnnnnnnnnnnnnnnnnnnnnnnnnnnnnnnnnnnnnnnnnnnnnnnnnnnnnnnnnnnnnnnnnnnnnnnnnnnnnnnnnnnnnnnnnnnnnnnnnnnnnnnnnnnnnnnnnnnnnnnnnnnnnnnnnnnnnnnnnnnnnnnnnnnnnnnnnnnnnnnnnnnnnnnnnnnnnnnnnnnnnnnnnnnnnnnnnnnnnnnnnnnnnnnngaacaggcgttcccctggagctcctcgtggctctctgtccgacctgcgctaacgaactgtcgcctctccctcggaacgtgggctccacactagcgtggtctcactcggttaggcgtcgtcagtgggttgggagaccccctaccgacgtggctacggaaac

SEQ ID NO: 135144 - DNA, 1762 bp, Homo Sapiens
  misc_feature (198)..(210): n is a, c, g, or t
  misc_feature (334)..(358): n is a, c, g, or t
  misc_feature (514)..(585): n is a, c, g, or t
  misc_feature (994)..(1007): n is a, c, g, or t
  misc_feature (1537)..(1537): n is a, c, g, or t
cccaacggcggccggagttattttaatgccggacagggggtgagccaaaggggtgtgtgaaaagtccgcttgggcgaattttcagggtttgcgtccatgtaccctgttggtggggagggggtttaccacagtttcggggggaggagacgctaaaaggagaatatcaaaccacgttctcttggaaaaaagtggtccaannnnnnnnnnnnntataatttggggatagggagcctcgctttttggaattcccggggtgaaaaggatccaaggaaaggggccttaagagactcccaatttgggttttgtttcacaggcccttcgggtttggcccgcnnnnnnnnnnnnnnnnnnnnnnnnnaattcaaagccccttgtcacaattcccagggttttccttgggaacgcggtaagggcccaggggcacctttgccttatgtggcccggcccgcccaaacgaaatgttttggaaaattttttgggggccgaaggcgggccgacaaatttttgtgtttannnnnnnnnnnnnnnnnnnnnnnnnnnnnnnnnnnnnnnnnnnnnnnnnnnnnnnnnnnnnnnnnnnnnnnnaggataagtaaaattattgcatttaatgtcattttcatgaaatgaaaatcatcaaattccttaatgttgtatcaaacgtaaacaataccagttcaaattagagggaatgtatgtcaacaccaacttttgacaaaaataagaaagctaaagccctacaatttatctaatttaggtcaggtaaccatggaaacaaaagaatattaaaattatttattttatcattatgcacattgaaggaaatcataacagacagtacagttcttttccaccataaaattatatacacccatttatttagctagaaacactagcttgagaggtactgatatattccatttgtgatactttctgtacagcaaacaaatgtcttatatttggagcatgttgaagaaaacattgtctcaagtcnnnnnnnnnnnnnngagtctcaatcactaagagttcaaggtactttgggagaatcgtggtgtcctggatggcctgatcaatgtattaaaatcaagcagtatgtcttcttaaaatactcttaaatccatacaaatgttgcttgggttgtggagctgagatttctcctactggcatgataaaatttgaacatgtgttatgaaagtttcacaccaattttgttttgttccttcttcattagccgttgtgcttccttttccattttcttcctttgttgttcggctgctctcttttctctgtctgctagtttctgctgtctcagaacttcttctgcttgccaggctgcatcttcttcttcttcccatgcattggtattttcctgccaggtatctaagtcacctaattcagaagactgatgaataaaaggcagatcttgtgtagctgctaatctactagagaacctgtgctctcatctgggatgccaaattcatggtctctcttcttaatacattttctgagtttccctatagttggttcatgtccttanatatcaggttcagttgtccaagactttgtgtgtgcacatccatcctcctcgatctaactgtgggtgatctcatccagatcatctcacactgtcgctagactgtgatacactgagtggaagtattggccactattcgtctcgcaattgaatactcttagatggaacgtgcagcagtcaattatacgacggggtgcaggggacaacacgcaataaacagcgtcagtg

SEQ ID NO: 135145 - DNA, 1058 bp, Homo Sapiens
  misc_feature (559)..(559): n is a, c, g, or t
  misc_feature (597)..(597): n is a, c, g, or t
  misc_feature (633)..(633): n is a, c, g, or t
  misc_feature (711)..(711): n is a, c, g, or t
  misc_feature (722)..(722): n is a, c, g, or t
  misc_feature (775)..(775): n is a, c, g, or t
  misc_feature (780)..(806): n is a, c, g, or t
  misc_feature (808)..(812): n is a, c, g, or t
  misc_feature (814)..(815): n is a, c, g, or t
  misc_feature (819)..(819): n is a, c, g, or t
  misc_feature (821)..(821): n is a, c, g, or t
  misc_feature (825)..(825): n is a, c, g, or t
  misc_feature (850)..(850): n is a, c, g, or t
  misc_feature (884)..(884): n is a, c, g, or t
  misc_feature (909)..(909): n is a, c, g, or t
ttttagatgtcattgactatattagttaaagtcattcttaactataataacagttaaaccccagaaactcaatgacttaacacagtccaagttatttctcgcttataattcatgtaaagttgaattggtggtattggggtggaggtggtgttctgttccatcgacgtgcccagagcagttggaggcccaacctggaactggagtcagtcctttccactcacttctattggccagcagtcatttggtcccatctggatgctagaggaaatgcagtccttatctgggcaggtaccttccaacaacagctgtgtttcatggaaaaggagcacaaaactatgatggatgctagaagaccagagaatgggtcaatgctgttagatccctctggctgatttgtcttcaagtgagtattacataccatttgtgtgtggtggtatctaaatccacaggacctttttgcacactccatagtaacctaagcttccttctccatctcctccacttctaaagtcctgcctctcctagtacttggctgatttttgtcagaaaacaatctgtngttgctccactgccatccaatgtagatgcacatagtanaaagatgctgcccccatacagcccagcaatcccatngagtagatatttacccactccgggcgtgtggccgtgggccggtcgcttcctcgctcggggcaaagttctcagccgtgnagaggggtggnatgtacaagtcaacctccttcccaggtggcgtaggttcgggtggaaggggggnttttnnnnnnnnnnnnnnnnnnnnnnnnnnnannnnngnngtgnangaangggggaccccgggggggaagtggtnaccgctctctcaaaactcagggagggcggctccnaagtgtggacccaaaggacgctganacggacaaggcaaggaagtttgcgggtcaaatgtaaatggcctggggtcgcaagttgccccgcactgactctcgcagtatcctccattcttcaggaaaacccctgcgatctgcccagcatccaaggagcataatccacagcaacttcgg

SEQ ID NO: 135146 - DNA, 1326 bp, Homo Sapiens
  misc_feature (95)..(95): n is a, c, g, or t
  misc_feature (140)..(343): n is a, c, g, or t
  misc_feature (392)..(392): n is a, c, g, or t
tcttctgctatcctgatcttgatacgtatacgctttatgagtgtacgttccgcaccgacgacgagccagcgatcatgaggagaagcgagagcgcncatagcaaacgcctctcccgcgcgtgccgattcataatgcagctnnnnnnnnnnnnnnnnnnnnnnnnnnnnnnnnnnnnnnnnnnnnnnnnnnnnnnnnnnnnnnnnnnnnnnnnnnnnnnnnnnnnnnnnnnnnnnnnnnnnnnnnnnnnnnnnnnnnnnnnnnnnnnnnnnnnnnnnnnnnnnnnnnnnnnnnnnnnnnnnnnnnnnnnnnnnnnnnnnnnnnnnnnnnnnnnnnnnnnnnnnnnccaagaaattcggcacgaggtttttttatgcacagggaacattttactntcaagtttaggagagaaacggtaaacgacaagaacgaaggtggaattaagctgcctgtgggaaaatggtttctaatgaccttaacctggtcttccagagatttgcctgtttcatcatcatcttccaagtcaggtaggtcctgaaagagcaagtgagccgcacatcaccagggaggtacacgcactgtcaacgttctgataggcacgataaaggcaaacacgcagtcaacccagccttagttacagttactcaaatcactcaggtgactcgcctgcctgttccccaccaaaaggaactctagatacacacaaagcaagcgttgccacctcaggtgtctggatctaataaatgaaagggaacttgcaaggtgtgacgtgtttaaagaatttccacatcttttttctgcttttttattaagagacacagccagttcatcttgggggaaataatgggacccaaaccaaatgcacctctgtacaaactagtccgaaaactctatgtggtataaaagtaatatattttgtacctccccaaaacttgtaggacttttttgttttgtattgtgggtgtttgttcggtatctttgtccataacaaccagtgcgtggttggggaggcagcatagtgtgtggttggatgcatgaactggagccacggtgcctaggttgttactcccccaccaccattttctagctgtctggctttgggcaagttgcctaacctctctgtttctcattttcctcatctgggaaattgggcatgataatagtatgtactgcttagagttgtaggaagggttacatcaatcaatacaagtcatgcttagaatggtgtcacccatataataagaaaccaattaacattagctattagtgttgtagttatctatatggtcagttctcaaatgtgagagataaattgcccaattatgtccc

SEQ ID NO: 135147 - DNA, 497 bp, Homo Sapiens
ggacttcctcacatggctcctacctccagcacagaagcggcactaaaccaggtggtcaatcagggagcaccaccgaggttctgaatggtccagggatgagcagtgatgcctcaagctaagccaatcaaagccttccctgggattgtctcaaggagtccgcagtgagattctgggtctcagtactgggaaagggtgaggctgaggctgcctgctgtcctgggggcctcaccctgccaccaacaggaagccacacagagggaagcagatatgagacgcagccagtgagggcagggtacaaaggtgagatcccggagagacagatgctgggacatcatccttgggtactggttccaacagtgcctgcagatgggagccaccctcggagagtccacaacagcagccaatcccttctatgcgtgtctgagctactttaagtcgggtttttgactgtttgaatgagattctcatcttgactagcagctggcgcaccatgggag

SEQ ID NO: 135148 - DNA, 916 bp, Homo Sapiens
  misc_feature (497)..(507): n is a, c, g, or t
tttaaataaagttttactggaacagccttatctacaatttacatattgtctatggctattttagcactacaatcacagagttgaatgtgagagaccctatgtatgatctaaagagatggaaatatttactacctgaccttttacagaaaaagtttgctgattatgggaaaatatccaatatttccccatatccctccacaaacactcatgtttgagaatacaccttccaaaatattataatcttggccatatctaagtgatgtataagctcttgatgatacatggagatctcctttaaatttttatcctttaagaatttgtatacttaatctcaaaattcagagcttttgaagtcaaaataataccaaatagaaaagttcacagtagtgatgctatccttccaatttttcagtaaaattcaaaccacaagacatttttcagagctctacctattcttagggcaaataactgcatctctgaatgccattaacacatcnnnnnnnnnnnaaagttctgagcatgttgcctttgttctacttcagagtatggaaagaaggaaatgttaccatatatccatacaataaatgagaaaatatatgccttttaaaatgcttgctttttttaagggccatatttagaggtgagaagagggagaagccaagattatctctgtcctaatccagcactataccgtacaattaaattctcaggatgagaagccctcccaagataacgtactgggtagtattatttacagtgacataaaaacacggcaccagacgcgccacacaaggtgcacaatgctggccgaacacttgtcagtgacaagtccacacacttaggactattacatgcaggcactgttgcacatatgttatgctttaagagttctccccatacctagccaggaaaattg

SEQ ID NO: 135149 - DNA, 1414 bp, Homo Sapiens
  misc_feature (212)..(275): n is a, c, g, or t
  misc_feature (293)..(302): n is a, c, g, or t
  misc_feature (312)..(320): n is a, c, g, or t
  misc_feature (486)..(528): n is a, c, g, or t
  misc_feature (1015)..(1015): n is a, c, g, or t
  misc_feature (1136)..(1136): n is a, c, g, or t
  misc_feature (1145)..(1145): n is a, c, g, or t
  misc_feature (1195)..(1195): n is a, c, g, or t
tttgcctttccctttctccccctgaccaatccatcctggaaaccccaatagtgtcattgattgccacatcctgggctgcatcttctagcgcccacctctcccgaccccaggccagggctggacgtgaaagttgggcccctgcctggtctcggtgcatgtccttcctgcccacctgcttgtcttccttttcctaactctattcgtctttctcnnnnnnnnnnnnnnnnnnnnnnnnnnnnnnnnnnnnnnnnnnnnnnnnnnnnnnnnnnnnnnnnttcatccaacttgcctcnnnnnnnnnnccatttaaannnnnnnnntgtctttttagctttttgcatctctgttgttgccattttcgaagttgagcccttgctagagattccgaggtcctcagtttcctcaaatagatagatatatatttttcccttaaatgagatgaaatgagtggcgtcctggggtggagggaggcgctggctggagtcnnnnnnnnnnnnnnnnnnnnnnnnnnnnnnnnnnnnnnnnnnnacgcatcactcaacgttgctgctgtcgaaggtgtggcactgaaagtccccgtcaacgtaccccatgcctggcagcttcatcccgtacttgtccacgcaccagcagatgccacgcttgcggccacgggaaggtttgcactgctttctcttgtagaatcctttgcggtcacaattgggcagtgttctcggctcccccgacaaacttggactgggtcagcttctttctgcggtccttcttcactgcttcagccttcagctcggagatgcgggtgtgtttgggccggaagatcttgggggagtaggtctcctcggccatctcagaggtggtgggctcctcgtgctcacgggagtctctctcgatcttgacttgctcgcggtagctcttttcgttgaggcaaaccccgcggccgtgcagcagggcgtgcagcggcttctcctcgtcctgccgggggaggcagcgcagcccctgggcgcagcgctcggtgtanacgccgcacgactgcccctcggccagggcgcaggtcatgcagcagccgcagcccggctccttgaccagctcgcagcccacggggctggggggggcacatggagagggctttctcgtcgcanggctcgcantgcacgaaggaccccaagctctggggcggccccgcataggcggccagcancaggaggaccgcggtgagcacaccatcttctcttattcgcccctttactcggggtgggaaggagacgagagtgactcgtgccgattcctggctcgagggcaaatccctaaggagtcgtataatcctatcagtcatactgttccgtgtgaaatgttatcgccacattcaacacatacagcggagaaaatgaaagcgggtgctatgatgagcatcacatag

SEQ ID NO: 135150 - DNA, 1622 bp, Homo Sapiens
  misc_feature (67)..(76): n is a, c, g, or t
  misc_feature (699)..(744): n is a, c, g, or t
  misc_feature (763)..(772): n is a, c, g, or t
  misc_feature (782)..(790): n is a, c, g, or t
gaaaaagaatagatttatatgcctatatatgactatatggagtcttgtagataaatacgagcccacnnnnnnnnnncagcctatcctcccccacagaggctgctgcgctacttacaaattgaattaaatgagggctgaaacggcacgcttcagcatgtactgtagtcaccgtggaagaacaagtctttccaatattggggcatgtattgatttctaaaaaatgtctgcctggggaatgaaatatgcacatgtatttcatattcacagatctgcttccgaaaacctctctatttaatatcactcaattatgaatttgttttgctttcagaggaatggaatgcattttagtttttataaatttggggagagacaacactctgcccaggtaagaggagaggaagttcaggggtccagctgtccatactgctggctagaggaggagacagatccgggagaggtcctggagtgttttgccttttcctttctccccctgaccaatccatcctgggaaaccccaatagtgtcattgattgccacatcctgggctgcatcttctagcgcccacctctcccgaccccaggccagggctggacgtgaaagttgggcccctgcctggtctcggtgcatgtccttcctgcccacctgcttgtcttccttttcctaactctattcgtctttctctctcttctacacaaacannnnnnnnnnnnnnnnnnnnnnnnnnnnnnnnnnnnnnnnnnnnnngttcatccaacttgcctcnnnnnnnnnnccatttaaannnnnnnnntgtctttttagctttttgcatctctgttgttgccattttcgaagttgagcccttgctagagattccgaggtcctcagtttcctcaaatagatagatatatatttttcccttaaatgagatgaaatgagtggcgtcctggggtggagggaggcgctggctggagtcggggctgggggtgggagggggtgagggaaaaggttggggggggacgcatcactcaacgttgctgctgtcgaaggtgtggcactgaaagtccccgtcaacgtactccatgcctggcagcttcatcccgtacttgtccacgcaccagcagatgccacgcttgcggccacgggaaggtttgcactgctttctcttgtagaatcctttgcggtcacaattgggcaggtacacagcacggggcaccatgcgtgggctggctttgagctcctgcagggaagcctccatgtgtctgcggcaggggccctgctcagactcctgtctcatctcaggtgcagagatgatccgggggtgggcagtgttctcggctcccccgacaaacttggactgggtcagcttctttctgcggtccttcttcactgcttcagccttcagctcggagatgcgggtgtgtttgggccggaagatcttgggggagtaggtctcctcggccatctcagaggtggtgggctcctcgtgctcacgggagtctctctcgatcttgacttgctcgcggtagctcttttcgttgaggcaaccccgcggccgtgcagcagggcgtgcagcggcttctcctcgtcctgccgcctcgtgccgaattcgccacccagcctcgctacctagcctaagattt

SEQ ID NO: 135151 - DNA, 693 bp, Homo Sapiens
gcgagctggtcaaggagccgggctgcggctgctgcatgacctgcgccctggccgaggggcagtcgtgcggcgtctacaccgagcgctgcgcccaggggctgcgctgcctcccccggcaggacgaggagaagccgctgcacgccctgctgcacggccgcggggtttgcctcaacgaaaagagctaccgcgagcaagtcaagatcgagagagactcccgtgagcacgaggagcccaccacctctgagatggccgaggagacctactcccccaagatcttccggcccaaacacacccgcatctccgagctgaaggctgaagcagtgaagaaggaccgcagaaagaagctgacccagtccaagtttgtcgggggagccgagaacactgcccacccccggatcatctctgcacctgagatgagacaggagtctgagcagggcccctgccgcagacacatggaggcttccctgcaggagctcaaagccagcccacgcatggtgccccgtgctgtgtacctgcccaattgtgaccgcaaaggattctacaagagaaagcagtgcaaaccttcccgtggccgcaagcgtggcatctgctggtgcgtggacaagtacgggatgaagctgccaggcatggagtacgttgacggggactttcagtgccacaccttcgacagcagcaacgtgtaaggggatgcct

SEQ ID NO: 135152 - DNA, 1024 bp, Homo Sapiens
  misc_feature (725)..(725): n is a, c, g, or t
  misc_feature (780)..(780): n is a, c, g, or t
  misc_feature (834)..(834): n is a, c, g, or t
  misc_feature (853)..(853): n is a, c, g, or t
  misc_feature (964)..(964): n is a, c, g, or t
tttttttaacaggaaaaaattatttaatagtataacaaaatgcaaaataaagtacccaagttacaaaacataaattcctttggttcatgatcacaccactatttttaccttccacatagctacagacatcacaccctcaaagtgaagtcaaactgtccccctcatactgaagatgtcatgccaaaaccatcacataccccactgttcagtgaaactgttggcaacttacatggaacagagctgtggggtaggaaaaaggggaaagggttgcgttaaaaaaaatggggagactctacacatgcagaacaagttagtgggagggagtgctctgctgggtcaacacgccatgaaccacacccctattcgtgctacatgaggctgagtccttgctacaaccacacagaaatacagacaatcaagtgaacctgagcacccccagggataacagaagaaaaatacagagaagcagaggagagaaagaatggcagcaagaggcagatcacagaataccagggaacacctagtccaaaccctgttttacagatggggaaagtgagacctggagtagtgaagtgtcttgccaaaatacatagtttatgggagcattagaactccatgcttccttttaatgtgagcaaggaaaaaaagagattgacaagaaattgataggcctgctaaggcaggagacagacccaggcctctcattccagttctgttgtcttttnggagagtgctatgaggtcattaggctttctgggtgtttcctgatctcaaagtcanggtctgggtggtctggacagaggattcaagaacagccagcactgataggaaganacatggctctatctgtccnaactaatctgaaaatcacatagctagatagaatcagcactctgatcacacacactaaatgtggagagaaatcacgctgatactctctgcgatctggctcaggcattctaangagcgataatcgacagtcacgttctggggatgtttcgtacatccaaaacagcgagcaatg

SEQ ID NO: 135153 - DNA, 505 bp, Homo Sapiens
agaatcttttaaaatatgctttattaatgtcaattttaaaaaatatttgaccattacaaggaatttttatatacccccactaattaagacaagaattttgtacttgttgatgctctatttacacagttttcattggaaaactgctcttcattgctttactgtgatgctgacattgcttttgtgatgctgaatgctgagtacaagttcctctcccatttcaacctggatgggattatctaaaacaactgcagcttgtttccagtgggaggcttcacttgaagtatccaacctaatctcttcatcaaggtacatatgataccaaaatggaatagcagtcagtcttccagatttacaaacgtatacctttacttctctgttagaggtgttcaaatacggagtcattaaatctagtcttaagagttccactggcttgcttaaaggtatatagggcaatgaggataggtccaaaaatacacgtataggtacctgaaactggttaataaaa

SEQ ID NO: 135154 - DNA, 945 bp, Homo Sapiens
  misc_feature (672)..(672): n is a, c, g, or t
  misc_feature (877)..(877): n is a, c, g, or t
  misc_feature (911)..(911): n is a, c, g, or t
gcgggagagaaaaaagtgacagcgctctttagaccaaggacttagaagagaaacctccacccttccggagcacgttagtcccttccctctctcactgctcaacctccctgggcttccagagcaagaaaaggctacgtcccctgtcgaaggagagtggacggtgaaggtgcctggaaacggccagagaaaagacctaggcggtcgatgttgcggtggaggacactgtgcagcacagccagatggggtccaccctcacctccaccctccctggagaagtcccgaatgaagcgaccccgctctgattggaagatgaacttctgaggcaagggcccatgctcccggagaaaaccccagacactgagcagcagcagacgcacctcgaaaggtgccagttggctaaatacttcatgcatattacccagggccggaggcaggaggcttccctcagccatgacagccactaaggtgcaggatgcctccaggtgccagggggagtgggtcgtgtcagggtggcgagaggcttcccaatggcccaagagggctgccagcagcctccgaagcagcacggaacagtagcacagggcttggggtgcagctgctaccagctttaacagctcaaagagcaggggctgttcgcggaagcgcggccatgcggagatccgctcacggtgngcaggcgtgttctcgggggggcagcagtctgcacagctgcatcgggaaaactctcacaggtcacgcacgcttggtgctctggccagatgggtgcccacatcccaatcatgccctgggactgacatgacagagtgagagtctgggtaaatactctgcgatcggacggcactggtgcttacacgcgtatcacaggaatgcatctcanactggaatcatggccggtatgtcaagagagacanatggcatgaatatgtcacctgcccaatttttgcg

SEQ ID NO: 135155 - DNA, 1096 bp, Homo Sapiens
ttagtaccacaaatggaagacatgggaagtttatttttaaaagggggacaaatgatcagaatagcaaaaataaaagagtggggaaaatggattttcctgtgtctgtgccagtgccacaaccctacattcttcccccatgaccaaatatttgagcccacaatagcaacagaagactttcacttcaaggtcatggcctgtggggctggcctgcctcatcagccatgttaagaatatagttagccatatcatcttcagtgggtgcatctgataccacccaagattcatttgctccagtcatctgtaggcgacaaatagggcaattcctgtgtcgatcactccatttatcaatacacttctgacaaaagctgtgagcacaaggcaggatgaggtcagcccgcccatccatacagatacaacactcctcctcatcggtcagctgcttcacccttcccatccaaagactagcctgacaagatgttacagaggatgagttttcatcaggttcttcagaggtggagctctgtgccaatactcctgctgcttgacttgtgatatctttataaagttgaataaactggtataaattcatgatccgtgatgcctccacaatgccactgcttttgttaatcttggtacagaccacccgtacaaccactttccaaaaagcagaggaatcagacccaggttgtacctcaaagagaagatgtttttcctggccagaagccactttagccgttacatcattaagctcagctactctcccgagaaattcttcataagttaaggagccactctctcgaaccaacgtaacatgttttgctactttttctggtaacttgttaataaccaactgtgtctgatccgaaatttgctgtcccatgatgaaaagatgtctttcaaaatccagagtgttgcttcacatagtttcccaggttcaaggcatcgcgcaccctgcggcagcggctgcgctgcctcagcccacagctcagacctgcgggtggccgcgactcaggccggacccgcgacgcgtgggtcgacgatatcccgggattccgaccgtacagcctgctttttgaaaactgttatagacatacct

SEQ ID NO: 135156 - DNA, 141 bp, Homo Sapiens
tttttttacaatagtccatatatttattcttaagcaagttatcaataaaaaatttgatactaaaatgcctttacatagagtctgctgttcataaaacctttgtgtgtttttttggccattttgtttttagtgtttacattg

SEQ ID NO: 135157 - DNA, 665 bp, Homo Sapiens
  misc_feature (71)..(104): n is a, c, g, or t
tttttttgggaattaaataacttttgactttatttcactagagataaaaccagcagcatcacagcttgagnnnnnnnnnnnnnnnnnnnnnnnnnnnnnnnnnnactcttctgcctaatgtcggtaatgggggcttcgggatcgggaccttgagcgccttcgagaagagctgtattctcgactgtatcggggggagggtgagcggctctgccggctgtactggcgttcccactcttctctctccttctctcggcgttcccgctccttcatgcggatcttgcgggccatggctcgaagctcgtcttcccgctcctgccgctcatgctcctgctggatcatcttttcttgtgccgccttcttatccgccttgaactgcctgttcagcgccttctgcatcctcagtttcagcttctcctgaggcgtcagcttgggtgactttggcagctcctgtctctttaccagcggcaggttcggtctttttcagcttctcgcccacagcaggagcatgagcggccaggagcgggaagacgagcttcgagccatggcccgcaagatccgcatgaaggagcgggaacgccgagagaaggagagagaagagtgggtaaggggctcaagctgtgatgctgctggttttatctctagtgaaataaagtcaaaagttattt

SEQ ID NO: 135158 - DNA, 613 bp, Homo Sapiens
caggatgggtagccccgagtcgccctccccagtctgcacattccctgttgtccctgttcctgcagtggctcccggccccagggaggcccacctcactcccagcctgactcggtggctggcttccttcaggactttgcgcaagtcagttctgctcattgggtctcaatttccccatcctttggatgggagcaagagtctttgctgggcctgccttgcaggggcctggtgagacccaaatgtgagtgtcatcatcaaagcccctcacagaagtggaggacggtgcccaagagtagcggtttggactgctgctgcctcccacccggagcctgccacttgggggagaaattggtataatgcttgcaaaaacaaacaaacaaaaggcaatgtcttctggttgtggttatttcctttcctgcttgcctccccagccccctttgagtctctttttggggtgccgtcctgtctgaacctgccggtgtgtgtctctggcgccagggtcagggcgaggcccaggggtggacaggggccgtgtagcatgccccagcctccccaagctcctgctgtatgtcgtccatgtcacgccaattaaacacgcttcctggacttgtcctcg

SEQ ID NO: 135159 - DNA, 968 bp, Homo Sapiens
  misc_feature (47)..(90): n is a, c, g, or t
  misc_feature (793)..(802): n is a, c, g, or t
acacagtcacaagattaatctggtgaatccttttgtcacagttctcnnnnnnnnnnnnnnnnnnnnnnnnnnnnnnnnnnnnnnnnnnnnaaaactggtcacatttaattgctttttggaccattgaatagttgggaagtaagaattttttaattggcatgagacggttcctcaactgttaaattaaccaactttgacctgtctttagaaaaaggcttatttgtatgattttgggctaactccccggggaccatattaaatgacaaaaatgctcctttgggtgacacaccctacaaagtatttgctgttacgaacataaacgcccacattcttaatatctaatatttttgaccagtgatgttttatgctgtcatctgaaccctagagaagcagtgtcagaggaaaccttggtgtcacatgtgtcttagcaaaagggttaccatgatcgagggtcatgtgaccaaaagatgctccagagaagcttgagaatttgtttcaagttgggaggagggttggagatacaaaaatcactctgctctacaggactcttcagctgtctatgcaagaaattccgttttctctttcagcacctggaaagacacagcagcccactgaggcgataggtgattcactaagcacaagaggaatgttttctaagcaaggcgtcccttgcctctcaaacaaatgccctccaagtttgttagggtttctattcctgcaacttgtggtatcaaaaccacttcctgaaattgtcaaagcactgccaaaataaatgtttttcccccttctaagnnnnnnnnnntgacagtgctcatatttgacacttgtgtattggactctcttttgaatgaataaaaaggaaaaggggtttggtgtaattcctgatggggtgcgtgttgtttttcatgccatggtttgtgaattttaattgtggtttcccatttcgttgttgtaactgggcagaaatt

SEQ ID NO: 135160 - DNA, 1864 bp, Homo Sapiens
  misc_feature (50)..(806): n is a, c, g, or t
  misc_feature (838)..(855): n is a, c, g, or t
tctgtaccagtgctgtgccagtgcgatagtcgttctacccggtggactcnnnnnnnnnnnnnnnnnnnnnnnnnnnnnnnnnnnnnnnnnnnnnnnnnnnnnnnnnnnnnnnnnnnnnnnnnnnnnnnnnnnnnnnnnnnnnnnnnnnnnnnnnnnnnnnnnnnnnnnnnnnnnnnnnnnnnnnnnnnnnnnnnnnnnnnnnnnnnnnnnnnnnnnnnnnnnnnnnnnnnnnnnnnnnnnnnnnnnnnnnnnnnnnnnnnnnnnnnnnnnnnnnnnnnnnnnnnnnnnnnnnnnnnnnnnnnnnnnnnnnnnnnnnnnnnnnnnnnnnnnnnnnnnnnnnnnnnnnnnnnnnnnnnnnnnnnnnnnnnnnnnnnnnnnnnnnnnnnnnnnnnnnnnnnnnnnnnnnnnnnnnnnnnnnnnnnnnnnnnnnnnnnnnnnnnnnnnnnnnnnnnnnnnnnnnnnnnnnnnnnnnnnnnnnnnnnnnnnnnnnnnnnnnnnnnnnnnnnnnnnnnnnnnnnnnnnnnnnnnnnnnnnnnnnnnnnnnnnnnnnnnnnnnnnnnnnnnnnnnnnnnnnnnnnnnnnnnnnnnnnnnnnnnnnnnnnnnnnnnnnnnnnnnnnnnnnnnnnnnnnnnnnnnnnnnnnnnnnnnnnnnnnnnnnnnnnnnnnnnnnnnnnnnnnnnnnnnnnnnnnnnnnnnnnnnnnnnnnnnnnnnnnnnnnnnnnnnnnnnnnnnnnnnnnnnnnnnnnnnnnnnnnnnnnnnnnnnnnnnnnnnnnnnnnnnnnnnnnnnnnnnnnnnnnnnnnnnnnaagaattcggcacgaggccgcggctgtaggcnnnnnnnnnnnnnnnnnnataaaaataaatatttattgccatttgaagctttatgtacacctttaaaagcacatgtacaaatgtgggaaattacaaaaatcaacctaaaaccctttttctcaaagtatacataaatgtacatccaagatcagtggtgctaccatcattagaataaaaaataagtctgtctggacataaacaagcaatcattttaagtgtcattcagatattctcctttatatttaaaactccaaaaaatactaagaggcccaatatatccagaaaattgtgttttcactttaccctaacttatgaatagtggtatacaaatatatttccatctttttgtccagccagcaaatgagagtctgtacccgaccatttcacaaaagaccaatgttggtcagagacaggtgggaggagggcagtacactgaccgagaagtaagtcccaaatggcaattgttccagaagtcaagattgctgctgcacagtgatctttcacgtcaccttccaggaacctgccagcctgccctggaggaagacagtacagcatcacacccacgctgagagtcgtcttagggttaatcacaatgagctgaaacacagggcttcgcaacgactcactctctttggcacagggatgactcaggacaataaagagaagccccatttcagaataggctttgtgacagactgaagcttggtaagaatcatcaatgtgcatctttttcaggagttgaccagtttttaaattccaaataacaatgttgttcataatagtagtaccaagcagagcttcttgcatcccttggacctcagcaaaagttagtatagtctcctcagggggcatcaaaaattggttttctttgcctcctccatcttctgcaaacgtcatgacttctacttgttgatcagaaagggtcccactgctactaactagcctcctctttgtcaggccaagcacagcttttatatttccagacttcagtagtacttgcttttcactttcatcatcagaggaaccc

SEQ ID NO: 135161 - DNA, 520 bp, Homo Sapiens
  misc_feature (25)..(25): n is a, c, g, or t
  misc_feature (49)..(49): n is a, c, g, or t
  misc_feature (55)..(55): n is a, c, g, or t
  misc_feature (93)..(93): n is a, c, g, or t
  misc_feature (137)..(137): n is a, c, g, or t
cccagatatgccaaggattgagtgngcccccagatcctatgtttttggncaagtncccccagtaatccctctgataacaagaaaattggggancctaagagattccatgggacaagtttcagagggctggtgactgncctcaccctttactcaatttaagcatgattttatgagtacattttttgaggtgtgtagcctttttttctttaaagcatctctgatgtagaaaagttaaaaatcactgaattaggatgtctagggtagggtagatccagacttgggactagttaactctatttgcctttatttcagaatacaaagtggcctgcataattatgtcatttgtctttcagaaccaagaaattgaagaactgacaaaaatctgtgatgagctgattgcaaagctgggaaagactgactgagacactccccctgttagctcaacagatctgcatttggctgcttctcttgtgaccacaattatcttgccttatccaggaataattgcccctttgcagag

SEQ ID NO: 135162 - DNA, 580 bp, Homo Sapiens
ggaggtgattggattaacaattttattctgcatccactacaaaagggctggtgttttgttccaaatgtttagctgggagggctgtagggacccctgttacccccattaaacacagtaaagcatggatccagtcagccccctgctggcaggtgtgggcctggcaactacacagatccaaccccaccctcctgggtgcggccagaggccaaggcagtcgcccgagctcctgaatcccaagaatggttctggcaagtactgctgtttgtttgtaggggcaaagagttaaaataaaacgaggttctgccatggctaagccttgtggaaaccagaccccaaagcccctgccatgccaggggtctcaacgccagacgcttgttatggaggcaccagcaggtagtggcccctgtaagcagggccagagtcgggacaaagagcaggagtgaagcagccaagagacagaggaccaggctggagccagtgggcacgcaggagcctgcctgggaaaagccggggggcaaggctggcatgggaatgaacacctgctggtgacacctctctgagcttcagttcccttaactag

SEQ ID NO: 135163 - DNA, 632 bp, Homo Sapiens
  misc_feature (404)..(413): n is a, c, g, or t
tttgaatttataaagttttatttttgtatatgtgctaaatcttaggaactgtgaacaatcttcatgtcagtctgttggcttgtaaaaggctaagaagtgcatgacttgggtggtgaaatttccttttaggaatctgaatctctaaataaattttcacacatttgcagttttaaaatgtggtgcaccttgcccccgcttctcttacacctataaatttggagggaaagtgctaaatttctgcaaacgtcaagtaattgttataaatacaatcagcagcaaattctcaatacacttagcacttctgtagtgttttatcacactcaaaaaccttatttgcaaaaactgaacactcacatatatgtaggaccaattctggttgagtcctactatgaaaccaatactgnnnnnnnnnncttggtaacacaaaaactggggtgtaggggagtgttttcctttatcggcagtatgtagtaccttcaaactagagaccaaaactgggcacttacaatgaaaaggcaattttcttatccagctataatcctaaataaggcaggatatatccaccaaattacccacaaaattcagcaaagtaaaatagctcatgggaaaacataagctggaaaaatactaat

SEQ ID NO: 135164 - DNA, 700 bp, Homo Sapiens
gtagttaggtaaaggtggaaaagtgatatgttaaatcaaatggtacctttctcccaccatgatttgcaatgcacactaccagtgtagtggccctaggggcagacaaaccccagtcttgctggaaaatctgccccaaagcgcttctaacttctttgtattccattcttttcttcttaaatacttgagatccagtgccaggcaagagggcagaaccacccttgtcagtgggctggcaactccttctgggagggcatcgatatctcttgaccccccgggataaatcttccctggatcctacacaaccctcgtgattgagatgaaacaatttaacatgtgaatccaacagccctgcatttcacagaatgttctgtttcaggcagtgacattctttatggggaactagtatacgcaaagcacgtgcaaggaaagggaagagtttcttaaagtgcattaagatagactgactagtaacaggatgcaaacggccctgacacatacagtagctccataagcagggcaggaggggtggcacgacagaaacctcagccagaccagcaacgttccccgtgttgcgaaacccccagcaatgcaaggatgataagcctgaaacacacacacacatgcccgtgtctggcagggcagatccctggcttcagggattgatggcctggtaaggcagaggctggttcctcctgggctg

SEQ ID NO: 135165 - DNA, 500 bp, Homo Sapiens
aaaatgtgtttttattaaatataagacagataaaaaatgatatttataaaatatatgttagctctaaagaagagtagtaaaattaacatacatgaatgtgctatccaacgtaagagaaggctccaatgctaccctcttctgtcctcctctagaggtggtcaccattatgctgaattttgtgataattattcacttgttcttcattgttttatcagagatgtccatattcctacacaagatactgttggttttccctgcctttgactttatatcaatggaatcacactgtaggtatttctctgtgatttgcttgttcctctagagattatgtttctgagatttatccacttgatgctttcatactgatgtttttcagttccaatcaaacttcactaagctcttcatatattgtccttctccaggcgcgggtcctgctccttttccggccgccctcgctccgccccttcgcctctccccgtgatccctctctcgctaaccgt

SEQ ID NO: 135166 - DNA, 1171 bp, Homo Sapiens
  misc_feature (1084)..(1084): n is a, c, g, or t
gccttttgttaggaaccctttaaataaattccaaaaacaccggaggtccaattagtgtatttccattcccatattagccacaaaagattaaacacttttaaaatatccggttattctagttttttaaaggaataaaaatgaaaaattttcaataacctgaattttggaaaaaaccttttaattaggagtttcttaccaagttatgatttaatatttatcagatgtgtaaatatacatgatagcaatttttaaaacttgtaaatagttggccttacaaaattacaacacactgtaaataaatccttcccacattttatacaaactacatgattttgatatacaaagattctgtttttattacactgacaatgtacaacaaagactatttacaatgcaaaaagtatataaaccacaatttaacagtctgctactggcagccactatagtttaggaggtagctttaattaaacgaaatgaacagaagccacatttcccaacttgtgttctaaaaataatttacataagataaaaattcattatatgcacagtatgtacagtttaattattaaactgcaatctagctggatttttttagtatattcagaataactaatatggcagtgggtttgctattgatttagcacactgttcaaaaaacatattgaacaattataactttaagactccacccagtaataggtctaaagcccatagatgggaatcaagtaaaatttttaatttttaaagacacaggactaagctttattctttcttcttctatttttattaataacatattatcttgtttaaccagagttcaacctctgagctattgaataggctcttttataaaaaatagtatggggaagatgtatggaaatttccatttaatagcacaggttcaggataatccagctcactaagaaataaacataagtacctcgtgtcatcattactccccgtttcgtctaattaatgcaagtatgaccctcgtggcgattcttggctcgagggccaattcctatagtggtcggattaagtcgtatcatgtctaactggttctgtgtgaattgtatcggccaantccaacacaacgagccggaccataatgacagctggggtgcaaagagtgactactccattattgcgtgcgccactgccgcttcagcgg

SEQ ID NO: 135167 - DNA, 1105 bp, Homo Sapiens
  misc_feature (32)..(32): n is a, c, g, or t
acaggtatcgcttgggggctggatttttggtntcgtagacatgggtaacaacgtttattaaaatctggccattttctacatctcaaagaggagataacccaccagaggcttaggtaacataattgtgtttaacgtaaatatacacagataccaataggcggttaagccatgggacagggccgcagatggagactgctcaaggtcaaaggggtctccagctgggaccctgcacctggttcgtagcccctctgcagacgcacagtgcctcacgcctgctgcaacctggaaccttgaggccttcatgtcagtgcaggacaagagtcatgtctgtccatagattggggctggaaaggactttctgccactggagcttcgattgtgagcatgcatccccgccaacagctgtgtctccctttgaaccaagtctggttcctccaagcaagcggtcgttcattccaaagagggcctgatcccagacagttaactccaagctcgactgcctcagctgagctggggttacgccactgaagacaaatgagtgtttccactgggggcaagcctgcttgctcaggtctggcgacttcagtctcagtttttgttggtctggcagagtgagacagcccttaacaaatgagttcaaggtgccatctggccgcacaggtaaattcttggctcctagcactaccaaacaaagttgaccatgaagtgatggctgatctgtcccttcttgagcctcttggagttttctgggccgtgaagggagaaccagcttagcccggactgtgagctctccattactctgaggaacgctgtcttcgtatttctccgccttggcccggagcggatgccgagcggaaggactgtgttgtgctgtcttcaaagtcccacgtggccagagaaatgatcacttctccaagaaacactctccgggccagcgtgcccagatgccacaccgagacctgcagctgccgggtcaccagctgggcaggggccacctgatacttcaaggtctcctgaaaggtcgggtccacggtgttcctttggactccagtcttgcgctttccctgggaggatctgtcgggcaacaggtaggtcttcacatacg

SEQ ID NO: 135168 - DNA, 867 bp, Homo Sapiens
  misc_feature (68)..(69): n is a, c, g, or t
cccaacacgaaatggtttagaaaaagactctctcgagggcccgaagggcgggcggccaatgttagttnntttttgatggtcccgctccaagaaggaaattattccagctttttttattgagatccagtggtggttctgaaaaagagctttttggtttttagaagttaggcgttcgcctattttctttcttggggcgccgccttcttagggttgacaacccttgggcttagcggctttcggcttcccagccttagcagcacttttggcagctttcttgggcttcgcaaccttggctttctttgggctcttagccactttcttgtttacagtggccgcggccggcttcttcgctttcttcggtgttttcttagcgctcttcttcggagttgcgccgccagccgccttcttgggcttcttggctgccccaactggcttcttaggtttggttccgcccgcctttttaaccttgggcttggcttccccggaggctgccttcttgttgagtttaaaggagccagaagcaccggtgcctttcgtttgcaccagagtgcccttgctcaccaggctcttgagaccaagtttgatacggctgttgtttttctccacatcatagccggcggcagccaacgcttttttcagagcagccagagaaactccgctacgctctttagaggcggccacagccttggtgatgagctctgacaccgggggaccggacgccttacgaggcgtacccccagcctttttggccgccttcttctttacaggggccttctccgcaggaggcgcggcagcgggagcggcaggagcagtctcggacatgttgagaatcaaaaactcgggtacaagtggcaaagcgccgatccc

SEQ ID NO: 135169 - DNA, 851 bp, Homo Sapiens
  misc_feature (58)..(60): n is a, c, g, or t
  misc_feature (62)..(81): n is a, c, g, or t
aaccggaaatggtctagaaaagctttcttgagggcccgaggcgggccgacatgttttnnntnnnnnnnnnnnnnnnnnnnnggaaattatccagctcttttattgagatcagtggtggctctgaaaagagccttttgggttttagaagtaggcgttcgcctatttcttcttgggcgccgccttcttaggcttgacaaccttgggcttagcggccttcggcttcacagccttagcagcacttttggcagctttcttgggcttcgcaaccttggccttctttgggctcttagccactttcttggttacagtggccgcggccggcttcttcgctttcttcggtgttttcttagcgctcttcttcggagttgcgccgccagccgccttcttgggcttcttggctgccccaactggcttcttaggtttggttccgcccgcctttttaaccttgggcttggcttccccggaggctgccttcttgttgagtttaaaggagccagaagcaccggtgcctttcgtttgcaccagagtgcccttgctcaccaggctcttgagaccaagtttgatacggctgttgtttttctccacatcatagccggcggcagccaacgcttttttcagagcagccagagaaactccgctacgctctttagaggcggccacagccttggtgatgagctctgacaccgggggaccggacgccttacgaggcgtacccccagcctttttggccgccttcttctttacaggggccttctccgcaggaggcgcggcagcgggagcggcaggagcagtctcggacatgttgagaatcaaaaactcgggtacaagtggcaaagcgccgatgaagcccc

SEQ ID NO: 135170 - DNA, 1060 bp, Homo Sapiens
  misc_feature (64)..(98): n is a, c, g, or t
  misc_feature (717)..(788): n is a, c, g, or t
ggccagtgccatgctcgaattaacctcactaaagggaaaaagcttgcggccgcggctgtatgcnnnnnnnnnnnnnnnnnnnnnnnnnnnnnnnnnnnctttaattcttattctaccctttctcaaagggttaaattatctcatgacattttatgctaagctgaaggtatttttcatccagaggaaataccaaaaataaaaactatggaatcatgaagctggaaggacccttgggggtcatctagttaaaccccttcatcatacaaatagagtcactgatgccttagagatgggatgaggcttgcttccagagcattcagtgagtgggcggcaggaccataaacaaaaccaaggactcttttctctttttcctttgcaacatcgtgactcacatattaagtaagtacccgttcttcactgcttcagtattacaagcttgcttgacatctttagagattaggacccaccctgccaggctttagtttgacccaaaactcattctcaggtctcctcaactctatcgttagagtccggtgtgctgtataccagcgatggacgacatcataaggaacggtattgatgacagcccggtcatagttgttgtacctgatcaaatacagctctttattccatgggtagatatttaagactggcccaatcccaatcatgtggttgtgacattctctctcgtgccgaattcttggcctcgacggccannnnnnnnnnnnnnnnnnnnnnnnnnnnnnnnnnnnnnnnnnnnnnnnnnnnnnnnnnnnnnnnnnnnnnnncacatttctaacaagatactagtcggtagcataaagtgtaaagcctgtggtgctaatgagtgtactacttcaattaatgcgttgcctcactgcccgcttcagtctgaaactgtcttgcatctgcattatgatcggcaacgccgggagatgggttcgctaatggcgcctttcgttctcgtcatgactgcgcgctcgtgtcggtgcggacggttacctattaaggcgtaacgttacacaaccaggaatccggaagacatttcatggcgcaagcc

SEQ ID NO: 135171 - DNA, 1108 bp, Homo Sapiens
  misc_feature (1031)..(1049): n is a, c, g, or t
gagggtactaggtatcatggtgtaaactcccaggcttgatgtaacagcagagcagagagtgcagaagtggacgctcagaagcgagtttatgtgtgtcttttcctctatctgctggctgtggctggtactgcaacctatcccaaagtaacagcctagtcaatgaggtatatgcttcagatctggcaaactctctcggcacataaaacggttattcttagttctctgaaagacccccagatctttgaagtgtaaactaagagctacattttcccttttactacatctcccttaaaagaaaagcactacaagagctttaaaatagcaagcttccctattctaaggggaaatagtcttttttcatgatttgaacagaaggtagcttgctaggggaaatcctgttccttggctatctccaaattcctttgtagcccagtgtgtacttttctctggtcttcaacttattcaaacctgcagtcagagataatggtttctcctaagcaattaaaaggtgtctgaggcctgctcttctcttcaaagcacttagtacacagggttacaggtgctaccacttggattccccagagcatggaagtctgatcccaggttgaacatatttcttctgaaaatgagcatcttggttctatagattcttatcttgctcacaggacttgctccaaaactgaattttcagaagcagcatgatagggaaagagatattcaactctgacagacaaggtagatcgaagcacccacactaatttctttcaggtgccccatgaggaagactgcatcatgtcacttccactcacttggggagattctaggactgagacacaaagttcccccagagtttctgctaatggaaggggaaacaggtggtttggaatggaaaggtggaaccaggtccacaaaatgtgctccctctgctcaagactgactttggctttcccagttccccacttgactttcatataagctgagatgacctattacggtaaaaattagggaacacctaataaaaccaactttcnnnnnnnnnnnnnnnnnnncctgagcagcggccgcaagcttattcccttgtagtgagggttaatttgagcattggcac

SEQ ID NO: 135172 - DNA, 1804 bp, Homo Sapiens
  misc_feature (144)..(315): n is a, c, g, or t
  misc_feature (338)..(355): n is a, c, g, or t
  misc_feature (1434)..(1434): n is a, c, g, or t
  misc_feature (1590)..(1590): n is a, c, g, or t
  misc_feature (1600)..(1600): n is a, c, g, or t
  misc_feature (1608)..(1608): n is a, c, g, or t
  misc_feature (1646)..(1646): n is a, c, g, or t
  misc_feature (1652)..(1652): n is a, c, g, or t
  misc_feature (1689)..(1689): n is a, c, g, or t
  misc_feature (1691)..(1691): n is a, c, g, or t
  misc_feature (1721)..(1721): n is a, c, g, or t
ggccggcccgggccccggaaacggggcacgcaaggaaacccgggaacccccgacccagtccctaacagaaaatagaacagcccgtcgtggtcaaccgaacccgccacttggagctgagcggtgaatcatgagtcaggagatcannnnnnnnnnnnnnnnnnnnnnnnnnnnnnnnnnnnnnnnnnnnnnnnnnnnnnnnnnnnnnnnnnnnnnnnnnnnnnnnnnnnnnnnnnnnnnnnnnnnnnnnnnnnnnnnnnnnnnnnnnnnnnnnnnnnnnnnnnnnnnnnnnnnnnnnnnnnnnnnnnnnnnnnnnnncaacacagcgagactccgtctcnnnnnnnnnnnnnnnnnncagaacaaacatcgacctcaggggcggctgctgggaatgtcaacaggagcgtgtgagactcctggcagtcccagccagagctttcctttggagcctgcccagggcacagaggtggcagggtggctaacggtgtgcagaccgctcactgagcaagcctttcccttgtgtaggacaccccagggcctcacattctctgaatccacacaaggtgatggatggctttgcctcttgtaaatgagaaaactgaggttcagagaaggtttgtaagcttgttcccgtgtcaccagctggtgagggagcttggacacggaaagccatgcctgcctgactgggtaagctgggctcctcacagcactgcccctgcttcccagctgtcgccaggggccccagggcaggcagagcaactgcgttcccgtggcagcacctccacctggaggggctgggcagggagcaccacacctgtcaacttggaacaaacttttattttgaatgctggtctgatcagtccacggccaggggtaggtggtaactagaaacagctggaaggagggaaggagaggggaccagcagtccgcaagcaggaggaaaggaaagggttggggacaggaggaggcaaggctgaggaaggacccagccagctgggtgtctgccccggctagagaacgaaccacccccacccaccagcctaccctccatctgtggcttcagtgcagaagtcagtccaggtgggttcaggcccatgccaccttctctggcctgcacagtcccaccccaggcaggggttcttccagaaggctaaatgctctgtcctaaccctggaagtgtcctttcactaacccctgcctgcccgccccacgctccagttgggtctttcaaacctggagctcaggccttcactactgtgctcctgtagcagccacaggggtggcgtggtggggaagatggggttctagtctcagcctggctcagggaagatggggttctagttctcagcctggctcaggggaacatccctccacccctccaacccaggaggtgctacaaaacatgatcctgagcagacccagaccccttctggntaccagtgcctgaggcccaacaagaagcggggtgatgggaggctccaggccgggcagatcagcgaaagctgagggcagccagggccggcccaggcaaacgcaggattgtctccaaggggaaacccacagctgtctttgggttggtggaagggtcanggtcaggccngagatggngagagtctatatccatcgcattcccctcaatgtctcangtacancagaagctttggatgactgatctgtggcttaaggaanangagaagaagaaaggagcacacttctctgtnaatgccatctaacggggtctgtctgacacaaacatccaacctcacggtcggtcagagggctatgctctcgatctgctcagcat

SEQ ID NO: 135173 - DNA, 620 bp, Homo Sapiens
  misc_feature (64)..(82): n is a, c, g, or t
  misc_feature (100)..(112): n is a, c, g, or t
cggccagtgccatgccgaattaccctcactaaagggaaaaagcttgcggccgcggctgtatgcnnnnnnnnnnnnnnnnnnngtggttggtggtgactgnnnnnnnnnnnnnaataaaaataaagatgagagaaattatttggacaagatgttggcaaatcacttttacaggtgcttgtaacctccaggagacctcagcttgactgtagaagatgcctgctgtagggcagttcacgttctggagtcgttcagcaccacctgcgaactctttgaccggaggaaggctgcctatacttcctgcttgctgggtctggaacagtcctggtttatgctgtttgtgctggcataaatagaatagcacggccttttattctcacaagtgactcagtttgacaataacttagtcacccttgctttgggcaggttaggtgagcttactgaatcaaagatttcaacaatatcatctaccttgaaagtctgtgaagcttggaggtcatataatcaaggtggctggccatgctgcctgctcagagctggtagagacagcagaggaaagcagctgagtactcctgagcttatttttccaacaccacagaacaacgttctctgaacaataaggt

SEQ ID NO: 135174 - DNA, 1070 bp, Homo Sapiens
  misc_feature (980)..(1003): n is a, c, g, or t
  misc_feature (1034)..(1034): n is a, c, g, or t
tactcgctactttttggatgggcggtaaattccacagaacaatagctggtcggattaacgccacttagagattaccatcagccagaattgccgagactatcaaatcatgcaacccaaagaatttttccctacgattaacctgacctcaatgatttgttggctcgggtggtatccaggattcctatattatcaagtgatttttccaaagcaatgaagagattcagtgaaggaacccccattttgctagagagtagatactccttaaatagcccccaccacagtcataacaataatgataatgctggattattggtaagccaaggatgtctgcctgctatccatcatactgtggcaatattattgctttcaatcaatttatactgagtgtaactttaggatttctgctattaaatgcatgctctgtatcatgcttcagtttctggctatgctttgtctgtttcaaaatatgtagcttcctcttttgtacaacaaaaaactcattctcacttttactaaatatactgtaggagtcatcattgatgttatttttctcttatgtatctgtaaagatttttggcatatgaatgtaatattaaagtcaatgatgctataacttgcgatgtttgcatcatgtcaacctttttgaaggagtgaaaaagccctactatgtttttaaatagcaagtgtaagctcagtgctagagtggatatacacaccgcatgttttcatatgtggcacttttatgtatcatgttgggttattgttctagactggactgttaaatactatgtttgaggctgggttgtcatttttataactgtcttggtgttttatggccattatttattacttttgatacacagaatgagctgcatgcatttatagagcaataagaggatgtatttaatgtgccttgtttttaactgaataagaactggaagcatgaatcaataaaactgattaaaatggtctatttgctnnnnnnnnnnnnnnnnnnnnnnnncctgagcaggcggccgcaagctttttccctnttagtgagggttaatttcgagaatggcacttggccg

SEQ ID NO: 135175 - DNA, 993 bp, Homo Sapiens
  misc_feature (71)..(71): n is a, c, g, or t
  misc_feature (148)..(148): n is a, c, g, or t
  misc_feature (167)..(167): n is a, c, g, or t
  misc_feature (216)..(217): n is a, c, g, or t
  misc_feature (229)..(229): n is a, c, g, or t
tttccgttcagattcagacagctgtcttccactactgtgtgtttgtgagagagggagagatgctgattacntatttcccagtttcaatctcttgacctctcttgacactgtccctttgtctctcttcttctcagaggcagtctcttanaactgagaggagatgagcnaatgattaaggaaacacacttctgaggcccagagatcaaatatagtaanntactaaaccgcntgcttgctgtgtcacttgtctcctctttcacatgctctatccctctatcccccacctattcatatgcttttatctgccaagttatccggcctctcatcaaccttctcccctagcctactggggatatccatctgggtctgtctctggtgtattggtgtgaagtgatgtctcagggacttgtgcaagtgtattcgtgtggggtcatttctacctacttgtcttttacgtaagtaaaataatcagtgtaatgtggtatatgtgtctagatgtataaactaaaacttttattccactatgtgtctagatgtataactaacatttttactccagagaagctttgtctctagccaaacaaacacacaaacatctgcgtatatggaacacacagtgttagttttatgttagcaatactggagttaagaagtatatagttatcattggtttgacaacagtctgagtaaaaagaaaagtcagagaacatttcttgaccaatgggagcattgggttacatggactaatagcaaaacattatattatcttcccttatgtgtttgaaactgatcaaatttggagtagactgacttgttattttgaggcatatgagcatattttattcaggctactaagtataaatcacccatgcctataaagttaaacctaatgcaaattctacttagagtcatattttttatttcctatttcttggagtaattggaagtgctctgtatgctttgagagcaataaaacgacattaaatactcttc

SEQ ID NO: 135176 - DNA, 1000 bp, Homo Sapiens
  misc_feature (717)..(717): n is a, c, g, or t
  misc_feature (726)..(726): n is a, c, g, or t
  misc_feature (767)..(767): n is a, c, g, or t
  misc_feature (781)..(781): n is a, c, g, or t
  misc_feature (789)..(789): n is a, c, g, or t
  misc_feature (828)..(828): n is a, c, g, or t
  misc_feature (831)..(831): n is a, c, g, or t
  misc_feature (882)..(883): n is a, c, g, or t
  misc_feature (899)..(899): n is a, c, g, or t
tttttgtgtggtaccttttatttagtcagtcttcattgtaagtgtgtgcttttgaaatcactaaatatgaccttttcagaattcaattctcacagtatttacagtgaactttgtgcaaacaaatccccctttgtgcaaagggggagcttcctgctccccctttcacattaataacttacaaattcagatcacaacaaaaccccagactctagttttctgtttgaaaggtactgagctgggataatgggttgctaggaaagagctaatgcaagcccaaaggaaataaaatgttttctttatcagaaaagaataataacaaggcctcactctccaaaggaaaacagacgtcccaagatgttgtggaacagtattaagtaaccaaatacaattccaatggttatttcaccttcattttttatacttacactcatctcttttaattaaataagcgaaaccagaaaagtgcaattcgaagggactctgaactgtcagggaacgttataaaaataatctgacgtcagtgactaaagagtgcgggtcatcaggctgccggccggcctcctgcaagggcactggccagggaggccacagctgccaaagctgggaggtgcgccaggccccacatcacctgcctcggggtccatgccaggcaagaaagaaacatacacctgggcctagccaagggtggtgccctgccaggtaactcttcaggtacanaatctacanaggggatcagtcctggagacacatttctcttccctctctangcagagaatactgnctgaaganactacacacactcaagtatgtatagggaagggtctgtgngangcacgatcatgattagaactgagtgtaaaataagatcacaatgtgcttcanntctgtaatacgcttanatccgtttaatggtgagtcgaacaacacgctttaatatttgatcagctttaaggagagataactatcactatcaaaacatcagcaatgttagctctgcatc

SEQ ID NO: 135177 - DNA, 1077 bp, Homo Sapiens
  misc_feature (64)..(82): n is a, c, g, or t
ggccagtgccatgctcgaataaccctcactaaagggaataagcttgcggccgcggctgtatgcnnnnnnnnnnnnnnnnnnnaaaccttaacccagagttatttttattttccagaacgtgttaggaactagtacttaaataatctcaagtccctgaggggccagagatcccaccatgcaaaatagcaaacagacccaagacttggggagaggcggtgagtgcatcagaaatggatgggtacatctgattcccaccacgcggggctcagcttagttagcaggagaccttcagactgagaaaaaatgcaagtctttttttggcctctaatatctgggaaggatggagggagctcaggagacacagaaaagatggcgtatgaatcctgtccggcctgaacgaggctggagttgtgcctctggatagcttcaagcactgatcagattgtcagcccccgctgcttgaacagatgctttagagcctcttccagttgccggtttgttccctgaagccccttcaccacctgcgctgcccactcgaagtattcctggactcgatgttctgaccatccctctggggtgcagcgattcaggtccctcagattgtacagcttgtctgccagcttcaccagtttggccccggggctactgtgggggcgcttgctccacctgcagcctctttctctccagcttgggcatacctcgtgccgaattcttggtcccgagggccaaattccctacagtgagtgctattaaattcgcaatcatgtcatacctggtttcttgtgtgagattttttgcgttcacatttcatacagcatacgagctggtatcaaaagttgtttggctggtgggtcccatgagtgtgtgactcaactatttggttgccctcacgcccttttcacgtcggacttggtctggcactgcactattaccggcacggggctgggaggtgttggcgatggggttttcggtttctttattgatcctgcgccggcgtgtgttgttgtcggccattcccaatggggatctgttctcttatttggatattatgcgatggtggaatgcgttatggcggac

SEQ ID NO: 135178 - DNA, 552 bp, Homo Sapiens
ttttttcactcttttttcttctttcatacagtaaaaatacaatagctgggccaaggggaagttttcaggacagctcattgcatcaggaactcatggccttgaaccaagcttgccaggaagtggggaaaaggcagtgctttccttgacatcacgctagcaagtttctgtcgactcttatgcaggatggtcagaacatcgagtccaggaatacttcgagtgggcagcgcaggtggtgaaggggcttcagggaacaaaccggcaactggaagaggctctaaagcatctgttcaagcagcgggggctgacaatctgatcagtgcttgaagctatccagaggcacaactccagcctcgttcaggccggacaggattcatacgccatcttttctgtgtctcctgagctccctccatccttcccagatattagaggccaaaaaaagacttgcattttttctcagtctgaaggtctcctgctaactaagctgagccccgcgtggtgggaatcagatgtacccatccatttctgatgcactcaccgcctctccccaagtct

SEQ ID NO: 135179 - DNA, 881 bp, Homo Sapiens
  misc_feature (105)..(105): n is a, c, g, or t
  misc_feature (667)..(667): n is a, c, g, or t
cgggtagggaagtaggtccttaaaatatttcccatttccttgaggggcccaggaatcccctccatgcaaaatagcaaaacaggccccaggcctttggggagaggncggtgagtgccatcagaaagtggatggggtacctttggattccccccacgggggggctcaggttaggtaggcaggagaccttcaggcggagaaaaaaatgcaagtctttttttggcctctaatatctgggaaggatggagggagctcaggagacacagaaaagatggcgtatgaatcctgtccggcctgaacgaggctggagttgtgcctctggatagcttcaagcactgatcagattgtcagcccccgctgcttgaacagatgctttagagcctcttccagttgccggtttgttccctgaagccccttcaccacctgcgctgcccactcgaagtattcctggactcgatgttctgaccatccctctggggtgcagcgattcaggtccctcagattgtacagcttgtctgccagcttcaccagtttggccccggggctactgtggggcgcttgctccacctgcagcctctttctctccagcttgggcagagtcttgtcatctgttacctcctccaccaggcgccgcacttgtgcccccaagtgtagctccacctcattcagnggtggtgtctgtgtcctccaccgtgtcatggagcagggccgcctgtaacaccacaatgtcagtgattcccgcctcgtgggtcaggatccgtgccacaccgatggggtggttgatgtagggggtccactcggggtccttccgccgctgctgccggtgcttgcgagccacgaagtcggcagcctccagcagctgcgccgcctcagagcccatcccc

SEQ ID NO: 135180 - DNA, 987 bp, Homo Sapiens
  misc_feature (778)..(797): n is a, c, g, or t
gttgttcttgaaacattttatttttttctaaatataaacccttaaaatgcacattattttttaaaataaaaactggcatgaatcctaatctttatacaatttcacagcaataatagcagcatgattttagcctcttaaaagatttcctcctttgctctaaataaaaattaatttcaagttctaaaaagccagagcagcaaccatccagtaattggaatgcaattctcctagtgtcttctacagaccgagcatttaaaatacgtgaatgtataaaacttgagtattattaagagttatggaatgaaatgacaatctaaactcgttttgtaaacataggactgccttgctagtctgatgtattttggggggtggagggagctgagaacatagaatggagttgggctagagagttcctactctaataaggaatgcaactttcaaaactcgtgggtgttaaacatgttttacatgtctccagagttataaagagctatacctgaaatgctggtgtagatggtaattacaagaagactgtgaccacacaagtatagagtaagcaaacgacagtaatgccttaggacagcaataactgcccagaactccactggtgaaacggggctgtgaactaagcagttattgcaggaacttgcagtctaataatagataatgcgtagctacttaaattctcagggaccccgtactctggtttaggaacagaacaacatgggaatttatattcatataattatgcgtgtctatcagtcaaccatgctgggcnnnnnnnnnnnnnnnnnnnnactgaaagaaagtgatatttaggaaacccctcgtgccgattctggctcgagggcaattcctaagtgatcgtataattcgtatcagtcaacctgttctgtgtgaattgtatcgtcaattcacaacaagagcggagatagtgtagctggggctatgatgacaccaactatggtggccacgccgtcatcggac

SEQ ID NO: 135181 - DNA, 970 bp, Homo Sapiens
  misc_feature (445)..(754): n is a, c, g, or t
  misc_feature (927)..(927): n is a, c, g, or t
aagagacagattcttgttttgtcactcaggctgaagtgcagtggtgcaatcatatttcactgtagcattaactcctgggctttggcgacaacaccaaggcggcagtgatccggctgggactcatggagatgatagccttcgccaagctcttctgcagtggccctgtgtcctctgccaccttcttggagagctgtggtgttgctgacctgatcactacctgcttacatttcagacagagtccagagcttgcagagtctggcatgcccattgtccgccagctagttcatggtctttgaactccttccagtctagtgctcttcacactacattacctggatccctttgtgcccctccttccttgtcctctgctctggggttggagctctggggcagcaggaataagctcatcccacttctgtccatcacccctcgtgccgaattattnnnnnnnnnnnnnnnnnnnnnnnnnnnnnnnnnnnnnnnnnnnnnnnnnnnnnnnnnnnnnnnnnnnnnnnnnnnnnnnnnnnnnnnnnnnnnnnnnnnnnnnnnnnnnnnnnnnnnnnnnnnnnnnnnnnnnnnnnnnnnnnnnnnnnnnnnnnnnnnnnnnnnnnnnnnnnnnnnnnnnnnnnnnnnnnnnnnnnnnnnnnnnnnnnnnnnnnnnnnnnnnnnnnnnnnnnnnnnnnnnnnnnnnnnnnnnnnnnnnnnnnnnnnnnnnnnnnnnnnnnnnnnnnnnnnnnnnnnnnnnnnnnnnnnntttcggttgcagtgagtggttacatctcacccaaagtgtggtatacctgttaccaactaatcacgggatactgcctgcacagatagggtgagaaaagggcagcattaggccaggacctgttataatgccgccgttgctggatgtttttcaataggccgctcctcccgacgagntatcaaatgttgtggctcagtgttaggtgtgcaactcttagcg

SEQ ID NO: 135182 - DNA, 878 bp, Homo Sapiens
  misc_feature (804)..(838): n is a, c, g, or t
ggaggatgctgtatagctcccggcttgtctcgggcccctgcagtttctgcccattcagcaactctttctccatctgctccaatggactttaaggcttccacagatctctactgtgtccacctcttgcacccactgtgatacggaagtttggtgtctgcatcagctctttccatgagttgtcccctggtccgggtccttgcagcccatgtttgtctcacagaacttctcatcagccacctcgctgtcaatgttggcccccatcagcacactcattggggatgccgaggcgctccccaatcacttgccgagatgagcttcagcccattggggccctctgtctacccccttaataagagatatgccagtggcgtttgccttcagatggcccttgagctggtcacagatcttgccgatgaactgatggggcaccacaaagatcaggatgtcagcatcctctgcagcctggaccacatctgggacagccaccacatttgggggcaacttgtgccctggcaggtatttgacattctcatgctgcgtgttgatgatctcagtcagctttttgcctccaatgtcttcctcaaatacccacatggtcacccgtgggtcaaactgtagaccagctgggctgcattgccacccacgatcttggcgatggctgagccccagttcccggagcctacaatgcagactttcttgctagccagtggtgccgcgtctctgcctgagccggctcagtgccacactccctcccccggccgtaatggccgaattcccgggcatatgtccggtaccgtcgactgnnnnnnnnnnnnnnnnnnnnnnnnnnnnnnnnnnncggccgcttcctcgctcaagactcgctgcgctcgtcgttg

SEQ ID NO: 135183 - DNA, 939 bp, Homo Sapiens
  misc_feature (200)..(200): n is a, c, g, or t
  misc_feature (270)..(270): n is a, c, g, or t
agcaactcattctccagctgctcaatggactttcctgtacgcgcaaaggcctcagccactttccggttcccgccctccatagcaggtagtgatcaggtcagcaaccccacagtttttccaagaaggtggcagaggacacagggccactgcagaagagcttggcgaaggctatcatctccatgagtcccaggccggatcanctgccgccttggtgttgtcgccaaagcccaggccatcacagaagccagcccccacggccactacattctntaaggctccacagatctctactgtgtccacctcttgcaccactgtgatacggaagtttggtgtctgcatcagctctttcaggagttgtccctgggccgggtccttgcagccaatggttgtctcacagaacttctcatcagccacctcgctggcaatgttggcccccatcagcacactcatggggatgccgaggcgctccccaatcacttccgagatgagcttcagcccattggggccctcgtctacccccttaataagagatatgccagtggcgtttgccttcagatggcccttgagctggtcacagatcttgccgatgaactgatggggcaccacaaagatcaggatgtcagcatcctctgcagcctggaccacatctgggacagccaccacatttgggggcaacttgtgccctggcaggtatttgacattctcatgctgcgtgttgatgatctcagtcagctttttgcctccaatgtcttcctcaaatacccacatggtcacccgtgggtcaaactgtgccagctgggctgcattgccacccacgatcttggcgatggctgagccccagttcccggagcctacaatgcagactttcttgctagccatggtgctcccactcaggtgggggctcccgagcgatcccgggaattccggaccggtaccagc

SEQ ID NO: 135184 - DNA, 1466 bp, Homo Sapiens
attttaaactccacttattgtatacatttgcataagtgatgttatcaacagtgaatcagaagaaaagtcctagagtcttcttgacaatgatctgcttacagctgcaaagcttgaagaacccattcattactccgttaatgtttgccacatccagttatctgtgagggttttagtcctatactttcctttggaagtcgtggcataaccaagccaaccaggtcttcacttaagcctttttccactttgtgtgaattctgaagttgttttctgtaggctttagattttattcagttgcataattaaagactgaattctttatttggaatgaaatattcttgtcttacacagtagataataaaaaggaataacgtatacacattattaatcataaatgaaaagagaaaaccagtgcaaaatgcggcagacagtacatctctaacatattgcaaaggctgataccgggacaacactacttcagaaaggtgccagcaaaatggtgaatgtgtgaaaacaaagaaaaatattgtgtttatagggtgcagaaagtttcccagaaactgacagagcccatgcatctctgcacccagaatacacttagagaataatttaaccatgacaatagggactacagaaaatggtatattgtgtataaacctggcctctctaatcgcctccttatgtgcctggaacatcttgacgttgttcatgttcgactgccaatatttcacatatcctccgtggtctgctgtcaacatccacatgtcattatgtgaccacgtcatggccctcactgggctgtcgtgagcctgtaatattgtttcaaaattgaaagtgagtccattccacagggtaaactccccactagaagctccagtgaccaagcgtcttccttctggagtccacctaacaacaaatacaggacactttactttatttgttgatgtccgaacaaattttgttgttactgcattcataggattattcaacattcctataggtgggaccagatcattgtaataacctgcatcaggctgaattgcccgcatatctctctggtctctttgccatattctgttctccaaatacttaattacagatggattgtagtctatggtttttcggttcacagcttttctcattcgttttccatcaaaagtaagctgttgcattgcttgctgttgtgcaaaatcaggtcgcttataaaacagctgtcgaggtgcctggtgctggaaccttggcatatggaaaaaacgaggaggagaaccaatttctgtagccatggtgatgttttccttctaggatacgtctggctttgagcagagctcctaaatggccagcgaagcgttcgccttcagagccagaaatgtctctcttgtttggtctccccaccccgatcctctcaatcccgctcctccaaaggagcagccgccatcttcccctatgggccaccgaacgcacgctctccc

SEQ ID NO: 135185 - DNA, 621 bp, Homo Sapiens
  misc_feature (460)..(469): n is a, c, g, or t
actgtaaagtctgagaaataggaaaaatgtctgagacagcaaaatatgaaaaacctgctcatcgttcagcttccaaaattctgaagtctggaagtttttccttcaagaaaagaaactgcataaaaaatttaaaactaagtcatctcccagatataagtatcatggtccagcagtactgtttaatggggtattcagtgactaaggtctgctatttatgcaaaattctgtttatcccgtgttaccaaattaccatttcagtgagaagcttttgaaaagtcttctgacttccagtctttcaccagatgactgcactggattagattctagaagagaatgaaccattttcatataactaaatattggtcatgaactgtgtaagggccatgcttattgggatcagttttaaagttaaattcttttgatattaataccagaccaaagacattttctgtttcctggnnnnnnnnnntgaatcatgttaggctttaggtgagagtacattttttacaaagtagctatagttgttacatagtcttacacttcaagctaaacaccaaatgggtgatattttgaaaaaagtttgtgttttactgtcttagatcgttcttggaaatcactaaa

SEQ ID NO: 135186 - DNA, 973 bp, Homo Sapiens
  misc_feature (806)..(814): n is a, c, g, or t
gtccagggatgaatagacaaaaagtgatctgagagtgctgtatgtccaaggagagagaagagtgcccaattggaaggacaaaagcaccttaaacacaccctccacttgctaagatttataaatattagactttttaaatgctagcacaagtccattttccaggccattctctccaaatacatgaaataaaactctattgaaccaaatccactcactgatgcaatcttttatttgataacagggtcataccaaactctccaagaatacctaatacttgaaatatttccagagatgataccagaatcttcttgacactctttctactaacaagttttagtgccctaagttctttatattcaatcaaaactattttttctaatatatttgaagatcatttccctccctttctttctccaattaggccctttatatggagattttgaaaagatccctggatggctcaagaatgacctatcaggtttctcttcctaactcatcctatctccatttgtaatccatatatatctgggccacctcctgatcttgtgtcagttcagcatcattttcagagtacacaggacgtaatatctatgtgatgcaattcacatctttactccaggttttcccattacaaaccatattaagaatacatttttggctatgcaagtgttttttcttttctcttcctcagaggacaccttaagagttcttaaccattttcgcttcattggcactctctgggctcggcctcgatgtgggcatgtgggagggcgatgtggtgggcctcggtacagcagcctcgtaannnnnnnnnctctctctgggttcctcggcctcgatgccacttcttcccgcgtggtcccttgtttctttccagtcaaatgtgttcgggggtggattggccccccgagatccgctaatacgacctgggcgcaggttgataggggtgtgcaggtgtgtgcgtacacctttt

SEQ ID NO: 135187 - DNA, 922 bp, Homo Sapiens
tcacaccacctttatttattgaatgagctaaaagacaacacagagaatactggaaatgacggctgtcatatttccccggtctgtgcctccttcctcccatgccccaccgcctcccgcaagcacagtgctgggcaggaacccggtgctccttctctccacaacttgcacatccacggggattcacacgagggccaccccactgctggacccgactctatctgcttgagctaatcttgtcaagttcgattccaagcacatttgcccagtaaattaagagtactctatttcaagtgtacaaaaatacatcgctttggagaactggaaaaggtttaatacatacaacacttatttacaagctgtgactttcacacctgtaaaaacatacacacttatttttgtccttgatttttggtgcaacttatacataaacattacatcagttagtctgtatttttaaaaataataaatcaaccatatgtacaattaaatttacaaccgaaagcaaataatccattggaacagtgtgactgcaactcagtagaccagtggaggacattccaggacttgagtccttccctacaaccagaccaaaaacacactgaggacctctctcatcctcacgatggaatatcttaatttctaagacttaagatgcaaaagaaaaataacgattatacagctacaattacatgtaaagactttaaagggacagaaaaacaacatattaacccccacatatataatgatcattaaattaaatatatttaactcccagtgcatatgatattctatcaacattatgggggaccacagggttccagaaacatttatccctaaaccacctcaccgctgaggcgctcctcacagccgggtctcagctttcttcagtacctttcacgtggctccggctgatgggcctcca

SEQ ID NO: 135188 - DNA, 957 bp, Homo Sapiens
  misc_feature (833)..(867): n is a, c, g, or t
  misc_feature (871)..(910): n is a, c, g, or t
atactccatacgagtaacatccaagccttataacttaaagatgaaagtaatggaagcccccaccagtgaaattttgaacacttgcttgtttactttgttagaacccagtactaccactagaaggttaggtaatatatgaccactattttccaattagtttacttatgttgctctaacatgtcctcttcacccagtgcactgttataattaatcaagaactctacaacacgtatattccacaatagcagcacacactactgctacctgcaaagctgtcagtctcaaatgactagtgaatgaaaggaaataaaaagtagataagtaacatattaaggagaaataatgagatttagcagattcatgcagttcagcctcttaatcagccagccagcttgctagcacacaagggacggcttccgttgaggaaggtcttgcggagtgggaatgtggtcaccagtgacctccgtcttatccggagctgcagtaggaagttgcttgttcttcatttttgctttagccatgttgtaatccccagaatccaaatatttttgccctttctgcaaccttttccttaagaaatctgaacctccaggcttttgtcccagatgaggatatcttgcttttaattttgcttcttctgctttctctggactagtcactttatcttccatttccttctgctcctccgcggaggctgcctcggggacttccgcagacatagtgctccctttgaccccgcttctcccgctcgctgtcgtccaaacacttccttttttccttcccccggccgtaatggccgaattcccgggcatatgtccggtaccgtcgactgnnnnnnnnnnnnnnnnnnnnnnnnnnnnnnnnnnncggnnnnnnnnnnnnnnnnnnnnnnnnnnnnnnnnnnnnnnnnctccgcgagctagcgccctatagtgatctacatccaaaggttctcta

SEQ ID NO: 135189 - DNA, 1209 bp, Homo Sapiens
ggaattcccgggattgttttaaaggcttctgggtttgatttcttagtcagatgctgtggtacttggcatttaacaactagaattcagaatccagatttttaaaggtgaattattttaaataactgagttgtaatagagaagtaatttatttgaaattattttaggaaatggaagataaagtgactagtccagagaaagcagaagaagcaaaattaaaagcaagatatcctcatctgggacaaaagcctggaggttcagatttcttaaggaaacggttgcagaaagggcaaaaatattttgattctggggattacaacatggctaaagcaaaaatgaagaacaagcaacttcctactgcagctccggataagacggaggtcactggtgaccacattcccactccgcaagaccttcctcaacggaagccgtcccttgttgctagcaagctggctggctgattaagaggctgaactgcatgaatctgctaaatctcattatttctccttaatatgttacttatctactttttatttcctttcattcactagtcatttgagactgacagctttgcaggtagcagtagtgtgtgctgctattgtggaatatacgtgtgtagagtttttgattagtttaacagtgcactggtgaagaggacatgttagagcaacataagtaaactacttgaaaatagttgtatatattacctaacttctagtgtagtactggttctaacaagtaacaagcaagttttaaaattttaatgttttggctttcattacttcatcttaattatagctttgtatgttactcttatttaatataatctctattgtattgatttcttctgtatttaccttttggattttgtaaaacagaagtttaagaccacaagttagaagaaaggtcacatatttcaaacacaactagatggggctctgaaagatttgtatctctgtgcttgaacttgaatggccttaaacctgtttcagctttaacagtagaattttacttgggcaatatttgcccattctggtgtaacttatgtgactctagtgcttaacagctgccgttgaagctaatattcagttctgtagagttagaataccttttgttgttgaagatgtgaatgaagtatgcatgtgcattaactgttgaattcacttttgtgccatttttgtaaatacagtagttttgcacaacctcaaaaaa

SEQ ID NO: 135190 - DNA, 1127 bp, Homo Sapiens
  misc_feature (135)..(143): n is a, c, g, or t
  misc_feature (744)..(744): n is a, c, g, or t
  misc_feature (859)..(859): n is a, c, g, or t
ctggaaggactaaaaaggactgctgcagtatttctggggagagggtctcatggaggagggaggagggtgtaggtcttacctttgtcatctgtgatatttacatttttaaagccctgtcaacaattcacttaggannnnnnnnncatgccacttagagtggcccatgtcaggaaattatgagtgtttttattctctgtaactctaaaaacaacctcaacatagcaagcctgacaccttttttaaaaataccaatctggtggatccctgctccagagcagctgctctccagtgtggtgagaaacgctggcagatacggtcttacttctcgaggagccccatcctcttcacagatgtggacatggtggggcaggcgtcggacagcgccctgggaagggcctgtgcaaggcagcctcagccgctctcccccaggagacattgtaaggatccgtgcacaatctttatgatatgaagatgctgcgcacgtttcaagcggctgcatctgaaacaagccaggcagtcagctgggggcttccgagtaactgtggcttctctggcgtgtgatgtttatgaaatacggttcatcactgtgaggatgtggagaaagctgggaggaggtgggctgaaacacagccagagcagagaccacagcactgacgactgctggggaagctctccttggtttggcctccccaaccaggcctcggctggcaaggatgcagctcatgaaatcttcttcctcggggntggtccggggtggccgcagctccgcaggcccatgggcaaacgggcagcagtccgtggacagagcgcagccatcagggtgatgcatgaagaaccagcagaggcgggttttgctccnggttgctttgtcttcacagtgtctctctcgcagtcgcggatgtgactctcccatcacacttggacactggtggtgttcggagcactctgcaggcccaactccgctcagctccgaggtctcgtgtcagtcgttgtacttctgcaaatagtcctcccatcagtctcaatccatcgaactctgtgttatgcttcactacataatcctctgcaacatggcataaccctggaggcggaatctcaagcactttctggagacagtgcaggctcac

SEQ ID NO: 135191 - DNA, 524 bp, Homo Sapiens
  misc_feature (524)..(524): n is a, c, g, or t
atttatcatagctggtgtcctttcattgaaagttgtaatactgtctctaaggagggaggaaaagattattatataattttataactggcaacatttgagttagtattgactttgtctaaaagaggcttgacttcaactgggataaaaatgtcagtgaattttgttaaagtagtaaaaatgcagttgacttagtaggaacataaaattatttcctaataagataatattgcactcctaccaaataaacaggattttagtaatatctgagggattgttgatggtgagttagactgtatttggcatagaatttggaaatgtaacttgaatgtaaatatgctgcaaaatgttgaatgtatacatagaaagactttttctgtcgacgccaaatgcccgttgtaaatgaaccttaaatattacattcctcctttgcacaataatatttctttataacacttatgattttttcccccaggacaacaaactgcccttaagagtcatttccttgttatcacaggtgtcaatan

SEQ ID NO: 135192 - DNA, 562 bp, Homo Sapiens
tctctaattttttaattttttaaaagtaaaactagaagtgatacctgagctctacgtatttgtcataaattaggtcacattctccctggaggaaatccaaggaggcaaagtagtcgggtggccgtgagggtgcagtgtcacaggtaaggctggtccgaggacagctcccacctctttatgggaggagctggagtcaccgccttcttctcagtggcagctacagcagagctctctgctggcttgcctgacaccagcgccttctgcgacgacatgatgatggaagggggcacagattcccggcggccatcgcgagtgcaatagtaattgttggagagcttgtggctaggacccacagggagcttgggaggaggctgagttcgcttggagatctcctggtagcgtagctgcagcttcccctgcaggtcatgcccggacgcccagttccgcagccgctggatgagacgggtggcggacgccatcttccgtccgcgatactgaagggcgcagccggtgacgtcctcgtgccgaattaaacacgcggcctcgctacctagccatacgt

SEQ ID NO: 135193 - DNA, 426 bp, Homo Sapiens
tgcttactgggcgttgtgcttacctgggcgtatgtattagtcataaattaggtcacattctccctggaggaaatccaaggaggcaaagtagtcgggtggccgtgagggtgcagtgtcacaggtaaggctggtccgaggacagctcccacctctttatgggaggagctggagtcaccgccttcttctcagtggcagctacagcagagctctctgctggcttgcctgacaccagcgccttctgcgacgacatgatgatggaagggggcacagattcccggcggccatcgcgagtgcaatagtaattgttggagagcttgtggctaggacccacagggagcttgggaggaggctgagttcgcttggagatctcctggtagcgtagctgcagcttcccctgcaggtcatgcccatacgcccaggtacgca

SEQ ID NO: 135194 - DNA, 1117 bp, Homo Sapiens
  misc_feature (624)..(651): n is a, c, g, or t
  misc_feature (694)..(924): n is a, c, g, or t
  misc_feature (978)..(978): n is a, c, g, or t
  misc_feature (995)..(995): n is a, c, g, or t
tttgctttaattgttttaactgctttatttcaggtttatatattctacctttcaatcaccaaacttctgttcttagatttctaaaaaaatagtcacttttcgaaagcagaaaaggaaagatatatatatttaatatataaaagaaaatgctaaatctgacataattatattcttaaaaacattccatttatttacagatgtataaaaaggtgaattattggtctattgagatcatgcttcttatagtgttagggtgagagctcactgtcttccacgttcctcaactcctctcactcaacttcacctttcataatcacacatgtaatattcatagatcagttccccctagggtaaggttaaagggtaggagtttttggagattttagatttctgtcaagactgcaggattgttctgaagactaagccctcctcaaattatccctgacaacacctagttctaagaggtcttgagaacacagtatcttgggggttagaatggtatctgcagccttccccctaaaacgcctggaatcatccctcatttccatcttcgtacaactctcatcaagagtcaaatggtatctccaatcaagaatcattacctgtttacctatattcttcttnnnnnnnnnnnnnnnnnnnnnnnnnnnnggcctacagccgcgggcgctccaaccctcgttccgaattcttnnnnnnnnnnnnnnnnnnnnnnnnnnnnnnnnnnnnnnnnnnnnnnnnnnnnnnnnnnnnnnnnnnnnnnnnnnnnnnnnnnnnnnnnnnnnnnnnnnnnnnnnnnnnnnnnnnnnnnnnnnnnnnnnnnnnnnnnnnnnnnnnnnnnnnnnnnnnnnnnnnnnnnnnnnnnnnnnnnnnnnnnnnnnnnnnnnnnnnnnnnnnnnnnnnnnnnnnnnnnnnnnnnnnnnnacgcgcgggagaggcggttgcgtattggcgctctcgctcccgctcatgatcctngctggtcgtcggtgcgngagggtacactcatcaagcggatacgtttcaaaaacagggatagcagaagacattggcaaagcacaaggccagacgtaaagcgttgttggttttcaaggtcgccctaaagacaaaatggtaa

SEQ ID NO: 135195 - DNA, 1099 bp, Homo Sapiens
  misc_feature (798)..(798): n is a, c, g, or t
  misc_feature (808)..(808): n is a, c, g, or t
  misc_feature (870)..(870): n is a, c, g, or t
  misc_feature (890)..(890): n is a, c, g, or t
  misc_feature (898)..(898): n is a, c, g, or t
  misc_feature (938)..(938): n is a, c, g, or t
  misc_feature (961)..(961): n is a, c, g, or t
ttttcaagaatgcctctagatattttatttacctggtctagatgggcctgaactatcacagccacgactgaacaaatcaaaataagcagaaccttggaaaatgttttagcaacgacttttttctctctgaatattcaaaacattgcaatacagtctttaaagagttgagatgatacaaggtttgtaaataatctagtttaatgcttagcacacaatagctaatacacattagtttctccccttcctcattctggaactgggattgtttccacttttaggctattatgaataacgctgctatggacatttgtgcacaggtttttatgtggatataagttttcatttatcttgggtatatacctgggagaggaattgctggatcatatcgtaactctacatttaaccatttgaagaactaccagactttttccaaagtggctgccccattttacattcctaccagcatgttatgagaatttcaatttctccacatcctcatcaatactagttattatctttttgattgtagacattgggtgtcttgtggttttgatttgcattttcctgatgagtaatagtactgaaaatttttaaatgtgcttcttggtcatttgtatttcttctttgcagaaaagcctgttgagctattttgcccatttcaaagttgtctttttataattgagttacgagttctttatataccaccaagatacaagtcccttatcacatttatgatttgcaaatattttctcccattctggtagctgtcttttcactttcttgatggtgtcatttcanacaacagttnttagttttgatgaagtccagttggtgtatctcttttgttgcctatgcttggggtatatttangaaatccttttgctatccanagtcacanagatttacgtctatgttttctttctagagttttatagctntagcttacacctcgtgcgattcntggctcgaggggcaatccctatatgagtcgtataattcgtatctgtctagctgttcctgtgtgaatgtatcgtcacatcaaacacaagagcggagataatggtagctggggtgctagatgagcatcacatatgcttcc

SEQ ID NO: 135196 - DNA, 987 bp, Homo Sapiens
  misc_feature (321)..(321): n is a, c, g, or t
  misc_feature (614)..(614): n is a, c, g, or t
ttggtactcctcttggcccccagttacattatgctccgctgatttttgtgaatttggcggtacaattcccccagaaacgcttgactgttcggatttattcgctcccttaaggaatttgccctcgagccaagattggcccgaggcccaactggaatcagacaatagggtaagtggatatgaatgaagcaagatattgtcacacatgtgtgtgcatcctgtttagggtatatttctaaatgtcatctaggtcattagttgtgtaatatttgtggtgtcttgaccaagctcctactaagtataggacacaaatgtttttatctntccaaggcctggctcaaatgccactgctgcaaagctttctttgaccctctggccacctcccaagccagaagttatcttccccctccatgtactctagccttttcatgacactgatattttcgtgacactgacttatagttcactgtttacctgttggtctaacagcaaatcataaacagtagttttcaacatacttctaaggctaaattcatttccagaagtagcaaagcttactagccaaaggctccacatttatcaactcttaagagctagacttgagagcctaacagccntatatgattttgtgtaaattgatctctatacctcagcttcttcatctgcaaagtgagataattgtactattctactttcctcatagtgcggttataacagattatgataatattacaaagtacttaatacttggcatatagtatatatattagctattagtattttgcaatttggggatattgaaaattagaaattgcatgttagttcatgctgcactaccatattgttcttttggggctcttcaatgggtgaaattccattttacagtttatcatgtgcatctgtatcacaggagtattttggcaaaatgattctgtaccaaaaaggagtactataaaatgagggtgccaaatatattgagtcttttatggg

SEQ ID NO: 135197 - DNA, 1093 bp, Homo Sapiens
  misc_feature (28)..(28): n is a, c, g, or t
  misc_feature (55)..(55): n is a, c, g, or t
  misc_feature (73)..(73): n is a, c, g, or t
  misc_feature (114)..(114): n is a, c, g, or t
  misc_feature (125)..(125): n is a, c, g, or t
  misc_feature (146)..(146): n is a, c, g, or t
  misc_feature (156)..(156): n is a, c, g, or t
  misc_feature (188)..(188): n is a, c, g, or t
  misc_feature (207)..(208): n is a, c, g, or t
  misc_feature (217)..(217): n is a, c, g, or t
  misc_feature (252)..(252): n is a, c, g, or t
  misc_feature (334)..(334): n is a, c, g, or t
  misc_feature (1002)..(1022): n is a, c, g, or t
tcagtagaaaatagtgaaatctgacttntcatcatgagcaatgctgtatacttcnccttgacagttggatctnaacatactagtgtattcaggagtgacgtacagtactttccntatagcggctnaatgtataagtgaaatgtatngatgtatatnaattgttgaaactgagcccactactgatcttngacaaattgattctatatnntaaataatntatggggaatgttccatcataatttctaaatcatntatatatcaaggtagccttaatttgtatatgtttcagtacaatgagatttattgcctctgggatgctgtttagtttgtattntgttgaacgtttttatcctaggaagagaaacctatgacttgtgtacctagatcatctgttacattaaaaagctgctctttcagcattagagctataaatgaatgttaccttgtcgggaaacaatctaggttttagctgtatgagctatgtttattatggtgctaatgttcagtagccacatttgactaatgtctccattctctgtgatgctgtggctagcagcagagctcgccagttcatgcctggacatactgtcagggctgggccctccagctagctcctttggggttgagtccgtatctttttgatgtggaagtataaagcaagtatcttgatttctaaacccagcaattttagaattgacctttatgagtgaagacttttggagcttttaaagaccttggcagtcatgatctcaaaccaattaggagctccaagctcccttcccaggtaactgttgggagcaatggcatcactgtatgcccttgtaatggctggaagggacatgatcttgtaagtaggaaagctgtaactaaaaattgtattgtttgcttattagccatgtatctcttaaaattttgttatgtttacaacgatgtaccttattggcaacaagttattagtttgatgtttaacaatagtgcctttagtaaattattttacaactnnnnnnnnnnnnnnnnnnnnncctgacaggcggccgcaagcttattccctttattgagggttaattcgagcatggcactggccgtcgttaaa

SEQ ID NO: 135198 - DNA, 927 bp, Homo Sapiens
  misc_feature (377)..(394): n is a, c, g, or t
  misc_feature (399)..(645): n is a, c, g, or t
  misc_feature (718)..(719): n is a, c, g, or t
  misc_feature (803)..(803): n is a, c, g, or t
  misc_feature (867)..(885): n is a, c, g, or t
aaaggtttcagaaattatttattgtagtagtacttacacgtaagattttagcctatggtcattttataaagatgctgttaggatttaattcacatttaaagaaaatgagattcgttatattatggtgttttttatgacctataaaatacttacccctacaaatttccataaatgtagtggttagtaaagcttttttcttactgaaaaataatgccaggtaaccaagtattattccttccatcatttatttaggaaaaagttttatgtattagggtaaagtggtagaagttaacctagaatctaataatctccaatcacccattcctgatctaatagtagccatgagaaaaaatctctagaaagaatcatacctctcnnnnnnnnnnnnnnnnnncaaannnnnnnnnnnnnnnnnnnnnnnnnnnnnnnnnnnnnnnnnnnnnnnnnnnnnnnnnnnnnnnnnnnnnnnnnnnnnnnnnnnnnnnnnnnnnnnnnnnnnnnnnnnnnnnnnnnnnnnnnnnnnnnnnnnnnnnnnnnnnnnnnnnnnnnnnnnnnnnnnnnnnnnnnnnnnnnnnnnnnnnnnnnnnnnnnnnnnnnnnnnnnnnnnnnnnnnnnnnnnnnnnnnnnnnnnnnnnnnnnnnnnnngaagtgccataaaaaagaaaggctctagccctttaccaatgaggtgatatgcccaggctatgcctgtcatcannatccatagcatactgatgatgggcatgagaaagtccagcacacaaaccattgcccagactgcatctgtgcatacacagagtaanagcctgctgctatactataaatggcacctgaaatatctctacggtatgtttgaaaatgggaggnnnnnnnnnnnnnnnnnnngagacatctactctattgctgaggtggagtgagatcagtctc

SEQ ID NO: 135199 - DNA, 590 bp, Homo Sapiens
ttttctttataaattatttaatattagtgttttttgttttatagacaaacataacatacacatggtttctaccttctataagacaaagtagaaaactaaccgttactgcatttacctcaaacacagcactgactgtgccacagataacatggtccaaaatattcaattctatagataggccatggtattgaatgcatggttaagttttaggaaaggcatatatttcctgaagtatgtatgttaaatacacaaatatctataaataacaaaaagttaccagcaaaaacgtttaggttataacattcccaaacttcctaacattttaagtgttttagatatatgttgtctgaccagttcgtttggttacagttttaaactagcaaaccattaccctgtaagaggagctaaactaaactataacactgcacaaacttcccaaggaaggtaacttgaaaagtctaaaaagtgattccaattattctaattaacatttgagatgctaaaagaatcaatgactcaagaaacactttgaagtaattccatttttctttatcattttctaaaaaagtattcacataaatttaagatcc

SEQ ID NO: 135200 - DNA, 491 bp, Homo Sapiens
gagaccagtctcattttcatactgacatgtctgaaagatttattatttataaagcttaggacatactctgggaagcttagaagatacttcagcactgggaggattttttaaaggaaatgtgttttgtatttcttgtaccagagaatggtgatgttgattgagttttttccatgtaaaaaatgtacttgtttgccaaatgttcctagattgctcttaacctgttaatacaagtaaaactgtagtggggatggagtctggcctaagtacagaatgagggatttaattagaaaagttattttcttttgttctgtatcaaactgcagaacagctatatacttggtattttgtacgtgaataacgttttagcttttgtgcccttttgagcttgaagggttatcctcaaaggggaaaactatgaaggggaagaagacaaacctaagataccataaagtaaaggttgacattacatattttcattcacaatgcccatt

SEQ ID NO: 135201 - DNA, 1157 bp, Homo Sapiens
  misc_feature (374)..(375): n is a, c, g, or t
  misc_feature (384)..(384): n is a, c, g, or t
  misc_feature (399)..(399): n is a, c, g, or t
  misc_feature (1056)..(1090): n is a, c, g, or t
ctaggttttttggaatcagcgggaaaaggtttgtgcccgagccttgcccccttcgtgcgagatattctggtaacaccccttggcaatccacaataagtttttgggaagaccaagtttccaaagacgaataaggtgattcacttaaaggtaacattgtaagacaagtctcaggcataatgaagattaggaatgaagtctgctggttcccatgatctaaagggatgctcacctatatgggcaccatcctattaagacgtggtaatatgtttccaaagccaaaaaaagtcggtaagtgttaaaatggactcctgctttataaatgatctgttaaatgtacttgtaaaattaaaaaaatttccaaatgtccaaaaagnnagattaaanttttggaaaaaaaanggtttgtaattcgtatctcattattccaagtaattctgttaaaaagatactaaatgaatgtccaattttatcttgtaaagttcttagtgtcaaacactcatgtactgaaatttcagtaaagtttaactttcatctaaatgtcacgatgactactattcattttggtgagttttcacaagtctgtactcctgacctgaagaatcacttttgtttatgccgaggagatggagtagtctttgtaggagatggggacgcagtaccaggtgagtcagttcctccatgcggaagtacttggtgatgatgccagatagggaacgtttctttctgtccaaggaatcctgcccccttcaaatgcctgcctgtgtgctgtcctgaaactgctatgtttgattgttgcatttgtcatgcttgctgatgaccttttcttggattctgaaaaaccttcagctattttatgcacttgccaatgccactatccaattgctctcaaactttttatttgctactccaggagactttctctcagatatattacattcccctgttgcccctttcacttcagcttgtattggacccaagttaccattttcagggacagctctttctcccggccgtaatggccgaattcccgggcatatgtccggtaccgtcgactgnnnnnnnnnnnnnnnnnnnnnnnnnnnnnnnnnnncgccgctgcctcgctcacagactcgctgcgctctggtttccgttttccggcctataataaaaccagc

SEQ ID NO: 135202 - DNA, 1355 bp, Homo Sapiens
ttacttaaataactgaaaacgcattgacataatcatttttatttgatttaattgataaataaatacaagagaactgttgtgaaaccactggcaatatagtaaattttaaagattttatttcaacttcactcacttatatttcttggaatggggatatatacattattcaccaataaatgctaatgctttaaatttacaattaccctatttgtagaaacctgaagatcattccaattaaatgaaaaaaaattgtacaaaaacgttcttttgctcttacaattcaaaatacattcaaattcacattcttacagcagccaaaacctttaacccaaaattcagaactgcagtcctacaagtgaacaaactagtgttttaatttaattatcatgattgttgttaacactgaaaagaaaaaacatggtggctcctgaaacaagacaggttagcaactggtacagctttcccttctgggcactcaaagctttgcccttgattattatttttatttcatcttttcaaacacagacaattgctccaacttgaaagtttcaatggaattttggcatttaatattgctaatgcttgctaagatttaagatctcccaatgatgagaatcagaaaatgacgcacgactaaattaaaatcatcctaaaagacttactacatagtggtatctggtattcaatatcaatagtgtttttgaattacatgatatgtttttcacaaacatagcacctcatcaaatatctggtaaacactttgcaatcacaataagtgttgggagaccaagttccaaagacaattatgtgattcacttaaaggtaacattgtaagacaagtctcaggcataatgaagattaggaatgcagtctgctggttcccatgatctaaagggatgctcacctatatgggcaccatcctattaagacgtggtaatatgtttccaaaccaaaaaaagtcggtaagtgttaaaatggactcctgctttataaatgatctgttaaatgtacttgtaaaattaaaaaaatttccaaaatgtcaaaagagatatgattattgtatctcattattccaagtaattctgttaaaaagatactaaatgaagtccaattttatcttgtaaagttttagtgtaaaaactaatgtactgaaattcagtaaagtttaactttcatctaaatgtaacgaaacaactattcattttggtgagttttcacaagctgtactcctgacctgaagaatcactttttttatgccgaggagatggagtagtctttgtaggagatggggacgcagtaccaggtgagtcagttcctccatcggaagtacttggtgatgatgccagatagggacc

SEQ ID NO: 135203 - DNA, 1610 bp, Homo Sapiens
  misc_feature (789)..(1486): n is a, c, g, or t
  misc_feature (1589)..(1589): n is a, c, g, or t
gaaaactgaataaaatttttattttaaaacatcacaagtaattacaaagacaaatattccaactatacaaactgtttttcacatatacatatatacatacatatatttaaggttggttgatctttcatctttttatctgagtaaaaagaagaacactttcctcattccggagatttttgatgttataatagttacctgaaggaacatagaacgaatccccagtacttaatatataaggtgtttcatgtaaagtacacaaaaggtcaccaaagttaacataaaaaaccaatatatcctggccaacatgctgctttcccttttcttcttgtggtcctaatatcaatttcccagtagaaaaaaagggtgtatccaatgtcttgtataccttcaactcaccatgcttaacaaaaaattgatatgtatcttgtggccttacaagatccatgagaataatctctcttgtttctgggtcctttaccctcgttgggctgcaaaggatctccaagaggtatacctagatttacccttaggttagtctttctttcatcgttatcaagacagatccttttcttattagattttttgttgacttttccaatattttcttttgccttccttttagacgatattgtgtctggagatagtactccactaatcacgaatcctcctgatggccttccttgataatctattcgctctcctcgccagtactccaaaggtttcaaacgtgttctcttggtcctgcgaacatttggtgtgttggagggcaatcctcgtgccgaattcttnnnnnnnnnnnnnnnnnnnnnnnnnnnnnnnnnnnnnnnnnnnnnnnnnnnnnnnnnnnnnnnnnnnnnnnnnnnnnnnnnnnnnnnnnnnnnnnnnnnnnnnnnnnnnnnnnnnnnnnnnnnnnnnnnnnnnnnnnnnnnnnnnnnnnnnnnnnnnnnnnnnnnnnnnnnnnnnnnnnnnnnnnnnnnnnnnnnnnnnnnnnnnnnnnnnnnnnnnnnnnnnnnnnnnnnnnnnnnnnnnnnnnnnnnnnnnnnnnnnnnnnnnnnnnnnnnnnnnnnnnnnnnnnnnnnnnnnnnnnnnnnnnnnnnnnnnnnnnnnnnnnnnnnnnnnnnnnnnnnnnnnnnnnnnnnnnnnnnnnnnnnnnnnnnnnnnnnnnnnnnnnnnnnnnnnnnnnnnnnnnnnnnnnnnnnnnnnnnnnnnnnnnnnnnnnnnnnnnnnnnnnnnnnnnnnnnnnnnnnnnnnnnnnnnnnnnnnnnnnnnnnnnnnnnnnnnnnnnnnnnnnnnnnnnnnnnnnnnnnnnnnnnnnnnnnnnnnnnnnnnnnnnnnnnnnnnnnnnnnnnnnnnnnnnnnnnnnnnnnnnnnnnnnnnnnnnnnnnnnnnnnnnnnnnnnnnnnnnnnnnnnnnnnnnnnnnnnnnnnnnnnnnnnnnnnnnnnnnnnnnnnnnnnnnnnnnnnnnnnnnnnnnnnnnnnnnnnnnntttgggtgttttgacgtaaccgcgtttcatccgacgggggccttatcggtaatatcgtctgagttcaccggttaaaagacttatcgcacggaacaccatcgtnataggatataaagggtgtatg

SEQ ID NO: 135204 - DNA, 994 bp, Homo Sapiens
  misc_feature (745)..(746): n is a, c, g, or t
  misc_feature (798)..(861): n is a, c, g, or t
  misc_feature (899)..(899): n is a, c, g, or t
  misc_feature (927)..(927): n is a, c, g, or t
  misc_feature (959)..(959): n is a, c, g, or t
tttgccttttactttaaatacatctttattgtctgaattttttacataagaatatatcattttataaattaaaataaaatttcaaactaagtggtaagagttttaaaatctctaaactgtatagatgatagagagagaaagatctagattggtccatagttatttctaagatacatttactgaaagttgacactataggatttggctgacatgacaagaagaacatgaagaaaattatccttttaggattaaaagaaaaaagcaactaatttcgaatcatctaggtaaaatgaattaatataccttgatggaagtccacaccaatttcaaattggctggtacttcatctgccctctcttctttgctaattggcaatttgctaaggatgaacaagacacaggatgccttttatcagcaggaaatttcacctacccttttcaggaactgcctcaaataaggtttcaaccaatttagcactgccctcaaagaagcctgaagctgggagatctgaggtttttggacacaccaacaaatacaaaaggagagaaatggtctccagtcacagaaccccgccttcgttcaagatcaagtctgagctggcaaactgaatggttggaacctcaggccaaagcttttatcacaacagaactttgttccttacccatgtctagcctaattccctcggagactctgtttcccacagacccaggaaaacagcacttgggttttggggcttttcttttanngaatgaatatacagatcagacaaactcgtgcgattcttgggctcgagggcannnnnnnnnnnnnnnnnnnnnnnnnnnnnnnnnnnnnnnnnnnnnnnnnnnnnnnnnnnnnnnngtcacatttcaacaacatagagcgggagataagtgaangctggggtgctatgatgagtactcaatnattgcgtgcgctcatgccgtttcagtcggaanctgtcgtgcactgcattatgatcggcacgccggga

SEQ ID NO: 135205 - DNA, 883 bp, Homo Sapiens
  misc_feature (100)..(100): n is a, c, g, or t
  misc_feature (104)..(104): n is a, c, g, or t
  misc_feature (107)..(107): n is a, c, g, or t
  misc_feature (109)..(109): n is a, c, g, or t
  misc_feature (208)..(209): n is a, c, g, or t
  misc_feature (224)..(224): n is a, c, g, or t
  misc_feature (236)..(236): n is a, c, g, or t
  misc_feature (314)..(314): n is a, c, g, or t
ggattgctcgagcaagatcgcagagtaaaatgtttattatttaagcatagataagagacattatagtatatgaaatatgtattctagttccatgtatgtntgtntantntcaatagtaaatgtactagatacttagtcaactcagtataccaagtcactgtagaaaaaataagtaccaatagacatatttctcagccttttagatatnnttctaattgtccccntcatgaaatttnatgccacagatataactgtatatttgttatgtatgtatgtaatctgtgtttatgcactaaaagaataagaatattttntgcccctcaagagccaattttcaccccattggtggtgatactgctcctgttgagaatgcatgcaataagccaaaagaaaaatcacctttaattttaccttacaacttgttaacattttggtgtacatctttctcagtgatgttcaatgcatatatgccttttctttgatgaaaatgaaatcagatacataatacttcatgctcctgtttttcttaatattttgtgaattttcatgataaatgagtatcttttaacagtaccccatctctaatggataaatactatagatgtatagtagtatgtgaatttgccatcatttgtttaaatgatttgtctatagttttcaattttttattataaaagttctactatgaatatcattatagttgaatttttccatgcatccttaattatttctgtaggataaattccaaaaagtagaattacttcattctgtacattttaatattttttggtgtatatgacttagaaagtgaaagtccatttccccaaggacagccaccatcaaaatcaatctttgtctagccttttcttgtatatatcctcac

SEQ ID NO: 135206 - DNA, 980 bp, Homo Sapiens
tcctgggagaagccagaacaatatacaaacaagtatgtggaggcagatttgctttattccaagaggctgtttgagtgtgtgtctgcctaagcctccttatagcctatttttctacttgctgagagagtaatattaaaggaacagtgagggagtggaaggagagccttagttagagcgttcccatttctggcctttgggggtttgcactgtgcgggagatgctctctcatcactctgaaggcccatcctgtgcagaagtgggactctgtggctgttcactgagcaccagggcagactgtagctgagcagacttgggttatggatgggatatggggcccagggaccctcaggacacagggaccggctcaaggtaccactcagcctggccaggacccccagctttgcttttgttcttgatctctttgtgatagagaagcttagaacattgaatttggaaccccaaaatgtgtgagtctttggaaaaccattccagcctttcttcaaatgctcttattttcagtatatgaagtgtgtatttgaaatattcatatttctgttatttcttgttttcaagctctgaattattgcagttttctgtcctgcatgctttcaacagtgtgcttttacagtggcagtttagcacagcgaaatgtccctgccccacactccatatggtcctgttttcctgaaaatacactccaggtagcacagacttgttattttgcctggctggttacacacatgctgtcttgctttgctgctcaggcacctccctctgaggccaacttaggccaacctacataggactccatctttagcgagacaccaagagacacctagtgatgaccacgggtctgcttttctctctgatcctagggacttgttaatgggagtgtctgtccacatggaggatgtcgtttactcccactctaataaattttacaatctatgtcaagtttaaatgtgcttgaggattccacc

SEQ ID NO: 135207 - DNA, 876 bp, Homo Sapiens
  misc_feature (295)..(303): n is a, c, g, or t
  misc_feature (561)..(615): n is a, c, g, or t
taagttgttattttgctatacatttattactggagtatctggtggtctgaaatagtcaaaagtagagttggtattaaatgttccaatgacatttatttttaatacttaaaaaatcatgtactttgaaatatgtcaaagcaacttctgataatatacctgaatttgtagttgtctcttgagcatcatttacttcatcttagatatagtgaagatctaggaaagctctatatgctgttcttttctacagttgtatttttgcagcatctcctggtttcattcactcttgttttgggannnnnnnnnagatctgcatatttcttgtacatatgcatgcaaatgaaagaagggagtttgtactggtgccatttctcccttcagttgctggttaatgggatttgctagaaaaaattctcccggttgaagggtgaaaacagacccttatgtgtatatctgtacagagatgtgtatatgggatgtggtggcactttgctgaatgtgaacttgccttgtcaatggaaagattgaaaagtattatgtttatttatacatttgtataaatcnnnnnnnnnnnnnnnnnnnnnnnnnnnnnnnnnnnnnnnnnnnnnnnnnnnnnnncccttaaaaatgtgtgtgtataataggtaaacagcctttgttaagcaagattaatgtctatggaaagttctggattattctgtaagccagaggaggtgacagtctagagtacatcatcagaacatactaaaatggaagtcctttggattatagttttgtttatggatattacacaatgaatgcttgtctgaacagttcttacttgccagttccactattcttcatcttcaccaccttctactggtcagtctttcatcactt

SEQ ID NO: 135208 - DNA, 1198 bp, Homo Sapiens
  misc_feature (470)..(470): n is a, c, g, or t
  misc_feature (486)..(486): n is a, c, g, or t
ggcagtaactctaacggttctaaggtagcgaggcctgggtggcgaattcggcacgaggagagggctctgaaccagtaccaggcccagctgggagagccgagacctggcctcggacccagagaggacatccagcgcttcatcctccgatccctgggggagaagaggcagctctactagtgccatggagcacctggggaccagcttcaaggatcctgacccctggacccctgcagctctcatccctgaggcacttagagaaaagctcagagaggatcaagagaagaggccttgggaccatgagcccgtgaagccaaagcccttgacctactggaaggatgtccttctcctggagggtgtgaccttgacccaggattccaggcagctgaatgggtcggagcgggcggtgttggatgggctgctcaccccaggcgagtgtggggtgcatgctgcagctggctaaggactgcagnctggggctggagccanggtctggctatcgtggtcgccgttcccctcacaccccccatgaacgcttcgaggggctcacggtgcttaaggctgctcagctggcccgggctgggacagtgggcagtcaggttgctaagctgcttctggaggtgagcgagcgggtgcggaccttgacccaggcctacttctccccggaacggcccctgcatctgtccttcacccacctggtgtgccgcagcgccatagaaggagagcaagagcagcgcatggacctgagtcacccagtgcacgcagacaagactggaagggcacctcgggttcgggaggagctgtgagtggctgagccagctccttgaggatgtggccacttgacttgtggaaggccatcttgatgccaggacgcacaggaagcccctgtgtgacatcaggagcagaacagcaagttttttgtccctgcacccccaccattttggggacctacaagggcctggattcagaggacagtgcacaggttaggcttggagctccaccaggcttggggagttgggacggggccccgttgccggacctgcagccttggacagatggggaacattgtgcctccctgaacagaaatggcaggggaggaggttgatgctttaaatgaagaggatggtggggttgggaggtataaccctgttcctttttcccagtttgtgcaataaaggttgtgaagatctctcagccaggg

SEQ ID NO: 135209 - DNA, 852 bp, Homo Sapiens
tgggtcaaggtccgctacccgctcgctcacctccagaagcaggttaagcagcctgtctgcccactgtcccagcccgggccagcgtgcgcagccttaagcaccgtgagcccctcggaagcgttcatggggggtgtgaggggagcggcgaccacgataccagacctggctccagccccagctgcatccttagccagctgcagcagcaccccacactcggctggggtgagcagcccagtccaacaccgcccgctccgacccattcagctgcctggaatcctgggtcaaggtcacaccctccaggagaaggacatctgagcttttctctaagtgcctcagggatgagagctgcaggggtccaggggtcaggatccttgaagctggtccccaggtgctccatggcatagtagagctgcctcttctcccccagggatcggaggatgaagcgctggatgtcctctctgggtccgaggccaggtctcggctctcccagctgggcctggtactggttcagagccctcttggcagcctcatcctccgggtagaagagcaggacactcaggacattttctatagcctgggacagattgcccacctgagcatgggcctcatgtagccgcctcagctggttgggaaggaagtctgggacagggaagctgcgaccagggcgtgtggctgtttcccccacacagcgttgccggcactgcaggacctgaatccagtgtcctgcaatggcctcatagaggccccctggctcgcagccccatcctcctcttcttcagccacctgctgctccctcgtgccgaattcgccacccaggcctcgctacctataaaccgtgagagttactgccgg

SEQ ID NO: 135210 - DNA, 688 bp, Homo Sapiens
  misc_feature (631)..(631): n is a, c, g, or t
tcctgtgcgtcctggcatcaagatggcattccacaagtcaagtggccacatcctcaaggagctggctcagccactcacagctcctcccgaacccgaggtgcccttccagtcttgtcttggaccctctggtgcctgcggctagggggctctggcgaagggtctatgctgggcatatcttcctcttcctcttcctcctcctcctgtgactcctgcagcagttctttggcttctgtccactcctgctccctgtgctcaggtgcccacgtgtgccacagtgccagggcacagcgccgtccccgagtcacggcccacaccccatggggattctcgacaccggagctgaaggccacaaggcgcccacagcgaggacgcacccgagccgtgacagtgagggcgttgggctccgttaagaacaggtccccaccctggaagtcatcgttgaggtagaggagtccgctgtagtcccgataggtgtaggctgggggctcccgccagcactctcccgtgtcagggtccaggacgcagttgtctgcgtgcactgggtgactcaggtccatgcgctgctcttgctctccttctatggcgctgcggcacaccaggtgggtgaaggacagatgcaggggccgttccnggggagaagtaggcctgggtcaaggtccgcacccgctcgctcacctccagaagcagt

SEQ ID NO: 135211 - DNA, 1003 bp, Homo Sapiens
  misc_feature (148)..(148): n is a, c, g, or t
  misc_feature (170)..(170): n is a, c, g, or t
  misc_feature (176)..(176): n is a, c, g, or t
  misc_feature (180)..(180): n is a, c, g, or t
  misc_feature (187)..(187): n is a, c, g, or t
  misc_feature (189)..(189): n is a, c, g, or t
  misc_feature (202)..(202): n is a, c, g, or t
  misc_feature (226)..(226): n is a, c, g, or t
  misc_feature (231)..(231): n is a, c, g, or t
  misc_feature (236)..(236): n is a, c, g, or t
  misc_feature (266)..(266): n is a, c, g, or t
  misc_feature (268)..(268): n is a, c, g, or t
  misc_feature (313)..(313): n is a, c, g, or t
  misc_feature (331)..(331): n is a, c, g, or t
  misc_feature (338)..(338): n is a, c, g, or t
  misc_feature (385)..(385): n is a, c, g, or t
ttcttgggcgagatggctcagctcccccgtggtgtgtcagattttccaagaatcccaggctcagatccggtgttaaaccgtcccaggccccaacttgaaacctttaggatcgccgggagaggcatccgtggacgcgctgaatcctggnctgggagaacagctgaagcagntgtgcntgcnagcgccntnacagtcatgaatntggaagctgaggcacgtgttgcgntcagnccctntgatgaccgcagcagccaccagcgcccttntntcccggacagctcccgagggttgctctcatggacaccatcagtgnctgggaagcaggaaccancaggacntggacagagtccccagtgaccggcctggcagacagagagccctaagntacatcatcacaaacaacgggtggggtggtctgatgcaattctgtggtgctgttgccaggcaggaggaggccatctccacagagacatgccgcgagacacacgcgtccgcagtcagggagcgcaggagcaatgtggccccgaggggcacgggctccattggtccaggagaacccattcttctcccaccctcgagaccacccagcaaagccccaaggacacacggctcccctaaggccgggtggccacaggcgggagtgacccagaaacgttacaaaagcaaatgccagaacccacccaatgtttagcaagcctggggatgtgccacgtcccccagggatccagcacgcacccaacagagacactgtccccggcgaggagcctggagcctgggaaaatacaagggcatcagactggtcccaagactctccccagggctggggacacactgtctggttattcttagtcccttgcgccttttttcactccaaccctgggtcctgggcacctcatagttccaaacccctgctatgcacatcccggctgtgatgcctgggacaggtcctgtcctggctgtgatgcctgggacaggtcgtgtcacctctccaaacctgtttcct

SEQ ID NO: 135212 - DNA, 750 bp, Homo Sapiens
  misc_feature (636)..(636): n is a, c, g, or t
tttactgtctgtgattaaaagtcctttactttttagcaccacattaaacgactttacatatccagtcacttaatgaaatccaacaaactcttcaagagttctggggatctggtcttggtagttaatgtcattagcccgaactgctcgggcagccaggcacttgagactcatcttcatttgagttttaagcagtatttcagataccccagttgtacttttgtctagcggagtcttattctgtttattcgtcatgtcagtgtgagctccggcttcaactaggctaatgatgatggagtgcaaggtcaaaaaatcactgatgggcctgttgtactgaacgataatatgaagggcactgtttccctcattgtccacggcattcacctcagcaccacagtccagcaggagctttgtgacaagtgcatttggaaagctgcagacgtcattggtgtggaaatcatcaactggagtattggagttgacagccagatgcagcaaggtgaaaccttcacgagttctgggatcaaggtgaatcaggttgtagatctgcttgttaattttgcactgatcttcttcgctgcactgtgttttggtagagatgcacactttttgtctgaggtgcagggcatgaagccacancttgatacactgctcaaattccatattatccgcataaacagctcctctgtaaatgatgggatgagaaacatcaatattgtcagcaccttaaatccgttcccgaactataagggc

SEQ ID NO: 135213 - DNA, 954 bp, Homo Sapiens
tttttggtatcagaacataactattttattacaaaacttaacattatttacaaaatgaaaaaataatcaaatgactattgcaggccaaagttaaaggtttttcactcaatgattgaagaaaaattaagcaatatttccatgcactcacaccagatcatttctgaaatatgcaaactcttaaaattcatgttagtaaaactttaatgtattcataatacttgctatgtttattagaagatggtcaaaaaaaatccatggttctgtacaataatattaacagtttgttcattttcctttaatattttttggcttccatgaacactcgtagattgaacattctgcaagtaagaattataatagtacctctgtcaccttgctgaattcatcaccacaagaaaaacacaaatagtttaatgcttttgcactaaactgaatagttataactccaaagttatattaaactgaagccttcattgtgatcaatagcttggatcagtttagagcgtagagtttctttttctgtatattttggaagatccagaagattaaaacaagtatgggaaactgggagatactcctcaccacctcctgtggactggatgactagtttcagactcttcataccaagaataggaatgcgatcactacctgtcaaaaataacagaaactgtttcttcttttccaatggtaattcgtgaaatacttcccaaaaaatttttatcgtaggatgttctgcccaatattcccctttgtattctgtattcttttccagttccttccaatcataatttgtattttccatgaccattgcttgtagttcattaggctgaaagagcagaaggacttttccttcacagaccttatgaaagcccgcatgaaaagcatcaaataaggaagccactgatttattgaatatgaatccacattagcatcgacaaactcttgccgattttg

SEQ ID NO: 135214 - DNA, 1027 bp, Homo Sapiens
  misc_feature (556)..(566): n is a, c, g, or t
  misc_feature (583)..(583): n is a, c, g, or t
  misc_feature (604)..(604): n is a, c, g, or t
  misc_feature (821)..(821): n is a, c, g, or t
  misc_feature (829)..(829): n is a, c, g, or t
  misc_feature (884)..(884): n is a, c, g, or t
  misc_feature (954)..(954): n is a, c, g, or t
ttgaccttttacactgactcttggtttgcaagcagccttcactgtcacaggaaggacacaattctccaaaaggagttctcaggagtcttttatccctggactgccccactggcagatcccgagtgtgcacaggcacgcacggttacatggggtatgcatgcatggccatacacaggcgtgcagttgtacacaggtgtgcaggagcatccatagtgtgcacaggtacacaggcatgcacgggtgtgtggacacacaccaacactcttaggtctctcctcacagcaggacctgacttgctcccagcaacactacatcctgacagccatccctgtcctggtggacgggtgagtgcaggactcagaaggcaggcaggcagtgggtgcagtgagcaggctgcggagggagcaggccctcaggttggggaggcgctgggaggaggattctgatggcggtgtgggcctccccagtgacgctctagcccatggcacaggcccagcccacctccacccatcacatcctgctagatctacgagcccaggaaatggctggtgcagannnnnnnnnnnaagcagggtccccaggngtggccatgacagagcccctnggatgcacctgggaccatggccctgtctgactggcaccatccactgactcgggccatcttccacgtgcagcctctgcctcaacccagggtaccccaagatgcctgctccccttgagcccctcggggagacccctgggtccaacagctccagcagccctccccaccagagatctctcccagctctcgtgctgagctgctgagcagcagcattcactgnggcgctanattgggaaagcccacagaaggcggttacagggtgtggggtgtcactcatgcacangcccctggcggagcggaaaagtggacctccctgccctcatgatgtgactcaccccagcagcggctgatanaaccggcaccactattgttatgatggggaaaattcaccacacaggcccccttgggagatagtctaacctagcg

SEQ ID NO: 135215 - DNA, 1043 bp, Homo Sapiens
  misc_feature (640)..(640): n is a, c, g, or t
  misc_feature (709)..(709): n is a, c, g, or t
  misc_feature (715)..(715): n is a, c, g, or t
  misc_feature (766)..(766): n is a, c, g, or t
  misc_feature (792)..(792): n is a, c, g, or t
  misc_feature (848)..(848): n is a, c, g, or t
  misc_feature (883)..(884): n is a, c, g, or t
  misc_feature (888)..(888): n is a, c, g, or t
  misc_feature (941)..(941): n is a, c, g, or t
  misc_feature (1004)..(1004): n is a, c, g, or t
  misc_feature (1006)..(1006): n is a, c, g, or t
agcagacatgaaaacaggaaggagtgaggccatttagtgcccatctggggcaacaacatcacatgggcatcaggaattcaggtccagctgtatccagcagctcagggccaggctggcctccttggtatggatagaggccagtttggtgaagtagagaccccagtctcagtcaaataagtcaggttccttatcctatccactccagtctgaatcaagccagagggcaagtttcactcagtgcaaggctggcccctgccaaagggcttccatgccctgagttctggactcaaggcacacaggactaggcacgtctctgggagcctccaaaccacagaatcaaagaggtccaaggagacaggagactcccggggcaggatgcgctgaagagggccccctggctcttgctcctccttccgggctagctctggcatttccttaggggccaagggggcccagggccgccttccctcgctcttgctgctggaactcctcgtgggcacgatccaggtctgcgagcacctccagcaggcgggcagttgctgctctttgccgggccaggacctcaggacaggcccctgtgtctgcctccagagttgtatccatgttagaatcctccagtaatttcagcctgagctggtcncgccccaggagcagctgccgatacactgtctgggcctcagcatcaggatccagtgggtcactccagtcncccagngtgacagctgagtgtgtacggctgcagccggcggctgagcgctcaacctgnaggcagcaggtccagcgcgcgctgcnggaggcaccggggtggcaggcggcagcttgtcgggttggggcgctggcctgcgcanggcgaagcactggtgactcatcacattctgcatgnnagangtggtgtgcacgccccgtgcgtctgcgtcacactgatcacgtgggcatttgangggcctctctaccgctcacggcggtgtgaaccgggatgggtgccactgcactcagatctgggnangaaagtcccccctagcaaactacgctcttgaagaagc

SEQ ID NO: 135216 - DNA, 1008 bp, Homo Sapiens
  misc_feature (722)..(722): n is a, c, g, or t
  misc_feature (735)..(938): n is a, c, g, or t
  misc_feature (946)..(946): n is a, c, g, or t
ttttttttgccaagtgtagtcacagtttatttctgatgtggctgaatctagggacaggcgggctgggctgagtggggggcgtgtcggcgatggggctagaactccaccttgcaggccgggaaggcgtcatcctgcatggacaccatgctgttgctgcccaacaccgtgatgcccagcgcctggtgccgggcgtgcgtctctgcgtaccacgtatgcatggccaccgagtcgaaagtggggatcagggtcacctgcaggtcacggtcccaatgctgcttgctggccagtagcgcgtccaggacggcccgcatgccttcctccttgcgctggtcctggccactgatgacgtagcagagcgcgcgcacgcgctggaagaactcctcatccaccaggtgggcgctgctcccgctgggcaggtaggccaggtccaggtagaccggggacttgggtggggtggctgacaccccgggccggctgctggctgaccccgacgggcctcgagtggcagtcttgggggttgaggactttctggacaggggtgcccggcctcccttctcactgggctcactccgggcactgagtggtcggctggcacggtccccaccagcaagccccttggttttggcagcagccactggagtggctttgggggcggcagcgcgtgagttggggcgggccaggggcttccgggtgcggctgacgcctccgtgcgaattcttggnctcgagggccagnnnnnnnnnnnnnnnnnnnnnnnnnnnnnnnnnnnnnnnnnnnnnnnnnnnnnnnnnnnnnnnnnnnnnnnnnnnnnnnnnnnnnnnnnnnnnnnnnnnnnnnnnnnnnnnnnnnnnnnnnnnnnnnnnnnnnnnnnnnnnnnnnnnnnnnnnnnnnnnnnnnnnnnnnnnnnnnnnnnnnnnnnnnnnnnnnnnnnnnnnnnnttgatcgngcacgcgcggggagaggcggttgcttattggccgtctccgcttcctcgctactgatccctgg

SEQ ID NO: 135217 - DNA, 1589 bp, Homo Sapiens
  misc_feature (320)..(354): n is a, c, g, or t
  misc_feature (506)..(584): n is a, c, g, or t
  misc_feature (1268)..(1269): n is a, c, g, or t
  misc_feature (1279)..(1483): n is a, c, g, or t
  misc_feature (1493)..(1493): n is a, c, g, or t
tagacccactatccccgcgccccccctgcgcaagagcgcgcgcccctcgtagagaaaactatacccctccccgcacgggagataagagaagatcttctgcgcccgccaccgcagcactattttctggtcctcctccaccgccgccccgctctcccactggagcagcaggatactgcataggatggcggccggcgcgccggcggccgcggttgtactaccagcagcgaggaggagtgagcgcccctccgtgagcctcccgtctgtctgttgttccactcagcgcgccgcgatcgcgagcgggtgggagaaagacgaatgannnnnnnnnnnnnnnnnnnnnnnnnnnnnnnnnnnaaataaagaacgacgcccactagcagagagggcggagcgcccgctgatagaaacagaaaagagcgcggggcggcgaggaggggactagtagggtccgccccacgcagggagagagacgatactgatgaggacgcgcgcgcgcgcccctctcnnnnnnnnnnnnnnnnnnnnnnnnnnnnnnnnnnnnnnnnnnnnnnnnnnnnnnnnnnnnnnnnnnnnnnnnnnnnnnngtttcttgactgttagttgggccttggcctatgtcatacccatgggctgccacatgggggtggagggatcaggacgaagagaggggaccagagcagggatggaggtccagactcagggagtcggcgcttcttgcagggggttgggggagaggacacggaagcctctgccccatgcaggacatttccttgctgtggcagcagggcagctgtgccctgactaggctgggctgcagagagtgtgagtctcaggtcctctggagccagagccatcaggatgactgcttttcaggggtcatcagtcgctccacctcccgcatgaaccgcagacacaactcttcttgccagggcagagccacacactgcacggccaccggcagccccacactcttcttcatgcccttctgcagcatcttgtcccagatatccccaaagtagcccctgtaatgttccatctgggcctcgtcctcagcagtcaccgtggtgacaggcaccacccctgcagggaagtccaggcagttgtacagcatagtgtagctgacggcccctgtggccctgcctggggcattcaagtccagagcaggggccagcatgggggtcagcaccacatccaggtccagcgccctccactgggcaatcacggttttgcggtaccctcgatctcgtgctgcagttcccagcctcgtnngcgattcctnnnnnnnnnnnnnnnnnnnnnnnnnnnnnnnnnnnnnnnnnnnnnnnnnnnnnnnnnnnnnnnnnnnnnnnnnnnnnnnnnnnnnnnnnnnnnnnnnnnnnnnnnnnnnnnnnnnnnnnnnnnnnnnnnnnnnnnnnnnnnnnnnnnnnnnnnnnnnnnnnnnnnnnnnnnnnnnnnnnnnnnnnnnnnnnnnnnnnnnnnnnnnagctgcattnatgatcggcacgccgggagaggcgttgcgtatgggcgtctcgcttctcctcatgatcgctggctcgtcgtcgctgcggagggtacagtcatcaagg

SEQ ID NO: 135218 - DNA, 1016 bp, Homo Sapiens
  misc_feature (728)..(728): n is a, c, g, or t
  misc_feature (740)..(740): n is a, c, g, or t
  misc_feature (744)..(744): n is a, c, g, or t
  misc_feature (776)..(776): n is a, c, g, or t
  misc_feature (838)..(839): n is a, c, g, or t
  misc_feature (847)..(847): n is a, c, g, or t
  misc_feature (854)..(854): n is a, c, g, or t
  misc_feature (862)..(862): n is a, c, g, or t
  misc_feature (864)..(864): n is a, c, g, or t
  misc_feature (869)..(870): n is a, c, g, or t
  misc_feature (876)..(876): n is a, c, g, or t
  misc_feature (879)..(880): n is a, c, g, or t
  misc_feature (898)..(898): n is a, c, g, or t
  misc_feature (910)..(931): n is a, c, g, or t
  misc_feature (954)..(954): n is a, c, g, or t
  misc_feature (1004)..(1004): n is a, c, g, or t
ttttgcccaaaatcatgaattttaaggaaagaatatatagagatggctgagttcaaaaggctcagtgttcaaattcagtttgttcctaaaatgaagagttacctatgtgggtgcaatatgcagctggtaaagtgattgctatttgctgtttgttgagattattcacccttgacttaaagcagcagtatctgatcttgtaaaatcctcaatttgcattacatcactttctctttgcgacttccttttctttcttgcatttactgctttgtaaatagctgttttcagtttataactgggactgatctttacatcagggtttctcagcctcagcacttctgacattttgggaggggtaattctttgaggctgctttccttgtgtattataatctatttagcaacatccctggcctctacccaattcatgctactagtatccctccaattgtgacaaccggaaatgtctctaagaattgccaaatgcctagtgaaatcatcctcgctccacttttggcaaccactgtttcacatgatacctgtttttttgaggtgctttagtattctgtgatcctaagaacaagggtttcatctcctgacataacacataaacattactaattgaactcttcgctcctaagggatgttacctatggggaatcaggagctggaaatagaagatggtatacatgattttgattatttctccattccttttattttgggacgtcnccctcaagtaanacanaacaaaactgtttaaaatacactaaacacctnattttttttcaatatttctattgactgtaaatgtggtctcttctactgctcacacatttgannagagtgangtccttntggtcttnantttcnnattgcncanncactgacttttaaataanggtttcccgtgnnnnnnnnnnnnnnnnnnnnnnttttaagcagaagctatcctcanggttacagatccagtacgtggatctataagtgtattgcctattaactggntaggatacaata

SEQ ID NO: 135219 - DNA, 605 bp, Homo Sapiens
ttgtatacgaattaaaatttatttcaaactgttttgtacatctttttaaaaaatgaaaattcaaaagtcttagaattaagcaatgagtctttgatatcataaagctgtgtataacaataattaaagtagtggtaacattttacccttgtaaaaatgtcacagaattaaaatctcaacttggatcctcaatgattcaactggtttatcttacacaataagcgtttggtcagtttcaagataaaatttccccagacatgctgtccttaagtccttcctcctcaccatccatcagctcacacattggggtagctggctgctgtggcgattccacagtggttgttcttgtctttggctatttttacatagccattcgagccccattctggaccccagctgtttttgacgagccaatacttgctgttattcgaatttgctccttcaaagccgtagccaaccaccagaacaccatgatccaggtttttgctgctgcagtctggttcaaaataaatgcctgatttgtagaactggaaggacgaatggcctgcatccatagcaacggagatgggccccacagttgcgactgctttcatcagggccttctcccc

SEQ ID NO: 135220 - DNA, 1018 bp, Homo Sapiens
  misc_feature (530)..(903): n is a, c, g, or t
  misc_feature (908)..(909): n is a, c, g, or t
  misc_feature (925)..(925): n is a, c, g, or t
  misc_feature (934)..(934): n is a, c, g, or t
  misc_feature (940)..(941): n is a, c, g, or t
  misc_feature (948)..(948): n is a, c, g, or t
  misc_feature (961)..(961): n is a, c, g, or t
catggggcaatgattgtttattgaataaatttactactggagtaagaagtggcttagagtccagtgtaacatggtggctgggagtgtgagtggatgaatggggggcccgatataggaactggggcctcggggatgaggccgagttccatcctgccttcttccacgaccatccttaccttcccacccccaccgctcccattctgcagatgagaaaaccgaggctccgaaaggaaaaaccactgcctggattcccacgcctcttctttaactcatttgcaggtgagggcagggaaggaaaatcctagggtcagcattggggagggggggactctcttaaatttattgggcaacaggctgcaggtgagggggctgacaggaggagggtcggggtgtaataacttaaaaaccgtaggtgacagcggcagctcctcaagagacctttgcagaggggagggtgtggggtatttacaaggatttgtacaaagtgccccgcgccagcctggggcaggaagcctcgtgccgaattcttnnnnnnnnnnnnnnnnnnnnnnnnnnnnnnnnnnnnnnnnnnnnnnnnnnnnnnnnnnnnnnnnnnnnnnnnnnnnnnnnnnnnnnnnnnnnnnnnnnnnnnnnnnnnnnnnnnnnnnnnnnnnnnnnnnnnnnnnnnnnnnnnnnnnnnnnnnnnnnnnnnnnnnnnnnnnnnnnnnnnnnnnnnnnnnnnnnnnnnnnnnnnnnnnnnnnnnnnnnnnnnnnnnnnnnnnnnnnnnnnnnnnnnnnnnnnnnnnnnnnnnnnnnnnnnnnnnnnnnnnnnnnnnnnnnnnnnnnnnnnnnnnnnnnnnnnnnnnnnnnnnnnnnnnnnnnnnnnnnnnnnnnnnnnnnnnnnnnnnnnnnnnnnnnnnnnnncgcanngaagacatgtgagcanaggcagcanaggcanngacgtanaaggcgcgtgctngcgttttccatagtccggccccctgacgcatcaaaatcacctaatcaaagtgggaaa

SEQ ID NO: 135221 - DNA, 907 bp, Homo Sapiens
  misc_feature (75)..(75): n is a, c, g, or t
  misc_feature (105)..(170): n is a, c, g, or t
aaatttggccccggcgcccaaaaagaaatggtttaaaaaaattttttgaggggccggagggcgcccacaaaaaantatattggtaatggtgggaaagggagaaannnnnnnnnnnnnnnnnnnnnnnnnnnnnnnnnnnnnnnnnnnnnnnnnnnnnnnnnnnnnnnnnngtctgttaaagaatgctttattaatacaaatacacacaaactctgaagcactaagaaatttaaatatctatgtcacagcaaacaggtggcaattcaacatccagggtcgacagaatgcttgaaggagactgcaacagattggattcccatggtggagagggcatcttcacaggtgaaggggggcccagctgaaacagcttttcaagctctctctcctcgtcaaggatcatgagaggcactccactcaaggggaggtgcgcaatctggtgctcttcaggcaggtcaaaactctcaaagtctagaggattgaagggaaagaatttttctatttctggataggcatcatctgaggcaggaacagagctttttgctttaacagtcttctcagtcatctttttggcagaaaagcttggctgtttttgtttgaggggtcccttggtctttacagacttttctgtagctctgttgacagttcccaaagcctttctagtagctttaggtaaggctggtggggcatcgaacgttttgccaaaacgtggtgttgaaacttgagatctcccatctaaggctttgattgaaggtccagaccccagcttcagcccatccttagcaaccacacgggtgcctggttctccattttccttatcaacatagatcagagtagccattctggattattgcaggtcttaacagccgcattcatctgaggccgcggtgaacggacgcggcgcactccc

SEQ ID NO: 135222 - DNA, 1779 bp, Homo Sapiens
  misc_feature (20)..(20): n is a, c, g, or t
  misc_feature (160)..(287): n is a, c, g, or t
  misc_feature (291)..(292): n is a, c, g, or t
  misc_feature (304)..(304): n is a, c, g, or t
  misc_feature (352)..(352): n is a, c, g, or t
  misc_feature (394)..(394): n is a, c, g, or t
gatgactgtacgctccgcanccgacgacgagccagcggtcatgagcgagagcggagacgccatacgcaaacgcctttccccggcgttgcgattcattatgcagctgcacgacagtttccgactgaaagcgccatgagcccacgcaataatgtgagtagcnnnnnnnnnnnnnnnnnnnnnnnnnnnnnnnnnnnnnnnnnnnnnnnnnnnnnnnnnnnnnnnnnnnnnnnnnnnnnnnnnnnnnnnnnnnnnnnnnnnnnnnnnnnnnnnnnnnnnnnnnnnnnnnnaatnntgcccctcgagnccaagaattcggcacgaggttgcttttggagagggtgcatctttgtcntgcatgacattcgattcttcccaaggagtcattagccttttntgcggggtgtgaagcttctcttctgcttgttgaatcactgatcggggatgaggcactggcggaatgggactgatgtgattgaagttgtttcccctttcctctgaaagaccattgcccatattgtgtatggattcatttacaccaatacccagtccattagttttaatctttatcctttcttgaaagtttggtccaggggtcaccgtttctctctgtggggttgtaggcctgtaaaaggggttggcaatatacaggcctcatgattactctgttggggatttagagtttctctctgagggcttgtcttagaagttcctctacttcaactggtgccaggccatcggtgccattgtatgctgcactgtgattagaacttactgcatacactgacttttgcccatcatcataaacttttattcctgtacctttaaagtcatctgatggcagaggtattgaagacagaactgtactttctccagtcttcaagtctttttcaactttaatttccatggcatataaagctttcctattttgttcatcatcttctttttcttcatttatctccttccttaacctagaaggtatgtaggactttggaaggtcagggatattagcatagatgtcctcaattgactcttctgctctttcttctctttccactttcacagatcttataatgtcttctgttgtccgctcaattgactttagtttctttaaaatggcctcttccttcgttgagatttgcagttcagctttttcaagatcttggatctctttctcaagcctgaggatactttgttctagaacctggatctggtgctggtcttgttgattttgcttcttcatctcttcctgttcttttccgctgctgattccatctagaagccatttctccctcaaggcctttttcttcaaatgctggtgctttagtttgtcttcctctattttcagacgcttctgtgagatttcttcctgtatttttcttttatctgtgatggcctggagtcttcccttcaccagctcagcttcttccattctagaagtcaaggacagtcagacggggaagcaagtccaaagctaccataaatcaaggagcctcctgggggagaggagcgggggtgacagaagagaagcagggagaaatccgctctttgcaccagtggagaaatagagaaattcccgacttgtcaggagcgtctccgagcagatgcacagatcaggccagacagacacatgtaatgagggtgtgctggggaggcagacgctgaggctgctggcatgagttgactgacaagtttgaacggcagcggcacaagcccttttccttcaggagctgccagctctttgttgtaatgtgcacagttagcaaggcacattttcttatt

SEQ ID NO: 135223 - DNA, 1001 bp, Homo Sapiens
  misc_feature (291)..(859): n is a, c, g, or t
  misc_feature (865)..(865): n is a, c, g, or t
  misc_feature (868)..(868): n is a, c, g, or t
gtgtacatactaggtgtatatatttatggagtacatgaaatgttttgatacaggcatgcactgtgaaataagcacatcatggagaatggggtatccatcccctcaacatttatcctttgtgttacaaacaacctgattacactctgtattttaaaatatgcagttaagtttttattgactatagtcaccctattgtgctatcatatagtaagttttactcattctttctactttttttgtacccattaacctatccccacctctgccccaccacctcgtgccgaattcttnnnnnnnnnnnnnnnnnnnnnnnnnnnnnnnnnnnnnnnnnnnnnnnnnnnnnnnnnnnnnnnnnnnnnnnnnnnnnnnnnnnnnnnnnnnnnnnnnnnnnnnnnnnnnnnnnnnnnnnnnnnnnnnnnnnnnnnnnnnnnnnnnnnnnnnnnnnnnnnnnnnnnnnnnnnnnnnnnnnnnnnnnnnnnnnnnnnnnnnnnnnnnnnnnnnnnnnnnnnnnnnnnnnnnnnnnnnnnnnnnnnnnnnnnnnnnnnnnnnnnnnnnnnnnnnnnnnnnnnnnnnnnnnnnnnnnnnnnnnnnnnnnnnnnnnnnnnnnnnnnnnnnnnnnnnnnnnnnnnnnnnnnnnnnnnnnnnnnnnnnnnnnnnnnnnnnnnnnnnnnnnnnnnnnnnnnnnnnnnnnnnnnnnnnnnnnnnnnnnnnnnnnnnnnnnnnnnnnnnnnnnnnnnnnnnnnnnnnnnnnnnnnnnnnnnnnnnnnnnnnnnnnnnnnnnnnnnnnnnnnnnnnnnnnnnnnnnnnnnnnnnnnnnnnnnnnnnnnnnnnnnnnnnnnnnnnnnnnnnnnnnnnnnnngacctngcngctacggatactgtccgctttctccctcgggagcgtgcgcttctcatactacgctgtagtactcatcggtttagcgtcgtccagctggtgttgcagaccccgttaagcgacggtggctatccgtatacgcttt

SEQ ID NO: 135224 - DNA, 1124 bp, Homo Sapiens
  misc_feature (605)..(654): n is a, c, g, or t
tttgtgtgaatatggtagaggtttattgaaatataaacattcgagaacatgtaagatagaaaataaccacaacatatagacacttgctgcaggaggacatctgaggtatttactcactgcctaggctacccatgtgctatcacatttttcctggttagaatacatataagatggagagcaggaggggacagagctgccctggctgatggcaccttcaggggaagctctgcttgggccaaggccccactcgtgggggcacctgctggcacccctcatcgggctctgggtgacaccctgctgttgtccttgagggcagtgagggttcactccaacggtgtggccaggcgagctgcctggggaaagggagaggatccaatgaccggaaagacacagtgtgctttccctgcatcctctgggtgggaagagtccatcctttgtgaccaaacccctgagaaagacatactggccaaatgtctgagacaccttcaaatgggcccagtgccagccaactgggctcctcactggcaccacgtcccagatgcccttctctgcccacaccctgcaggctgaggccagaggaggtcagccctcgggagatggggtannnnnnnnnnnnnnnnnnnnnnnnnnnnnnnnnnnnnnnnnnnnnnnnnngggctgagagaagacgcagttgagcagagctgcagcttaccgggctgaggtatctgtttgtgctcaagcttttgattccctttcctctcctacacaggactgaatgcgagccacgctgccacacacacccacgccacgcgcggtgtctcccactgccacagccccatgtcacagtggtggtgttctgctgaacattccagggcttcctcgactgaggtgagccgcaagcgaatcaattttctttacagcacaggagctgcctgctcccgcgcagggtccaggaggagctgtggagttattcatctcctcataccctggggcggctcaacctctggcaaggccagcgaggaccccagcctgcctgtgccctgagctgggaatgctgagtgatggggaggtgtcctctgcctcctggtcagctgggggtgggggtgtggcagaaaacggtcttcagaactggtacagtttca

SEQ ID NO: 135225 - DNA, 1316 bp, Homo Sapiens
  misc_feature (587)..(603): n is a, c, g, or t
  misc_feature (674)..(1244): n is a, c, g, or t
tttaattaacacttgtgttgctaaattctatttatgtaagtctgctaaagttttttagcccacttaaaacttaagacaaccatttaaaataatggatgggttactatgagcaatttcgctttcagaacccccttgttttagtatatgaaaaagcctaatgcgcattaatgaggttgaagagactatgagaaatatgtatagtgtatattttaaaacagctttgcttgtattgtgaagatttaaaaacaaacttgagatttttaacgtaactattaacacagttttaacataagttatcccactgggtttaagagcatcttgaatgtataatcctttttgtaacccaggttggtttctacttttaccagtcacccaaacatatttatgtttttagttttatgtactcatttccctttgttttcctcaaacagcatgatttttttgcacatgtagaaattttttaaaagaaagaaattagtacatcattttctctggattttcttcacttccctcttcctttctactaactccttccttaaaggccatatcactccatttgcattatttgtgcaaatgccagggttggnnnnnnnnnnnnnnnnngctatttacctaaaaaaagaaaatgcttcagtcaattgcttttttatttaaaacctcgtgccgaattcttnnnnnnnnnnnnnnnnnnnnnnnnnnnnnnnnnnnnnnnnnnnnnnnnnnnnnnnnnnnnnnnnnnnnnnnnnnnnnnnnnnnnnnnnnnnnnnnnnnnnnnnnnnnnnnnnnnnnnnnnnnnnnnnnnnnnnnnnnnnnnnnnnnnnnnnnnnnnnnnnnnnnnnnnnnnnnnnnnnnnnnnnnnnnnnnnnnnnnnnnnnnnnnnnnnnnnnnnnnnnnnnnnnnnnnnnnnnnnnnnnnnnnnnnnnnnnnnnnnnnnnnnnnnnnnnnnnnnnnnnnnnnnnnnnnnnnnnnnnnnnnnnnnnnnnnnnnnnnnnnnnnnnnnnnnnnnnnnnnnnnnnnnnnnnnnnnnnnnnnnnnnnnnnnnnnnnnnnnnnnnnnnnnnnnnnnnnnnnnnnnnnnnnnnnnnnnnnnnnnnnnnnnnnnnnnnnnnnnnnnnnnnnnnnnnnnnnnnnnnnnnnnnnnnnnnnnnnnnnnnnnnnnnnnnnnnnnnnnnnnnnnnnnnnnnnnnnnnnnnnnnnnnnnnnnnnnnnnnnnnnnnnnnnnnnnnnnnnnnnnnnnnnnnnnnngaccctgccgctacgggtactgtcggcttcttcctcgggaggtgggcttcccatactcagctgtaggaccaa

SEQ ID NO: 135226 - DNA, 1020 bp, Homo Sapiens
  misc_feature (628)..(628): n is a, c, g, or t
  misc_feature (633)..(633): n is a, c, g, or t
  misc_feature (689)..(689): n is a, c, g, or t
  misc_feature (728)..(729): n is a, c, g, or t
  misc_feature (749)..(749): n is a, c, g, or t
  misc_feature (760)..(760): n is a, c, g, or t
  misc_feature (826)..(826): n is a, c, g, or t
  misc_feature (832)..(832): n is a, c, g, or t
  misc_feature (845)..(845): n is a, c, g, or t
  misc_feature (906)..(906): n is a, c, g, or t
  misc_feature (958)..(958): n is a, c, g, or t
tttttaggggtaagaggtagtacactttattgaccgggttctctcaacatgttgcaacctctggcaaagccagatcctgggctttgccaccatcccatccaccaaagacagaagagaatgcatctcatgaacatccacgtggcctccagacagcagagcacaggggcgggtgtggggagggaggctgccagccaggggtgggtggacgaggggcgaaagcgctgggtgccgggctgggggcacccctgaggcccctccagacctggccagcccctcactcccccagttgaggtttcgtgtggttcacagtgagactggcttagattggcagcgggcgatggcagacagatgccctccacgctccctacccgccctggccagactcacagagctggcaagagggagagacggaaaatcccgttccccgtgtctccctccgggacagggaagccccttctctggaggggtaaaggggagaggcctagtctctggacatcccccaggctactaaggaagggccattcactcctggctcagaagtttctagaacatcttggtgaaagtgcccgccattactcccaattagaaaaaggtttttgaaatctaggagttgactggggtggctcanaccanacagtaaaaaccctgggtagacctaggtttacaaaggcagctctacctttgcttangaggctagggaggtccgtgaaggcgttggctcagggcanncaggggtaggagtgccctgngaatggggcanggacaggggcaagatgcaggaagcggtgatccatgggacatggcaggtcgtctttcagtgctgcangcctgngctcggagggcanctgggggcctccgtgggacatctgccaggcaggcacgggtctctgcccaccgggagaacangggcccatcaggcctgtgactgcgttggctacagctcttgtggcagtgtgantctgcggggctgaacccagatctgcgctgacagctgggttaagcgctgggcacactgtgtgg

SEQ ID NO: 135227 - DNA, 1062 bp, Homo Sapiens
  misc_feature (340)..(356): n is a, c, g, or t
  misc_feature (380)..(398): n is a, c, g, or t
  misc_feature (445)..(848): n is a, c, g, or t
  misc_feature (857)..(857): n is a, c, g, or t
  misc_feature (872)..(872): n is a, c, g, or t
  misc_feature (897)..(897): n is a, c, g, or t
  misc_feature (1045)..(1045): n is a, c, g, or t
tgcagggcagggaaaacacagaactttatttcaacagtcattaggttccaccacacaacagggacaccatgggattgttttttcatttaataaatacaaatgaataaaaatactttattttgtcaagagactgcctctcctccctctcccgatctcacagaagcctccaggcaattgtgtgcccctccagggcctgcacccacagaccccgtctacttgcacaaatgactcttctttacagagagggctccatctcatttgcctgcaaatacaacttaggtataataccgctcctttcccccatctccttccaaatacgagttcttgccctgcgttccannnnnnnnnnnnnnnnngagacagagtgagactctgtctcnnnnnnnnnnnnnnnnnnngcctacagccgcggccgctccaacatcagcctcgtgccgaattcttnnnnnnnnnnnnnnnnnnnnnnnnnnnnnnnnnnnnnnnnnnnnnnnnnnnnnnnnnnnnnnnnnnnnnnnnnnnnnnnnnnnnnnnnnnnnnnnnnnnnnnnnnnnnnnnnnnnnnnnnnnnnnnnnnnnnnnnnnnnnnnnnnnnnnnnnnnnnnnnnnnnnnnnnnnnnnnnnnnnnnnnnnnnnnnnnnnnnnnnnnnnnnnnnnnnnnnnnnnnnnnnnnnnnnnnnnnnnnnnnnnnnnnnnnnnnnnnnnnnnnnnnnnnnnnnnnnnnnnnnnnnnnnnnnnnnnnnnnnnnnnnnnnnnnnnnnnnnnnnnnnnnnnnnnnnnnnnnnnnnnnnnnnnnnnnnnnnnnnnnnnnnnnnnnnnnnnnnnnnnnnnnnnnnnnnnnnnnnnnnnnnngggcagcanagggcaggaccgtanaaggcgcgtgctggcgttttcatangctcggcccctgacgagatcacaaatcgagctaagtcgaggtgggaaccgacagactaaaaatacaggcgtcccctggagctcccgtggcctcctgtcgacctgcgctacggaactgccgctttctcctcgggaggtgggttcccaantcactgtagtaccagtc

SEQ ID NO: 135228 - DNA, 1041 bp, Homo Sapiens
  misc_feature (363)..(371): n is a, c, g, or t
  misc_feature (590)..(590): n is a, c, g, or t
  misc_feature (710)..(710): n is a, c, g, or t
  misc_feature (743)..(743): n is a, c, g, or t
  misc_feature (750)..(751): n is a, c, g, or t
  misc_feature (771)..(771): n is a, c, g, or t
  misc_feature (829)..(829): n is a, c, g, or t
  misc_feature (833)..(833): n is a, c, g, or t
  misc_feature (869)..(869): n is a, c, g, or t
  misc_feature (922)..(922): n is a, c, g, or t
  misc_feature (940)..(940): n is a, c, g, or t
  misc_feature (955)..(955): n is a, c, g, or t
  misc_feature (971)..(971): n is a, c, g, or t
  misc_feature (998)..(998): n is a, c, g, or t
ttttcaagtagtaagcagagtgtttattttttttaaaattacttaaaaaaggttgtttacagagatgtggatttatataacttggtgacaacatttttaaaatgtacaggctatttcatattattgcacttactctttaatatataaggcattttactttacataaataaaggttaatgtataatatcatacaaagttatggtgccaattaagtcaaccatcaaattcaatgagatgtgtgggaagatggaaatgaaacccagcctactttaatcttcatggtatattcttgcaactacggtttacttgttataacacatatttatttaccctcatagcttattgtgaatgactgaccagttnnnnnnnnngaaacaatgacagttttagtaggacaataccattagtgttcacttcagaaagtgtgggaatttattaggctaattagaaatactagtcatgccttgaacactgaagacaaataaatagctttctatctatcttagggtcaaagacagtttagcttttgcttcttcccttaaatttcaactgtttgttggcgagggaaaccttctggcaagatgtagtancagtggctgatgactttagcatagtgtatgtggtaagccagaggtctacccttgtactccagatatgaggattaaaaagacttgcggaaggagacattccatttgctccacattgcacangaattcctgtctgttacatagggctgtgcgttnattattnnattatattaggcacagctgntagagtggaggcgacaagcagttttcagtgttgttgacttgaatagtctttgatttangcangaaagcagaacccacaaactgaccccagagactganaacaaatcatatctatcaatcaagcatgcaccttgcactgacttcctacagtnatctacctggtactgtantgaaaagtaaagtanatcaatagacttttcnactactcctgtacaaatttccctttgnatgccagttatgagatctggaccagcaagcagtattctcccca

SEQ ID NO: 135229 - DNA, 925 bp, Homo Sapiens
  misc_feature (815)..(849): n is a, c, g, or t
ggggggcagtcttaaggttggcttttcttttccagttccccggccagggggttttcctggaagccagtttccggttggggggggttccaatccgggtaaaaaagttctcaggttaagcctctggtttcctaggacaacgggaaaagacttccttggtgaatcctctgaggggggataacaggctgcttcctgagaacttgggaaaatccctctctttgttcaattaatgcaggcaaggatttcatggctccactgatctcctttgctactgtttcccctctgcatttcaaattttccatatgaggggcagaatttcttgttttgcttttatggttttgatgacacattccaggatctttctgggatactgcttacgttttgtggctatatctactatgatttcatcaaactgatcttcaagtactttgatgtcagaatccataggaccattatctgaagctttcctgccaatgcttgcccaattgaatgctgatagttctcttgcacagctgagttcaaaagtccactgcgcatctcgcagagcgggctcccgaatctgcctccggcagagcgtccccgagctttttgcacgaagcggccgcacagttgtagcatttcggtcacagcccgcttcgaggtgcagcgcacccgaaagtcttctcggggagtggcggagaccaaggcctggctctctgtgccagccgcgagctccttgtcccatggagggtcaaggaccaccaactcaggagaccccgccatttttccccggccgtaatggccgaattcccgggcatatgtccggtaccgtcgactgnnnnnnnnnnnnnnnnnnnnnnnnnnnnnnnnnnncgccgcttcctcgctcaactacttcgctgcgctcgtcgttcgtctacaaacgagctagcgccctatagggatcgta

SEQ ID NO: 135230 - DNA, 1482 bp, Homo Sapiens
  misc_feature (49)..(63): n is a, c, g, or t
  misc_feature (81)..(81): n is a, c, g, or t
  misc_feature (1363)..(1397): n is a, c, g, or t
tcccgggatatcgtcgacccacgcgtccgctgatcgcgagcggcgcccnnnnnnnnnnnnnnncctagaaagatgtatacncaggggaaacacaacagaatttgttacttgttaaatcccacaaaagctacaagggagctgagagttgatggcacttaaggacagtaaaagtctgcacttttaatatttttaatgcccactgatgggctttgtgtcaatactttttaaaatgctttttatttacaatagataaaacagtaaggaaatacaatattatatcatatccccgcacagagatactatatctgtataaatgaatcactagtaaaagagttatttcttatttcaaattaagtcttatctaggtattaattaggctgtaatctaaatgttgatggtgcctattttcaactcccaaaataaacagaaagagctcatgtatcaagattaattttctttggccgcaatggataccattttctctgggggcagtctttagtttgctttcttttcagtaccacgtcagaggttttcctggaagcagtctctgttggtgtggtttctatctgtgttataaagttctcaggtttagcatctggtttcctatgacaactggaaaagacttcttggtgaatcctctggaggtggataacaggctgcatcctgagaacttgggaaaatccctctccttgttcaattaatgcaggcaaggacttcatggcttcactgatctcctttgctactgtttcccctctgcatttcaaattttccatatgaggggctggatcagggtcatattttaggtccagtggatgtacaacagggtggtactgcttcagaatttcttgttttgcttttatggttttgatgacacattccaggatctttctgggatactgcttacgttttgtggctatatctactatgatttcatcaaactgatcttcaagtactttgatgtcagaatccataaaacaattatctgaagcttcctgccatgcttgcccattaatgctgatattctcttgcacagctgattcaaaagtccactgcgcatctcgcagagcgggctcccgaatctcctccggcagagcgtccccgagcttttgcacgaagcggccgcacagttgtagcatttcggtcacagcccgcttcgaggtgcatgcgcacccgaaagtcttctcggggagtggcggagaccaaggcctggctctctgtgccagccgcgagctccttgtcccatggagggtcaaggaccaccaactcaggagaccccgccatttttcgtcggaactgtgggcggggcactctccccggccgtaatggccgaattcccgggcatatgtccggtaccgtcgactgnnnnnnnnnnnnnnnnnnnnnnnnnnnnnnnnnnncgccgcttccttcgctcactgacctcgctggcgctcggtcgttcggctcataaacgcaagggccctatagtgatcgtatacattt

SEQ ID NO: 135231 - DNA, 556 bp, Homo Sapiens
caggctgcatcctgagaacttgggaaaatccttctctttgttcaattaatgcaggcaaggacttcatggcttcactgatctcctttgctactgtttcccctctgcatttcaaattttccatatgaggggctcgaagtaataaaaaccatatatgacaaatccacagccaacatcatgttgaatggggaaaagttgaaagcattcccgttgagaactggatcagggtcatattttaggtccagtggatgtacaacagggtggtactgcttcagaatttcttgttttgcttttatggttttgatgacacattccaggatctttctgggatactgcttacgttttgtggctatatctactatgatttcatcaaactgatcttcaagtactttgatgtcagaatccataaaacaattatctgaagcttcctgccatgcttgcccattaatgctgatattctcttgcacagctgattcaaaagtccactgcgcatctcgcagagcgggctcccgaatctcctccggcagagcgtccccgagcttttgcacgaagcggccgc

SEQ ID NO: 135232 - DNA, 535 bp, Homo Sapiens
cgcaatggataccattttctctgggggcagtctttagtttgctttcttttcagtaccacgtcagaggttttcctggaagcagtctctgttggtgtggtttctatctgtgttataaagttctcaggtttagcatctggtttcctatgacaactggaaaagacttcttggtgaatcctctggaggtggataacaggctgcatcctgagaacttgggaaaatcccttctccttgttcaattaatgcaggcaaggacagaatttcttgttttgcttttatggttttgatgacacattccaggatctttctgggatactgcttacgttttgtggctatatctactatgatttcatcaaactgatcttcaagtactttgatgtcagaatccataaaacaattatctgaagcttcctgccatgcttgcccattaatgctgatattctcttgcacagctgattcaaaagtccactgcgcatctcgcagagcgggctcccgaatctcctccggcagagcgtccccgagcttttgcacgaagcgg

SEQ ID NO: 135233 - DNA, 562 bp, Homo Sapiens
ctgtctcttcatggtgggtgaagagcacagggacagtgtgcttcctggctgtgtcctctcagaggccctccagtccagtctactccggccttggagatgactgccgagagagggagggcgggctctgggtcacccagcttcatcctcttcatcttgcgcagttcaccagaggcagaagggatgaaggttccccgatccccttctctcctagactgcccctagagctagtccaccaggcttggctcctggatcagggtcatattttaggtccagtggatgtacaacagggtggtactgcttcagaatttcttgttttgcttttatggttttgatgacacattccaggatctttctgggatactgcttacgttttgtggctatatctactatgatttcatcaaactgatcttcaagtactttgatgtcagaatccataaaacaattatctgaagcttcctgccatgcttgcccattaatgctgatattctcttgcacagctgattcaaaagtccactgcgcatctcgcagagcgggctcccgaatctcctccggcagagcgtcc

SEQ ID NO: 135234 - DNA, 1008 bp, Homo Sapiens
  misc_feature (150)..(163): n is a, c, g, or t
  misc_feature (708)..(708): n is a, c, g, or t
  misc_feature (713)..(713): n is a, c, g, or t
  misc_feature (735)..(735): n is a, c, g, or t
  misc_feature (741)..(741): n is a, c, g, or t
  misc_feature (767)..(767): n is a, c, g, or t
  misc_feature (807)..(807): n is a, c, g, or t
  misc_feature (819)..(819): n is a, c, g, or t
  misc_feature (855)..(855): n is a, c, g, or t
  misc_feature (858)..(858): n is a, c, g, or t
  misc_feature (921)..(921): n is a, c, g, or t
atgtacccaatatatttttattcaagaacacaacaaattataactactagcaaactgacagctttatacaccgaacatttgttaaatgccatttttttctgagaaagaatggaagaaatgtatgagctttctatgaaatgtacaaagttnnnnnnnnnnnnnnggcctctgctatgatttttgacttaacatatgctttagcaatccaacagaattccaggcacctaaaaagtaacaggttttcaccttttaaagttaaaaaagtgattaatttaatggtcatttcttagttaattcaggatttaggaaaagttctaaatattaaaaaaatttttttcattagactagacttctgttcaacatctctaaacctttccaaatgaatgaatttaatagaaattcattttgatacatgcttgactataataaacaaaaatgtaactagttacaattaaatctttcagaccttggaagaaatatcttcctttcctcactggtatggtagaaagaaaacctaatatgaaatcagagaaacttagttcatcatgacccttgctttgcaactgctatgtaaagcaatcaatggcaagaggaaaaaaggagagaagacacgctcaagacagcaagacctaatagaacacatgaacgttggttaaatcttcattggaacaattcaaatgttaaaaggcatttttagcaactggtganatttngatatggactggctattagatnatgctnagggattattactagtaacttttacnatacgctgtgtgtttcccataagggtgtatctgctagcanaaatgtgtgcanacagggtatcgctcgtgccgaatcctggctcgaggncanatccctatatgagtcgtataatcgtatcagtcatactgttcctgtgtgaatgtatcgctacantcacacacatacagcggagataagtgaagctgggtgctatgatgactactcaatatgcgtggccacgcgcttcatcggaactgctgc

SEQ ID NO: 135235 - DNA, 1117 bp, Homo Sapiens
ttgtgtggtgcaattatatgtgctccgtgtgccgggagcattgatgcgcaatctgtgcgcccattcctctgtacggaaggagtcgtgccctctcaagtacacaacggttatcggaagctctacttagacccccaagtgtgtcaggataataagttacttagccccttggaaagcttgaaggctaaagttctggctgtaactatttaggaaataaggaagatggatttcctaaccgcacgtggaagttggggcggatctcaaagtgcttaggcatgacaaaaactgaccgaaatgggaccatttttaggaaggtaattttggtttctacgcgaatattgcactattcggtatttcctggataagttgaacagtttgtatttgtaaaattgtgatagtaaagtgtctgttgttaaccagtttaaaaaagcacacgaaaaatagttcaaactatatataatctgttatttttcatcctggttagctaatcacaaataactcagcaaaacaatgcttgaacattcagttctactaaaaaacagtatttgagtagatcccatcaccttacccattgtttgctatgttagaccctaaaacaggctgccgacagatcggacaagtgcaattctctgagagccatcggtcaatacaatgaatgtgaaattcatgcatgcaaggtaattgcctgagcttgtttccagttacatagtcactaatgcaaacactacagattttacctagttcactatcaatactgttatgctcatagtgcctggtggaaagattgtcaatctgctctttggttaaaccacgtattcgatcatcatcatcactttcatttagtaaaaaaaagtgagcaaggcgaagaatgggtagtgttccagtttcaactaaattgtttggatttcgcaactgcctgccacccctactgtcactgtttcgagtatgaggctgggtggtctcgttttcaccatgcatttcagtgctgtctccttgggcctgcctgtcttgagaggaaccttccctgtgctggctcctgttgttatctgtacctgagttgcactcagttctgagtagcttatgtactggtaactgctggccctttctttgaagttctggc

SEQ ID NO: 135236 - DNA, 479 bp, Homo Sapiens
gggctatgtaaggcatttttctttattatttttcagtttatcttagtaatgccagaaaaataacagccgttattttcactttaaatgcaaaccaaatactgctgcacacagagtacaaagattacctatgaacatggttaggtacaaaggccatattagatgtatagaccacactttgttcttacatcaaagaccgaccgacagagcaattttttgacaattattttagcaaataaccgtgctactaaacaaaggcaaatacacatatatacacaaacacgtctcaactaaaattatacatgtcactttgacaaacaaattctctggtggtttcaccagatatttgcaccccagagttccctgcccaaatcccgaccccaaatgctgacttgatctgaagaaaaaaattagagatgttcttaattaaaggcacatttggcagctactgaaagtggcatgcatctggcacaggtgcgctc

SEQ ID NO: 135237 - DNA, 947 bp, Homo Sapiens
  misc_feature (785)..(785): n is a, c, g, or t
tctaacttttatctttattgggtggaattttccagcatgagctttttgactaccctacaggttcgattttgttgctttagagattggcagcatatcaatttgtcctgagaactgataataaagggaagtgaaatcaagcacttaccctgcctttcttgtacggtgatgaggttattaagagttaaaaacagacacatatacaaatatttcatgctcaaactgtctcatttttacatggcctgtagaaatcccttcaagttggcttgtataaccctttgacagaatcccaagtctttaagagcctccttgaatcctggacatcttgtaccagatatgaacttgtacacttactgccctggaactattagctgttttgcaaataagttctgattccttttaattgcaaatgaaaatgaaagaacaccatctgggtacctagtggtgctcattgttactgaactgtaattactctagaccttttcatgtagacaggagtgggaaatatttactgtttacaaagaaaaataaagcatataatgaggtttccatgtcaaatttagattactggggtctaatgttacatgattattaatttaatctatacttttaataataaaaaagatatcaagattttgtgaaattaatcatgaaaaaccacattcattagtctaagatttttttctgtccttagtgtatatccactgacaatgtaaattgaatattgtgtttgatacttgagattatttttctctatgtagtagtcactgtcctctcttcctctttanggaactataattcatttgtataatccccattgcttagtttgaatatagggatatgacatataaaagtgtatcatctcctttgtacctcactcgtgcgaatctgggccgagggcaattccttagtgagtcgataatcggatcagtcaactgttccgtgtgatg

SEQ ID NO: 135238 - DNA, 1088 bp, Homo Sapiens
  misc_feature (64)..(86): n is a, c, g, or t
  misc_feature (910)..(910): n is a, c, g, or t
  misc_feature (987)..(987): n is a, c, g, or t
  misc_feature (1011)..(1011): n is a, c, g, or t
  misc_feature (1041)..(1041): n is a, c, g, or t
  misc_feature (1043)..(1043): n is a, c, g, or t
  misc_feature (1051)..(1051): n is a, c, g, or t
cgggcagtgccatgctaaaattaccctcactaaagggaataagcttgcggccgcctgctcaggnnnnnnnnnnnnnnnnnnnnnnngtgctttaatagtcatttgttcctttattggttcaagggtcagtgttggtgtggtcactgctgagtccactgtgcccagaagacagggtccacagcaggcactccataaatacatgttgcaggactgccctcactggctcactctgtggagtgagggacctaatgggccccatttacctattgcctctgaaagttaaagggcaggaacaaggtggagggccactgccctctggcctggcatggcccagaggcagcttggggttagctcaaggcagctaagcaggtccagcccaagaactaagtcaagtgggccgaggaggctctgagagtggccggggccggcgtacattccctggcatgggtgagaactgcggctgttctggacgcacattcatctcatgcgaggtgctggggcccaagttcatgtaggttgctggcagctgcacataatggtccccaagcagtgcagacactatctgctccacctcccccactagtactctgaaggtgggtcgcactgctgggtctgcctcccagcattgctgcatcacttggtacagagaatcagggcaatactcaggctggggcaggcgccgaccctgggccaggaagtgggtaaggtcaaaagggtcaatgtggcggtatggtggggcaccccgtgtcagcagtttccacagcagcacaccaaatgaccacacatcagacttggtggtaaatctataggtctgcaggctctccagcgccatccacttcacaggtaggcgagcgtggcgatgctgttgaacactatagtactccctgtccaggatgtcgcgggccaacanagtcagccactttgactgtgatgactcgtccgcatgcagttccgcgcagcagtcctgtgcacaactctgctctgcangtactccatgcgcggctactgcangcaagtgataggtcttcacgtgggtccctnangtgacgtnactgagcagtcactggacattggcacacaatgggcag

SEQ ID NO: 135239 - DNA, 1043 bp, Homo Sapiens
  misc_feature (383)..(420): n is a, c, g, or t
  misc_feature (798)..(798): n is a, c, g, or t
  misc_feature (841)..(841): n is a, c, g, or t
  misc_feature (868)..(869): n is a, c, g, or t
  misc_feature (874)..(874): n is a, c, g, or t
  misc_feature (910)..(910): n is a, c, g, or t
  misc_feature (921)..(921): n is a, c, g, or t
  misc_feature (940)..(940): n is a, c, g, or t
tttttgggtttttcaaaaaaccaagctttattattaattttttttggcaccttaattaacaattcatagaatgggtcacttcaggccactcaagagtaccagtgaacactcccccacaaacacaccctgccacaagacatttagcacagaggaacagatccatggccactgcctctgcagtatcaaagagaattagtctttccacaaaacaaattttaacagccaatctctggatttctgtagtggctttagtcaggcatatttatcatcatattagcagtgttcagttcctgcccaacatctttatttaatcccaattcaatgcttatggatgctcagctcatgtttaatgttgcaagccccatcttagcccatcttaattnnnnnnnnnnnnnnnnnnnnnnnnnnnnnnnnnnnnnnggtacctgcctggttcatggatccctagccatccagggaccaaattccaaattaggatgacaaagagtttcccttagttcaaaatgacatgtgtttccagtcctaatcccagatgttaatctagccatagtgtcacctgagccttagtccatgtgtatatcacatacttcctctagctttagaatgacttcacaagctgagaaaggcaaaacaaccataacccagacttgcatgtaagtatctggcctcaactattaaataatacttaaaagggaaccttatgagccttagctctttctggaaattcatctgaacaggggtgagggtgggtaggtgggtgcaaatggtgggctcctccagctcagagtgatttgttangggtatgcactttctggaagcactagagacagggaggagacangtgcgtaagacttttatccttttgcannaacangaaagggcactccattatttatcacggtggtctctnagggactacanatctactaaggacctctangattttgtgaccatgaaatctctctcctagtcacaggcataatacataaatacatatggcaattctgatctgcatgctctccaataagtgtctcagtccttat

SEQ ID NO: 135240 - DNA, 907 bp, Homo Sapiens
tgaatcatctgaacaggtgaggtggttagttggtgcaaaatgtggctcccttcagctcagagtgcatttgttaaggtattgccaactttctgaaagacactagagacaggggaggagacccaagtgctaaagaccttttatcacttttgcaaaaaacaagaaaggccaactccatttattttatcacgtggatctcttaaggaactaccaaatctactaagggacctccaagaattttgtgacccatgaaaatctcctctcctagtcacaaggcataaatacataaaaatacataatggcaaatttctgaatctgacatgacttctcccaaatacagctgtcttcagttcctttattattgcctctttgcagcagcggtgatggtgggtgatggagtgacatcaggagcgccagaaggaggaagtcagaaagcccttggggacaggaatgtccttgtgttgcaaacatttctccaagaactgcttgaggcgtatgaaggagcccatctgtcctgagcttgtgatagcttcaattctgggaaagtagtcctctttgatgagaattagcatcttccagaactgaacctggtattgcttcatgagggcattcccacacacctccaggaagtcaaagaggagggtggctgtcacatctgacaagggctccatgtttaagatctgtgccaaccagcgccatccatgatttaagccatgagggtgaatctcctgtcggtttccatatggccaccggagctggatgatagcagcgtagagacggatcatccctgacatgcgttttagaaagttgtcttgctgctccactttggaatcctttacttggtaaccaagcatcctctgatagtcttccaaagccattccctccttgaaagtgggatagaaaggaaccc

SEQ ID NO: 135241 - DNA, 402 bp, Homo Sapiens
  misc_feature (69)..(77): n is a, c, g, or t
  misc_feature (134)..(170): n is a, c, g, or t
ttttttccagttctgacacctttttaatagaaatcactgtttttaggaaacaaatagcacttttgtaannnnnnnnnacaatgtttcttaccttgatcttaatttaagtaacactaggaagacctcaatatctnnnnnnnnnnnnnnnnnnnnnnnnnnnnnnnnnnnnnccccagatacaaagatttttgcccttgcataaaaaaacagtgcccgaacgatgacacaaggactcacaaagactcacgggacctcactgacactatgattcctactctaccatgcaaggtcttggctacccttaattggactgtcagcctgaaaaacagcttttctattccttattttagtttttgttaccaagaaagtaaaatgaacagtaaaataaaactttccttaaag

SEQ ID NO: 135242 - DNA, 397 bp, Homo Sapiens
  misc_feature (233)..(269): n is a, c, g, or t
  misc_feature (326)..(334): n is a, c, g, or t
ctttaaggaaagttttattttactgttcattttactttcttggtaacaaaaactaaaataaggaatagaaaagctgtttttcaggctgacagtccaattaagggtagccaagaccttgcatggtagagtaggaatcatagtgtcagtgaggtcccgtgagtctttgtgagtccttgtgtcatcgttcgggcactgtttttttatgcaagggcaaaaatctttgtatctggggnnnnnnnnnnnnnnnnnnnnnnnnnnnnnnnnnnnnnagatattgaggtcttcctagtgttacttaaattaagatcaaggtaagaaacattgtnnnnnnnnnttacaaaagtgctatttgtttcctaaaaacagtgatttctattaaaaaggtgtcagaactgga

SEQ ID NO: 135243 - DNA, 1189 bp, Homo Sapiens
  misc_feature (12)..(12): n is a, c, g, or t
  misc_feature (72)..(72): n is a, c, g, or t
  misc_feature (130)..(679): n is a, c, g, or t
  misc_feature (706)..(714): n is a, c, g, or t
cgtagccacgtngctacgggtctcaacaccactgacgagactaccgaatggtactacgctgactatagaacncacctccgagggagaagcggacagtatccgtagcgcaggtcgaacagagacgcacgannnnnnnnnnnnnnnnnnnnnnnnnnnnnnnnnnnnnnnnnnnnnnnnnnnnnnnnnnnnnnnnnnnnnnnnnnnnnnnnnnnnnnnnnnnnnnnnnnnnnnnnnnnnnnnnnnnnnnnnnnnnnnnnnnnnnnnnnnnnnnnnnnnnnnnnnnnnnnnnnnnnnnnnnnnnnnnnnnnnnnnnnnnnnnnnnnnnnnnnnnnnnnnnnnnnnnnnnnnnnnnnnnnnnnnnnnnnnnnnnnnnnnnnnnnnnnnnnnnnnnnnnnnnnnnnnnnnnnnnnnnnnnnnnnnnnnnnnnnnnnnnnnnnnnnnnnnnnnnnnnnnnnnnnnnnnnnnnnnnnnnnnnnnnnnnnnnnnnnnnnnnnnnnnnnnnnnnnnnnnnnnnnnnnnnnnnnnnnnnnnnnnnnnnnnnnnnnnnnnnnnnnnnnnnnnnnnnnnnnnnnnnnnnnnnnnnnnnnnnnnnnnnnnnnnnnnnnnnnnnnnnnnnnnnnnnnnnnnnnnnnnnnnnnnnnnnnnnnnnnnnnnnnnnnnnnnnnnnnnnnnnnnnnnnaagaattcggcacgagggacaactacnnnnnnnnntccccatgttctttaaaatgcatttgaaaaacactagccctgtggctatttctctgtatttgaataatggcaactgctttaaaggaaatggtcaaataggcatgttttcctctggcagggtcaatcatgcttagctgcaggtgatttaaattagattactagtcaccttcacttacgatcctgccagtttttgctctctatatactttaaaactctttcacattagatatgattagtatgcatttacatacattttaaaagagtatgaaaacatctggaggcttttaataagactttccaattcccttttgcagcaaagaggcagaatcagttcaacacaccgatgtaagagaaaaaagaaaatctcaacaaatcaaaataatattcaaaccacaacatttagtttatctacatcccgctcaacagcaacatttataatatatcaataatctgtatcagaattttctctgtaggg

SEQ ID NO: 135244 - DNA, 973 bp, Homo Sapiens
  misc_feature (590)..(590): n is a, c, g, or t
  misc_feature (659)..(659): n is a, c, g, or t
  misc_feature (713)..(714): n is a, c, g, or t
  misc_feature (867)..(867): n is a, c, g, or t
ttcaagattcacatctttattaaaggctgtgacagtggaggcagggcagaacacccctcaatcacatctgaaaacagcacacatggtggggctggaaatcagtgggcccagtctcccttcctccttccatctgcatcaatctgtttccatcggtgcttcagaaccagcgcctattttaacagtctggcatcagaatcttattttaaatgcatcaaaattcactgtgagagccagcactccggtcgtgggaacaagaccctacggaattcctcagtgggtcttcaggggccccatgggatggggctgcagtatgggtacacagacttcaccagtgtgaaagctgaggtcatcagccatggaggctagaggcctgggctgcttgggaagcatcccaggagcagggagctaatgagtagggatgggaaggagggaggaggaggaaggggctgtcgttctgctaatcagagcggacaaccctgacctgcctctgttctgctgttgacctctgatgtgaccacaaggttggggactaacagtttggaatgggagctagaattcaaggatgagaatcttcctgtccactgcctcanaggcctgctttccattcctaaaaatgcaggatggcacagccagatggccgctctgaccatggagggcantcagcccattttacagatggggacactagagcttaggaagggacctgttcctanngcacactcactgcacagtcagagatagggacgggactttctctgctgttcacactgcttcccttgggaggagcatctatgagagagcggtctcaacttgagcatgcacagatcacgggagacctcgtgccgatctggctcgaggcaatcctanatgatctataatcgtacagcaactgtctgttgaatgtatcgtcaattcaaaaatacacgacaaatgtactggggcaagatggcaccatatggtcgcacgcctcatc

SEQ ID NO: 135245 - DNA, 957 bp, Homo Sapiens
  misc_feature (610)..(643): n is a, c, g, or t
  misc_feature (682)..(759): n is a, c, g, or t
  misc_feature (855)..(855): n is a, c, g, or t
aaagctatatcttttattcctttcctcattatggataaattttcatagaaaaaaggcaaatctccattttttcctctgattaaagtacagtgtagtatcagattcagcgctgatcaaaagaaagactgatttgaaaagttggctttcttctataagccttgctgttccttctcaaccaagaacacttcaaaagagctaatgaagtaatagctgctttgattcaaatcaagaagttaaataaaaatgtcctacagactgtgaggagggtgaggtatttaaaagccaataatacattatagaatatactgatatcaaagagcaactttcagaattatgattgttaacacctatgcagtcagtcctttgatgaaggcaggtgaactgacatgcttggtaagagattatcttttctccctagaaacctacttgtttcagatactggtttgaaccatgatgaaatactctgcttctcctcaaagctcaactcttctttagtattcagctatgaggctttcagattgataaaactgaattaaataaatgatgtgtcccactggaaagcattctcattctaagactgctggttagtaactttgcctggggtatttannnnnnnnnnnnnnnnnnnnnnnnnnnnnnnnnngcctacagccgcggccgctcccctcgttccgaattcttnnnnnnnnnnnnnnnnnnnnnnnnnnnnnnnnnnnnnnnnnnnnnnnnnnnnnnnnnnnnnnnnnnnnnnnnnnnnnngtcacatttcacacacatacgagcggagcaaagtgtaagctggggtgctatgaggagctatcacattatgcgtggccatggcgctttcatcggaanctgtctgcactgattatgatcggcacgccgggaaggcgttgcgatgggtctccgtctcgtcataccctcgccgtcgtcgtggggacgtaagcatcaggcgta

SEQ ID NO: 135246 - DNA, 647 bp, Homo Sapiens
acagtatttgtcagctgtttttattcttcagtttatcatcttatatttggctctcaatttcacccataaattattgatggcttattatacgccaagtaccctgcgctccgctttttgtggtatccctcttcggagcgagaagtcacttagaattttaccccatcttccccacttgggaatcggaagggttcatagctaagtttagttatttataagcacgccggctcttctctatccctctctccaccaaccccatttcaaggttggtccctcccagcggacgacagtgatgaattcctcttggggacagccctcccgcaactaacggtggctccatcgacgctctggtctccttgctgctcgctgggaattcgggtgggacgttttccaaagtttggattccacggcacattcctccctcggaaaggcacaaccggctcggcgtgtcagctcagctggactcacgccggtgcggggccgcagctccggttctcgctgggcggctgcggagggctgggcgattctctcagcgtcgcgaggcgacccgggcagcagcaaacttctccgcttcccctcttcgggacgcggcacctcttctgcccttgagcactccgcaggaacttcccccggcctcggctctcgctccg

SEQ ID NO: 135247 - DNA, 575 bp, Homo Sapiens
  misc_feature (275)..(303): n is a, c, g, or t
  misc_feature (436)..(452): n is a, c, g, or t
cagacaaaaatttaactttttatgagatttcagtttttgaaatacacaactcttacagcacaaacacagtatttacatttcaagttctttgtacaaaagatgtatgccattttggaagaatattgttgagatcatgatctaaaatacctgtcagagttactcatggaatctgctcttcacaaatccattgtattatgacataaaatatggctagacgccaaggtttaaccatacataaaaatactaattctcggctgggtgcactggcttatgcnnnnnnnnnnnnnnnnnnnnnnnnnnnnntttccaatgagttacatgaaaatcagatataacaagctgctccatataaagattgtggttcctacttttaaaaaagtatgctataacttacttccttaaaaatataagcatatcacaaaaactaaagaataannnnnnnnnnnnnnnnnaacataggccctgctgagaaatcgtcataaattctaaaataatttcaacagttacagcttgaaccacacattcacatatgacatgcaaagagagaatcccagcatcattgaacagttcagcat

SEQ ID NO: 135248 - DNA, 1340 bp, Homo Sapiens
  misc_feature (749)..(764): n is a, c, g, or t
  misc_feature (795)..(1210): n is a, c, g, or t
  misc_feature (1217)..(1217): n is a, c, g, or t
  misc_feature (1221)..(1221): n is a, c, g, or t
  misc_feature (1246)..(1246): n is a, c, g, or t
  misc_feature (1261)..(1261): n is a, c, g, or t
ggaagtccgcgtgctttgataccctcagggggcacttacaggctaggtggacccagggctaggggtaagaatgcagcagtgaacatggttcctgcactcatgaagcaaatgtatccactgtggtacaaaagagactgtaaaaaacaaacccaaatggacaacagcagggttaaacattgcagaagaggtgccaccttggatagtgttatttgatggaggccaggatgatgcatctgtcttctctctgaagtgccttacaaaacattacgagcgagtaggtcatcaaaacaaaacacaaagcatgagttgcaaagggaaacatttagcttgcaattcttattacatctttattatcagtcaaggtcacagtcatattaaaaatatataatttaattctcaaataatgtctttgttcctctttttcctaaagtcctttgtcaaaagaagtcaaagttgaatatattttgtagctgatatacatatgctgacagacagcacaatgttctgaaatgaaaacagagatattattgctttataaaaagaaacttggtcccagagaggagaaaaatagatagtacacaagagtgacataagaaaaaaagcaaagcattatcggagaattgtttccatttaagtgaaagcagtatctgtgatttttggctgactgctccaagtaccgtgtatctcctacatcagtgctttgaatgtattcttctataaatgcatgttaaattaatgtaacagtaatnnnnnnnnnnnnnnnngcctacagccgcgcctcgtgccgaattcttnnnnnnnnnnnnnnnnnnnnnnnnnnnnnnnnnnnnnnnnnnnnnnnnnnnnnnnnnnnnnnnnnnnnnnnnnnnnnnnnnnnnnnnnnnnnnnnnnnnnnnnnnnnnnnnnnnnnnnnnnnnnnnnnnnnnnnnnnnnnnnnnnnnnnnnnnnnnnnnnnnnnnnnnnnnnnnnnnnnnnnnnnnnnnnnnnnnnnnnnnnnnnnnnnnnnnnnnnnnnnnnnnnnnnnnnnnnnnnnnnnnnnnnnnnnnnnnnnnnnnnnnnnnnnnnnnnnnnnnnnnnnnnnnnnnnnnnnnnnnnnnnnnnnnnnnnnnnnnnnnnnnnnnnnnnnnnnnnnnnnnnnnnnnnnnnnnnnnnnnnnnnnnnnnnnnnnnnnnnnnnnnnnnnnnnnnnnnnnnnnnnnnnnnnnnnnnnnatgatcngtanaagggcgggtgtggggttttcatangttcgcccctgacancatcaaaatcgagctaatcagagtgggaaccgaagacataaaacagggtccctggagtctctggttctgtcgactgcgt

SEQ ID NO: 135249 - DNA, 970 bp, Homo Sapiens
  misc_feature (127)..(127): n is a, c, g, or t
  misc_feature (133)..(133): n is a, c, g, or t
  misc_feature (146)..(146): n is a, c, g, or t
  misc_feature (156)..(156): n is a, c, g, or t
  misc_feature (172)..(172): n is a, c, g, or t
  misc_feature (188)..(188): n is a, c, g, or t
ctctcctgagattttgttttgttgacgattagttgcatggctgatcatgcagactgtcatgcactcatctccggtcaatgattctgctcactctgagtgtggatacagcaatcaccacaccgctatntgtatntagtgagatggtntgcatgtgcncagctgtctcaactcntgcctcagtgattgcntcctcgcctctcaaatgctggattacagttgtagccaccacacctggcttgaatgtagattttaataattgaatttattctgccgtgttgatagaataactgaatatcagtaaattgtgtaacagtggtggatactgttgcataagatgagctcctgaagagtgaagctaattctttggtcaatgttcttttcccctcagtgtctagtttaaggcttttagaagattgatctgtagcaattatttaatgaattgaatatttaaaaaattttttatttgctgtctttggtaattatctctctgcttgaaattaaatgcactataagttaatataacaagtaaaatacattgtcttttgaaaatagtttctttttaaaggaatactaattaattgtaacttgtaaaaccaaaagttctaatggtttttaaaaaccagtgttgagtggaaaagtgtttctttagtttggaaagacctgtgaagtatcctagtcagggaaagaacctgttttctggaagaatgtaagttgctatatgtggaggggcatgtaggacaggggttctaattactgtctgtgagagttactactttgtaacttatggtttctgcttcagtattgtgttggttctgtattataaattgcaccttaatagaccaaaaatatctatacagcactgatttccttgaatattgtgtgttaattgatatatcttctagaggcaaaaggtttaaatgtgttaaaatggttatattgcctcctttttaaacaaattaaagagttgtaa

SEQ ID NO: 135250 - DNA, 997 bp, Homo Sapiens
  misc_feature (720)..(720): n is a, c, g, or t
  misc_feature (785)..(785): n is a, c, g, or t
  misc_feature (806)..(806): n is a, c, g, or t
  misc_feature (828)..(828): n is a, c, g, or t
  misc_feature (874)..(874): n is a, c, g, or t
  misc_feature (902)..(903): n is a, c, g, or t
  misc_feature (915)..(915): n is a, c, g, or t
  misc_feature (923)..(923): n is a, c, g, or t
  misc_feature (931)..(931): n is a, c, g, or t
  misc_feature (962)..(962): n is a, c, g, or t
ttttattaataacatttggttgtattttaattgtcttttttctctttttccatttacataaattgtatgttctgaagttactgataacagaaaagtaaatgtgagggccaagatgatgattgtgaaatttccctatattccagggattagatttttatctgaagaaggtaatttattctgattttttaattggtggatttaaaggcttgtgcgtagtgaaaagagcatctcctacagttgtttgagtggcgcctgaggtcttttctctgctctcaagagtgctggggcatgccttggctgcctgtctgacgtctgtttctgataagtgagttttaggctctaacagctcctgagaattttgttggcagagacctggtgagatcattctgctttccgctgagtttcctttctctgtttttttggactgttctgatgaacgtgaccctggagtgttcagtaatacctctgctcctttaggaactgttggcctactgcctggttttatctctctctgtacaaaagctccgtgtctctttccctggagaggctcattcggagtttttctggcatcatattgatgtataaaagagatgtattctataaaattgttttgaagttctgctgatgtaccaggagaggcaagtggtactattccacaagaaggcttttgcatcttgctgtgtttgactggcaaaacagtggacacgatggtttttggantcactcctctgggtgctcttagagtcgtaaagtggtaggaaacaggttcagtgctttacatgtgnacacatcacatatgtatagancatctctatttatgctgtcaanaagacagctctgggaaagcgttctgactgcatcacttctggcctgnatttctactcatttcacatgctccattnncatacagagcanagtttggnatctgcanagatcagcattccctgatacgaaagaatcanagtgatctgctaatcagtagaactaagttggacaa

SEQ ID NO: 135251 - DNA, 1017 bp, Homo Sapiens
  misc_feature (664)..(664): n is a, c, g, or t
  misc_feature (676)..(676): n is a, c, g, or t
  misc_feature (772)..(772): n is a, c, g, or t
  misc_feature (784)..(784): n is a, c, g, or t
  misc_feature (787)..(787): n is a, c, g, or t
  misc_feature (792)..(792): n is a, c, g, or t
  misc_feature (819)..(819): n is a, c, g, or t
  misc_feature (829)..(829): n is a, c, g, or t
  misc_feature (863)..(863): n is a, c, g, or t
  misc_feature (913)..(914): n is a, c, g, or t
  misc_feature (944)..(945): n is a, c, g, or t
  misc_feature (951)..(951): n is a, c, g, or t
cctttcacacagcagcatcatttatctggtagtagcaagacagccgtatgactttttgttgttgttaaagaaaaataagttgtcaagatttgcctaccaataactttcctatgtcttggctttcatgtccagtgggctagtttccaactgtttgagactcagggtaatcccagaaacctgtgaagcatcggcacaaaggttgtagcgcagatgccaacagatgtgtaggtaacaaacttgtaaggcacttcaatctccagtctccgcctggcctccttgttcctggtgaccaccttgaaccatgagtataatacttgcagtgagagattttgtacaagctgacgaaccaagaggatcaacacaattcccactgcaaatttggtcagacccaaaactaacatgtaggtggtgagtggtgggatgttctgaataacagggagagattcagcgggcttggatacaagctggaagaaatggttgatccagaatcctatggtcactccagccccggcagccagaatggtggtggtgtccgcccgggttgggctgtagtaatcagaaacagggtaattgtaacacaggaagaatggcacaactatgacaaaacggggggaagagggggctggccgagtccaggcagtcgatgaaggtccaggcagggtangtgaggacgatnaggagtgcggtgatcaggacgccaccagcacatccaggaccgtatgcatcccagtgtagagcctgctgagacacaccaaggtggaaaacacacggncatcaccagtcncancacanatggatactggtatctgtccatagtanagataaggangggtgaggcaatggcagtggccgccatggcgtgngtggatggcattccatatcagcgatcatctctttcagttaacacaggggnnggaaggaggacgggcactcaaacatcgtgnncactgncagaacacacaaaccaataagatatctctggtaaaaggtcaatcagtgtgatggaaactgagtaaa

SEQ ID NO: 135252 - DNA, 1002 bp, Homo Sapiens
  misc_feature (373)..(381): n is a, c, g, or t
ggtttttggggtgtcttcatgttttttaataattaaacattttattattacaaattcaaatttgttctcttttccctatatcaccatttaattgaacaacaatacaacgaaaactggtcgccttaaaaccaatttgaaacaggttgttcaggagcaacaatacaaaaacaaagtgtagactggaatgtattacattttggccaaacaaaaagatttgattcattctggttcatgaagttagataatggtgtttatggttttgaaagttcactgaaacttcttcactgaactggtttctttctgatgcattttcttgagttctagccatgactgccacagtagcagtcctgggatcagaacccacacaccgttnnnnnnnnncaggtaaagccaacagtacagccagttgctggtgttgaggttggggcttctggtgagccactctgggaggaaggtcatccagcagccatacagctcgcacacgcacagggtgatctgcaggaaatgccggtaatatttttctttgactatggcataaatgaggaacaatgccagagacccatccagggcgacggtcagaatttccacagacacaatggttggatcaaaataaacccatcttgcatcagctttgccatattctttccataaagaagcaatcaagccatcggaatttgcaacgtttcctactaaagacaagtagacaaaagggccttccagcgcgaagtgcaccagcgcgtcgtagcagagccagatgagcgccccgcggtccgccgccccctgcccgcggcccaggcgcaggcccagggcgcagcccgccgccagcagcgcggcgcacagcagcagcgaaccgccagcctcggcccccagctcccactcagcgcccatgcttcaggcttccgacgccaacggcccaggaccatgcggcagaggaaagcagggagagaaacgacgcggacgcgtgggtcgacgatatcccgggaattccggaccggtaccagc

SEQ ID NO: 135253 - DNA, 565 bp, Homo Sapiens
  misc_feature (74)..(82): n is a, c, g, or t
tctgatgcattttcttgagttctagccatgactgccacagtagcagtcctgggatcagaacccacacaccgttnnnnnnnnncaggtaaagccaacagtacagccagttgctggtgttgaggttggggcttctggtgagccactctgggaggaaggtcatccagcagccatacagctcgcacacgcacagggtgatctgcaggaaatgccggtaatatttttctttgactatggcataaatgaggaacaatgccagagacccatccagggcgacggtcagaatttccacagacacaatggttggatcaaaataaacccatcttgcatcagctttgccatattctttcccagcgcgaagtgcaccagcgcgtcgtagcagagccagatgagcgccccgcggtccgccgccccctgcccgcggcccaggcgcaggcccagggcgcagcccgccgccagcagcgcggcgcacagcagcagcgaaccgccagcctcggcccccagctcccactcagcgcccatgcttcaggcttccgacgccaacggcccaggaccatgcggcggccgc

SEQ ID NO: 135254 - DNA, 175 bp, Homo Sapiens
tatggtgctacagcaatttatcagtgttcttgaaattccattctgtggatcccaggaccccagcactctcctggttcgtggtctttcccactctctcctaggatagatattttaaaagattctgctcttattcctcagctctttcacccttctgtcgtcttctcgcagccgtata

SEQ ID NO: 135255 - DNA, 1305 bp, Homo Sapiens
  misc_feature (61)..(93): n is a, c, g, or t
  misc_feature (1179)..(1232): n is a, c, g, or t
gtgccaagctaaaattaaccctcaactaaagggaataagcttgcggccgcggctgtaggcnnnnnnnnnnnnnnnnnnnnnnnnnnnnnnnnnaaaagatgagtaaagagaatgtttatgaagtggctcctacataatgtcccagccctgggagtcacgaacagactccatggttttcattggcccctcttcttcggtatcagaatccctggtttaaggcaaggatgagagaagaacacgaggacgcaatgaaccagattcaagctgaggctgtgtggcatggcagaaggctgaactattcttgtgtagccctagggatagtccaagagccctctagtcttctctgaggcaatgagattcaagggcagctgtgatccttgcccttgaacggaaaccagccgtggccaaatctgtcctcacagatccatgtctccctggggcagtggcagagcagaggatagttccttattactctttgctcaaagggagatgtctcctgtccttgcctgcatttcgtcgcctctttcgactcaagaagttctccaatttcttgctgcgtttcagctccttgaacttctcagctagtgccaactggcgctgctcagattttttcaggaagtatggccgatggccctgctgggcctgagcccgacgttcttgcttcagggccaggtgcagctcctgctgttgctttcgttcctgctgtgccatttcttgctgctccattcgctgaagcagttgctgcagtttctcatgctcctctcctgaaaggtgcttcttcaactgttttttcacaagctctttctctttcgctcggatgtcattcaagaattggtatgttttgtcaaacacctcaggattatattcccctgacagatcatcaaagcgagggtcccgggctacctttttactaatgggaacaacctgacgtaaaaatggtactcggatcttggctgacatttccagaggcctgtgcttatctgcaacacatgcattttggataggtggtctagaagcttgtttcttaggactatttccagctaccaattgtttgtacgtcttagtccccacttggctctgcaattccaacagctcctcaaatgacatgttagatgtgcccctcaataggtcgcgggccacggccgcgggctccaggcccccgccgtcctcctcgcggtnnnnnnnnnnnnnnnnnnnnnnnnnnnnnnnnnnnnnnnnnnnnnnnnnnnnnnagttagctcccggcatcagctggcagtagcgctccggacgcgtgggtcgacgatatcccgggaattccggacc

SEQ ID NO: 135256 - DNA, 1039 bp, Homo Sapiens
  misc_feature (846)..(846): n is a, c, g, or t
  misc_feature (896)..(896): n is a, c, g, or t
  misc_feature (1002)..(1002): n is a, c, g, or t
tccggtaaattggaattcttccaagaaccaaattgggttttaatatactccggcaggcaaaaattacccttttctagttaggaagggaatttaattattaaccctaggcagatttttagacatttcacataatttgtgtaaacaattttaacatggtttattacgtttccagaaaggttaagtcttatattccattttctgctaattcttctttcatatatcatttaatataataaatatatgttattagggtgcatatgtgcatatattttcacacatatatatgtcttatatacataaaacagcacttaatggtcatgttctttgcatgttcaacttcagaggaaaaaaatgaattgctgttatgtataaccaatggcgatcttcccttctgtttcacagatggccatatctggatgtaaacaaaacattggagcgagtcattccaggtgaattgtacttcaagttgtaggttggtgttctcaagaagaattgggtgctccctggtagtaaatacctggaattaccccagtcaggaccaatgcctgaaagtgatcctcttttgtcagttgcatatttgtaaaccactagcaggcactgtttacaaagctccactaggcgctggcaacactggagctgcaaaggagtcaccacctccgggcttttattgaatatactctcccaagaggatcctgaatcacagaaacagttccacagcccttggccacgactccagagtaagcgattaaaaacccggttgaaaatccgatataaatttacttcttcaacatcaggcactcagatgcgtgggaagactgtacgaatacttgttttcactatgtccanacttttcgttgtttacagagtcaatttttatgagcatatgaagcactttnggttatgaacttcagtatcatgaatctctacagagtctgatctgcacgacttctggaaacgtctcagtcttgaacaataggtcgctgtaatcactctgtcttgttnagtgcgaagccatctaatttgagaaaattttgaggtc

SEQ ID NO: 135257 - DNA, 1429 bp, Homo Sapiens
  misc_feature (1169)..(1169): n is a, c, g, or t
  misc_feature (1219)..(1219): n is a, c, g, or t
tttcataactgacatatgccacacatatgggaactacaggattgcaagttttccgggggaaaggggtaagctctttcttcaacaggatctgtagcagtagataggagagtcttcattttcggtacacgctatgcttctgaacttggctctttatcacaaaagtcccttcaagagattagttacagtgactggataattacattaactagatcatagggagtgattatttttattttaaactactaaatagactatcatttaagcaagagatgagcacttcagaaggctaagtgtctggaaaactattttctacaaggaaaatatttttgtgtacataattaatcatgaatctcaaattggttagctgttgataaagaaggtggtagctaaaccctaggaaattggattgagtaatttcctagcaatcaccagaagaaaagaacatgtaaacacagaatctttttggtaaacaatattttaggtaattcaaagggcaataatttcaatcgtgaggactgccacatgacctcaacacccagtgtcagaacggccagattcaagcagcacttcagaggtgcggttgagatggctaaaaatgctgatctgggctgggagtgcaatcacagtgtttattgatttttgtgcttctgttgcaccaagcaacaagagcgttcccaggaaccgctggctttcccctgccatctctggcagggaaaaactacctggtgacaggatggccacatcctgcagagcatgtgtgcgtgcctctgaatcgacagatggcacgagcgggttctgcccctgagaagcatgcacaagtgacaagacccggccgtgccactggatggcactggggtgggcaggcccctgggaacaatctggtgtgaggaaggacagagcaacatcggcttggataatttagagaactaaaacgcagtcacggcggcaggcagcagcattagaccatgaagcggtgctccttcccgtcatgggccatgaggatgacgttgcggttggaagtccagatgagccgggccagcttgagggcattgtgggagccgggggacgcgggctgcacagggggcacctggtaggttttaatgcagcgcagctgaggtgccgagttcagcatgccgatgcttcccagcagtgacgtgttcatctgccanaaagaaatgtggctgtcagtgtttgagtaggtggcaaatatcttcatcangagcaaagcactgcagtgatggtccctgtgtcatggatgcacgtgccgattctggctcgaggcaattcctatatgagtctataatcgtatcagcaactgttctgttgaatgtatcgtcacatcaacacaacagcggagataatgtagctgggtgcagatgataccaatatggtgccatgcgctcatcggactgctgactcatagacgacg

SEQ ID NO: 135258 - DNA, 674 bp, Homo Sapiens
ttttttttcaggatgtgacaacgtttttaatgcaaagtcaaccattagcatctttcccatgtacttattagatgtgaaatggcaggacttcacggccccgtttgcatattttcctactccgcagacgaataatattttcagggaaggcagcgcagtctgtgccgtcacaatcgggcgactgtgggtgatgagggatgatgattttccaggaggccctggggtcagaggactcctagagggagtttccagcccctcaatcgcagatggatggcctgttgatgttgtaactggggtggaagttgagccggtcacaggaggtgatgcagttatcggggccagtcacgatgcttttctccaggtaaacattgagagtattgttccggaacattccacccgctgcaagttgttgggaaaatttattcgaatttggataaaatactttaggcatctcgtgcacggtgggggctctgctcccgtaagcctggttactggtcctgtacacggagacagccttctgggtcctgtagccccggaaccaccccgggttgttgaacctgcccggcaggtccgcgctcacgcggtagtagtcgctggtcctctccggcggggccgtggccttgggcgccacaggctccgcgcacgctctggggcattcctcagccattgtgcctgga

SEQ ID NO: 135259 - DNA, 1444 bp, Homo Sapiens
accaaggtaataaatgctgtttatgacttctttaaatttacatagtactgtagcatattaataccctgtgaactgcaaaaaaccaaatacatttacagtagtattggtcaccaaaatagaggggaaactttacaattgtgagaatgtgcaaatgttctcattaaggcagtattgacccagacaaccatttagtattcatctatcccctcaatgcctcataattctggaatgcctgttgtgaaacatgtcagtgcacagtgtctcctaaattctcacacgtgcttgattttctgattcatctggtgaactgggagtaggaagttggtcatagacaatatgccctccttctcttgtctgaccaaagcttgaagcaatcacatctactgccaggttagctgtagtcttcgcctcttcctctgaggtggccaactgaggattgacttcaacaagatccagtgctgatagcaaccctgtattgtgtatttcctcagcaatatacatgccttctcgataggttagtcccccgacaacaggagttcctgtggctggagccagtgtagggtcaaatgcatcaatatcaaaactcaaatggattggtctttgtctcttgccaatcagcagatcaaatgttcgttccatgaccttctggataccaagtcgatcaatatctctcatggaaaatactggatatcatagttctttaaaataaaatgttcaggagggtccacgtctctcagaccaatatacacaatacttgcagaagagatacaaggtttgatccaggaaaatcctgggagttgtggtaccttatcctgtagttctctgaggagaaatgaaactggctgtccatggagatttcctgatgaagtggtaaggggtgtgttgatgtcagcatgggcatcaacccagacaacacaaaggtctgggcagtgtcgggcatggccactaatggtaccgattgccaggctgtggtctcctcccagtgtgacacagctgtagccatctgacacagctctgctaaccacctcagccagttcctggttggcaagacccactgagcgtggattcactatcaggttgttgtagagatcatctttggggactggagtaaaactcaaatctccaaagtcttttaggtggcagcccaaactggagagccttttcatcaagccagcttctcttatggcagcgggaccatgctccactccttttcttttctgcccttgtgagaacggggctcctatcacagccacggagtggacggatttcttcaggatggaatgcactcgcgtctggaggagacgcgagaggctgccccttagggacatgatccgcagcactgagaatctccaaggcagaggctccgcgcggttggaagccgggagtgagcgccaccgcccgccgctgctcttacctacccgcgccagcgtccgcccgccccgtg

SEQ ID NO: 135260 - DNA, 660 bp, Homo Sapiens
ttttttagttgaacagggatggtttatttcattatcttaaaaggtttcttttaatctactatagcacaacagtgttttaacttaaattcatggccaagaggatgaggtgcaaggggcttcctaaaaataggtattttctactataaaatggactcttgtttttactttggcttgttctccctgtcccagtgggatgaccctcactgagagtagcagcaagggaacctgaggttttgtcacactttgttcttccagggttgctatcagcactggatcttgttgaagtcaatcctcagttggccacctcagaggaagaggcgaagactacagctaacctggcagtagatgtgattgcttcaagctttggtcagacaagagaaggagggcatattgtctatgaccaacttcctactcccagttcaccagatgaatcagaaaatcaagcacgtgtgagaatttaggagacactgtgcactgacatgtttcacaacaggcattccagaattatgaggcattgaggggatagatgaatactaaatggttgtctgggttcaatactgccttaatgagaacatttaccgacgcgtgggtcgacgatatcccgggattccgaccgtacccagcctgcttttttaccactggttcatgtacaatgcctgc

SEQ ID NO: 135261 - DNA, 457 bp, Homo Sapiens
  misc_feature (437)..(437): n is a, c, g, or t
ttttacattattacaatatgttctttaatgttgatttttaaatgtcagaatagatgtaataccagtgtaagccacagggtgggagtgaaaggcaagaacttgtgttgaagcagcttaaatacataattgcaccatctttataaatcttttaaatgcttgttgaattataaggagctgtagcttggttttctttcttcctttaatacagctgcattcttcagcaaagaatctctatggtgaaatcagaccatttggcatagtttgaagtcttccaagaagcctggtttccacctgaaactatttccatttcttcattgaagaccactggagggcagtgttttctcctttgggaacagcacctggtttcacatggagactgcatagatgtgttaaaaaggcatctaggttacaggaaatgagttgtacttctcattcangctgtgcttggaatttaccc

SEQ ID NO: 135262 - DNA, 482 bp, Homo Sapiens
tttcagttttttagatgcctatggacttcttggaattaggtgttaaatagacaaaagtgaaccaaactgcctttaaaagcacagcatgaccatgtaattctttttccagtttgtggtaaaaaatgatgaaacttctttccaagtagctatcacccagatttagtgtgaaaagtagtgtaattgtaattcacgccatcagggtctatcgctgatagacgatcagctgttctgtagaggggagaggctttcttttcaaataggaaagctgccaagtgctctgcgatacctccagcaagcttatcggattgagttcagagccaaaacagcagctgcacacatatgcaaattggcaattaatagtataacattctctatggtgaaatcagaccatttggcatagtttgaagtcttccaagaagcctggtttccacctgaaactatttccatttcttcattgaagaccactggagggcagtgttttc

SEQ ID NO: 135263 - DNA, 980 bp, Homo Sapiens
  misc_feature (56)..(56): n is a, c, g, or t
  misc_feature (62)..(62): n is a, c, g, or t
  misc_feature (89)..(89): n is a, c, g, or t
  misc_feature (129)..(129): n is a, c, g, or t
  misc_feature (158)..(158): n is a, c, g, or t
  misc_feature (172)..(172): n is a, c, g, or t
  misc_feature (193)..(193): n is a, c, g, or t
  misc_feature (270)..(271): n is a, c, g, or t
ttcgtctgtgaaccccattgagatctggagatgcacattgtagtgaacaccaatcntagatnattgctttgactgtgtgtcacctttcngacaaagcatgcgcatgagacctgtgagggtaactgcatnctcagcagagtcactgtcgccaacactgntatgagaaaaatcntcagaagtcctgcagaccatnaacactgagtcagggggaacctcaattatagcttaaatgccttctcctccctgaatgaggctgagtatattttattnnacaatgatccttccaaactaaggttttccttttggtgcttctccacaaagagcgtgtagctttgcaatttttgataaaataagacgtgttgccttcccctctatcccattaaaaaagagcagataaagctcaaactattccacctggtagggtcatttaccaagggctggtaggagattccgaatactcaatattctcaggcatgcaagaggacctaagagactgaaaaaagtgaattgttggccagaaaccttgggtcttttcataaaaggaaatttgggcttgtcaatccctctttaaagatataggtagaaagaagagatttttaaccctttgtctgcaaaagaaaaagggttaaatgaagcatctatacagatgactttgggagattatgacaccttttgccatcttcagggcttacgtctttactttcttggctaaccagtttcttagaagaaaatgtgtcagggacttggggatctacagtcatgctttagcatggctatggagctaattatcaagcttaaagggtaactttgggaggactcctcccttcactcctagtctcccttggaagagcagtccaggctcagggaagggaacggataggatgacacagtaagtacagaaactgaagctgtcaatagtgaaggaaaaaggggaattcttcgttgctttggcattgacacataagtactttgattaaaaa

SEQ ID NO: 135264 - DNA, 1111 bp, Homo Sapiens
  misc_feature (570)..(972): n is a, c, g, or t
  misc_feature (983)..(983): n is a, c, g, or t
  misc_feature (1001)..(1001): n is a, c, g, or t
  misc_feature (1024)..(1024): n is a, c, g, or t
ttttcaaacaagtattaaaattttatttaaatgaacgtttttaagttattgagccatgttaagggaaaacattaattttattagaacttgaacaaatgtttcacaaagaaaacattttaacaaaatggtatggtggcataacaataacaaaaaagagaacagcaaaatgtgtaaaagaaatataaggtggaaaaattgttaagtatctcataatccagtgtggaaataagaagtctaaatttaaaaacaatgaattttaaaaagcataactataaaacaaaagttaatgcttgtgctatcctaaccacagacacattcttcagcaaaactttaaaaggcagagttacattttatggtatttaatatctcttttctgttgttttttccacagaaatagagactgtttattcaatctcacagttgaaaaagaaattttaagcactgagaaataagtattctactatttaaaatgactggtgaggcaaaacaattgattagtctttaatgctctgtttttcaactgtactaaggacttcatccaaccaaaacaaacctcgtgccgaattcttnnnnnnnnnnnnnnnnnnnnnnnnnnnnnnnnnnnnnnnnnnnnnnnnnnnnnnnnnnnnnnnnnnnnnnnnnnnnnnnnnnnnnnnnnnnnnnnnnnnnnnnnnnnnnnnnnnnnnnnnnnnnnnnnnnnnnnnnnnnnnnnnnnnnnnnnnnnnnnnnnnnnnnnnnnnnnnnnnnnnnnnnnnnnnnnnnnnnnnnnnnnnnnnnnnnnnnnnnnnnnnnnnnnnnnnnnnnnnnnnnnnnnnnnnnnnnnnnnnnnnnnnnnnnnnnnnnnnnnnnnnnnnnnnnnnnnnnnnnnnnnnnnnnnnnnnnnnnnnnnnnnnnnnnnnnnnnnnnnnnnnnnnnnnnnnnnnnnnnnnnnnnnnnnnnnnnnnnnnnnnnnnnnnnnnnnnnnnnnnnnnncatggcagcanagggcatgaccgtaaaanggcgcgttgctgggttttcatangtccgcgcctgagagatcaaaaatcacctagtcaaggtgcgaaccgcagacatacgaacagggttccctggactctcggggcccgtc

SEQ ID NO: 135265 - DNA, 1218 bp, Homo Sapiens
ttccctaaccccagacacattcttcagaacactttaaaaggcaggagttacatttatggtattaagatctctttcctggtgttttttccaccagaaatagagactggttattcaatctcacagttgaaaaagaaattttaagcactgagaaataagtattctactatttaaaatgactggtgaggcacaaaccaattgattagtctttaatgctctgtttttcaactgtactaaggacttcatccaaccaaaacaaatcttaagcttcagaactctctaatgcttaaggaacgcctctgcctgattgccatataagggaatcaagaacctagtaatcgtggagtactctcagggacaaatgtaggaagagaggacacaacagagttttcacaattttaacaagtaatctgtcaccatttcagactaccaaatgctaatttacttaagacaaattatttaagtatatattcccacctttgcaatttatttctaaatactgatatattcattttttaagcagaccacatcaggttaataatggtataaatcaatttgaaaactataataaactacttcaagaataggtatatttttccattataccttgatcattatgtaaagatgcaattcttactttcttggtggtgaagcctatgggaaattaactcggaaatgtttcaaagagattgtcaaccaagacaggttttctacatgattgtcattttacaaagataacaaatttcacggttttttaaatgtcttaaagacaacatagttgtaatgttttataaacatcaaaggcaaacatttaatagtcaagccctttgcattctgaatatttgaaatttacacaatacgcccaattcaaacctaaatgaggtatattttcttttaaaacattagataactagcaaatatataataccaggagcagtttcaaattaaattatattcacaggcttgctttttgtttgtttttgctttgtcctgtcatataacacactgcgatgagtcttcggatgtggcatctaacaaaaagaaagctgcacatggtcactctgtgtgttgagttgtaagtatgtgagataaaaacatctttgtggattatttttaaaacgataaactgcattaccaactttatgattttacgtatgtaagtatatattagcccggccgtaatggccgaattcccgggcatatgtccggtaccgtcgactg

SEQ ID NO: 135266 - DNA, 1070 bp, Homo Sapiens
  misc_feature (46)..(68): n is a, c, g, or t
  misc_feature (725)..(726): n is a, c, g, or t
  misc_feature (842)..(842): n is a, c, g, or t
  misc_feature (854)..(854): n is a, c, g, or t
  misc_feature (868)..(868): n is a, c, g, or t
  misc_feature (873)..(874): n is a, c, g, or t
  misc_feature (940)..(940): n is a, c, g, or t
  misc_feature (957)..(957): n is a, c, g, or t
  misc_feature (970)..(970): n is a, c, g, or t
  misc_feature (1010)..(1010): n is a, c, g, or t
attaccctcaactaaagggaataagcttgcggccgcctgctcaggnnnnnnnnnnnnnnnnnnnnnnnaatttataaagaaaagaggtttatttggctcacagttctgcaggctgtacaagcagcatggtgccagcatttgcttctggtgggggcttcagggagcttccactcatgacggaaggcaaagggcagcagcatcacatagcaagagaaggaggaagaagggagggaggtgccaccaggctctttttaacaaacagttctcacagaaactaatcaagtgagaactcacttgttaccacaaagatggcaccaggctattcatgaaggatccatcccgataacaggaacatctcccaccaggccccaccttcaacactggggatcaaatttccatataagattagaaagggacaaacatccaaactgtatcatggcagaaggagcctggctctgccagacagttgagctgtttcattagccctgatttcccttctcaactagtatgtgtgcaagcactgaactgctatcttgtgtacacaactccagggtccctctgttattggcgctgggtagggtatggtgggaatcctccaggccctggccatgaggtgctccgtatttattgcctctgtccgggtcatggtgggcaggtgggtctgcctccccttctggaccaggtgaaccttaacaataggtgcatgttttactcattccaagtcnncccaggggctggcccatgactggcactgaggagttaggggcaatggcagaactgcctggacctgaagcaaggctggactctgttctctccttactgcctgtctcagtcagtttttngatgcgatacanataccacaggctangtgtnnctaacacataattaattttcacagatctgggactgaagtccatatcaaggactggcatctgggtcngtgaggctctcattgcnatgcatttcattnattctcctcggcgatctggctcaggcaatcctaaggagcnataatcgatcagtcaacgtcggttaatgtacgccaatcaaacaagacggacaatgtacgg

SEQ ID NO: 135267 - DNA, 937 bp, Homo Sapiens
  misc_feature (503)..(734): n is a, c, g, or t
  misc_feature (743)..(743): n is a, c, g, or t
  misc_feature (862)..(862): n is a, c, g, or t
aagctaccttatttacagattctgcacaatatttcatcatacaaaactgttttcctaaattcaaagtaaactgcatatggttactacagaagcattataaaattttcattggcatttttaaaattggagcatttaaaacagatttgagaatgagaaaagaatgtctgactcaaaatgaaaacatactagcctctttcataaactcctagaatcttgacattattggttgctgtggttggtggataaatcaaatccacaaagtgggtaaaccctctaggtgcaagttataagctccctcaagcaagccttttatcagaaaagacttgagatattctctcctctgtctgcccttcattgataagcaatgaaatgaccccaaaactcagaaagcaaataacatttatcaatgatcttcatccctcccaaagcagaagtttccaaaaacatcccataaactgaagtaccccaatggctgtagaataaaacctcgtgccgaattcttnnnnnnnnnnnnnnnnnnnnnnnnnnnnnnnnnnnnnnnnnnnnnnnnnnnnnnnnnnnnnnnnnnnnnnnnnnnnnnnnnnnnnnnnnnnnnnnnnnnnnnnnnnnnnnnnnnnnnnnnnnnnnnnnnnnnnnnnnnnnnnnnnnnnnnnnnnnnnnnnnnnnnnnnnnnnnnnnnnnnnnnnnnnnnnnnnnnnnnnnnnnnnnnnnnnnnnnnnnnnnnnnnnnnnnnnacgcgcggngaaggcggttgcgtatgggcgctctcgctctcctcatgatcgcggctcgtcgtcggtgcggagcgtacactcatcaaagcgtatacgtatcaagatcaggaacgcagaagcatgtacanagcagcaagcagacgtaaagcggtgtgcgttcaagtcgctctgcagacaaaatacctatcaagtggacgaagcat

SEQ ID NO: 135268 - DNA, 525 bp, Homo Sapiens
  misc_feature (446)..(459): n is a, c, g, or t
tttgttatttttgtttaatatttcttcaaattttgtcaattgctgaagcccaggctgagcttctgtggcacatgacgattctctgaatttttgaaaagaacacatgtacctaaagttcaaaatcgaccagtgacacagatcttggggatctgggaggaggagaccccacagacacttccaagcactgccgggagattcgtttcgcctctcagacctgcctgccttgctcatcagcatgcagtcagagtgccaggggagggcacagccagcggcaacgcttcctggtgctccaggggctgccctcaggaggaggcctgccactcagtctgtgaagcaggattcttccatcaaaagaagccaaaccaaagagctcctggaacactcaggaccaaggcagatgagaagcctctaattaattttgtggccttttttggtttgttggtttnnnnnnnnnnnnnngcctacagccgcggccgcaagcttattccctttagttgagggttaattttagcatggcactggccg

SEQ ID NO: 135269 - DNA, 972 bp, Homo Sapiens
  misc_feature (79)..(87): n is a, c, g, or t
  misc_feature (629)..(629): n is a, c, g, or t
  misc_feature (687)..(687): n is a, c, g, or t
  misc_feature (713)..(713): n is a, c, g, or t
  misc_feature (828)..(828): n is a, c, g, or t
  misc_feature (892)..(892): n is a, c, g, or t
  misc_feature (900)..(900): n is a, c, g, or t
ttttttacattcatctgtaaatactttatttcatttcctgtcttaaaagatgaaactgattacacgatcagttgataannnnnnnnnaagtttgataatatcccattcaagtttagttgaatggtgaagatggcttccattgttgtcattgaagaatcttctgtctatcgagttgtttttcctttgtgtgttttcctggggttcttcaaagaaacagaaccaagagggcatgtgtgtgctgtcagaaagagagagggggcaaaaacaggacagagaatttattttaaggaattggcttacatgattgtggggctggcaagtctgaagtctataggaaaggccagcaggctagagccgcagggaggaggttatgttgctacttgagttggaaggctgtctggaggcagaattccttcttcgtttgggatctcagtcttttttcaaaggccttcaactaattggataaggcccatccacattgtgacgggctatctgccttactcaaagtctactgatgacaaatgttcatcacatctaaaagataccttcaaagcaacatctactcacagggacatctgctgctgtgtttcaccaaacactgggacccatggcccagccaagcacatatnacaaccatcatgagtggtctatagtttttctctgattgtctcttcaatttcagatganatcagttccttatagagagaagtaanaaaatcatatgaagagagcatagccagtagaaaatgttcaaaagcaatacggaatataccactgaatcttctgctgctgataagacatggattaagtggaaaaagttagagacanggtggtcagcaatggaacaagttgtctggatcaccgtgtcacagtagagtttcaaggatctganagggtggngatggagtacatactgcgcgatgatgatcaagggtcaatgcctcagcgatggtctggtgacaagaaggtggg

SEQ ID NO: 135270 - DNA, 536 bp, Homo Sapiens
  misc_feature (457)..(465): n is a, c, g, or t
tctccatgtggcatgacagccttgggtctcttaactttttctccactataatgccatggtctttatgcagcaggcaggaagaattcaggtggttataattccgtatgtgctttttgaacatttttctactgggctattgctctcttcataatgatttttttaacttctctctataaggaactgatttcatctgaaattgaagagacaatcagagaaaaactatagaccactcatgatggttgttatatgtgcttggctgggccatgggtcccagtgtttggtgaaacacagcagcagatgtccctcacacacatgccctcttggttctgtttctttgaagaaccccaggaaaacacacaaaggaaaaacaactcgatagacagaagattcttcaatgacaacaatggaagccatcttcaccattcaactaaacttgaatgggatattatcaaacttnnnnnnnnnttatcaactgatcgtgtaatcagtttcatcttttaagacaggaaatgaaataaagtatttacagatgaaaa

SEQ ID NO: 135271 - DNA, 1058 bp, Homo Sapiens
  misc_feature (165)..(165): n is a, c, g, or t
  misc_feature (233)..(233): n is a, c, g, or t
  misc_feature (843)..(861): n is a, c, g, or t
  misc_feature (974)..(999): n is a, c, g, or t
cttcacgaacattctgatcgatatgctccttagattgctgagccagatcgccgagtttttgttgattcgactgtctgtgatacgcacaaattattgagtgttgagatattgttcatactgttctttgcctttattgacagatatcagagtgacactgatagattnaatacattacacatgtatcacttttagaatctgcattataccttctgtaacagtgcattcccttaatnttctagtgaaagttagagataactgaacagactgaagcacttttctgaaatcttttgcttgatttatgaaggctgccatagtatcttttcttgtgttaaccatcttaaatgatgttttgtatattttaatagactgataggatgagaaagatttatattattagatttcaggatgatttataataattcaaaaatgaaattcaataatggggaaataattatgaattatagaaattatgccttcattctcttacatttgtgtgggttgcaagagggggagattattctggaaatgaagtaaatatgggaagttattgccaaatgagagagaaactatgggaaagctgatctataaagaggcattctgatcaattcatttgtaggaaactgggaaataaaaacctggggaactttaggttatttatacaaagggaataaataggctgattttaatttggtaagttgatctttttattatgaatttggtaatagtataggtttattatttattcatctaattttatagtacaggttttgtaatgttacatgtgatgatatgagctcccaccttatatgggggaacatcttgggaatttgagatttaataagnnnnnnnnnnnnnnnnnnnagtgtttttactgcatactcacaaatgttgtctataatttgaaaaatattgtcgtatctggccctttgatgagaaaaggaaattacaataataaagttttatgattttaaatnnnnnnnnnnnnnnnnnnnnnnnnnncctgagcaggcggccgcaagcttattccctttagttgagggttaattttagcttggcac

SEQ ID NO: 135272 - DNA, 970 bp, Homo Sapiens
ttttttgagaatcaatacaaaatatttattttttttcaaaccacagaattcttaaccccagagccacacaataaagttctcagaattgtaagccattaacatttttctaaacaatgcagtccagagatgaagataatttccaaccagcagggatgcaatatatagtaggttcccctatgaatgaagctcaaattagcatttcctttaattctcccacagccactccatcaacagaagcagaaacagtacacatattcatgccactcggctctgaaaagaggttcaaggtgggtcaaggtgggtcttggccagtggaggaaggaaggtgtccaggactttagttaatcaacagtggggacagagaggaatgatttcccttggaaaacaacagggttcctttctcatattcttgtggccagaaactggggtgaacttcagtggggtaatgaaagaaacaggagagccatttctccaggaactcctatgacctccattttaacttctgacaaagttaacttcatttatacaatcgtattgaaaacagtaatcacaaccaaaaaggtcctataaacctgtaatagatgtcaaagggattcacattctgaactttaattttaaggaccctttaaaaggcctagacttggattaaagtaaacgtaatattccaagctaaaagaggcaccataaaaaatcaactcaaaacatccaaacaatggctagatgactaatgtaggttgttttgctttttagttgcaaagcttttcagtatctcagattagtgtatgttcataaaacaatgctcagttattttaatagctgcttatgaaacaataacagtttaactcaagggcaatgcttcttgcataataatcacaaaaataattaactgctataaaacgggaaaaaaagtagaagaaaataaagccagcctcaataataaaaaggcaaaatctggaggggtaaatcggct

SEQ ID NO: 135273 - DNA, 1048 bp, Homo Sapiens
  misc_feature (61)..(80): n is a, c, g, or t
  misc_feature (673)..(673): n is a, c, g, or t
  misc_feature (774)..(774): n is a, c, g, or t
  misc_feature (841)..(841): n is a, c, g, or t
  misc_feature (843)..(843): n is a, c, g, or t
  misc_feature (932)..(932): n is a, c, g, or t
gtgccaagctaaaattaaccctcaactaaagggaataagcttgcggccgcctgctcagttnnnnnnnnnnnnnnnnnnnnaaagagatagttttatgggtaacagtatgggacagactgggaaggttgccagggcctgtagtgatgagcttcccaggaatagaccaacacacaggcaggagtggcccaaacagacaagtagatagacagacagacagagggacaagaaaacaaccaagtgggtaagaggcccaggccaggctcagcagctgtgtccaggcatcagctccagctctgctctggggaactggtggaggagaagggctggccggggcctcagtccttacagggctccttctcctcatgccctactatccctcatccagcctgctgggatccttggcaggtggaattcccagggctatggatggctgggctgagtgagcagaggatcgaggctcttggagactccctggggaggtggaggcctgggtggtgtggggttagcagcagcactggggggaatctggtcaagttccaggatgggggccactgctcagcagggcccctgtgtccagggcaggccctccacctgcccaccacaccaacatggtgcaataaataaagtttcaagtagtaagtcagtgtcaagcaggagagctgcaggctggcanacaggcagggactgagaaagagaacctccagcccccaccatatctgctcagtgggctcaagcggtcgcaagtctgtcttgtgcactggagtgggtgtctgngcctgatgtcacatgagcatccccgaggggctcagccctcacacagcgcagagctgtcggggggcanancaggcacatggtgccaagcgtcacatggtgcaggtgtctctgcgctgaggcacaagtgcagagtcgcaaccacatatcaggtgtggcgnaatccggagcagattgctgatggcctcaggcaggcagtacaggtcgtgggggcaaagcatctcatggtgcagaactggaaaaaggctctggtctacccacagccccatcagataag

SEQ ID NO: 135274 - DNA, 815 bp, Homo Sapiens
  misc_feature (69)..(130): n is a, c, g, or t
ttccttttgattcgagcaatttcctctgttgttactatgacaggagttgcttctgccataggtggtgannnnnnnnnnnnnnnnnnnnnnnnnnnnnnnnnnnnnnnnnnnnnnnnnnnnnnnnnnnnnnttgcacccatctgaggagatttttctttggggtctgctggctggttttctttttcttcttccataagcctctgatgaatttcagcagccaccatgtgagatactgctaaagaagcctgctgccaggtgtccatgaccaacttttcatcggcctcaaagttggactcaacgttttctagggagttatccatcttgcccttcagtactgattttgtttttggtttgggtgtaactgtttccagagaaatggatattcgaggaactagaggaattctaagctggctttcagaattgtctttactatccagttggaccaaagggattcgagtaaatctcttgttgtcctctactgggattttactttccattccccagtaataatcttgaaggagtctctttgtatcttggaaacggttcagctctgcctgcatcagggaaaagaaatggttcattgtcattccaagagtgtcctgtaaccagctctcattaatgatgtcaagccgctcctgctccgcctcttccttccgggcatcacaaatgtcccacaggcggtctcgcagatcattcactcgttgatgtagttcagcctttgtttcctcatcatcccacaggtcatcaggaagggagttgaaatcagcctgccattgagctacaaaatcttgcttgtgatccggacgcctcgtgcc

SEQ ID NO: 135275 - DNA, 1114 bp, Homo Sapiens
  misc_feature (60)..(78): n is a, c, g, or t
  misc_feature (852)..(852): n is a, c, g, or t
  misc_feature (892)..(893): n is a, c, g, or t
  misc_feature (1018)..(1018): n is a, c, g, or t
  misc_feature (1021)..(1021): n is a, c, g, or t
  misc_feature (1081)..(1081): n is a, c, g, or t
gtgccaagctaaaattaaccctcaactaaagggaataagcttgcggccgcctgctcaggnnnnnnnnnnnnnnnnnnncttcaaaataaactttattcctaatatgaaacaaaatttctagagaaactaaaaactctgcgtctgagggagataaggaaacaaagagggcatggcagcccaccggagtctcaggaggctggggaggacactggaaggactctcagaggatgctggtggcagcaggcagcacttcctggctcatgaaaacgttcaagtccaggttaggatcttccaaatccagtttcataaacttatccactaatgtctggcaattttccatttggttcttctttagcaaatccttgacaggcttgatgggttttccactgcggatcaagtctgagacctccttgccacgagccacaagcttgtcaggaagcccagcctgggcagctgtgtgggaggcatggctggccttcgcaacaccttcgcaaacctgatagaagaagacaagatcgttgccatcctcacaggtctccatggtcaaatactgcaccaggggcccttgtggcagcagctgtagctgaacaaggctcagaaagttggtggccacaaagatgtgggggcatgtgggtccacgtgccagccagtgtcggagcacagcggccagaagcgcgagcccatccaccgtgttggttccctttccaaattcatcaataaggaccagcgactgtgcagtggcattgttcactgctttcgccacctggttgaggtcgatcatgaaggtggagagggcaagggagatggattcgcagctatgaattcgtgtgaagatggcgtctactgccccanttttcggctcctctgctggcacaaagctgcctaccagggnncatgatgtgatcaagctacctgtttgaggttatgctcttcctgatgagttggtcactgatgatttgacctcctttgtcccacacatctgtggagtggcacaagttcggcaagagtcatcagagantcngcatctggatctaccaggactgtgggagtaccggtctgatacctattccggcacatgganagcaccagctctgcgattctgtctcaggcaatt

SEQ ID NO: 135276 - DNA, 475 bp, Homo Sapiens
  misc_feature (392)..(392): n is a, c, g, or t
cttcaaaataaactttattcctaatatgaaacaaaatttctagagaaactaaaaactctgcgtctgagggagataaggaaacaaagagggcatggcagcccaccggagtctcaggaggctggggaggacactggaaggactctcagaggatgctggtggcagcaggcagcacttcctggctcatgaaaacgttcaagtccaggttaggatcttccaaatccagtttcataaacttatccactaatgtctggcaattttccatttggttcttctttagcaaatccttgacaggcttgatgggttttccactgcggatcaagtctgagacctaggaacaagcaagaaggtgggaggagtaaggggagtgtggggagagagggaaataaggtcanaaatcctgtggacctagacccaggcccagtaggactaggaatgaaagggagctctgatgtggaggtggttgcacatttggatc

SEQ ID NO: 135277 - DNA, 559 bp, Homo Sapiens
  misc_feature (147)..(202): n is a, c, g, or t
  misc_feature (368)..(421): n is a, c, g, or t
gggatctgtctttttctcgttccttttctttgtcctgttccttttctttctctttgtctcgatccttctcatgctctttttcccgttctctctctctgtccttttccttgtctttttcccggtccttttcccgttccttgtcccggnnnnnnnnnnnnnnnnnnnnnnnnnnnnnnnnnnnnnnnnnnnnnnnnnnnnnnnngctcctgggggacggagatctagaagatttcctttttatggtttttgatgttcttggcgatctggaagaactcctgctcctcctcctacgcctttccctgctggaactacgagatcttcgcgatgcattgtaactcctgggtggtgttctggattttttatccttnnnnnnnnnnnnnnnnnnnnnnnnnnnnnnnnnnnnnnnnnnnnnnnnnnnnnngtcctgttccttttccttctctttgtctcgatccttctcatgctctttttcccgttctctctctctgtccttttccttgtctttttcctcactgtcagatgctatggtcttctctcttttgcctgacttgtctgatcc

SEQ ID NO: 135278 - DNA, 622 bp, Homo Sapiens
ctgagtatcaaaaccaattttatttacattaacatattacattgttactgtgtggataaatgtgaaatatattattaaaatcagaacacttaaatgtaccattatttattgaattagctgtggaatttaatttactgaaatcctctaatgaaacagcactacaggaaactcccctctcccctaggtttattttttcccccctcaaagccattatatcttaacatataaagggaacctgggagtagagggattaatatctttttgtaataaatatggtttagttctaaattggaacatccagataccaatatgctcactgaagtcaaattattttgtaaactgcaggtaccacaaagaaattggatctgcattactatgaaaattccaatgccatgataatccataccaccagtatagcagcaattctaacagcccccctactgtcatactaatgcaggctgaccagtcttttcacagtgattaaatgcaattctagcatatataacctacatgttttcttaaagaggtttctgatttttttggagaggaggaggaagattaaaagacattcaaaatacatcttatcaaagaaatttataatatacaccatactctattcttg

SEQ ID NO: 135279 - DNA, 385 bp, Homo Sapiens
tttactttaaaaaagaatttatttgttacagccctgggggctgagaagtccaaggttgaggggctgcacctggtgagggccttcttgctgctggggactctgcagagtcctgagggtggcgcaggtgtcacatggccagggggcggagcatattcacaggccagctcaggtcttccttcctcttctaatgaagtcaccagtcccactccggtgataaccctttaatccatgaatccatcgacaggttaatcccaaccacgcttagaggccccacctctcagtactgccacattggagattaagtttgaacatgagtttcattgaggataaacatccaaaacagctcatcccaaatctaaatgtttcttaaatcaactaatcaatt

SEQ ID NO: 135280 - DNA, 527 bp, Homo Sapiens
ttatcatgcctggactcctttttgccaccggaggagattttatccatcttctcagatttaaatgaatcactgcctttttctttgcctgaagattttgacttatttttttccttgtctttctcatttggataaggagattcacaaggactttcacttttatgttttgaaacccccattgttccattctcctctttacgtctcttggttaagtccggtggcacttcacggtcgttgtttgagtgatcccttttccgctctttcctgtccttttcatcttttttctctctttctctggatctttcccttgacttgtccaaatctttcttgtccatttctctctccttactcttggacagtggtggaggagtatgattaatgtagagctttgctgaagattccttgagttcgatgagactgtccctgagtcttcaagaaggctacacccacgattttgtgctgcagttgaatgcctggggtttctctttgctgggtggtaggattggatgccacatctgcttttatcgtaa

SEQ ID NO: 135281 - DNA, 258 bp, Homo Sapiens
  misc_feature (217)..(217): n is a, c, g, or t
ccacagaaaactccagttcattgttgggagaagttgaagatgaactcaatacctgggagtcatacatggcagtcaacgcatggacaccggagactattgagacgccgactggagtcacacacggcagtcaacgcgtggacaccggagactgctgagacgccgactggagtcacacacggcagtcaacgcgtggacaccggagactgctgagacgccnactggagtcacacacggcagttcaacgcggtggacaccggg

SEQ ID NO: 135282 - DNA, 820 bp, Homo Sapiens
  misc_feature (646)..(646): n is a, c, g, or t
ttttagacagaattgacaagagaaatttattactaaaaataaagcagctgaaggttttcccagggaaaaccatcaccacaggaccttccatgatgaaatacgttagtatcttctttacttctgaattgctgccttctttcatatacccaaaattttagtttaagttaaattaatcacgacaaaaacgatgtggcatctgatcccttcttgttcaatctgaagactgaattgggctaccctgtgatggagacttcaagtgctgcaggtgagtatctaccaagggttcatgtgtcaggtacatgggctggtaagaagacacaaaggctgcaggctgaagctctgggaggtccaaggatcctggcagaaggggatcattctgatcttcatcaaagatctgtctctgaaaggcttcaaagctcatagctgcatcattctccggcagcccctcaggtagctgcccatctccaggtttgcacacatcaaatttcacccactggtaattgatgcattttcgagctcctggacagctctggatcaggttgtggatggctggatgagaaaatccaaaaaagtcagctccagctggaagcaggttaggcattagtttccccatagtagtgcttatagtcctgagcagttctgcatngacaagcatctgcagaagagctgacaatggcattctgggggtcatcttcaggaacaatttcaaactgaggctgcacaccaccatccttgatctgacaggtatatagacacttctggtctgggcacccggccgtaatggccgaattcccgggcatatgtccggtaccgtcgactg

SEQ ID NO: 135283 - DNA, 945 bp, Homo Sapiens
  misc_feature (304)..(321): n is a, c, g, or t
agattttataaatcactttcaatttattaagtaaaccagacttttcaactttacattcaaaacatgtatctattctcttacaatttctgatagataagaggtttaattataaaagtacattaatgttccattcatttttagctatcagtctcctatacgcattagattttacttacttagagacacatacattctcaaaagatgtaatattctatatcccaaggttttactatattaaaaaaatatgacatctaattaaaaatattgagaactgtactactgtgaatatccttttccatggtannnnnnnnnnnnnnnnnngtacttcatgctttttattcatttctcagactgttttccctaagaaacaaaacatatatattccccatgccatttcttctttcctcaaattgcctgcccaagaaataagaaatcaaagtacaagtgagaatgcagagcttctgcccagtttctaaagaaacaatctactatcataagttaccagaaaactggcctattggtcaattctgttatacattaaaaattttttaattactttattaataatttcatgtgtttcttgaagaacatatgtgatattgtgactaaatttaactacagaaaatatcggtcaattaaattcattttaaatgcaaaatattgacacaatttcactgttaaacctcttgaaattaatcatctgttttgaaaacaatactctattaataatgttatttctgcactaagaaatttaacagtaatatataaagcatttccatatttctatttgaataacaaggggaatatcaaagaactggaagtcacatttcagctatatcaatctaatatttattctaaagggcaaaatgcttccacaaaattattatgtaatgcaaaaggtgtgaaaaacatttcaaatgaaaataaagtatgagtttgaaaatt

SEQ ID NO: 135284 - DNA, 750 bp, Homo Sapiens
tttttctgaaaccaaacacaaatactttttattcatgggatatcattttacatcaatgtcattgaaacctaaaaccagtttgctgtactcaagttaggtggcataacagtatttcagttaagctgggagtcacaggacttgcacacttttatgaatgtaatgcaaatactgacgacacgaagcattcacagttataggttacctgctgtcattgaacagtaacccccaatagaaattattttatgaaaaaagcaacccacgttttggtctcatttacagacacccaacattttagttggtcaatgaaatctatacatttattatacaacatatgaaagaataaaggataaggcttacagaggtattttagcagttttaagaataaaaaccaagggcacaaactaacttttaaagctttctgtataaacttcaaaagcactgttaaaatggagactgagagagaaaataaatccattgtgaaaccagaatctaggtttgcctagtcagatttataaaaacataattcagagttcatgcttcaaaaaaggtgcatgtaacattacagtggatgtttgaggcaaatcaaataatacaatttctgacctacttcagcagtaaacatctaaaggttgtattccatgacaacagagtattgcaatgtggagttcgaaacacaatagaaaaagagaaagggttgtagacttaggtactaaagaaacccagatgaaggcaccctatttattcacatta

SEQ ID NO: 135285 - DNA, 2113 bp, Homo Sapiens
agtgcttgtcattttaattgtaacatattaccaaaaagctttatatacatagctttatactatttacattgcagtagaggaatggcaatgctaacaggtgatcagtgcttccaaactttttcaatacctacacatgggagatctaaagagtacaatatatttaaggacttttaaggaattgttttttcctcactaataaagcatgccctgactaaagagaaggtcctgtaggcacaggcttatttattcaatgactggcaccttcgcagggggtactgacacacaaagtgccttcactggactttacagttctcactgcctttggactccagtccagctttggggctggggacaagtcggcctcgcttgaccctcaggccctctctggggctgtcagtcggacttctctcaggaagattattgactgggacggatttcgtggtgggttctcggaggatggtgcctgaatctactgggctccgctgagcaactttgaccttttgtgatctgctgccaccagctgttggtttggaggactctgcaagattttctttgccgagactcagtggggatagcgctaacttctgtgcagccaggcgggggctggtccgagttgccatggttgttcttcgcaggatatatgggctagtctttcctgtcgggatgtcagcaaaccctttctttacaacttctggaagtccctctggctcaaactcagtaccttccgtgtcttctgcagggtgaataccactcatgactgctttcttgctttttttagaaaagctctctggggtagcaggtgttggtcctccaccattctcccatattccactggatctttgcctcttgccctgaagctttattttggccagatgataacctcttttcagtaacagaagggattggagatggtcctggaacaactggacctagcaaaggagaccctcgggaatcttgtttagattgctgtgaacacagatgggcccacttgtgtctctaacatctctttagctttctctaacttttcatggcttataagcaaggaacagtacttatccaagtattcatctgcctccttggttttttcttcaagagtttctttcagttctttgatctcagttgttaattcatcgaccttggtatccataacagtacctgttttctgcttctcctgtgcagcttgaagttgagagagttctttctgcagtatctccttttcctcttccagctgtttacaggatttgatcaacaacttcattttcccctgggcacgttcattttccttcttcaactgatttacatattttagattgtccatcttggttttcttcaattcttccaaaatctgagtagtagctttcaatgaattattgagctcttctttactagactttaaaaggtctatctccagcttctgtgaactgagacattcttctttagaagtcaatttctctcggtatgtctggatttctacttcatactgtttgtttgtgtccaaaagcaaagcctggtgtttcttttcagcttcatgaagccgtagctgatattcagctatttcctctctcactttcccttccttttccacctggtctttgtgcatgcaatctaggctcttcttcaattcactattttctagtgtgagctccttcaattgatctttgctgctctttatttcttccaaccagtaactgcaactctccagctagcctatttttctctccactgagttcttcttgcagctctgctgttttctgtgccatctcatgcatttccctctgcagctcagtttcctttgcagtcattttgtttactttttcaacaaaggacattttgtccatttttgtcaattcaagctcattctctagattcttgtaagaactctgcagcacttctaatgtgtcctgcaaagaggcatttttggattgtagcacttggatcttctgctccaattccactgtcagatttctcagttctaagttttgctccttccaaagttggtgctctccttccacctgggacagtttagagacaagctgctcttggtcttgaatttgatttttcagtctactgatttcttcatccttcttctccagtttctgcttgccatcttcta

SEQ ID NO: 135286 - DNA, 1075 bp, Homo Sapiens
  misc_feature (157)..(173): n is a, c, g, or t
  misc_feature (187)..(479): n is a, c, g, or t
  misc_feature (483)..(611): n is a, c, g, or t
  misc_feature (1060)..(1060): n is a, c, g, or t
tggtaccggtccggaattcccgggatatcgtcgacccacgcgtccgaaattcgcagtctggaaatttaatttttgcatcaacctaatatttctatggtaaatccttgcaaacatggaaacaatgcatttggcccagtgctttgtggttgtgtactcnnnnnnnnnnnnnnnnnaatagatggcattnnnnnnnnnnnnnnnnnnnnnnnnnnnnnnnnnnnnnnnnnnnnnnnnnnnnnnnnnnnnnnnnnnnnnnnnnnnnnnnnnnnnnnnnnnnnnnnnnnnnnnnnnnnnnnnnnnnnnnnnnnnnnnnnnnnnnnnnnnnnnnnnnnnnnnnnnnnnnnnnnnnnnnnnnnnnnnnnnnnnnnnnnnnnnnnnnnnnnnnnnnnnnnnnnnnnnnnnnnnnnnnnnnnnnnnnnnnnnnnnnnnnnnnnnnnnnnnnnnnnnnnnnnnnnnnnnnnnnnnnnnnnnnnnnnnnngttnnnnnnnnnnnnnnnnnnnnnnnnnnnnnnnnnnnnnnnnnnnnnnnnnnnnnnnnnnnnnnnnnnnnnnnnnnnnnnnnnnnnnnnnnnnnnnnnnnnnnnnnnnnnnnnnnnnnnnnnnnnnnnnnnaatactaagtttttaatgttaaatgctgcttttagatacactgtaaaaatacacctatcaatgagtttttttattaaaaacattgcaattgtactagactttaaatactaagcaataattcagggcttcaatgttggtttatagcttttctcatttctttcattttaatacctctgtaaaatgaagcagttactttccattttcctgaggtgagataagtgccctgcacaatggttataggcccagtaagtgagactggagctctgatctaatccctttgacattaaagtttgtgcagtaaaccagctatgtcagtttgccacatttgtaatagtgttcaataaattttcacttaaaggtttaatattaaagtagtagcaagaattcataaccttaattggctttaacagcttttctttccctgaaaacagatgcatatgtcacatgcncacagattgcttaca

SEQ ID NO: 135287 - DNA, 830 bp, Homo Sapiens
gaagttcaaatgtatcagtttattaaaaatgcagcatttttcacatgagctttaaagatgtggaagatggggtacaattaaaaccatgagagttgtgcagggaacagccgtagggcctgtttgcaccttcagatattgcctgctcccaaaaattcagacccccagatgcagggcaagacaataagaaagggtgagtgcaagcaaggagagcctcctgctaagaggctgaggtcccctctggttccaaggatgggatgtcagccttgaccttccggggtctgcagtggccagaggctgcctgtcgccccttcctcctccccttcttgggcactgtgggagcttctgggtcctgctggaggctggtcccctcaggccgctgggttgcagtacctcttaggaaggtctctctttgcccttcgtgtcctggaaggggccttgcttggaggcaaagcgtcctccactctgtcctcaggactcagctgtgtggccttggatttcttatttgcgggacttgcgcacctgcaggacactggtgttggagttggagggtcctatcctgcccaggggtgactcccagggttgcagggggatagggtcggagaagggtgctgtagcccattgcaggcgtgaagtcctttctgctctcttagcctggaaccagataggtacggccatgccagtcctgcagggagctcatgcctggcatgccatagcagcgcaggcaggctcgaaaggcagcaaagtcctcattacccgctctctggacccgtaagcctcttgccacccaaataggaaccacttccttgggcactgagtagacattagctcca

SEQ ID NO: 135288 - DNA, 779 bp, Homo Sapiens
  misc_feature (569)..(604): n is a, c, g, or t
agaataggctctgttgttgaattgttgccatttcactttctggtcctctctttcctgctcaagttcttttattctctgagcttttttcaaagctttcttctttttatattcacgctgctgggcaatcatttctttttttgacatgggtttgttgccactgtcctcctttgccttccttccttcttctacaggcttgaggttcaacagtggagtcacttcagcattgccataaccagcaaaggtgattgcagcggtgccattttcttcatctatctcctcaatctccgcttcataacactgtccatcttcactccagactgccatacacttgtctcctactttccatgaatgagtaggttgagtagaagcaaaactgtctgaacttgcaagcgtctcagaaggttgagttgacagaaggtctttggttagttctataacttcttgtaaatctttcttcaattttagcaaatcttcattttctccatttccagataatgcagcttcaacttgctggagctgagctttgtagcttgccagctgctttgctaaatcctctgacatcttgtgtnnnnnnnnnnnnnnnnnnnnnnnnnnnnnnnnnnnnaaatgagcccagtggtagtggcggtggcagcagcagcagtagcagtagcaggaaaatcaccgcgacgacagcaaggcgacccggtctgaaaaggaagaactcggtcggcggcgagggggaagggaggaacgccgggcactggaagatcccgagaattccggaccggtccagcccc

SEQ ID NO: 135289 - DNA, 716 bp, Homo Sapiens
cttccccctcgccgccgaccgagttcttccttttcagaccgggtcgccttgctgtcgtcggccggtgattttcctgctactgctactgctgctgctgccacctgccactaccactgggctcatttgccccgaccccttcccgccgcccgcctcatcccacacaaaatgtagaagattagctaagcaaatggaggctaaaatgctcaggtccagcaagtgagatgctattggacagatggagaaaatgaagatttgctacagattgaagaaagatttacaagaagttatagaactaaccaaagaaccttctgtcaactcaaccttctgagacgcttgcaagttcagacagttttgcttcgtactcaacctactcattcatggaaagtaggagacaagtgtatggcagtctggagtgaagatggacagtgttatgaagcggagattgaggaggatagatgaacgaaaatggacaccgcatgcaatcaccttgccaggtggatggcactgctgaaggtgactccacgtgtagaacctcaagcctgtagacagaagcgcaggaaggcaaaggaggacagtggcaacacgacccaatgtcaaacacaacgaaatgatgcccacgcagcgtgaatataaggacagaagaaagctttgacacacagctcagagcataaagacacttgagcaggaaagcgacgaccaagacaagtgaacatgga

SEQ ID NO: 135290 - DNA, 418 bp, Homo Sapiens
acatgggtttgttgccactgtcctcctttgccttccttccttcttctacaggcttgaggttcaacagtggagtcacttcagcattgccataaccagcaaaggtgattgcagcggtgccattttcttcatctatctcctcaatctccgcttcataacacctgtaaagatatcatggctgtaagcaggtgagtaaaggtttagtactcagcctacaagacttatactgtagtgataaaattattacatgtgtctataatgaaacttctataatcaaatggttgtttcagcaaagagaatacaaaagagtggttgaagttagttatctgctatcaaaaaaggacatcccaatcataatattgctgggcaagtctcttacatgtacctactcaacgtgatttaatgtctttgagaatagagg

SEQ ID NO: 135291 - DNA, 623 bp, Homo Sapiens
acaagttatttttttggggttcatgtaaagggtttcagccttgacagcaacaccctttattcagcaccaggaatacccttcgcacagaaccagcgagcttcacgtgctcagcttccccgcggaaatgctcacaggatgctgcgggacccccggcgtgccacacgctctagtggtggtgctgtctgaactggagcccacagtaaccgcatgtgccggtttttgtttctttgtccaagtttatatacacttttgggtggccaagagctcccccgccgccatcgcacgctatcacccgagtctccacctcgctcacgggctgctctgctatcaaatcaatggcaaagttttcattcacctctttctgacgacctacaaaccgaattctcctgtagtctttatcatcataaacctggccagtgtgcgtgaccttctccccggtcggcgagacccgcaccccgaaacacctggcgcccaggggcaggctccgcgccgcctcgccacaccggttcagcagccggcagaaggtcatcgccgccgccattttgcgccgctggcctttgacccggcgcctcgtgccgaattaacaccagcctcgctacctagcgctatcgctgtccccgcga

SEQ ID NO: 135292 - DNA, 331 bp, Homo Sapiens
gaaaagccagaccttgtgcccttgttttgaacaccgactgggaagatggggcttaggtaacagccaaacctggctgtcagctgtgtgggagccaccaccctctctgggaagagttcctgcttctgtatggcaagcataaatcaagctcagtctgggttatggagaagttgaaaattgttttgttcctcattagtttataattgtatgaaatacgattttaatgaaaacttttcagaattcacgtttgtgtagatatttcagagaaccatttttactttacatcctaaaactgccttttcctatggttttgtcaataaaacactatgatgtt

SEQ ID NO: 135293 - DNA, 1065 bp, Homo Sapiens
ggggtggagaagcacatgaccacaataggacagcatgggaagtgttctggggatggacctggtgtgccctacgtgtgcaaaaactgcaccccaagagtcaactttactgcatgttttcaaaatattttttaatgtgatgagtggtctgggaaatcctcgcctaacaaagtggcttttgattcaaggcctgaagaaggggagggcccactccaggtagatgacatggccagggcaaaacctgaggccagagtgtgcctggggatatgagggacgtggagggcacccatgtccagcccacctcagtgcttctgcctcagtgagaaggggagggagttggccacaagggggcctgggtgcatcaaataggaagccggtgagtcaagcagctcggggccagtggggctggagagatgccagagccaggggctatgtgtggacttagggtttggaaccattaaagggctctgcgacgggagtggcaggatatgacctatttttgagacattgtgctgagaacaggccttaaaggcagaagcacagagcctggctcggggcgctgcagtactgaagccccatagttgaaaattatcttcctcccagctcctacccaggccctctccctctccagatgcctacagcacaccagacagtaggctccttgctggcacgaaccacagcctccagctcatggctctcaaatgcagtgcaggtatgcatggttctcttctgggcattctgggcagggtgccctgcaggagccacagttaactgcagtgcaactaatgagacactgcacatcagggaccacttgccattcatgactgcaggccccaccacagctccacgatgtgggccccactcacatcccatccagggcaggaacgtgagccatggggaggctaagagcagacccagggtcacacagtgatgaggctggcactgagggctcccacctcatcacaccctgcagcacaccagcaggggctcaactgatcctgcaggcacaattgacctccccggccgtaatggccgaattcccgggcatatgtccggtaccgtcgactg

SEQ ID NO: 135294 - DNA, 623 bp, Homo Sapiens
gaatcttgagttttagataagtagttatttttttcaatatcacttctgtttttagtgatattatatcaagaaacaacgtattcaagagccatggctgacagtgccagatatacttagggataaacatcaaaatgcaattatagttgctataacgttagatactcggaatcaaaatttatttgcaagctgacttgataaactaaatgaaccaataaaatttgtagaaatgctatcctgaaataattatatacatgaggacaatgttgactaatgaattaagatacattatatactagttaatgctaactagtctcagtacctgtttttagccatctgttactgtccaatagcacctcattcccacattctattttcccccggtattctttagatcctagtatttggaaaacaatcggctaaccttgacatttctttttaccttcatatgccactatctcggtagttcaaaaaaatttagttcttgataaattgccttgaagtttaccttgtgctggagagccttatgataactccaaagactttcttacggtataatacatgtcgtttaggattgtgtttcttagtcactgaagataataaatattaaaatggatgttttcatc

SEQ ID NO: 135295 - DNA, 713 bp, Homo Sapiens
  misc_feature (637)..(637): n is a, c, g, or t
  misc_feature (665)..(665): n is a, c, g, or t
ttttttgatgtaaaaagttatttttattatgacttgcagtcaaaaaagtttgaaatacattggtcaatagagaccaccaaaaataataaacatggagtttccacgaaaaataataaacatggagattcctggtgttaacgtcaataaggatgagtactgaatgtaaaccagtcttctgctctggaatccaaggtaagctacagagttctcagtttaccatcaacactaaggttttacttgtttttcctcttaccctacactttcaggcaggggcatgggcaacagaaggaaggaggaaaacccctagtggcaatgatttacttggagtggtatcatgttcttttgagaaaaggcattttttaaaagagtaattcccaggtggctaattaaaaggctttccttctcccctataaagtcatactggtagcataaaagtgaacagaaatttgtcattacagttttgacattataaatggtctaaaccacgggagtctgcgattttgtttctggttttgcaaaatatgcagccacagacacagatagaatgtgtgatcttgtcctaatctactttatccacctgtaaaaggaagacgattggaattatccgaaggagactgactctgtcctctccatctgntaagatgctaaacaatcattttctccanatcaaccacctaaacacatgacaagacaatgtttagcttctggctttc

SEQ ID NO: 135296 - DNA, 1167 bp, Homo Sapiens
  misc_feature (629)..(667): n is a, c, g, or t
tttttccatcaagaatgaataagttgtagtatatttatataatactatatagcaataaaaatgaaagaaagtcacagaagtaaacattttgccatttatataaaattcagaaacatacaaaattaacatttcacttacagatacatacgtatgttgtaaaactataatagacaaatgacaaacacaaaattccaaataattatttgagagggagagggccttagggaacttctaaaatgtcgacaacatctgtatcttaagctggctgatgagtacacagatatttacatttattatccctttatatatacgtttatgtatttttgtagtatgaaatacttcattaaaaaaagagtgaaaatgtaagacttcaaaaatgaagactaccatttatgtataacaataaaattagtgtaaaaaagtatacaaagaaaatgttcaattctttatctttccgtgctctatataatcagtattaatctaaagaccataatcctagtatgaaaaaaataacaagctttgacacaaaatctaagcatctgctttcctggcactcttaagttagacaagagtaaatatgttagcctctcaattctgcctcttcatctttcatctatacttagattttnnnnnnnnnnnnnnnnnnnnnnnnnnnnnnnnnnnnnnntctttttactcctttctcgtttcataaagatctgtttggtattttgatttatgactattactataatgtccatccctctctcgagatcggctacgacttcggttctgagttcggtctctcttttcactcttttgtttctcccaacagcttttcttcttcttcatagtgaccaaaccccatttctctatagatatcctgattagtatttttgattggcatgtagtcctcatcttctttctcttcagaacagtgatgggttttcttcttgtgttttttacttgtgtgtgagtgacttgattttgagtcttcggcctgctcatctaatataagatcgtattttgtatcctgtttgggctactttatctttcagaaccaaattaggtggtttatcctgttctttttcatactccttgaaatcactcttggtgtatttcccaccttttcctttcccccggccgtaatggccgaattcccgggcatatgtccggtaccgtcgactg

SEQ ID NO: 135297 - DNA, 2003 bp, Homo Sapiens
  misc_feature (72)..(85): n is a, c, g, or t
  misc_feature (122)..(150): n is a, c, g, or t
tgtaaaaccttttgtgccgccaactttttttagaaaataaaaaaagaaataggatggacaagggggttgttnnnnnnnnnnnnnngttgtgttttaacaaggggggggccttggtttcctcnnnnnnnnnnnnnnnnnnnnnnnnnnnnngggaaacttttttggccccacaaagtgttggaaagggggtaggataagccgcaaaattatagaaaaattttaaaggtgtttaaagaagacaaaaggttattttccaaaaagggaaaaaagtggttccgcacatttcctttttatgctcttccccagtggcttctaattataaatccaggtatttgaatgcttaaagagcccataattcctagttatgaaaaaaaattagcaaggctttggagcacaaaatctaaagcatcttctttttcctggcactcttaagttagacaagagtaaatatgttagcctctcaattctgcctcttcatctttcatctatacttagatttttctttatctttggacttctttggacttctgcttcggtctctctttttactcctttctctttcataaagatctgtttggtattttgatttatgactattactataatggccatccctctctcgagatcggctacgacttcggttctgagttcggtctctcttttcactcttttgtttctcccaacagctttcttcttcttcatagtgaccaaaccccatttctctatagatatcctgattagtatttttgattggcatgtagtcctcatcttctttctcttcagaacagtgatgggttttcttcttgtgttttttacttgtgtgtgagtgacttgattttgagtcttcggcctgctcatctaatataagatcgtattttgtatcctgtttgggctttactttatctttcagaaccaaattaggtggtttatcctgttctttttcatactccttgaaatcactcttggtgtatttcccaccttttcctttccatttaacctttgcaaccgactggctaaaatccacatgtattcttctgtcatctataagcacattgtccattttgaagaatgctttctcacaatcttcttccttttcaaattcaataaaagcgtaacagagggactctcctgtcttccagtctcggataacttcacaacttcttattggcccaaatctagagaatattatttccagatcctcatctgtggtcactgggttcaatttacacacaaacagtacattttctggaggtttaatatctgcatcaggtaggtctcccaccatctccaaaaagtatagcttgagttttagcctctttcttctgcctttatttcttctacttcctcagctgatcttcctttgaaatcatcaatttcttcatctgctcctattcgaccactatctaattgttcccttgtaggttctggtgatcgatcagggattaataaatcaggagggtcatcaaatggatcatctaaaatcaccgtatgatttatcctgatatcctgatatggtacaaagtccttgtcaacaaaggtctcattaattttcttaattatgtccatgccttctgtcacctcaccaaacaccgtatggacaccatcaagataatctagattttctcctgtggtgataagaaactgagatccatgttgatcactgccattattcaccatggacactgtgcctttcttcttgtgcttaattcttgggactttttctgcctcaaaaaagcttgcttgatcaccatacagttggccaaagatagactctcctccacggccagtccctgtaggatcgccagtttgtatgataaaatccctctgtacattgtgaataaggcaataattgtaatattttattttgcacagtttcaagaaattcaagcaggcacgcggccgttcttcggtgtacaagtcgatgacgacgtcgcctaaagtggtctccagtagaaccgccatggcgcccgctcctcctccgctacaaaccccgggaggagccc

SEQ ID NO: 135298 - DNA, 839 bp, Homo Sapiens
  misc_feature (101)..(145): n is a, c, g, or t
  misc_feature (664)..(691): n is a, c, g, or t
ataagagtaaaagtatctttaggaatttctttctatagagttcttcattaacatttatacgagttttttgctgagtcagatggacagttgggttctgatgnnnnnnnnnnnnnnnnnnnnnnnnnnnnnnnnnnnnnnnnnnnnnaagaactaaggtattgcctgaaaaacaagtgatgtctgtgcagccttacactctgtctttacagaagcaaatagtacacaaaagatctatttcagacacattttgaagatgaatcttcaactttaataccagctctttgttttccttgtatgatgaggggattgggggatacagttattttactagcaccttgtgaagtgtttccgtgttttgtgatgctgtaatttattaatgtttgtagctttttatatttgtacatttcttatgagctttgtttatatacccattacctggatgtttttgtccactgggagaggcagcttggtggaggccttatccactcccacttgtcctgtttggagggacgcagtccctagggcccgagactgggtgggagagggggagtctcacggggccccaggcttattcagaactggtgtttttaaagtttcctttaccctgcccttgttgaacatttatataatctaacctggacatcaagctgttctctctctctcnnnnnnnnnnnnnnnnnnnnnnnnnnnnggcaacatgtacatttctaacaaagtttatcgtggctattaaagtgttttatttcccaattcatattactcttgtatcgagtccatgaggtctaaggcaacttagatcaaagttttaaaaaagtaaaaatatttcaggttttgtacag

SEQ ID NO: 135299 - DNA, 1012 bp, Homo Sapiens
  misc_feature (50)..(63): n is a, c, g, or t
  misc_feature (929)..(929): n is a, c, g, or t
tccccaaattatcaccataacagtttattttccaaacgtatttttccttnnnnnnnnnnnnnntccacgcaaatagttgtctctaagtcttgttcccaatagctcagtggtttcataacaagtaaaaatggcgtaaatatgtaaaaaatatatatatgtgtatatatttcaaactgataggcactgagcacacagggcctctcttcccatgtatgtattggttgtttggtttgggtagttatcaaatcagaaaaatgaattatctggtgatcagaattcagagtaaaatactcataaatttaatgttataaataatctggtgtaccaagaagcctactttaggccaccataatattcagaatcttaacatactaatttaaaaattacatgaaaaattgcaagcaaattattgcttacagtagaataaagtcacaattttatatcttctttatagacagatacattttatataatttaaagcaatgaccctacagctgtattcttgtacttctgctgttttaagaggtaaagaggaagaaaatggttctgtttgtccccagcatgagtgtgatgccagcttctagagggaggacggtgtacggactcaaggaacgctctcatggagaagctctggccagacctggcacgtacagcacgatggctgttactgcaaccagggcagccaacatgggcatccagggccagggtttctttctctaccacaatggaccgaaacaccaaaacaggaaagccaggaataggccgatgaatacggctgggacgggttgtaatatggaaggattatttcctttctctcggagcagcttcaggttgtttttacactgtttgagctcatctgtgattgactgcttttcctgctcagtcatttcaaacttcaacttcagttctgagagtacagtctgtgtctntcatactctttctgcacatccctttgcttgttttctgccttactgagaagagtttttaatcagctgaattcccgagaatgctg

SEQ ID NO: 135300 - DNA, 970 bp, Homo Sapiens
tttcttctggggcattaggtccaacccttgaattattggaaggaagggaatttggtggcataatttcctcttcttgtggaacatttttcttattttcagcctcaattctcaccctcacaactcctgacttgtccacaatctcctgaatcagctttccattttttcctattactttgcctactaagttccttggaacttgtattacatcttcagcaaattcgagaaagcttctagcttttttcactgcatcctgatcctctccataaatatgaaatgtgcaggtatcttcatctagatcaatagcagtgaccccaggtacttttctagcttgctgaatattagcaccatgagtaccaatagctagacccatcagatcttctcttacgataaactgttcatgaaatctcgaggcaagctgccttgaactctccagctgcttactagcttcttcatttctcattatcagagacaacttagtgcgcagactccgaaagtgcatgtcaatcagcatatgtgctcgctttgaggtgacttcattgatggacaaaaatgacaagctgatacttttctggatcataagttacagaaaaggcaccaactgcctttttaaaatccttatgtgccgcctctttggcacacatttgtcgtaagtcttctggcacatccagcttgatcttatggaaagtatcttttgtggcaggtttgttgggattaacagatcttagacgttcaattgtgacaatttcattgtaagttgcatcacatgctgcatattctatcacataaaactcaccctttatcatcctcactttagctaaccaccaacagcaaggctctttttcatttgctctggaatacacctcaacttcatcactttcatttatatctttattataacctacaggaggtgggaatctgacatcatgaaatggaatctgcctatcaggctgccagttgttttcaaatgcac

SEQ ID NO: 135301 - DNA, 1433 bp, Homo Sapiens
  misc_feature (50)..(50): n is a, c, g, or t
  misc_feature (157)..(157): n is a, c, g, or t
  misc_feature (187)..(187): n is a, c, g, or t
  misc_feature (196)..(196): n is a, c, g, or t
  misc_feature (478)..(506): n is a, c, g, or t
tggttcgtaccgtaccccgctcagatcagtgcaagcgcgaccgcgggggngccggcagcgttctcgtgtgggacaccgccaaaaggcgagagagtatttcattccgcgtcgtggttttctttgcgcgcgtcgccgcgaatgtagaagaggatgaganagtgcggcccacgcgttgggctgaaaatgnaagcttttnggggtgcttctcccgcggtggggggtccaacggcaattttcgcgcgcgtttgttcgtccgcgggagatacgcgacagtgatggaggaattgtcgctctgtgccaggcgagggtagttggagtggtgctccccccctttggaagaaagtttttttctgtcgccgcccccgagctggccccgcccgggcgtgtttagggtagcgtaggggggtcgagccccccgctcggcgtgtagtcttttttcctttgggtgcaaaaagggggttttgtctctgagcttttnnnnnnnnnnnnnnnnnnnnnnnnnnnnngtttttttccaccttggtggcggagccccccactttttccaattgcgcgaaggggtcgccagcagcgataagagcgcattatctattgtttgccgcctcctcaccgcccggtgtacagcgcactctttttgcgtgtcggcgttgcgttttctctaggagaaagttctagggcgtcaccaagtttgtgtgttgcggcaaaactgtgggtccattccaaggtttgtgttaagtggtggtcgccaaaacggccaaagtggggtgctgactttccctttaaaatagggttcaggggggataatccgcaaagggaaacaagtggccattaacggatggctgtcccttgtgtcgcccaaaaaaacaaaggggtggcccttccccctctggggcttttgtgactggtaggttgagaaaaaatgggtggggttttcctttatatgtaaagtgttttttttcttcttggggcattagggtccaacccttgaattattggaaggaagggaatttggtggcataatttcctgttcttgtggcgcatttttctcattttcagcgtcaatcctcaccctcacaactcctgacttgtccacaatctcgtgaatcagctttccattttttcctattgctttgcgtagtaagttccttggaagttgtattacatcttcagcaaattcgagaaagcttctagcttttttcactgcatcctgatcctctccataaatatgaaatgtgcaggtatcttcatgtagatcaatagcagtgaccccaggtacttttctagcttgctgaatattagcaccatgagtaccaatagctagacccatcagatcttgtcttacgataaactgttcatgaaatctcgaggcaagctgccttgaaccctcgtgcggaattcgccacccaggctcgctacctagaccgtatacggcc

SEQ ID NO: 135302 - DNA, 1247 bp, Homo Sapiens
  misc_feature (808)..(1007): n is a, c, g, or t
tgagcgccgcacgttttcccttgtagtcacgagggtaggggctggagaaagcagcagagatagtcaaaaacccacagctacaaaaaatgcactcctaagagcaagtaatggcgagggctaaaaggcactgtgcccattctgggccattctaattaccacatttaaatggttttgagaaaagagaatttttatctgaggaacgcgagttcttttaattatcaggccgagagagacattcaaatgaggcgacaatcgcgccctactaccccttgacctgtgttcacctctttaaactgctactggtggcaacagcgccacaaacagctataaattaacctaatgacgccacaatggacactatacccacactcaatagctgaacaacatatagtcagtcactaatcaatttatttctgtaaaccagtgagaattcctcacaaacaagttcctattagtccactccctggcccccttttttgcctttaaaatccactgttaactgctaatcggagtacacattcagggcgccttgaatttgtgctcaagtgtggcccagattgactctgctacttagagtgaactgttgtctccgctcgtgtttcaggccgacagtttcctaaatgttagtattcagcctatcatgagaaatagtcaccatatctaagtgaggggggaaaagcctatacaggataatctcaattgtatatgaaatttatatacgtaaggacaaagatacatagtaaggtaaaattctggcaggtattaaggctgaataaattaagacagtccagagcggtctggctcaggnnnnnnnnnnnnnnnnnnnnnnnnnnnnnnnnnnnnnnnnnnnnnnnnnnnnnnnnnnnnnnnnnnnnnnnnnnnnnnnnnnnnnnnnnnnnnnnnnnnnnnnnnnnnnnnnnnnnnnnnnnnnnnnnnnnnnnnnnnnnnnnnnnnnnnnnnnnnnnnnnnnnnnnnnnnnnnnnnnnnnnnnnnnnnnnnnnnnnnnnccagcttaattcacgtaaattccagacaaacgtagaaagtggctcctttagtaagccacttgcggctgctgctcatcagggttcgcctggggccactgagaccacgcgcacggtgcccgccctcccgctgcggtccgattttctgaaccaaccaggcgcttccgagcgccttgccccagacgggcccaccgcctgcgcgggccgaggcggcgcacctgcgcctgcgcttccgcatcgaag

SEQ ID NO: 135303 - DNA, 689 bp, Homo Sapiens
  misc_feature (613)..(613): n is a, c, g, or t
ctatctcacatttctttttctcgttttactgaattactaagaactctagtagattactgatggttgtggtgttgggtattttcttcctgttctgagcattaatgcaaatgcagccaatgcttcaccatcaagaatgatgtttgctgtagttttgtgggaattttccttatctttctagtttgcttggaactttaggaatgagtattgaattttattaaatgctttttggtactcactgagatgatataggtcttttctcttttaaatcagttaataaattacctatcagtctatctaaaatggtgattcatcattacattcttaaggtaaagccttcttggtgatgttaaattttatgtgaatgcactacctaattcagtttactaatacgatgcagtcatatttacacaaatttaggcacacaataaaaaagtcttactttatgtataaaattggacataagaggaaatctctccaattaaaaaagattatctacaattgtatattttcatggagggcaagcctggtaagtagaacaaactggaattatgctattgttacatggcagtgccacttcagttaatccctattctttatgaatgtcccaaaacanaagcatgatttacatgcaaaggaagcactatcagatggtgataactagtcatggttatgttcgcctcgtgccgaat

SEQ ID NO: 135304 - DNA, 1000 bp, Homo Sapiens
  misc_feature (765)..(765): n is a, c, g, or t
ataattcctctatagcaaatttttatgtataactgattatacatatccatatttatatttcattgattccaagacatcactttttcaatttaacatctctgaaattgtgacatttcttgcaactgttggcacttcagatgcagtgtttaaaattatgcttgaataaatattacactaatccaactttacctaaatgtttatgcatctaggcaaattttgttttcttataaagatttgagagcccatttatgacaaaatatgaaggcgaaatttaaggacaactgagtcacgcacaactcaacatggagcctaactgattatcagctcagatcccgcatatcttgagtttacaaaagctctttcaggtccccatttatactttacgtgagtgcgaatgatttcagcaaaccctaacttaactaacaagaatgggtaggtatgtctacgtttcattaacaaatttttattatttttattctattatatgagatccttttatattatcatctcacttttaaacaaaattaactggaaaaatattacatggaactgtcatagttaggttttgcagcatcttacatgtcttgtatcaatggcaggagaaaaatatgataaaaacaatcagtgctgtgaaaaacaactttcttctagagtcctcttactttttattcttctttatcatttgtgggtttttcccccttggctctgatcactttaacttcaagcttatgtaacgactgttattaaactgcatatttaaattantttgaattatatgaaataattgttcagctatctgggcagctgttaaatgtaaccctgagagtaataacactactcttttatctacctggaatacttttctgcataaaatttatctttgtaagctaactctattaatcaggtttcttctagcctctgcaacctacttcagttagaattgtctaatactgctctattaatcaggtttctagcctctacaacctacttcacctcgtgc

SEQ ID NO: 135305 - DNA, 515 bp, Homo Sapiens
gcacgaggaattttgtttaaaagtgagatgataatattacatggaactgtcatagttaggttttgcagcatcttacatgtcttgtatcaatggcaggagaaaaatatgataaaaacaatcagtgctgtgaaaaacaactttcttctagagtcctcttactttttattcttctttatcatttgtgggtttttcccccttggctctgatcactttaacttcaagcttatgtaacgactgttataaaactgcatatttaaattatttgaattatatgaaataattgttcagctatctgggcagctgttaatgtaaacctgagagtaataacactactcttttatctacctggaatacttttctgcataaaatttatctttgtaagctaactctattaatcaggtttcttctagcctctgcaacctacttcagttagaattgtctaatactgctctattaatcaggtttctagcctctacaacctacttcagttaaaattgtctaatacagcaatattt

SEQ ID NO: 135306 - DNA, 1018 bp, Homo Sapiens
  misc_feature (936)..(970): n is a, c, g, or t
cagagccagttaatcagacaaagatgatttattttcatacctaaagcactttataatattctctggaaaatctaaaatcattctgttatcctaacatttttatactatcatcattttagaaaataaaaggcctgcgttatatactagaaaaatttcttcattatatgcaaaatatttatctcctctagtaaaggagattaaagaacaactgcaagaggaaggaaggtcctgaaagtgtttcatttggtatctacctaccccaaccccaagacataaagacagataaaggcactaagatgctagtatgtggctagtcctttcaataacccagtcagtccatacagataacccatgggatatattcaagccactctttgagccatcgatggtcattatttggttagttcacccaaggtaaggccataccagctgttaaaatgatgtagagattaatcaacagggctgccacttgcgaatcccctccaaggatgctgtgcaaagggtctcattggtcctgatgagtaatcttgtgactgtacatattcctgggtgcatgtccacaaatactgaggtatagcctgcatgccactaaaaataacaaaggtttcagggctggagacattgtcaaccacactgtcatgaccatctatagctccaggactcagtggtgggggaacaatatttaacggatgtcctggcagaagaagcctgtgagtacttcagcctcaaacacatagatcagcttatctgcagcagagattttcttggccttctctgccaggtttttgaggttcttggtgaagtatatgccagctccgtattttggatcgcaaggtgtcgagtacattctttgaaagccaactctgcataccacattgcagaactcccggccgtaatggccgaattcccgggcatatgtccggtaccgtcgactgnnnnnnnnnnnnnnnnnnnnnnnnnnnnnnnnnnncggccgcttcctcgctcactcgactccgctgcgctcggtctcggtttt

SEQ ID NO: 135307 - DNA, 737 bp, Homo Sapiens
ccaattatcaaataatcccactaactacaaaggggactgactactgggtggaacttaactggcaactgactttactgagattaagtgcctgttaaacataatgatctttcagcagaaaatgcagtatgtgcttttacactttgaataaactcaatttcagaacaaaaagaggctacttccatttccacatgacaaacattaaagacaactgaaccactctcaacactaattatgctgagaacttccagaaagtggattctctaaacaagatcccaagtattaggagctatttcttaaatagtttaaatttgcctttgaaaaaagttccattacttaaaagtattaatttaagcaaaatcatggaacacattgactaaaaaataccttttatttttactcaacttgttaaaggggcagataaagactttggcaaatttgattaactgcacaaaataatgttatccaaactgagtaatttattgctggtctgaggcttgccttgtttacacttaagtagaatttacgttgtttccacaaatggcagatatcaacatttaaaggaatttaatagtgacctattcaataaggcaatcatcttggtagcaaacttttatttaaatcttacataactcaagctttataaaaagccaacataattgaaaattgggttctccctctaaagccttaagtattcaaagctcaaaacagttaatttaaaaataagcaaacaaataaaa

SEQ ID NO: 135308 - DNA, 624 bp, Homo Sapiens
  misc_feature (527)..(527): n is a, c, g, or t
tttttagttgctccttgagtttttattcattgttttagcaggaactattaacaaataaaggctttagtttcatacaaacaaactgacaaaaaagatcttatttctctagagggtagggaaagtataaaattctgaattttcatgtcgagtgtgagccaagttagaggaacttggccacctgcaaaccactccctccctccatgggaaggaatctgaggcttcctaggtgaccaggagccgggcttcttttgttgccttaatttcctttcacctgagagaaaatgaaagccagggtctttgtgctccaggccaaggcccagatgctggctgcctgctccccagatgagacttcctgggctgcctctcccagcctgaaccagcaccatgtaccctagagagaggccaagtccccagtgttcccctggggcccatggaggcccctgcctgagcctgtggtcctgggagctggggagaaggtagagatgctgctgtcagaggtccaggctaaggacaagtggggcaggtanggcaggtgctgctggccatggatggaaaggcaggcaagttccaagaccttagcaggccaaggactgctcaggccccttgggagcagacccgctcccc

SEQ ID NO: 135309 - DNA, 1494 bp, Homo Sapiens
  misc_feature (147)..(155): n is a, c, g, or t
  misc_feature (341)..(366): n is a, c, g, or t
  misc_feature (510)..(614): n is a, c, g, or t
  misc_feature (715)..(715): n is a, c, g, or t
ctctaccaagcgcgccccaaggggtgtgtgtaattatccgccccgtgcgggagttccgagggtttttcccacacacccgccgttttgggagaaggggtttccccacaattttcggccacaaaaagtggctttaatggagaaattgtnnnnnnnnngctttctttccccaaatataagcgcccccggggcgcggggggggttttaattttgttaaattatagagactccgcctttgggaactccccctgttggaaaagaatcccccagagaaagggccctcccaggaaccgcaccccctgtggggttttgttctcaaaaacacccctgggttttcccccccnnnnnnnnnnnnnnnnnnnnnnnnnnaatcccaacccccttgtttcttggccccgggttttccctagggaaccacttatggcccccggtttccctttcccttctggggccgcggcggccccaaccaaaagttttgaaaatttctcggggggcggagggggcccccccaannnnnnnnnnnnnnnnnnnnnnnnnnnnnnnnnnnnnnnnnnnnnnnnnnnnnnnnnnnnnnnnnnnnnnnnnnnnnnnnnnnnnnnnnnnnnnnnnnnnnnnnncaacattaaatgactatttatttttcaggtttaaaagatttcaaaatacatatgtacaagataaataaactacacaaaaattatgtcatcaaatatatttnaaaaaaaattcaaggtaggcaacttagatcaccttggcaaagaacacattaactaagatgaaccaggacaagtcccctaaacatcaggatgaaatttcttttctatgcctactagctgactggccttccttttctgtgttgagttgtgtactctggagtcaccagcctctggtagattatcaagcatctcttcctcatcagccttttgtttctgtcttgcatgcttctctgtccactgtctggcattcttgaggaaggctggcttattatatttaaattctgaggatatgtcagccatgagcgggtcatcagggttgggttctgacatgagcagctgaatagaggtcaacacagttgcgatgttgagggatggtctccaagcaccttttggtggcaatttgagaacatccagacaaatccttccagcagaatcaatgtttggatgataaattggagtgagaaatcggatctgaggaggttcaaatgggtacctctcaggaatgataacttctagcttaaaaacacctttctcataaggtgtgttggctccacctaatatttgagctcgcaggtcatccatttggtctttatcttgccaacatgtgatgcctgggggtggctctgtggctaacatgtgcagctctctcttcagacgtgaagctctctgcatgatccccaagtagaaggaaccacacacagttcactgctccacactaagagctgcctgggatgcactgagctgacacccctcacaacgcagcaacgcgcggaccaacccc

SEQ ID NO: 135310 - DNA, 795 bp, Homo Sapiens
tttcccaaagggggtagggccaaaccgtaaggattcccacctttgtgccaaaagggacccccattttaacttaaagatggacccaaggggccaaagttccccctaaaccattcagggatggaaatttctttttctattccctaattagctggaactggccttcccttttctgtgttgagttgtgtactctggagtcaccagcctctggtagattatcaagcatctcttcctcatcagccttttgtttctgtcttgcatgcttctctgtgcactgtctggcattcttgaggaaggctggcttattatatttaaattctgaggatatgtcagccatgagcgggtcatcagggttgggttctgacatgagcagctgaatagaggtcaacacagttgcgatgttgagggatggtctccaagcaccttttggtggcaatttgagaacatccagacaaatccttccagcagaatcaatgtttggatgataaattggagtgagaaatcggatctgaggaggttcaaatgggtacctctcaggaatgataacttctagcttaaaaacacctttctcataaggtgtgttggctccacctaatatttgagctcgcaggtcatccatttggtctttatcttgccaacatgtgatgcctgggggtggctctgtggctaacatgtgcagctctctcttcagacgcgaagctctctgcatgatccccaagtagaaggaaccacacacagttcactgctccacactaagagctgcctgggatgcactgagctgacacccctcacaacccc

SEQ ID NO: 135311 - DNA, 1222 bp, Homo Sapiens
  misc_feature (342)..(371): n is a, c, g, or t
  misc_feature (418)..(427): n is a, c, g, or t
gcctgcacagtgtgaggaacttaaatatttactagatttgaattacgtacatttgcactacaataccacactaaatagatataccagcagagaatcattatcaaatgacttaaatgaattgtcagtttgtctttacagactcaacagaaaacatatttattaatatgaacatatgaacctttattaagtggctcacatttcagtataaatcacactaaaaagatatttaaaagctatttacactacagtgctgacacatttaaaatgaaaaaaaaggatataaataagctctatggaaaagctttaaattgttgaaaaagaattctggctcatattacaaannnnnnnnnnnnnnnnnnnnnnnnnnnnnngttaatgtcagctctattctaaaacctaaaattccaacgtaaatgannnnnnnnnnaaagactcctttatgtttaaacctgcaatgtttacagtgcatctggccctaagtgcttaatacttcacagttatggacaggcactgaggaatgttacaaagctacataaactatgttttgtaacagacataggagcaagtccttggcttgctttcagaattcatgaatctttattacattaaatttttttaaaaaaggattttagatggtatatgcaaatttagcacaaaatgtcatcgtcttttttatcttgatttgaatgtgctgaactgtgttgccttgtatcaactagacttagatttccagggcacaattcttcctttaaatctttgttgctattttcaaatttagaatccatgtcaatcttaaattctgcaaattgaacatgatccaattttgctttaacattcttgccatccatattattcagtgctgtagtcttttcaggaatattaacattcacaggttcttccttgattcttacagatgcaataggttcatgtttaatctgctgtaattcatatttagaatgaagtttatctgaaaaaacagaatccaaggaggctttgcttacagcacaaatcatgttgtcagtgtgaggtccaagaacagatgatgtggaatctgatgatgtgcctgtttcatgagtagctgtattctgagaagtgtcctcctctgagtgatataatttgagccgaatatgccatgctaaactgcatacagctgaaactgtcttgaactgatgaacacattccttggaataaaataaatgtcattatcatatagctgaatcct

SEQ ID NO: 135312 - DNA, 1182 bp, Homo Sapiens
  misc_feature (903)..(911): n is a, c, g, or t
ttttttgaaaccaagttcatctttatttaaaggattgacaatcccattttaaacaattctttgatttacaaagagggaggtagactcgttagcctcccaaccttagcttaaatcgtgatgttgccaggttcctggtggttcagctgaatcctagacagtttcccttctcttcataaagctgagaagaacaaaaaattatctccatctaggcccacgggaattttgtgcatagactgtttgaattggtctgaaaagtgtgactagctacctaccttttcacaatgcctagaaaatgggctaccagatatggtagtggtcaaagccccgactttcctgtctgaggtactgggtttgctctaaggtagaccttggcaaggcccctaatggtccgtccagcagagtgatgctcgtgtccctcggctgtcaggtgagcgtgggtttgtgaatcagctttggataggatcatttctcttggatttaccactaggctctgtccctaacagggtctacctacctgacccccaagctggctcagtctcagcgctaaggtgtactatggaagggtccggacaaagactaatatttgagatctcttagtagcacaacgtgaaaatggtaggggattttgtcctccaacaccaaagacacttgcttttttaagaacaagaggatgtgtaattcactgaataaaatggttttcctccgtctaggggggattctagcatctgcccttccatttttgttgagagaagtattagctgatctctgaaatgcagatgttaagagagtaacaactgggttgatccacctgttgcttttacaccatagctccattttccaaaaatatatatgtatgtacatatatatatttcagatttacagggaatttttttgtgaacaagnnnnnnnnnttgtctatagaagtcacaagtgtctttcttctcaggagacctcaatgatttccatgctgcccgaaaagctagactgactgcccactttccccagctcttcccgtgacctgttctctgacatgatgctctctccaaattccatttggcagcttctgcgtttaaactgcttttcaaaggggctctcttcatgccagctccgccgcgagtcagctctgtcacttggcttctgccgcctgcgcacagaatagacttggtctccgcaagtggcagc

SEQ ID NO: 135313 - DNA, 414 bp, Homo Sapiens
  misc_feature (337)..(348): n is a, c, g, or t
tttttttcagcttcatttacaaatttattctaacccctctccccaaattgcaaggtacacagaattctagctagcagaacacacgagcagtgaaccatcctctggcctcttgcattttgagaggacgttctttccacttccacacactctggccacccctgacgccgcagtgggggaagtagatggccctgctgcccacgatgactggctgcctgtcagggcagggcagggctgagtgctaagtctctgagatgtgagagcagcactccatctgggtcaggacagcgctggggtcaggaattggagctcctgcctgtgttcacactcccacctctgnnnnnnnnnnnngagttgagtctcactctgtcacccaggctggagtgcagggtgacggagctagactgtctccgaaag

SEQ ID NO: 135314 - DNA, 366 bp, Homo Sapiens
  misc_feature (40)..(40): n is a, c, g, or t
  misc_feature (43)..(43): n is a, c, g, or t
agcaaaggagttcatgtttcaatgaacccaggtgacactntantgctgattgttcaatgacttggatttcttaggtaatagctttacttgatatattgtgtatttttggtttaattgttggtcagtttggtattccatatggtagtgctactcaaaatgtgttgtgaacccttggtggcccatagagtcaaaactattttcataataatgctaaaacattatttgcctttttcattgtgttgacgtttgcagtgatggtgccaaagcaatagagggtaagactgttggtgccttagcatgaatcaagatagtggcaccaaacttgactagttatcactgtattctttgctatcacatactcactgt

SEQ ID NO: 135315 - DNA, 1336 bp, Homo Sapiens
  misc_feature (488)..(510): n is a, c, g, or t
  misc_feature (726)..(740): n is a, c, g, or t
  misc_feature (1246)..(1276): n is a, c, g, or t
tttataattccattttttttattattcaacattttatacataataaatacaaactttttacagccactgtaaagaaagcacatctgcacagaggctccctccgagccctgacctgtgcactgtggtgctggattccatatcctggatggaggggttattttttaaaaaggaggcatgttttcacaactttgttttttaaaataaaattagcagctcttccaaaaaatattttaaaatacaacaaaagatttcaaataaccctttgaggttgtggaaaacccaaattcaaggacaatttggctagctaaagacagaatacaagactgggtggcaagaactgctctatttaataagcatttgaagatttttaatatgttagcaaactttaaaatcttaaaaaaaccacccttttaatttcttttttaaacttaagaataagtttgataaacacaaaagacctcaaatagatcaacaggttaagaagtgtnnnnnnnnnnnnnnnnnnnnnnncccaaatcatggagaagattcattaatgggtattgtcactgaagtgatcaaagaactaaaaatttcttcagttatcaccttacttttggtcaaaaatcccatggggacatttggcgagcatttcaagttttttaagattcttaggagggatggagttttcaaagcataatacaacttgtagattaaattctgcaaatttgatttcttaaccaaggnnnnnnnnnnnnnnncaaaccacaaccggcgaacatcccttagtccctaggtattgtgctccctaccttctacaggagcggacagcggacagtcagcacctgacgtgggggcacctgctgctgcaggcttgctggcctgcagagaaggccactcctggctttccctgtgacacacagaagacacttgtcttttcctggtcaatctgtacttgtgcagggtgcgcaatccttcagtcctttctcatagaaagctggtttcctccacgagccaccaggttcttccttccacggaaatgtcagggtagtgggacctggaagctgcattttccaccatagcagttggtctggaaccagcccacagcctggctgtctgggccggtctgctggcttgggaataaaataatgccggggcgtccccagtagagaagctcaacaatgcaggtatgtgtcctcaacttatctagacatttggattctaaggatactggtaagaagagtatatgctgtaaaaattaagatgnnnnnnnnnnnnnnnnnnnnnnnnnnnnnnngaccgcgtatgcggccgcaagcttattccctttagtgaggttaatttaggttagcactgc

SEQ ID NO: 135316 - DNA, 1110 bp, Homo Sapiens
gctcgttgtgtccgtggctgtttagtgcttctttgttattggcgtcttctcctgttctttctgtgttgtcgtggttgttctcttttgtctttcctgtttcctatggttctttctgagtttgtgttattcccttccttgttcactgtgatgtctacccgttccctgttcttaccttgaatccgtgtggttcctcctgggtaagttgtcacgttcgggccttctgtatgattttgaaccttgtaacttacagtggccagttgatgagttatgtcccccttcaccctgagacttcctgttgctccgcgccttccgcctgcctcagccttaggacattggtacagtcttctttgcttttgcccttcgtcattccctccttctgttatcttctcgtgctttctggattgaagtgccctggctctcgttcctggtgccgacaagtcatcgttctctaggctattgctgtctaaagctttcctgacggtctgacttggatgttctgacatctcacacctctctgtactttctgcttcacaggcatcactaatgtcctgtgagggactttcatgttcgggcagggtgcagcgatctgcgtcttcgctctttggttctgcaggactgctttgagtggcaccatctattttagcattatcttttgcaacaccttcatctaattcttcaccaccagccctcgggcctgatgattgaacggtgtcatcctcgaaaatctaatgtgtctccatcagctagtacctcctcagctgctgtttgtacatcatcaccttcttggtcaagttttccatccaacttaattttaggattctccggacaatcaacattttcactgctttctgctgcaattttctgttttggattttcagtcacctcgttttgggcttccactgctgactttctgtcagtagactttacctgctcttcttccttaatttcacttaaatctgtgttctgatacgttaactcttttttaacatctttaagggtttctacgggtactggggattttttcggacgcgtgggtcgacgatatcccgggatatccggacctgtaccagcctgctttgtttgaacacactggtctatagtcacatagct

SEQ ID NO: 135317 - DNA, 460 bp, Homo Sapiens
  misc_feature (150)..(159): n is a, c, g, or t
ttttttatgattcatgttcatcctgttttattccaaagcaccaaagcactttaccgaaaagccccttggcccagccaaaaagttcagggccaggagccaggacacctggactccagatctgcatgtggaagatttggaacgttattggtnnnnnnnnnntctcaagttctctgtaatgtggcaagtgccatctgtggaggactttacaattttacatacatcatctcatttggccttctgatccctggtgagagaagcaaattaaacaggattggtattttaactttacggatacgaaactgggaccagggaaggttaataaggcactcagattcacacactattaagaaggtggggaagttgggacttttgattccaaaccctttgctctttcctagtcaaaacaataaagtcagttctatgcctctacaaacacacacaccccctattataatatgtc

SEQ ID NO: 135318 - DNA, 1171 bp, Homo Sapiens
tttgtgaagaagcctagaatattttatatttacacggttaaatggtcacaacatttaaaaagccgtagaacagttatagttcatatattaagtttagaattaaaagaaaaggcaatgtttattagctatttcataaatcttctctgaaaagttctcaattcttctcactgaaacttgtaagcaactgagcagcttctgtctgtatctgtttatcctcctctgtgtgtgctggatagtccttggctttcattagccagaaagcagcaagctttttgttgtgtagtttcaagtatgtctttcctaaaagaagtaagtttttgctgtagaagtttggatccacttgttctgccctgtgaaagtagcctaaggccttctcataggtggaactaggaggagttgcaaacagcattttagcaattcttctttgataccaaggcatttcggcaaatgtatagcaccaaatacccataaggtgaattgaagtagcatctttagggttcagttcaattgctttctcaaaatgctccttgatgatatatgcatttgcaattttagccttgatgccttcataatctccaacatcactaagacagattgcataccacttatgagatgcaaaacttgattcatttttttctagtgctctttttgcatactctagggcttcatacaccaatagctttttctcctcttctgaggttctgctaagctgagctacatcacgtgatgcccgtgccaaacgccacagtaactctgcatcttcactttccttgtattgggttagcaactgataaagtttttctgtttctccgctttcatacaggtagtctgcttgttcaagtatttcttcaactttggctgtggcatgaaccacagcagcctgagagataacctggtaagtttcaaaacccaaatacgacaaagctgagagtaaaaggcctcttttgaaagttcctgggtttcccattacctcgaagccgcggaatcgacaggggccgcaatgcccgcggctgcccgaagtccccgcagggagacgagaccccggggcggctccacgtcggaaaggcagaaggcgccacagtcgagcagccagcgccatgacctgcaacttgcgggctgaccctgcactacttcaggcagctacggaggcgggcggggctaaaggagattc

SEQ ID NO: 135319 - DNA, 854 bp, Homo Sapiens
  misc_feature (288)..(288): n is a, c, g, or t
  misc_feature (317)..(317): n is a, c, g, or t
  misc_feature (323)..(323): n is a, c, g, or t
  misc_feature (332)..(332): n is a, c, g, or t
  misc_feature (350)..(350): n is a, c, g, or t
taagacaggtcattttaaggacaaaaaatatagtcagctctactttatcaaattagttatgtttctagaaatcaaatgtcattagagaatgcattacaaaaacagtagcttaagtaggacaaaaagagtttcagacttaacattgtatgtaggaatttcaataataatggactcttaaaaattcactagtacaacgaataaattcagcttttgattatattttgtttttactaaaaatcactagttatgatttaagagaactgtcaaaatagctgagttacacgtgantaatgttctttcctttctgcacatgatgnttagtnttggtaccnaagttctaaacagcaacncaagttattaccaagaaggtagtccatattattgtaatcttgatgattgaagtgttacgttcactttgggtgttaactctcactgttgaagaagtgaccattattttaagatgatttacttcctgacttaaatataatatagcagtagatctttgagacaatgcttttttaatattgtcttctttaatcttttttattatgtttgggctctttgtgtttttgacaggccttaggctactttcacagggcagaacaagtggatccaaacttctacagcaaaaacttacttcttttaggaaagacatacttgaaactacacaacaaaaagcttgctgctttctggctaatgaaagccaaggactatccagcacacacagaggaggataaacagatacagacagaagctgctcagttgcttacaagtttcagtgagaagaattgagaacttttcagagaagatttatgaaatagctaataaacattgccttttcaattaattctaaa

SEQ ID NO: 135320 - DNA, 2962 bp, Homo Sapiens
  misc_feature (47)..(47): n is a, c, g, or t
  misc_feature (56)..(56): n is a, c, g, or t
  misc_feature (68)..(68): n is a, c, g, or t
  misc_feature (80)..(80): n is a, c, g, or t
  misc_feature (91)..(91): n is a, c, g, or t
  misc_feature (113)..(152): n is a, c, g, or t
  misc_feature (161)..(161): n is a, c, g, or t
  misc_feature (190)..(190): n is a, c, g, or t
  misc_feature (368)..(368): n is a, c, g, or t
  misc_feature (390)..(390): n is a, c, g, or t
  misc_feature (457)..(457): n is a, c, g, or t
  misc_feature (474)..(474): n is a, c, g, or t
  misc_feature (545)..(545): n is a, c, g, or t
  misc_feature (693)..(727): n is a, c, g, or t
  misc_feature (885)..(894): n is a, c, g, or t
cccgcacgtgcgttggcgagaggtgtcgggcccccccgccggccccncatacccanggcgaatcatangaggcggccgtntgtgtatttcntattacgtatcatcggctaaannnnnnnnnnnnnnnnnnnnnnnnnnnnnnnnnnnnnnnngttttgtcntccgccacggccctggcgagcgcgcggcncacacaggacaggtaggatgtgttggtgacagagggagaggtgacgaaggagaggaggggggagtgctggctgctcggtgagcggccgagcgcgcgcggggctcagagttgttggggcgagggggtttatgttagttgacctgaacccgcaccacccatttggcgtgccatagctccncgcctctcggtcccacctgcanccgcgcctgggcgggggacagagtgtggggccgagcacaaacacaacagagaggtgtgtcgcccacncccccccaccttttgtntgcgctcgtagtaataaaaaacgaagatagtatagagtaggcgctacgcgggggttgcgcccttttttggntctgtcctaaccaggtgtgcgagggggctcctcctgccttgcgaccaacgtcttcctcgtcttttgttttaaatatttccgcgcgtgagggagggggcgctgtggaaaaaataccccacccatcgggagtgtttgtttttgagagacnnnnnnnnnnnnnnnnnnnnnnnnnnnnnnnnnnnttttcagctcagcgcaaggatttccaaaaccactgaggcggtgtttacccggaggttccccctggggaaaacagtgttgtacggacgccggggggttgcgccagctgggccggccgcgcgccccaaaggagggggttatataaaatttttggagggtnnnnnnnnnncgccggcgagatggtggggttgcgctgtgggtttgggggagtgcgcccttgttgtcttgtggcggggggccgatttggtgtgcgactgggggtgggtggtgggcgtctgtccgttttgggtttttgtgcaatgaagtcaggtttaattttgagattcctgtgccctcactcacgcaaggaggaagtcacctggctccagtgaacacgtgtggaacagaaatcagggccactgaaaagccaccacccacttgagagggcttgttctcaacaaacctgactcagatgggcccactttgggcctttagtcagatttagagaaaacccccggctcatccaatcaatgtgcaatcaatttctacaccatggcagaggtaggaaaagccagtcacatgtccaaatgatgagtgaaaatcaaggcatcgtggagccacctcctccagagggggagccacaatctcaggaccccgaaggagcagacattttcaagtggctcctttacattaagcaaaatgtggtcctctcattcgggtctgaagcatcatttgtgtgtgagcccggcccactggggacctctggctgccaggtggagagcctcctggtgcagatagcaaggtggagggcagaactgcaaaaatccagggctccagtatggatgtgattcccacagagttcagtcccctttatttacccaagtcccatggtacaaatccctggcctgccaccttgcaaatcccaccgagctcttgattcctgctcccctgatcatggtgttgctctctgcatgattagctgctggttctccagacactgcttcagcttgtcttctgtcagtgtcaaccgctgctccagaatggagactgtctgagtgaggacatccagctggcccacaatgtgctccagcgtgctagtcagtgtctggggcacactcacgggctcctggggctggctctgcacagacttccacactcctgcctctgcctggggggaccagggaagtccacttctggcagattccccatggagctggccagtgtggctgggggcctcggcactttcgtgacttctccatgatcaacaatatcaaagttactcttccagaccatcacttgttcatcagagcctccagaagcgaaatactcccccgttcttgaaaaggcaacagtggtggctggtccctgatgcccgtggagtgtgtagagcagccggccctccatcaggtccaggatcttcagggttgagtcactggaggctgtgatcaggtagtttcccgacgggtggaaagagagcccgttcactgctgcactgtgcaactgataatgctgcagcagccggtgagtccgcacgtcccacaccttcactgtgttgtccatgccggcagcggcaatgcacgtcccactggggtggaagtccacataggtgacaaagccgccatgctcacaatacgagtggacacattcccggctgctcttgtcccacagcttaacagtcttgtcatcactggcagacacgatgagccgcccgtcgggggagaacttggcacagcggacccagttgatatgctggctcagggagaacaggaatttctggcgatgagttgcccacactttgactgtcttgtcgtcagaggctgtcacgaaggactggccatcactgcagaagtggacactcctcactgtggctgtgtgtgcacgaaacacagtggactcacctttgacattgggtacccagatgcggacagtcttgtctcgggagccggaagcaagcaggtgtcccgaaggagagaagttcacacaggtgacggcatccttgtggccagtgaagcggtaggcgcgtgactgcggcttcatgtgccagaccatgaggcatgagtccatggagccactggccagctgctttgtgttgatactgaagtccacacaggtaactgcatctcggtggcccttaaaatgcctttccagcgaggggtcctccgcgcagggcgcagccatggcggggctggcggcgccgaagcagctgcggtggccgttgcctcgtgccgaattcacacaccaggcctcgtactagctat

SEQ ID NO: 135321 - DNA, 582 bp, Homo Sapiens
actatgattgaactttaggcatttattgaaaacttatacatgccatataaacaaactaaactcttttagctgctataccaagtttccataaaactgtctgctggttggggaggctacagcctgaccacattctttgccattgcctacaaggggtaagaaatggcacatggaaacatggcaggccgactcacgaacacaggcctgggccagcgctttcttcttcctcttttattcccatcagtcctagaccagagagtgaaccatgagtgctcttggttcctggcagcaggatgaggcagagagtgcccgggcacaagctgttgtagagctttccaatcttccggctccagcgccaggctgctatcttcgggtggtccagtttcagagtctgcaaggcctcctgttcaaaggggggaggtacaacacgaagccctgggagccttgttgattcaggtggtaagcctctgagccaggcatggaggtgcctgggggttagggcatgcctgcctttcagcttccagtccttgcctgtgagaatgttgagggcctgctgggcactgccaaaacttttgaatttcagga

SEQ ID NO: 135322 - DNA, 1013 bp, Homo Sapiens
  misc_feature (466)..(506): n is a, c, g, or t
cccccaagtgaggacctaactccaaataatacaatagaatatgcaaattatcttcacatcaagagtaccccaagaaaaacgaaatccatggcacagacactgtacaagggtgcagggcagggctctgaggggcccaaaccccattttgccaactcgattttctagcattgaagggagcaaggggtcaggcatatgatggagatgatactgaaatgatttatccaaaatccatgcaaatcaagttctttggatagaggtgaagaacttggacatggctgtttcaggcagctgaagtcaaagggaatagtaattggggaaggggaagtgggcagaaaggattgttggccaatagaccttccactccagtagagagggaggacttggctctgagaacctccatctgacctaagaggaaccctcctctcctatggccatctcctcctcctgtcctttaagtctcttgtgnnnnnnnnnnnnnnnnnnnnnnnnnnnnnnnnnnnnnnnnnagcaaatttcaattgtcctgggagaaaaggttgctgtcatgtccgaaagccctgtggaggcgctgaaggagttggtgacagctgaggaagggaagctgctgacctgggccgggaaagcagggggaacagaggagtacgtggtggccaccgacggggaggggaagccactgtgcacaggggatgggtaggtcgaggagccgggagaggagaaggaggtgggcacaggggatgggtatgaggtggtggccggggatggataagaggtagtaaccggggacgggtaagaggtagcaaccggggacgggtaggaagagagagaggaggtggccgaagaggccacaacacttttgtctgctttcttgtccttctgccgcaagtggatcttggtatgcctcttgcgttcatcgctcctggcaaactttcttccacagatgtcgcaggcgaagggcttttcgcctgtgtggtgcggatgtgggtggtgacggtgctggtgcggggatacacgct

SEQ ID NO: 135323 - DNA, 697 bp, Homo Sapiens
ttttgggtgttttgaaagtgggtatttatttggatttatagtaattggcaaaattcagtccttggaggcgaaagtacctctcccagttaatgggcaaactggagaaagggcctcacctggaaactgtaggattcacattgtggacgctgtctgctaaagtgagcaccattaagaccattttctagctgcagctttcctggaaaacagcacaataatctcttaagtggctcctggtagctggcaagaccatgcggtgctccaaaaggaagttcaggcgagtgttcgctgtcgggggtttgaatccgtggatacagccccagcaggtttttgggcacatagccctcccggtctccaaggcgagcccaccaccacctcagtctcgcttttcgtccttgcgcctcaggatggtgagggcgtccccttcgtggaaggacagctcgtcactgttctgggcctcgtagtcccacagagcatacgccacacctttgttcatcacacccagcttttcctgcaccccatatagaaactgggagcactggatgtagccttcctccatctcctcacacttgtctgcagcagtttcaatgtcgcttatggttgaggcaaaaatggcggcaccactctccaccagctgtttgcagaggtgaacgctgttacaagaggcagcgcagtgcagcggcgtccatccatcactatc

SEQ ID NO: 135324 - DNA, 353 bp, Homo Sapiens
ttttttgaacttatttagaattcatcagtttattagtttggaaaaactgtagtttctagcttatgaatagcacattcatcaagttggctcttcatctatatcactactttcctaaatgaaacaataagatatctggtgatttacttcctacaaagcaaagtcaatatacataaactattaagtcaactcataaaaaatacagcatgtatttaacaaatgcaacttctaatatcaagagattatcacttaaaatgtgtctatgtatgtgtgtgcttgtgtgccaggcagttttgtgaaatttctcaactttaataatcgaaattccttattgggtctgaaattattctaacagc

SEQ ID NO: 135325 - DNA, 728 bp, Homo Sapiens
cgtttttatagatttattttcaaagagtaaaacacatacaatttaaatacaagtccatcagaatcactctgtcagagtcagcaagaatgccaaatgtgtcctcactgccagacattcgtcactatcatctgagtcctctctcagcaaagccaaagggtctgatactttattcatatacatccttcttatctgcaatgtaatctacaatttcttgtggacacattaacttttcagcatctatatcaggaatttcaaacccaaattcgtcttccatggccatgataatctccacttggtccgaactgtctaagcccaggtctttcagtaaaatgagaagtttagctgaaagcttctctgggtcaagtcttgtcatagaggtttcaatacgtaaagaagcagcggtcctggatgccctctaagcgtcaaaggaggcatgtcgctatactggcggcacaactgtgtaactctaccaggaacctgcgcgagcactaaggccggctgcaaagtgcccgagcctcgtctgggtccccgcggagcagagagcggtgctgagaggccgggccacggccagcatccggacccggggcagcggcgcaaagccgcgggcaggcggctgacataggctgaaaggaccctcgtgccgaattcgccacccaggcctcgctaccttagaccgttatagtactgccgtcttttaacctgggtttgtacaactgtgcctcacggaa

SEQ ID NO: 135326 - DNA, 925 bp, Homo Sapiens
  misc_feature (158)..(162): n is a, c, g, or t
  misc_feature (164)..(165): n is a, c, g, or t
  misc_feature (168)..(169): n is a, c, g, or t
  misc_feature (172)..(172): n is a, c, g, or t
  misc_feature (174)..(174): n is a, c, g, or t
  misc_feature (176)..(176): n is a, c, g, or t
  misc_feature (178)..(178): n is a, c, g, or t
  misc_feature (180)..(180): n is a, c, g, or t
  misc_feature (182)..(185): n is a, c, g, or t
  misc_feature (187)..(187): n is a, c, g, or t
gtttccgtgtgcccccgggattttttccctagggggaaagccgcggcttatggcccccagggttcccctttcccctaagtgggggccccgcggcgccaaaagagaatggttttaggaaaggtttcttgaagggcccgagggcggcccgaccattttgnnnnntnnttnnttntntntntntnnnntngggttttatagatttattttcaaagagtaaaacacatacaatttaaatacaagtccatcagaatcactctgtcagagtcagcaagaatgccaaaatgtgtcctcactgccagacattcgtcactatcatctgagtcctctctcagcaaagccaaagggtctgatactttattcatatacatccttcttatctgcaatgtaatctacaatttcttgtggacacattaacttttcagcatctatatcaggaatttcaaacccaaattcgtcttccatggccatgataatctccacttggtccaaactgtctaagcccaggtctttcataaaatgagaatttactgaaagcttctctgggtcaatcttgtcatagagtttcaatacgtaaagaacacggtcctggatgccctctaacgtcaaaggaggcatgtcgctatactggcggcacaactgtgtaactctaccaggaacctgcgcgagcactaaggccggctgcaaagtcccgagcctcgtctgggtccccgcggagcagagagcggtgctgagaggccgggccacggccagcatccggacccggggcagcggcgcaaaggccgcgggcaggcggctgacataggctgaaaggacacgagacgccatggctacgccaacccaggtgccgaattcgccacccaggcctcgctaccttagaaaccgttatagtactgcctcttttatacccgctgtttgacactagctc

SEQ ID NO: 135327 - DNA, 1448 bp, Homo Sapiens
tgagccaaagattttcttcccccagtggttacatgcatgaagggcagaggggtggagttgtccctggggtgagctggcttgtgtggcatgctctgtctatacccctcagcaccactgactgggcaaagcaaacgtgttccagaagggctccccacatgcagacagtggggttccatggggtggctcttccaatctgcatcagggaatcaggaagggactggcctggagccaaggggaaagggatgattgctcctgctgtcaccacctttttcccacagaagctcagcatgtcagccagatgaaccatggaaactggagaggaacacaggcgataaggaacagtgactgtgtccagggctgtagccaggatggcactgcagtggaagggcagagtggcatcataatgcaggtaagggaagctgacaggtggctcgggtcgcaggcccaggctcccacccaaggacaaggggcagacaagagagctgtgagcagtcaggtgcacgagaccaaaagctgtgtttaatagacgatagatgtttctctgggcctccccacgatggtagggaccaggtagcaggccccaggttattattccccgccctgaatattcatcttgtagcagctctgccgccttcgcgcctaccccagagaagccatcgtgcaggtcacacaggatctggaagccctgcaagtagtcacattcctccacgtagaaatgcagcctgtcctccagctcttcctggtacttgggttcctttaggacactttccccttggccaaaagcctccagccgacctgcttccccatcgtggttgtacttctgaatcatacagatgctccggggatggagatggactctgaggaagtctgaccagaccctgatgctggcctctgtagggataagtggttttggagttgtagcggtggggagtggtgaggaacctttgccattgggaatggatttgaccctccagacaccatcactactcagcactccctctgcactcagaaagtcttggagataagggttcttgggatagagttcctctttgtgtgtggtgagcttcccctgccatgctattgcagcatccaactgtttgtccctgtagagtccaccttcctcttttagggagctcaaactacccttcagatccatgaggatgagtcgcggcgtgtaggtctcctggccgtgcagcgtccggcccgtacgatacaggacgtcggggcacagctctcccgggggctccttggaatcggtcgctcggcccagcgcagcatcctgctggttccaccagtgcgcgcccacgaaaccggcaaaatgtcccaactgcagtgtgagcacctcccgggcccccggacgcgtgggtcgacgatatcccgggaaaatccgacgcggtaccagcctgcttttgtgtaaccacggttctataggtcactattgcgttgtt

SEQ ID NO: 135328 - DNA, 1510 bp, Homo Sapiens
  misc_feature (1478)..(1478): n is a, c, g, or t
ccgggggctgcttttatggggacgacctgacagagggcatggtccgtacaaaaccgggaacaatacatacatatatatattatatacagagatgcggccctcccgacggctgggcaggggtggccgctggcccaagcagcccgaagcggccccgcccacccggttccgccccctccatctgccggggtgaagtgcgcgagcccaggactgagacagccagctccttcaggggatgggggcacatctggggataggaaggggtggggacaagaaatactgatcgaagtcatggtctatttacaggggacaagaagccaaaacggatgggatgggtggtctgtttttaaaaaatgaacaaaaacccagttagggcaggggcatgaagtggcaaaatgagatggattttgaaaggggaggggacctgggggagggggtctcacctcccttggtccaagccccaatttggggttaaagtggggaaacagagtcgatttcacttagaaggcaggctgccagcagggcagccctggtctccaaaaagatgagtagtagtaaaattttgccctccagtcaaaacattggaaaaccagtagggggtggggggcgaggctgactccctgcaatgtcagtaggcttccaggcatcgccctgggctgggcagacagggcagcacaggataggacctgactctccagggagaaatgttccccttgcctaagaccagggtcgctgtagccagaccccctttcctccctggcattcccaggcttgaccaggaaacctggaccccagagaggccacataacagttccaagacgaggttatggctatttggcacctggaagaggggaggcacaaggagaaattgagggctgctgccccaggcaatggggagctggggaccaggtgtcctgaactctccctttttcccactctcactcccccttttcccgaaggacacatgagaaatcagtgcagggccagggccaggcccagcctccgggctctggggtggactctatccctcccaggacagggaacagggatgggggaggtgttgaggcaacgcccccaccccccaggcgggagggtcagaatgcaacagagacggcacaatgatggggggagagggaagggccgagaaggtagaatctcaagtcaagaggcccaggggccacccaggtgccccatgggcagggagcagcccccagttggcagatgctgggagagccccagccccgttccagtccagagacaaaagctggagtgtgtaaagtctggcagtttgatctgcaggtgcttgtgtccgtcgaccaccaggccagccctcggcagccctcggcctctgtgcctcagccccatggggcaagaaagaggctgcccttctagccacctctgtctgcccaggccatcttaagggggcctgtgcctcgtgccgaattcgccacccaggcctcgctacttaggacgtatggggncctgaggcgctctctctccgtgctccgtgtgt

SEQ ID NO: 135329 - DNA, 790 bp, Homo Sapiens
  misc_feature (380)..(417): n is a, c, g, or t
tggggtgaggcccagagcctgtgccaggctgtggacgagcacctgcgggagactcaggcgcagtaccaggccctggagcgcaagtacagcaaggccaagcgcctcatcaaggactaccagcagaaggagatcgagttcctgaaaaaggagactgcacagcgtcgggttctggaggagtcggagctggccagaaaggaggagatggacaagctcctggacaagatctcagaactggaaggaaacttgcaaacactgaggaattccaattctacttaacaggaatcattccatgactggacaataattaacccccctcccattgtcctccctcccctgtcctcaacaccccacccctcccccttccagcctggggacaggtnnnnnnnnnnnnnnnnnnnnnnnnnnnnnnnnnnnnnngcttcagggaccagagggctcatatcacaggcccccttaagatggcctgggcagacagaggtggctagaagggcagcctctttcttgccccatggggctgaggcacagaggccgagggctgccgagggctggcctggtggtcgacggacacaagcacctgcagatcaaactgccagactttacacactccagcttttgtctctggactggaacggggctggggctctcccagcatctgccaactgggggctgctccctgcccatggggcacctgggtggcccctgggcctcttgacttgagattctaccttctcgggccttccctctccccccatcattgtgccgtctctgttgcattctgaccctcccgcct

SEQ ID NO: 135330 - DNA, 567 bp, Homo Sapiens
attgtgaatttacatttctttaaataatatttaatcaatgaatcacaaatatttaacctgtcattatgtcaccccgctggacaataatggagagagtggggtatcactgctgtcttataacttttaaccccacaaactttatttgcatccccattaaaggacaaggccatgctccatttctgatctgttcctgggtcactcagaaactgaggctttcagacagatctgtgcagtgatgagaaggacaactttttgaaatgtggagaaaaaaatatgacatcttttaatgtcaggcttcttatctgagcaaaaaacatgtatcatcttttctttttgtcagtgtgacagctggatgacaagaagacctacaactgagtagaaggctgtgacttctttccttctcctccatgctatcaacatgagtctttaaatgtcctgtaagattctgagattttaattttgaatacaacctcctaaaaagtgaggtaaaaaactatcttcaacttctatattgcaaatttgttgatactaccaatgcacgtgtttaactgagatgcataaaagcct

SEQ ID NO: 135331 - DNA, 1559 bp, Homo Sapiens
  misc_feature (1533)..(1533): n is a, c, g, or t
gttttcaatgttgatgtttttattaaggctttggaagagtcttattattttacataataattttcccaactacttttatggaatacctcaaaagaaagaaaatttcttttacattatagaactgatgatactgccctaattgagccaaacatagaaaactttggaaaaaactttctataaaacagtttcaatataattttattagcagttattacatcaaaattcacatttagaggatccagaggactgtcttagaaaattctaaagcatatttaattaggttttaacagtaagggagaacttaatataacacagcccttaaaaagtcaagactactactgaaaattaagtgcagttctatcaagaactagaaatgaactgcacgcgtagtgtcacttaaagcaaagcttcatgaaaatataatacacttctatgaatgtatcagtggcaaacatcattggcttccaaaaaactgacactaaaggaatttccaatcaaaacacaagcacagtggctttcattcaatatagagctatgataagtctatcaagagaccctgaatccttacgtacttgtaatatgattttatgctgtgacactagtacaaaacacatcaactctaatgcatagatgacgacacatgataacacgataccagggaaagcctttttctatatccgaaaatgccaagttctccagtactgtgtagggctcgtcattgctgatccagtgaaattctacgtcctccagcttgagcagtattataggattcacaaatcttacatttcatgcctaatatatgaaactgaacagtggatcgtccattacagtcattgcagagaatatccacagtcatgttctgatattctgatggcataggagtctgtgctacttcatcatccagctgtctccaatacctggtcatatctaaagcagagtgcatacataatggacatctgtagctctttcaacatttcttcataacacgttctatgtaaaagatgtccacatggcaagacatgagcaacaacacgggatgtgtgaatgtcctccaaacatattggacaattctgtcgggacacattttcaatacacttgtgtcttccttgaagattcatagctaggcataagttacatttcaaacaatggaaaaaatcttcctttggaccaatcctacaattccacagttttcacagtgatactgcttcttatctttgtcaaacaatggcatatatcgcaataatattctccaacatgtgctacattcttcacaagtctgttgggcatgttgaatttttttcacagtttatgcactggacttccttcactttaaagcgatctagttgatgatcttcattgttatcatgacacaagcggcaagtataaagcttgtcacagcaaggtgcctttaggagacatcctctgtcatagtgctcgcagccccgctgacctcgctcttgaccgctggcgcccggacgcgtgggtcgacgatatcccgggattccgaccgtaccagcctgcttttttgtaccnacttggttcctatagtgtcactagtt

SEQ ID NO: 135332 - DNA, 394 bp, Homo Sapiens
  misc_feature (223)..(223): n is a, c, g, or t
gctgcgttttaatatttttttcttctgtttttcctttcattctctctgtcttgcctccaaccattctggttgccgggcgggagggggcaccccgaggcccctgcctcagtgtcaccacctgtgaggtgaccgctcctgccacggccccggggtctgaatcgtgcaaagacccctgtcccccaccttccctgcagccgcccacttccaggggaagaccctgganagaggctgggggacccccctcggaaggaagcaaaaagacagtgacaggactgcatggccacaatggtgggggggcagactttggtatcgcccgctcgagcctgcctggctgcaggtccacacccatgccaggccgggcctgctccggcattttacattcactggcttataa

SEQ ID NO: 135333 - DNA, 568 bp, Homo Sapiens
aattaaggagagcaaagtcattactagaatgtatagcaaatatggaggttaactttgtatcgtttaagtcatgtttgtggtaacagagttttaggctgtgtttggtgtcaatgttaatatgactggggtgagtcgtgtcaatgttaatatgactggggtgagtccagtgttgacgttagcagcgttttatctcaagcatatgtgacgttgatcaaaatgtgaacttttgatccgattctccttcctaccccactggcttagttattgctgtagtccggtcacgaagggtggtcacacgtttggtgtatttctgcaaacacggaggaaacaccttatttatattatgcaatttaccttttcttatcatttggactttttctgagcccatcaaattgcttgttttatgattttgattttgcaacacagtaataaatgtcattttctggaaataagtaatgaacatctgcttcctctgaagatgcagtatgagtccaccacgtgcagttctcacaggcagggacccacctccgggctgatacacagtggtgacggttttcttcctcttgcc

SEQ ID NO: 135334 - DNA, 1164 bp, Homo Sapiens
  misc_feature (203)..(212): n is a, c, g, or t
  misc_feature (288)..(415): n is a, c, g, or t
  misc_feature (454)..(467): n is a, c, g, or t
  misc_feature (476)..(583): n is a, c, g, or t
gtgccccccgtgttttttcccacaggggggaaaatatttatatattcgcaagaggcggcgcaaatgtggcggggtagtcccccgcgggaggatattagaggtttcaccaatagccgcgcggtggagagatggtttccgcgggggggcggggaaaggtttttgaaaaaatatcaccccccttacttcataaaaaaatgccagannnnnnnnnntaaaattggatattaggggccccctgggggctcctttggggaagatcccccgaaaaaagcccccaggaaattcccnnnnnnnnnnnnnnnnnnnnnnnnnnnnnnnnnnnnnnnnnnnnnnnnnnnnnnnnnnnnnnnnnnnnnnnnnnnnnnnnnnnnnnnnnnnnnnnnnnnnnnnnnnnnnnnnnnnnnnnnnnnnnnnnggggcgcggcgccaaaaaaaggtttataaaaattttttnnnnnnnnnnnnnncgggcaaannnnnnnnnnnnnnnnnnnnnnnnnnnnnnnnnnnnnnnnnnnnnnnnnnnnnnnnnnnnnnnnnnnnnnnnnnnnnnnnnnnnnnnnnnnnnnnnnnnnnnnnnnnntatgaataagaaagctttttattttacaggtctttgtgggaagaaacagaaagaaatcacaaaagcaattaagagagctcaaataatgggtaagaaagaatacctcaacaactgaattgagctagctgaaattttgctcattatgttttgtcaagaactttaattatctctttacagggtttatgccagttacatacaaggatcctgcatatctcaaggaccctaaagtttgtaacatcagatatcgggaataaattctatcacgttaccactaataaacttattttacagtaagtggttgtatgatgccaatactgactcaaaccaacctttggatagaaaagtgtttgaggagtgaggtaaagaatgacacttccccttcataccaatgtccattaagcagattgcttatttaaaatgttaacactcatcacattttatctatgttgaataaaagtggttctgtgtgattgtcatttatatctgatccccaaatagctcatacaataatccattcaatagaatggaattaaaactgttcagaatgattttccaactagcaaatataagtatgcctggtt

SEQ ID NO: 135335 - DNA, 680 bp, Homo Sapiens
ttttttgacaatcacacagaaccacttttattcaacatagataaaatgtgatgagtgttaacattttaaataagcaatctgcttaatggacattggtatgaaggggaagtgtcattctttacctcactcctcaaacacttttctatccaaaggttggtttgagtcagtattggcatcatacaaccacttactgtaaaataagtttattagtggtaacgtgatagaatttattcccgatatctgatgttacaaactttagggtccttgagatatgcaggatccttgtatgtaactggcataaaccccattatttgagctctcttaattgcttttgtgatttctttctgtttcttcccacaaagacctgtaatgtgccttccataaatgcatccagtaaatggagaaacaaactgggacaaaagctgtacattcttataatctacatgctttccacacaagatacatttcttaagaggttctttataaggattttccattgaaatgggcaggtcctcattgctggatacctgttgtgaacaacctcttctccaaagcaccgtgtgagtcccgggatgtgtaaggctgacagcagccgttaccaagtgtgtcaacttcttcctccctagaccaccgcaaacagcaaccacagcggccatggttccgcgtttcttccactcccc

SEQ ID NO: 135336 - DNA, 651 bp, Homo Sapiens
  misc_feature (68)..(69): n is a, c, g, or t
  misc_feature (109)..(111): n is a, c, g, or t
  misc_feature (114)..(116): n is a, c, g, or t
  misc_feature (120)..(121): n is a, c, g, or t
  misc_feature (123)..(124): n is a, c, g, or t
  misc_feature (127)..(127): n is a, c, g, or t
  misc_feature (130)..(130): n is a, c, g, or t
  misc_feature (132)..(134): n is a, c, g, or t
  misc_feature (136)..(140): n is a, c, g, or t
  misc_feature (142)..(147): n is a, c, g, or t
  misc_feature (149)..(246): n is a, c, g, or t
cggccccccccacaaaagagggtgtcaaggatatttttttgggaggcaggggggggcgccatatccannttcccttttggggcccgcgcccccatatggaatggtttgnnnaannntttnngnnggncgngnnngnnnnncnnnnnntnnnnnnnnnnnnnnnnnnnnnnnnnnnnnnnnnnnnnnnnnnnnnnnnnnnnnnnnnnnnnnnnnnnnnnnnnnnnnnnnnnnnnnnnnnnnnnnnnnactgtaaaataagtttattagtggtaacgtgatagaatttattcccgatatctgatgttacaaactttagggtccttgagatatgcaggatccttgtatgtaactggcataaaccccattatttgagctctcttaattgcttttgtgatttctttctgtttcttcccacaaagacctgtaatgtgccttccataaatgcatccagtaaatggagaaacaaactgggacaaaagcaggtcctcattgctggatacctgttgtgaacaacctcttctccaaagcaccgtgtgagtcccgggatgtgtaaggctgacagcagccgttaccaagtgtgtcaacttcttcctccctagaccaccgcaaacagcaaccacagcggccatggttccgcgtttcttccacccc

SEQ ID NO: 135337 - DNA, 1072 bp, Homo Sapiens
ttatgtttaaaattctgatgtcatttattggcacaaaaattattctgatacaacatggtgtctagacatggctacactttatactttgtgcatttagttgagtatttgttctgctcataatttccaatatgtaccagaccttccctgtgttcagcacctccatgacagtatttctgttttctgagcccttgctctaaacagagtattttgaccactgaaaacatcccagaaccctgctgcagaaggccagtgagggtggtcccactgcacagtgatcccctctgtgcatctgctcagccgaggctgccagcgatctgaataaacctccctactagcggtcaggtcttgaattgaagcgtgtgagtcgcagcatcactgggtctgatggaagacagaccttttgtactcattttggcctatcttgcaaacatttctgctgctgtccacagaccagtgaggtcttgggataggtggcaggggtgaggtcagcatcttctgtgtctttacagtctaggatcctaatccatgttctccacgacctgaggcttcttggctgtgctgagtttgctgtacccatgttgagaggagcaactaggtcattcttccatcagcaagtacttatgatgagttctcttgtgagttaagtcaaaacccgtatttctaaagttatggatcttctgttccccaaaatgaatggcttgatttacgtggtattactatgtttcactgtcctgggaaccaaatcaagccttgtgtttctgacaatatattcttcaacagcagctagaaagttggttcaaaccaacttttaatatacagtagttcttttcatttacatttcaaaatatttaacaaagtcaaactttctcaccatggtttcagtttagtggaagcatttactaaagtacaaaagcctcagaaaaaacgtgatgggcacatctgggcctccagttaccagaaagggcaccagccaatatagcactggcagaggttttcatgggatgtcgcttgtttgatgagcagctcaacttgcgttggaacatccaaagtgtcatcatgagagaagtccccc

SEQ ID NO: 135338 - DNA, 592 bp, Homo Sapiens
tgatttatttttccaactggacttcttcccggggctctttctgggcccagctgcctttgtgatcccgcgccccggtcctcggcctctcacctccagcgccggggcgccccctgctgtcggaagcggctgtgaccgggcagaggtgctatctgggactctgggttctcagcccggggacagcgaaccgaggggcagatgatccatcagaaaagagccggcactgcccagccccgcgcccctgcccctgcctttttccgggagcgcgccgcgccgcacccgctacggccgcttgaccccatctttgagcccggccccaagctctgggaccgtcgtgcccctcatcaaggaagagccaaggaccccaaggagaagagaaaggagttcatgaaggcagaaatgcctggggcccacgaacatcccagtgtggccctggacgggacatcatgctgggcaacacagctaaaatgcgggtgaagaccagatttcttgcacatggcggtgacgggatgctccctagagagcttcaagtggattctttgctttttattttctctcttaataaaaatgtatgatgtttacattgtcagagacc

SEQ ID NO: 135339 - DNA, 1243 bp, Homo Sapiens
tggttgttttcaggagataaaggcgcccccccgttagtgggtttcttttcctatccaagaaaaaccgtgtttagttgggatccaaggggcttccgaaggttgtgtaaaagataaccagccatttgaaagaaggtgggctttcaataggcaaaggggcctttttttccctaaggccagggaatttctaaaatttcgggaaagattgttccaatgtgatattgaaccccttttggcattcaagacaatcacacccaagtttgaggtgtcaatgcaacaggatggatacatgctgtaacactatgtggtggtggtgacatgtgagctacatccaaaacttaagattaaatgacaatttttcctttttaatgaatctgcaaaaatcatttctgaaattctgctaaatttaggaatgttttaatctctagcccaggtttctttcctcccaccccctaatctcaatctgtagtttcctggtgtactagtgaaacactttagataattagtcagaatattagttctcattaacacaaatatttattgatactatttatacagtaaattaggttgaatgtgaagttttggatagcctgaattcaccattttcttgtgcacaaatgggcatttttctcatttacaaatgggcatttctctttggcatccattaggtatttgcccagatattggcctctgtcaaatattttttaaaaatcaacctagtttctattaaacaaaactaaaagtgattctatggagagtgattgtatgattaccaaacacatctgatgttaaatgtcattaaagtgctgtttgatgatctctgtcggtttgtgctaattaagacagagagggctgggattttataaatcccaagagtcttatctgaacagtctgcatataaaagttgttttttagcctggtgaagggtatccatgaagccgtggacttctgcattcttgtctttgctggtcagtaacagccatctttccaactgtcatctttcatgctaccataggttttaggagctggcaaggatctgcgaacaggctgtgcaagtttgctgcgaggcactggtatgcccccagcagaaggggcactgggtctgggcaaccacttctcattgcagttgtccctgcaggtctggttagagtagcgctgttgatattgctgggaggatttgctgagactgtgctctgaaccataggaggcccaggtgaggagggtggtttgtgtgagctgtgttatt

SEQ ID NO: 135340 - DNA, 1332 bp, Homo Sapiens
  misc_feature (466)..(474): n is a, c, g, or t
  misc_feature (636)..(648): n is a, c, g, or t
  misc_feature (1313)..(1313): n is a, c, g, or t
tttccttttaaatataaggcaacttgccaacacataacttaaaactggtcttcagtcacattgcttcagatcactagagaatttctggctaacgaacagtagtggatagtgaacaaaatgcaaaaccttaaataagaaccatcagctgacattccccagagacaagaggaaaggtaagggcttatttcatctgtaaaaattaaaaaagcccaattctgcatctttaacagaatggtgcaaaaatttgtaacaaaacagtctaagtttaaaattacagaaaagtgtttctagccaactaattgtcgcttgggatgagacgtgctgagcatggagtggatgaaggtatgctctaagaatggacagagggcaggaggggcttgtttccaatgtaggcccagctccaggtgttagaaccatgctcatttggtaaaggaagtactcaaagagcttaaggctttgtgtttgnnnnnnnnnccttcattaaactgaggggctgcactagagggtgaatgtacctgtggggccactcacacacaatgctactcaaacccacactacattcatacagaaacgtaacgtttaaaacttacagtgtagagcaatattcttagccagtgtagagagaaccaaatgcannnnnnnnnnnnnggtgtttttaatcccaaactccaatgtgatcattccttacctacctaattcctcaagtaaggtagattttgtttttgttgagggggaaaggataggggctgtggggaggtgagttaggggacaggcaacagtgagaaagggatcttgggtatgctcaaaggtcactgtatttttctaggtttggaaaggggagtctggaaccaagatgccaatacaaagactttttccccccatatctcaagaaatggtcaaatacttccaagatgcccttgagatcaagtgtggcaagggcaagtgcagtggctgtgggatcaatatagacacaaaacaaagccttgaggaatggaaaggaacttgaaggatatgaagactgggtcagctttgatttgagatccttcgatgagtaagtaattagctttcagagcacctgggaaatcttgcttcttagtcctggagggaggggaaggggggtagcaacaggtagaggtctggattaggggcctgagcacctatactacctcaactagggcattccgtcagcccacacctcagtcgtcctaagggaaacaggaagagattcaagaaaagatgggtgggagctggctggaaatggccaaggtggagagactagctgacaggcagtcagtggagagaaaagcctgggncttagggttaggttctaac

SEQ ID NO: 135341 - DNA, 1809 bp, Homo Sapiens
  misc_feature (772)..(780): n is a, c, g, or t
gcggccgccgcgctccccggcccgaggctatggagaacggagcggtgtacagccccactacggaggaggacccgggccccgccagaggcccccggagcggcctcgctgcctactttttcatgggccggctcccattgctccggcgcgttctcaagggcttgcagctgttgctgtctctgctggccttcatctgtgaagaagttgtatcacaatgtactttatgtggaggactttatttttttgagtttgtaagctgcagtgcctttcttctgagtctccttatactgattgtgtattgcactccattttatgagagagttgataccacaaaagtaaaatcatcggatttttatattactttgggaacaggatgtgtgtttttgttggcatccatcatttttgtttccacacatgacaggacttcagctgagattgctgcaattgtgtttggatttatagcaagttttatgttcctacttgactttatcactatgctgtatgaaaaacgacaggagtcccagctgagaaaacctgaaaataccactagggctgaagccctcactgagccacttaatgcctaaagactctggggagcagatgttacctaaggtagtgaccctgcattgtggtgcctgagccctggcagaagctcttgtaaaatttgttaattgtttaaaccacttcttttggagagcaaggggaaggtcaagaaggcagttttatcaatattgtgtcagtcaccacaaagtaggccagataagttaaaaaaaannnnnnnnnaaataataattgaaacttatctcaaatggagattttggtgggaggaggagaaaacaattgtttttaaatcacacagctcaacggttgataaatgattctgtcattctgttacaggtcattcttttactaggcttagcttccaaattatgctttatagctgtataaacatcgtgattatattcatctacttagaaattgttttatttttaaattaatttgcttagctgtttgttttgatgcttagattatgttctgttaatgggaatttaacatatttaagaaaccaatatttaaaatgttggtctaggtttttttccttaacatatattaccaggctttactgtatttcactcagccttaaatgttataatatttttggataacggttattaattctttgagaccttcgtatagcctataaaatgtatgggagatgttggtattttatgtgtataaaagcaacaatatcagcaacttcgtgtttatactgcaccttggttgttgatgtcaagtaaaaaaaagattgttttgtaacacataaaaaaatggaagaaactgataccacacctaaggaccaaagataagaaagactttttgcccaagacagtgaaagtaattataaaaacaagctttgaccacttaccaagtatctgaagagatgagttcatactatgatttagaaagtggttcaattcccctgttggcatatgattatttttactaaaattaatacagctctgtgggtcttccttagtgttttctttgaagccaatctgttttttttaggacaccagcctttggtttttcatctgttcgagatgcctcttctctgtctccttatcagatagaaatggagtcatgtgctgctgcttcatctagcagaggttggcctctggctctgacactttttgtcagttgtctttaggtggtcctgaatcttgggcccttttgattgtgaatactgtgtagcaggatcttgagagtccttgttcttacataggcattgctctagtttgtctttggcaaaaa

SEQ ID NO: 135342 - DNA, 1515 bp, Homo Sapiens
  misc_feature (43)..(77): n is a, c, g, or t
  misc_feature (292)..(301): n is a, c, g, or t
  misc_feature (570)..(624): n is a, c, g, or t
  misc_feature (865)..(883): n is a, c, g, or t
  misc_feature (1117)..(1205): n is a, c, g, or t
aaacgacgagcgcagcgagtcagtagagcgaggaagcggccgnnnnnnnnnnnnnnnnnnnnnnnnnnnnnnnnnnncagtcgacggtaccggacatatgcccgggaattcggccattacggccgggcatctagcagaggttggcctctggcttctgaacacttttagtcagttgtctttcaggtggtcctgaatcttgggcccttttgattgtgaatactgtgtagcaggcatcttgagcagtccttgttcttacataggcattgtctagtacgtctttggcaacaccacnnnnnnnnnngaacaaagagaagtcacgatcaccccgggacaccacccggccacgaaacacaacaacgccggggggcgggaacaacgaacagcacatacagcgacccataccaaaagagacacacacgcagcacaaacccacaagaaagtggcgctcgagcgcgcgcaacacccaagggggctcaagacacacaacacgacaaaggggccaaaaagtggcggaggcaaactaaaaaacacacacataaagtgtccaccaaagagggaaactcacaccgnnnnnnnnnnnnnnnnnnnnnnnnnnnnnnnnnnnnnnnnnnnnnnnnnnnnnnnggaacaagagaacacctggaaggaacacacataacagggaagccagcagaacacaacagacgacccaccggagacaaacaaacagcaaccacaaaacaggacgaccccacaacggcggggagcaaaaaacagataaccaccaacgagagagaaaggagagcaccccacatatgggagaaccacgagcgggagacaaaccaacaataggtcgtccaccaaagaggaaggcaacacaaccacnnnnnnnnnnnnnnnnnnncaaacacagctatataaaacagaacgacacaaccacaatcagaggacagaaagaggacggcgaagcacaaaccgcgcaaacacgggcggcacaacaaccccacacgtcagaactgaaccaacaagacacacacaaacatgacgacgaacaaccaacaccccaacacactaaaggacgcgacgaaccaaaccaagtagcgacgcaccaaccaacacaaacacagactgaacgagnnnnnnnnnnnnnnnnnnnnnnnnnnnnnnnnnnnnnnnnnnnnnnnnnnnnnnnnnnnnnnnnnnnnnnnnnnnnnnnnnnnnnnnnncacgccacagctgttcgtgcgaacaatagaaagcatccaagagagaaagcatgacgcacaagataccgatgtagctaataacccccgctcactcaacatctctcacacacattaccacgtgctccacaccacagacataccgcactaacacaagcacgaactcacatacagagcaacgaatacgacgagaaccgtccacaaggaccaggaacggaacagcaccggactgatcccacaccagcaaccaactcaccaagacaagcagaaagaccacagtgccgcacactagccagacaacaacacgcgcgac

SEQ ID NO: 135343 - DNA, 357 bp, Homo Sapiens
gacaaaaaatagatctattttccttatatattgatttagaatcttaagttagaattttatagaagaaatgtctgagcagttctatgtatggaggagcaattcagcttttcagcagcaactttatcttttgccactagagggagatctgtggttgctttctcctttggagaatagctgctttgcttttatttttaatttctaaggttggaatagaacttattctcaaaattcctttagtgttattaaatattttcatttattagtcaaaggtaagttaattaagcttgtttaatgatgccaatcttatgcttttctgtaatcttcaatttttaataaatgtgagttagatactaagtg

SEQ ID NO: 135344 - DNA, 1478 bp, Homo Sapiens
tttcacaattggaatgtgctttatttcagggaaatataaagggaaatgaatgctattataacttggtagaacagaagaaatggctacctagctttgctttccaactacaaacataaatgaggatctcagcatttaaggtaaaacatgataagcacaaaaggagagttcactggggactggactccctcatttactctagaaattatgagaaccagcagcaatattcctcaagcatccatctcaacatcaagttcctttgttttatttaccagatgaccaggaatcatagatgagtttggctgcaactgtgtcttccactgccattcccaaagacttgaacacggtggtcttctcacagtgggctggtttcactcccttaatcacttctcccagctcagcaaagatctcggcccctgacagcaggacatctccagactccttcagggcagcctcctgggaatccacgtacagcacagcttctttcatgagctcatcatccagttctctccagtcaggtctgctggctccaacagcattgatgtgagcccctggcttcacccattccccaaacaaaatgggctctgttgccagggtgactgtgatgatcacatctgcacctgccacagcctcctggaccgaagaacagacccgtacctctccttgcactgtgtctgcaaacttctctgcattttctttggtgcggttccatatcctcacctccttaaaggagaactgctctgtgaagatctcataatggctgtaggcctggaccccagccccaaggatgcacagcacttcactgctgggaggtttcagaaacttggtggcaatggcagaaactgcagctgttctctttgcagttatgacatttccatccatgaccgccagcagggtgccattgctgggctcaaagagtagcacagtagcctggtgggaagggacgaccgaggtgatgccgcggtcctcgtagaaggtgaccaacttggtggtcagtgcatcctctgcagcactgtaggcgggcatgacccccaggtagcccctgtgcttggtcaccggcaccacggtgcgcacgggctgcatgacccctccttcgggaccgctggagaagttggccagggccgtctctagaggcgggatgaggaggctggagctgcggaggtgttcctccacctcggccgcgctcaggaacgctggtacccggctcatctcgccacctgtgccttctaacctcagtctccgcaccgcgatccacgtaccctcggctgtgccctttatgagcgcgcccgctgctctgtggagccgcctgctggtcacagcccagcctccgggggcggagcaaccccgccccgccccgccagccctctcctcccccttcgcccacctcgacccctaagggtgggcgagatgggtcccttccagcaacggattccccaagatggacatcgcggtggcgtgctgggagtcaatatgttggtcca

SEQ ID NO: 135345 - DNA, 646 bp, Homo Sapiens
  misc_feature (606)..(606): n is a, c, g, or t
tttcaactcttaaaaattatttaatagaaagtccaatgtcaaaatgtaacaataaacaaaaatacacatgtataaatatgtatatataattagacctgtacactttctcagacccttttcaaaatggaatagaatcatcattacatcttggtggtcaagtcaaaaataatattcaagcgacatgggcccactgctacgtggggggtagtactgctggagcacttcgagggttcaaagaattccaatcaggagagagctggggatattgccagtgtccttttctggagacccggagagggaagatgaacaatcaatcgcatggctctgtccagtgtacctgacttttgcttagcacctgtagccactactgtctagggacagctctcctttagggttttgaattatttacatttatgttgtttgtgagtgagttttctttcctcatctcccagatttgaagttcctggggattctgccttaggactttcttattctgcaggccaaatgtcgcacagtggtatgggatgctatttaggcgtgctgatttgcactaaagcaagggtgttcaaagtggggtgtgcacataccaggaggtgcccaaggtcnccctcaggagttcagagagaaaatgccagaacctctgttt

SEQ ID NO: 135346 - DNA, 1198 bp, Homo Sapiens
ggaaaatacaagtgctttgactcatttatttaaaaaggcttcatgtaaaccttgcatgagaagatgtccattagttactcaggatagagggcaaagagattatatacaaaaagtattttcaaggactatcttgttcttcctttataagaagttgaatttaatttttgaagtaattacttaggaagaaatgcagaggagttccacagaaaaagatggcaaccagaatgatattccgtcagccagatttttaaaattccttcactctgaaatttcttctttgtcagctaaaactgttttctgggtcagtttccttaggtgagccttgttcacattcagtatcaaaaccagctgacatttattattttggtttcattttcctttttgcgtctttatgtttctttcgacaatccatacgcaggttggttgttctggcctcccaagagttcctgctcatattacttcctactcctctccagaataagtcagaacctattaggggaaaaagaagaaagatgaggcaagcaaactgactactaaaattggtaatattcgtaagtgttggcattatcaaggttctcgaataaccagttaagatcattgctgtttccctcaggtttctacctattgttcaaaaattagtattttttctttccaaatgaaaaatataatattgcttttactgtttatatatatcatttactattatgtaactttgtttatgctaggctttaagaaatgagctccccaacagcctgagttttcacatggaatttatggcactaaaacttaggggttttatatgtctaacatctaaggaagcccttggaacaaaacaaccctttgttgatgagaatgagcgggcaaagaaagtggtgagtggggagctctcagaccttgacagctttacaagttaacattcatcagtgtgaacaaatggggttaaaccacatgacattaccaacggtcaaaattcctggatgtgaattactgtagctgtattattacctgttctatgtatgtaatttgatgaaaaaaatggactgaccttgaagtcgttcatcattcttagagaaaaagaaaaatctagtggtctctttctcaagtaatgatgcttctccaggactggagtttctgtgatctgtttcttccccggccgtaatggccgaattcccgggcatatgtccggtaccgtcgactg

SEQ ID NO: 135347 - DNA, 2223 bp, Homo Sapiens
  misc_feature (436)..(444): n is a, c, g, or t
  misc_feature (1028)..(1037): n is a, c, g, or t
  misc_feature (1092)..(1100): n is a, c, g, or t
gtgtgcagcattacaaaatattttatatttaatgagaaaaaagaagcttgcaggcagcacatgaagcatccacagcaggtattatgattgaaaactagtaaaataagtgtaagttgttgactgatgtaggtactaacagcatctgaattttagcactggccttgattacacaggagatggagaagtcgttacaattgagaaaacatatttaataaatcattgtcaatttttataatgtttcaagcccattctttgttgatagcctccacatttatatgggttaagtcattgttgctgtgtttcttacctatgacattatttttatatcccttcatttgtgggatcttaaggatgttgcaggaagggttcattccctgtacccccaatacagattcacttcctttaggctgccttttctaggcaccaatatgctttnnnnnnnnntgcgcaaacaacaagcagtgacagcggccaattcctcgaatgtccagattaataactgtagcatgctaaagaaaggtgtgtgtcaatagctggagatggtatatggtccagagtccagcataaaattatttcctttctgagcattccctccattcccctaacccgaatacatgcattagaatgtagcaaaacccttcggaaacctctcttagccaactgcaaacttatctgttgccacaagtgcacaggggtaggatgtgaaccagtatatcacaaagctctttagccacttcagttggtgacagaacacaaaaggaaaaaattcctacgtatacacatcagtctgtctccactttttataaaactggaataaaacgggaaagtgccatctttattaatcctaattgaattttaaatgtccttttgacacaaaaaggtatatacatgacacagctacacaaccttttttcaactggacaacaagtgtcaaaaccctgtggatgtatagggtaaaacaagattggtcaggaaaagagaattgttcctataactggtaatctgacacaatgtcctattgccattgnnnnnnnnnnggtccattttcagtttattcaagtttattttcatggtgttttatccctcttgatnnnnnnnnnttcagacttttgtaatttgtgtatgctgatcttcatcaaaaggttcattctctggatcagagtcagtggtgtcagaatatctataatgatcaggttcattgtcactaacatctggtgttacagaagttgaactgctagcctctggatttgacggctcctctactgtttttgtgaagtacagcttcaccttaaaatttggagaaaagtatcggttggctttgtctttatttgctttgtcaagatcattttttgttaaagtaagtactagatattccttgtcattatctgcacgctctatactgcaaatgctatcgatttcttgatcacatagacttccattttctactttttctgaggtttcctctggtcctggtatgaagaatgtatttacccaaaagtgaaacattttgtccttttttagcatcttgttctgtttgtggaagaactctactttgatatcaccacacacaggtaacggctgagggaactcaaagtacatgaacttgtcttcccgtcgtgtgggtcctgaattggaggaatatatcttcacctttagctggcagaccacaaactgaggattgcaagttccgccactgaacattggaatagtttcaaacatcatcttgtgaaacaacagtgccactggtctataatccagatgattctttaacaggtagctataataatacacatagcgcctctgactgggaatagttactccctttttgtctctggtccttacttccccatagaaatctagggcctcttgtgcctttaaaaatttgccccgatgtaataaatatgcacatatcattacaccagttcgtccctttccagctttacagtgaattgctgcaacatgattgtcatcttcacttagccattggtcaagatcttcacaaaagggtttgataagttctagctgtggtgggttatggtcttcaaaaggatattgtgcaactctgcaattaaatttggcggtgtcataatgtctttcagcacaaagattgtatatcttgtaatggtttttatgctttgaatccaaaaaccttactacatcatcaatattgttcctgcggacgcgtgggtcgacgatatcccgggaattccggaccggtaccag

SEQ ID NO: 135348 - DNA, 554 bp, Homo Sapiens
  misc_feature (145)..(145): n is a, c, g, or t
gagaataataattatgtgaggtgatgaatatgttaagtagtttgactgtagtaatcatttcacaatgtatatacacatacatcaaaacatcatattatacattgtatttatatataatttttacttgtcaattacacctcaatanaactgaaggaaaaaaagaaacccaaaatctgttttccaataaattctcagatccaggaagaggaaaggataaacatcaagaaataacttacctttttgtctctggtccttacttccccatagaaatctagggcctcttgtgcctttaaaaatttgccccgatgtaataaatatgcacatatcattacaccagttcgtccctttccagctttacagtgaattgctgcaacatgattgtcatcttcacttagccattggtcaagatcttcacaaaagggtttgataagttctagctgtggtgggttatggtcttcaaaaggatattgtgcaactctgcaattaaatttggcggtgtcataatgtctttcagcacaaagattgtatatcttgtaatggtttttatgctttga

SEQ ID NO: 135349 - DNA, 1376 bp, Homo Sapiens
  misc_feature (713)..(749): n is a, c, g, or t
ttttttgctcaacacattttattgctaaggacaaggtgatgcaccagttttcaaaataatttggtttatagtgttcatacgtaacaaaaaaggggaagtattataaatctgattcttgtatacacagggtattggtgtgaagccctccaatcctgggcccaggcaaacaaattcttgaggagcaaaaacctgtttaaccccttcagtattgccctctagtcccaccccccaccccaaaatcagctccctcccacctacagtgggcctccaatggccccagttttttcatcctaaccctcccagcccctgcatgattgcaattttctgttgacagaatcacccaccaggctctgcctgcttccatcattaaaatccccgattcagggtaatccccacccacaccctgtaatactttgccacaggggctctgcacctagagtgttgtgggcacacacccatgttatccccatgttctcctttaggggaagacaaagaggtggcatcagctccttagcatctcaatactgcagctttgccagcactgtcttgagacggttccaggcctggacagatgccacacccatctccagccaacccccaggagcccttactcagctcagctgagggcagaatttcacattttgtttgccctgcataggcaaggaagaaagtaaaggccaggggctggcagaagctggtccagaccaaacatnnnnnnnnnnnnnnnnnnnnnnnnnnnnnnnnnnnnntataaatacaaaagtaggggttggggcaagtaccagcacctcagcctagtcggtgcaggtgatagttatgaagctaagtcctaggccaggaacaaggcagccagtccagccagcatagttgacccctctatggactggggccagtgcagccacagcattccagtgctcagcccctcagctgggagatcagcgactgctgccacgtgcccagaaatggctcgtcctttcactacagcggaatgcaatgagggtgggtgagaagatgatgggtcggttatttcattccttttctttttacaacttcactttcagagacttcagcgttccatgtctgctgtgctgtggaacccagagtgctcttgcctggatggctgagaatcccttggaccctggaagcacctactccatgatggcccgcaggaggaccaaactggagacagtcctggctctgaggaaacaggaaggaaggagggtgaaaggaacgtccacctgcacacaaaggtaactgtcctctactcagggaagagtgaaccaggacaaagtaactgttttagagagcaaggcagctctctgggctgaaaaatgttaacagttaaagaccttgctaagtcaaagtctgcccctatc

SEQ ID NO: 135350 - DNA, 1558 bp, Homo Sapiens
atgatacatgttttccctagaagagaataagaagtccaagggacgccgtcagcctttaagcaagctcccccgccatcacccacttgtgctgcaggagtgtgtcagtgatgatgagacatctgaacagctgacccctgaggaagaggctgaggagacagaggcctgggccaagcctctgagccaactgtggcagaaccgacctccaaactttgaggctgagaaggaattcaatgagaccatggcccaacaggcccctcactgcgctgtctgtatgatcttccagacttatcatcaggttgaatttggaggctttaatcagaactgtggaaatgcttcagatttagccccccagaagcagaggaccaagccattgattccagaaatgtgcttcacttcgactggctgcagcacggacatcaacctttctactccttatcttgaggaggatggcaccagcatactcgtttcctgcaagaagtgcagcgtccgggtccatgccagttgctatggggtcccccctgcaaaggcttctgaagactggatgtgttctcggtgttcagccaatgccctagaggaggactgctgtttatgctcattacgaggaggggccctgcagagagcaaatgatgacaggtgggtccacgtttcatgtgctgtggcaattctggaagcaaggtttgtcaacattgcagaaagaagtccggtggatgtgagcaaaatccccctgccccgcttcaaactgaaatgtatcttctgtaagaagcggaggaaaagaactgctggctgctgtgtgcagtgttctcacggccgctgcccaactgccttccatgtgagctgcgcccaggctgccggtgtgatgatgcagcctgacgactggccttttgtggtcttcattacctgctttcggcacaagattcctaatttggagcgtgccaagggggccttgcaaagcatcactgcaggccagaaagtcattagcaagcataagaacgggcgcttctaccagtgtgaagtggtcaggctcaccaccgagaccttctatgaagtcaactttgatgatggctccttcagcgacaatctttatcctgaggacatagtgagccaggactgtctccagtttggtcctcctgctgaaggggaagtggtccaagtgagatggacagacggccaagtctatggagccaagtttgtggcctcccaccctatccaaatgtaccaggtggagtttgaggatggctcacaacttgtggttaagagagatgatgtatacacactggatgaagagcttcccaagagagtcaaatctagactgtcagtagcctcagacatgcgcttcaatgagattttcacagagaaagaggttaagcaagaaaagaaacggcaacgagttatcaactcaagataccgggaagattatattgagcctgcactataccgggccatcatggagtaggtgcttccagggtccaagggattctcagccatccaggcaagagcactctgggttccacagcacagcagacatggaacgctgaagtctctgaaagtgaagttgtaa

SEQ ID NO: 135351 - DNA, 577 bp, Homo Sapiens
ttttttttcaagaaaaattgttagttttattggtattacagtgtacttttaatacaagctaaatacaaacacaattcttacatattcagccacttattctgcaaaacaacatgccaagatcaaccttgaaaagtttataaaaaccaaaatccagaaaatatcttcctcaactctaaggactccatatacaaatgcaaaaattgctatttgtcaataatcacattaagtgttgagttattgactgagcagtaaaaaacaatttctgatttttaaattaaatagctccagataaaagcatgttattttccacatacgctatctttgtattctgcacagagttccaaggcaaagattgctcctggctttatgaattaccagagatgatgacttgtgtggctgacttatcacaggtcttttactcttccttcctgatagatccttagcttctttgggaggtggcatatgaattggtttccacggaattggattataaaaggctggttctggataggaatttccactgtaaaaacctgtagttttccactggcataaccatagctctttgcagctggacgag

SEQ ID NO: 135352 - DNA, 1315 bp, Homo Sapiens
  misc_feature (582)..(582): n is a, c, g, or t
ttttttggctttatagactctaaccatttatttaacaaaatggaaatttctaatatatagcacttttctacatttaaaattttagggaggagagactcatgttctacagtatacattattacaaaagagttcattataaatttaaatcagctgaaacaattcctttaatgattaggattcatcatcctttagtgcagcgaggtgacattttgtggaaagcatccatggctcttcgtcagagatgtcttaccagcacaaccttccttcactctgacctgtccatcagaggatttcctttaccagtaaaacagatggaagtccatttttctctttcggttcccaactcaagtgtagatcttttaatttaggaaagaactcaaacttatataaactaaagagtggaggttgttgttttcattctgtttactcacacactgctctgtaaagtcaaggttttcttgtcgattttgctcacatgctgattgctatgcatgcagccatcattagtgcaaatgcgcgggagactttttgaataatgtatagcacctaaaggaatgaacagcagacccccccaaaattcanatcgctgttcttgcaaattctgaaagccaaggatcacttgtgccttacagaatccgggggctctatccccaggtgcaaagtacattttccaggtttctccagggcaaaggcagggtggacaccctcattaaacctgtgcctgatgatgaagagcaactgctcgctctctgcgttgatgaagataagtctgtggttgttgtagtccagccggatgcccactttgggtggtcgctcagtcgcatgaacatcactcacaataccactgtagaaaaatgtgtatctctgtggctcagagcagtgcatgtaccatgaggtctccccttgtcctagggcacctgcctgcacagccgagctggagcagatgccgagtcgatatgctgggcagtctgtgactgtggtttcccagtaatgctggccacaggaaggcagctcctcacccagcactgacgggatttccgtcagctgtctcctctcaccaaagctgatcactgtcccacttgaggaaatgtgtagagcaggatgagctgtttctctcaacaagagaaatctggttcctctggtggagatgagagcagcttcactctgttcacttgtcccaaatgcattgatggccctcacatagaaaaagtagttatcattgggttggaggttaactttcagctggagtcctttgattccagagaaagatctggctcagagggtcctacgcccacggaatctcgctgattgcccc

SEQ ID NO: 135353 - DNA, 1915 bp, Homo Sapiens
ttttttttctgcctaaattaccaacttttacttttataatcatttgagtgtattacaattttatattatacatttttttcaattcaaattttcagactgaaacattgttattttagtagagtcaatttataggcaatttgcaacagtgatttctcatggaaaaaagacacagacagacagtaatcattcagatctgtggaactgaatgaccatgaaaaccgacctcctgcaaaccatgcaaacagagatatgctgacccattcagcagcagcatcttcacgacgagctgaataaagacacatcttatgtcatgcccaaaatgtagggcaagactcaaagctgcaggtagtaaaatgttcttataaaggcaagatccaggtgctgctcgctgcagtgcttcacagactataccacttgcttgccagtggcttgtgactctcccacgcagcaacagtgagcatggtgcactcgcactctcagaggaagtactttcccgttgatgagagaaggaatctaggcaattcttcacaaaaatgacaaggttcaaaaaacatgtttgcttccaaggcaccaagggtgtaaagctgtttagaaaatacgcagaaatgaacagactaaaaaaagggaattatttcttaatggagaatctattactgctgtagctggtgtaataatcacttcgatagattacaatcaaaatgcacatttattaaactgtactgtgtgagggaatgtctgaccaaagagcattcccacaggcactcggggcactggctggaaagcgctctcaggtgttcttctcagagccggagaagctgcacatcacttgtatttgtaaaatccttctccagtcttcttgccgaacttgttctctgctaccagcttatttaaggatgggctgggctgatgtaatgggttctctgcatccatttcatgccacccatccacgatgaacttcgtagtatccagtccgacataatctagaagctcaaatgggcccatggggtaaccggctcctaatttcatagcagtgtcaatgtcttctttggatgcgtcacctcgttcatacagcctgattgcttccatgaggtatggaaccaggaggcggttcacaataaacccaggagtgtccttgcaagaaacaggatgctttcctagggctttgctaaagtctaccaaagattcaaatgtcttctggctggtcattggtgttttaatgacctccacaagtttcatgacaggcactgggttgaagaaatggaggccagcgaatcggtcttgtctggtggtggcattagctatgcttgtaatctgcaaggaggaagtgttgctggcaaagattgtatgttcagcagcaaacttgtccagccttttgaagagctcgtttttcaccttcagattctccacgatggcttccaccaccaagtctgtgctgtggacaacggaggctgcatccgtgctggtcgctatggtgctcagggtcttctccacaaattcatcgccggccttagggttttctgcaaacttcttctttgccactttcctaaggctttcctcaattccctttttggattttgccaggatgtcctctgtctggtctaccaacactactgtgtgaccagttgctgcagcaacctgggcaatgccggcgcccatcagcccgccgccgatgaccgtcacgtgcttgacgattatcttcttggccgaggccgaggcggtggacgaggaggacacggaacgcatgaactgcctggtgacgaaggccatggtgtggcagcggcggcgacagcgaggagacccgggcagggaagacgcgcgaggcgggcagccgtggaaagcccggacgcgtgggtcgacgatatcccgggaattccggaccagtaccagcctgctttttcaccactgttcatagcac

SEQ ID NO: 135354 - DNA, 687 bp, Homo Sapiens
tttgtacatataactaaaacaattttttattcttaccacgtgggatgcattgtgaaatattctatgttctttcatgtaaagaaaaatgagggtcacattttagtaaaaaagtttcacaaatcactaatatgttataatctataactcccataactgctctaaagcattgacaatgctaagctataattttaggggaatatatattcgtgctccttcttagaattagcccatgatagtattttagggactcaactcagagaaaaaaaatttaacatagccttgttgccatgtatccaacctggacatggtacatgctttcagtgagtttaaatcacctaccttcctaggcccaaaatctgagggaatgacttccaactgtgtaacaggaccctttgtctgtattatacattttatatatgtcttttcatgtacattatttcatttgatcctcacaacaaccctgtgaggtaggccggggggaaaatgttagattcactttatagatgacgaagttaaggttcagagaggttaagtgactttctcagttaccatatacctagtacgaagcagacagaataagaaccactaacttttgtggttgggggcccttttctctaaacacatagcttctgagagtataaatgtacccaaacatttttaccctcgtgccgaattctggctcgaggg

SEQ ID NO: 135355 - DNA, 389 bp, Homo Sapiens
  misc_feature (122)..(170): n is a, c, g, or t
aagatgacttgagtttcttgcactcaaagagagagacacagtcagatgtgtctatggtattgcctagaacgtcttaactactgagaaaggatgcgggggtgcaagaaactcaagtcatcttnnnnnnnnnnnnnnnnnnnnnnnnnnnnnnnnnnnnnnnnnnnnnnnnntatcttttttaggccagagttttctacaggtattaatgaatatttttcttaatccttataagttttatgtgtttaatatttcttaataccggtagcattaatttatacttttgtagcaacacaatatttttataaacagccggtgcttggctcaagtcttcacgaggggtttaggcagggccatcttggggaccctgtgtaccatgtactgtatttgga

SEQ ID NO: 135356 - DNA, 690 bp, Homo Sapiens
  misc_feature (217)..(268): n is a, c, g, or t
  misc_feature (656)..(656): n is a, c, g, or t
  misc_feature (664)..(664): n is a, c, g, or t
  misc_feature (674)..(674): n is a, c, g, or t
aatacagtttttggtacacagggtccccaagatgtccctgcctaaacccctcgtgaagacttgagcacaagcaccggctgtttataaaaatattgtgttgctacaaaagtataaattaatgctaccggtattaagaaatattaaacacataaaacttataaggattaagaaaaatattcattaatacctgtagaaaactctggcctaaaaaagatannnnnnnnnnnnnnnnnnnnnnnnnnnnnnnnnnnnnnnnnnnnnnnnnnnnaagatgacttgagtttcttgcactcaaagagagagacacagtcagatgtgtctatggtattgcctagaacgtcttaactactgagaaaggatgcgggggtgcacgcacgtggttactgagtggggggtggggaggagggcaccaaggctttctcaagatttacctgatgtgaacgaatcactggcgtgaagttgtggggaaaagaaaaaggcaggatcagaaaacaactgaaaataatttacgcttcttaaaaaatatctctgcttcgggtggttgtacaaaatgatttcctgatgcttgggatctgaatggccctgggacaagctgcctgggccagccctgccgtgcggccctcggctctctcctggctggcgaaggcccagccccngggtcaantccatgaagncggtttaaccggttag

SEQ ID NO: 135357 - DNA, 759 bp, Homo Sapiens
ttttatcttcctaaaggttgttttattgtaaaaccataaatacaacactgacatgaaatcatttaagcaactgatcctctctaactgttaaaagttatctttttgccttggcatcaaccaactgggaaatagtgctgcaagaattcggggggcaggggaggtactgaatcccgggctggggcttttggcgacttaaagaaccgagtggaaccttcctcttctccctgggaatgttccacttttggacaagaacagacaggtaaaaacagcaacattaaacagctcagttttaaattttattactttgtaaaaatctttttttctgttcctttcctccatttgacatcagtaaatgttttgaacatcatgaaactgatttggctgtaaatggagaaacggcaccaaaacaaagtgaaacaaaaacccaaaggacaaacagaaaaccctaaataaaccctcaagtttggtctcgggggtttacatatcacaagaaccgtcaactcaacccccatgcaatgtgactccctggagagctgttggatccacaccgatacaggagaccgcacacaacatcttttgttaattaacacagcaagtgtgaagttgtggggaaaagaaaaaggcaggatcagaaaacaactgaaaataatttacgcttcttaaaaaatatctctgcttcgggtggttgtacaaaatgatttcctgatgcttgggatctgaatggccctggacgagctgcctgggccagccctgccgtgc

SEQ ID NO: 135358 - DNA, 1305 bp, Homo Sapiens
  misc_feature (1114)..(1114): n is a, c, g, or t
tggtttccccttagtgtgtaaaatggggataccattctaaccttaggcccaagttgtactgatgattaaacgagatattcatgtagggcatcagcatagtgccttaggagcttaataaataagcaggccattaagaaggggaatgcatcttgttacaactagcagcatcaaaccttgatgttgatgtttctaggtacttgaaacagccttcattacttagagaccatagcttttttgcaagttactattccctgcatttagaaagttcatctttaaacaggcaattcagtaagtaaatattctatggctctaaaacagatacggctgttggagactttaaaacatctgacagttacatttttaatgttgtctaccaaggctattacatgttcctctgtcaaagtaacttaattttaaaaacgaactctgtgcttgttaaacgaaaaggccagaaggctactggctactcagcgttcatttgaaattcttatagtgccttcagtacaattcaaacttagaggtgattctcacaattcatgtgaagcaacattttacaaaaaaaatcacctacgttcactgttaagtcagaagacagaatgattaacaaaatctcagccgcgaattactctcacgatggccaactggatattaaataactctgcattattttaatggaatgttataaaggatttgcaacaaaatgcagacgtagatttagggactgccgacttctatagatcaaggacttcattggtgcagctgaggaaattcttccaaacaagtctaaatgttggaaatccaccaaactgcagagaaagacctcttgcctccgtattctttcttcatctgtaaaaatgttgacttctgcttttcagactacgcgcacagcctctttatttcctactgcggcttcattccctcacggaacactgacgccatcgcgaaggaagcatttcgagcacgactgacgctccccttattatttgctaagccgctgcgctcgggtctggctacgatttgctttcagaataacgggaaggtgcaacaagatcgcttccctagaggcgcgtcgcccgcgtggcccggaccccccacgcccgcccgccgccccgtngggtgcgcacgcgtatccgcgcaggcttcccgcctggcgagtgcaaggctcctctccgccgtgctgctttccagcctctcagcaaatcacgaacaccgaaagaagccacggcggcgacgggaggggcgtcgcgcgtgcttccctcggcgacaaagcgggagccgggcgcgccggccgagggcgcccggcgc

SEQ ID NO: 135359 - DNA, 724 bp, Homo Sapiens
tttgtgtgccacaagtttattactcaataaatattctgtggtttgacgtgctgtattgtatttttaatgtatcctgatgagaaaaacaatcctaagacatcctgtaagtatcagacacgattgaataagaaggggaatgactccatgaaactatatttggcatcagtaagattcttctgccagttttctcgaaagcgaaccattcctggtctgtgaactaatgcttggtggtcacctacataagaaacaacaatgggtgcatccggtggtttggttttggagaccttcatggtgaagtaggtaccagcagagattcgtgctacgggtaggtcagcagttgagatactccagtgtacatagtagatgtagaggaagctgtgaattaagtctttcctctctacaaactctacgccatgtgcccagcattttttagaaacacacttcgaaaaatattcgtcaatttgtttaagacccttttccacagtgaattcaccgtgagtcatccacttgatgtttttcaaagggtttcgctcctcttccacaatcttaacaggataattgatgacatcctcacccagagctagagctacttgagtcaattcatcctcgtagttcttgtcttgtgtattcggcattgtttggcttgcggctttgttatcctcatccattgctttctggcttgttgaattttgagtctcactcattttctttttcccggagtgag

SEQ ID NO: 135360 - DNA, 567 bp, Homo Sapiens
tgtgtgccacaagtttattactcaataaatattctgtggtttgacgtgctgtattgtatttttaatgtatcctgatgagaaaaacaatcctaagacatcctgtaagtatcagacacgattgaataagaaggggaatgactccatgaaactatatttggcatcagtaagattcttctgccagttttctcgaaagcgaaccattcctggtctgtgaactaatgcttggtggtcacctacataagaaacaacaatgggtgcatccgaaaaatattcgtcaatttgtttaagacccttttccacagtgaattcaccgtgagtcatccacttgatgtttttcaaagggtttcgctcctcttccacaatcttaacagcataattgatgacatcctcaaccagagctagagctacttgagtcaattcatcctcgtagttcttgtcttgtgtattcggcattgtttggcttgcggctttgttatcctcatccattgctttctggcttgttgaattttgagtctcactcattttctttttccggagtgagcagatcttctcctcgtgccgaattct

SEQ ID NO: 135361 - DNA, 993 bp, Homo Sapiens
  misc_feature (164)..(176): n is a, c, g, or t
  misc_feature (396)..(396): n is a, c, g, or t
acattaaaaatcaagcatttaatttgtaaaccttaatgaaataacagcctactccagtttcttcaaaggtttgtgagctttttataagagtggtcaggaagtgcagaaaaacaacatggaagacaggatttggaaacaaggccaaaatttaaaagacttaaccnnnnnnnnnnnnnaaatgagccacagaagtgctcttttataatgttgacgcaaatcaacatttatattatagaaatgcactcagaagtaacagacacacaaggttaaaacctgattcttcccactaagttctggaaatttattctaacataatggtgcctttctgtacaaagaactgtaccatatcataaatttactgctagtaaactttaagccaccagaaatctttcagcntgtgacaagcacttgattgtaatgacagatttcagagtctgaatactgaaaaatatatatatccaataaaaaatttttgaagggggaataaaagcacataaatggcagcagaggaattgatgttctaagcctgttttattacatgggacatcacactacccttaatttcactgaaggtatctgaaatgggtgagatgaaatcaataggattttctgctaccattgtaacagttctatatgtagttacaaagggtgttattcctagtgatgatgacacctttcatgggattcaacttaaaaattaaatccttgcactttcaaagtttgaaactcaattcaaaatgagtccgtcttaaaagcctggctcatatggtcccattaagggaggctaacaatggtaatctataatacccaaacttgaagaataaagactttatggataaaaaggaataaaccaaaatatttgggctgttgaagtataagggcctgttgtaggacaatccctcctacttcctaatcccccccatacaatggcttaagatagccaaaacgtttattgtagaacgtttattattcctacaagcttatgtctcaccc

SEQ ID NO: 135362 - DNA, 966 bp, Homo Sapiens
aacatgacaagaaaatgacaaagtttctctaaggtttaatttatatttatgttttttgtatattcaccacccaaacacacagtcttctacttagtccggtctgtattaggtttcgtctgtttttgttctgccttggtttgctgtagcactttctgccgtgagcgtaactcacttccttgtaggagtttcctgaggctgccgtaacaatcgccacaaacctggtgacttaaataacaaatatttattttctcgtagctctggaagccggaagtccaaaaccaataacttggcagggctgtgctccctctgggagatctcggggagcctccttgctacatgttccgcttctggggacttctggtggtgtttccctggagggccaaggcctccgggcggcccgtgcattcggtgaacacctccaaagagctctgagtcacaaagccttgggaaactttattttattctttctaggacattatcagtagtcccgaggagacatcaattacataacaagaaaaaggaaggaagagaaaaatacaggtttggcctggtttaatgttgcaatgggaggatccatttccttacccttcaccatcaccgagctgggaacggagggagaagaggcccctcaacgtgggtttcttcaacgtggactctcctttctgtgcatctcagtgtccttgtgtttgcagctgggaggtcggccctgtcgttctcaccccaccgaggctcaggagcacggcttctgatttctcaggacaggcacatgcctgggtgccagcttttaactctccgctctctcctcctctgcacttctgttccgggaaaaggaatcctttctcaacaggcgacaacagttcaaggattcagccttgttgccagtgtcgtgtattagctccgatatgtgatgtctacaccaggcagtggcgcagtgaagtaaagggctataagaaatacacaaaatct

SEQ ID NO: 135363 - DNA, 472 bp, Homo Sapiens
  misc_feature (432)..(432): n is a, c, g, or t
acaatccaattacattcttttatttttaaatgtacaattattattgactatagtcaccccgttgtgctatcaaatagatccttttttttgtaccccaaacacaacgaaattaccaaagccaaaggtattctaggtacaggatttcaagtgactgacttttcatgtgatgatggactttatttctcccctctacttctgtccaaggtaaggacagcaaaaatatttgcctcaatgccttgcttgcagcagcagcccaaaggccatgctgaggagctggagttccctccaacctcccagattttacagctccaagagagattacatccttgcaccggggaaaattgaaactgtctttccccattatctatggaataatgttgttcagtctgcaacaaagagaaacatgaaaatatcatatataggataatgttntacacacatgccagcctgcccttcaactggctttcaattt

SEQ ID NO: 135364 - DNA, 591 bp, Homo Sapiens
tttttttacaagctccaatttttttaattagacccaacagaaacaaaaacactccaataaattgtttataaaagcttcctgtcagtatctgtacttatttcctcacagaccagtaacatctggttggcaggcactggtctgaggaccacacttcggtgctaaaagcctgtactatagtgcatccaattcagtcagcagaaccggggttcaagacctgacttcattactactagctggatagccagagaaagatcacttagcctttctaaggtccactttactcatttggatcaggttaattatatctatgattaagctttctgtgagagctcaataataatgtactaacctctcaggaagtacttgaaagttgaaactgaatcacataattggtacatttacatattaaacgtgaattgttttatctgatatctactccatcttcttactgaatggtgttttctccttgaatagaaacgtgttcagttgatcatcaaatacttaaaggaccttgaaagcttgtctggctctaattaaagcacagctacttggtgatcttaacagaaacctgtcctctctcggcctcgtgcc

SEQ ID NO: 135365 - DNA, 729 bp, Homo Sapiens
  misc_feature (538)..(546): n is a, c, g, or t
ttttcttgactggatgttatttaaaagatgaaatttcatggttcaaatgtatttttctcccataaaaatattttctcttccatttaaatatatacctaatctttgagaaatcttgcacaaatggcattttattaaagaaaatctaatttacaaagctttgtaaattttaagaaaaacattcatagatcataaacaaaaatttcaatatgcaatattcaaatttacaagaaaataagcacaaacttttagacagtgcagttattgctgcactcctttaattccttatccagagcccaaaaaatgtagacaaaccctaaaaatgtagcagaagcatttccgcacactggtgtccagaatctagtttgtgcagaaatgtttccactagatttatagagtactcttcagaagaaagaggcgagggctcgtcatttggtcaccctttggacattttgcaactcttcaatgggtttccattgttggttgattgttataagcttttgaggtacagtagggtccacagtttcccaaggttctggannnnnnnnncgatcaaggatcacatcggttttccaaagagaatacacagcgaaagatgaggctccacccgccgccacagtcatgaacaccaccaagggaatgagttccttccttttcatcaggagttggaaaaagctcatgatgacttcagcgaagaattgccaaatctggacgccgggcgcccacgcgtcc

SEQ ID NO: 135366 - DNA, 2141 bp, Homo Sapiens
  misc_feature (691)..(699): n is a, c, g, or t
ttttttttatcaacaacagaaatttatttctcacaattctggaggctgggaagtccaagatcaaggtgcttacagatttgttttctggtgaggacccacttcctggttcgtggatgtttgtcttctccctttcacatggcagaaggggtgatggagctctctgggtctctttatataagggcactaatcccattcatgagcgctgttactctcctgacctatcacttaccaaaagccccacctccaaataccatcacattggaaatgagatttcaacattagaattctcggtgcacacaaacattcagtctactgcagacattaaataagaatctagggtaaattctaacaaagaatacatttgagttaaagagtgaaacataagactttaagaaagaaggaacagtgaaaatattctttagaatgaaaatgatagtatttatgtactgaaaatatgtccttgacagtagtcattgtgtttgaagtaagtatggtagcataatctcctaaaagaacatttctgatacaaaaaggaattaatattgtgcggaaaaggcatgttccactctcccccagtcataccccaagtttgcactctttgctattcctgcctttaaccacttctaatttcttttcaatgaaaccactgagaaagtaggaaacagaaaatggtggtagtgaaccagatatnnnnnnnnncttccaatgaagaacttaataaataactttaaaaagaacatttttatactctagccattatcatagtacttggtaaatacgggtatgttggcatctttttccttgacccatcagaagtcttgaaagatgtggtcctccggagtttcaaagtgttttatttattgaagaatgaatttcactactaaccttatttctttcatattctactggctattttaccaatataaatttagtcttcataaataaaaaaaatatgttttcatagcagcaagtctacgtccattattgtgaagtttgctttcaaggagatttcgtgttccatcatgaattaaattatctgctccctaagtaacttcatttgcaaaatgtcaataaagttcatagctctctattaaaattcgagccactctgtcatgtaaatacagttagatggtgaaatctcaccaccttcgtggcagtcatcaaaaaccgggcagagtccacagggtgcccggaccaaacccgtgggagggatgattggattgactgccctgtacagtttcatgtgtccatctacactgccaactgtgccttcttttgcagcaataatcgtcatctccacttttccatcataaatgagtgtattcaggatggtttcaatgtcttccatggataactctaccttactgatttccaattcgcagatatatttccacacttcatgtgatgaggcaaatgaactatttctttgtatcattgggttctgtttgctttctcgtgctgtttctgccttggactgtaggaatttaaaacactgttggttaagcacctgctaccaattcagattccaaatcctggtcactgtaccaggctccaccagtcacagaccggtctggctgcaggttatagagcatatacaccttcttttttgaggctgctacagacttaacagctttgataagcttttttactttccagattcttcagaattttgttgatttctgttaatggcaaattacttttatagcggatatctctgctccatattcctttatttcctgcatcctctatgatttgatatactagtttttcttggttatcggatcccttcattttaccagcattctgagagtcctttattctatataaaaggcccgtattgctccttaagagatccaactgacccatagacaacaacctattgatggctactgcccgctgctgggcttctatatgaggcatttcattctgaattacttggtctgtgattccatgagggaactggtgacataattctataatcctgttttctatttcgaccggatccgcgtcaggcggctgcaccttcaccttcacctccgccatgagggcgcagttcctgacgcctggggggaaagatgcacggagcagcccggtagcaagccggggaacccgggtaaccagtggaggatagcgctctgctg

SEQ ID NO: 135367 - DNA, 765 bp, Homo Sapiens
  misc_feature (441)..(450): n is a, c, g, or t
  misc_feature (646)..(658): n is a, c, g, or t
atagctctcaagctgtcctttttacaggaggtgcatcctgcagccttgcctgtgttaaagagagtctgtctcagtccatcaaacagtatagaactataaatgggcatctggatcattaaagtatgtccttgtttagaaactttggcagtcctagtatttaaactgttttgaggatcaaatttttggttgcccttaagatactttgtcacagtttttatgtttgctatactgccgaatgaatttatatctcccaaagttgagatgcaacaactaagtaaagcaactatgtatgctttgtctgtgaattgttccacagactgatagattttgtaaataattcttccaaaatcatgtatttaaagcagttttgcatatacattatgtaaaaaggtgattttataaaagcagtttttaaattcatgtttgtacattgaaaggggnnnnnnnnnnaaacctccttttctgtgtttaatatgctgtagaataataacctagatgctctagactgtatatcaggatctgatttacaagaaaaagtcagagctaaacactagtgatggcatagcattactgaaatcattgtttcttaatttcattttactacattgtgaacttgtgattcagattccattttctcagagaattnnnnnnnnnnnnngtactcttgtaaaatgcacttttctgtcttttctttgcaaagcagaagtatctcaatgtaaaataaaaatggagctcagtgggcagtattaataaaggccatgtttt

SEQ ID NO: 135368 - DNA, 699 bp, Homo Sapiens
caggtggagtcaacagctttatttcagagcagcccaagtgtgtccgtggggcctgccttgccttctgcctccctgcagctgaggtggctaggcttgacacacgtacacaggtgcatcagacgtgtggacatgcagacacagacacacggagcatgggtacatcaccgcgtgtcggcacgtccagccgcactcgtgtgcacgcgggaacccccctccgccccgggcctccttgagacccaccccaggcagtgtaggtggtttgaccagaggcgccgacatgcccggtgcctgcctccccacggccgcgtgtgctgcttcctgggctgctggtctggcccaccctgggccgctggggagcctgctgctgccacagctgcaaggaccaggccaagagatcgcacagccctggcaggtctggttcaggtgtccagagtctcaaggggctggggcccagcccagctctcttcggctgagactcccgccagaacccctggaagcatcacccgtgggagatgaggcccgctgggctccgggtcatctgacgtgccgcctgcaggcgggggcatctgactggcctctggcttgatgctggacgcccctgaggcacggctggctctgggccaggagaacacgccctgcggagccggcggccgcctagcacagggtgagggcagagcatcgagcagcagctcaggagct

SEQ ID NO: 135369 - DNA, 219 bp, Homo Sapiens
ggctttaatggtttcacattgaagcctgaagttgctaagacttaggttgtttcttatatctggttttaagtagatgaaacaaccagaaacttttacttgtgatactctaccatgaaggatgcggtaatggcaggaatagcagaataattggtgcttgtaaacatttaagattctcctgtggattttggtgagtgatcattaaactgttttccaacttgc

SEQ ID NO: 135370 - DNA, 404 bp, Homo Sapiens
tttcaacttcttcaggtggtagtgtagataggataattcactagaacccgttattctcactgcatgagatagtgctagcttctttccccaaataacatttattggtatgcctaggatccaattatttaatttattatttactgttttacattcagatttttacaaagtggattgtaattcaatggttacttttgagttactctgtagaaaagtaagtgagcaagcaggcatttgaaaaagtcttctagcatttcagacaaacctagcttgattcatgtaggtaactattgatgagatctgtgtagttacagccaaaggctatttaatttaaataggcagttgttactatccacactattgagccaaacattccctcctattgattccaatggggaaaaaaaccc

SEQ ID NO: 135371 - DNA, 530 bp, Homo Sapiens
ctcttgtatgacattactcttcttgagacttgtatatgcaagaaagtatatataaaagatgcctggtggtaactttgtatctgagttctgattcattatggacttttagaaatctatttagataattggttcatactaggtgctcaattactctgaccttgtgtggcttaatccttaaatagttgctttaggtgttactgggtggaagcatggaaagtgaagggctaatattaaggatttttatgtattactgagtagggaaagtgggaagtagcttatctttggacagttgtattactttgcactaatcaccttgtttgcagttgtagctgattcagttctagattttaggaccaaaaagatctctaatttaaagaaacagtttttatatacctagaatgaagattctgtttaaagcggttttggttaacttggttcttgacatttgcctaaaattttgttggattgggactaaaatgttctattagcccaatgaataacgtccaagtaaatttttgttttattttggg

SEQ ID NO: 135372 - DNA, 797 bp, Homo Sapiens
  misc_feature (440)..(456): n is a, c, g, or t
ctaaaagcaatttatttaaggggattaagcccccccaaggttcagaggtaattggagccccctagtatggaccccaattattctaaataggatttctaaaaggtcccataatgaattcagaatctcagatacaaaggttaccccccaggcatcttttatatatactttcttgcatatacaagtctcaagaagagtaatgtcatacaagagcactaggaattgccacatactcccaaatgggcagcaaaaggaacaaacattactgatttaaaacagtatatacatactaactcaaaaaaataattcggtaaatcattttctaacttgtgtgggtaactttttcccttccatttagaagtgaacaattggctaccagtttagtacagaagtaatcaacagcacaaaagctaaattctgtccaaatgggaattctaagctcnnnnnnnnnnnnnnnnngatgcaatctccaggagccattaatttctgccccagctcaacctatggaatttacctatatgaagtgttcataattctcatctcatagaaaaacttctttgcacaacgcaaaggacttacacaaagggatctgagtcactaaatgtgaaatactaatcatggtattttttaacagattatacaccccttaacagctttcaaaatatattttatgttgcaggctacctatctaaaaaataataaaacatgttttactaacaagttttatcttgcccttactttgattatatagaggtgtaaagtatgctttaaaattacttctaatttcacagcttcctgcc

SEQ ID NO: 135373 - DNA, 487 bp, Homo Sapiens
tcttttatattattttattagtacttataaaaacaatttatgaaaatattttccttttcaagatatagaaactacgctctgcaaaatatacatacccatagttgttacaatacatatccttgtatacaccttggacattgtgtttaagaatcacaccctgtaagggctagaagaaacattttctctaacctcagttatatagtgtgacattcaagtacttaaactacattgttcaaacaaaacatgtctctagtgtatgggcctaaagggatttaactttctaggtgccattgattctttcactgtgcaaggtaaagaactggaagagggttccctgagagttaattcaccttaggtagctcaagtagtggtttactgtccatactttatcatggaactaaggaagggaggaaggccatggaaattcaacttgggcaggtctcctctctatcatccctatctacgaagcatggcccctcctcgtgcc

SEQ ID NO: 135374 - DNA, 511 bp, Homo Sapiens
tttttgcaagttagagcactatatttaattcaacatggttgacctagaaatggaaggaatagtgaattaggatatggtaaacactgtttatcacaaagacccaaaatagcagtggcttaaatctgatagtttattcttctttcacatgaacgtttgagcagctacggttcctcttctctacagaatcatcagagtccttggttccttttatctttgtcttcatccacatagtccaaggtagctcactaccaagtccacattccagtcagcgggaaggaagacagcaaaggatggaatcatcacacttttcaaggacagaagccagaagttgaacatgtgccttctatccatatcctcttaaccaggagttagttacatggacactgtgactttagccagctgttatgttttcagacagtgatttgctttagtcttctcttccttgcagaatcataaggaaccttagcttatgagagcagtttcttcaagaatctgcggccgccctcgtgcc

SEQ ID NO: 135375 - DNA, 527 bp, Homo Sapiens
  misc_feature (309)..(381): n is a, c, g, or t
aacattaaaaaataagtttattggtctgttgtcttaacaataggggaaaccattaataatattgtaagttcttctttcagaagtcacagacggtccattctctaaatggaattaagcctgaagtttccaggaagataggtgcccagattttttccgtagcattttcatttatttcagtaattagacaacacatgtgtttaatttttaaagggtacccaaataatggacaggatgggaaggaggcataaaatgataaagtgtagtttatcaccattatggcttatcactagagttgtgctgttcattatnnnnnnnnnnnnnnnnnnnnnnnnnnnnnnnnnnnnnnnnnnnnnnnnnnnnnnnnnnnnnnnnnnnnnnnnnaaataatggatactcaatttagatatatacaaacagttcatttcatcctgtccaattttctgcaactctcttgttttaggcccatcatccatcactgaggctcttccaacagcttaactactttccttttctaatgaaacactctg

SEQ ID NO: 135376 - DNA, 420 bp, Homo Sapiens
tttgtgatgtcaatatttttattaggtatggcctctggtgttttcttagtccatttgggttgctatagcaaaataccaaagatactggacaggtaataaacaacagacatttattgcccacagttctggagactggaagtccagtatcaagatgcggcagattcaatgtctggtggggacccactttctcattcatagacagagccttccctctgtgtcctcacactgtggaaggagcaagcgagctctctggaatcctttttgtaggagtgctcatcccattcatgaggctccactctcatgacctcatcacctcccagaggctccacctgaaactcatttgatttggagatttaaagagtagctgtagggcatgttgtacaacttttagaaactttccgaaatgttagccctcgtgcc

SEQ ID NO: 135377 - DNA, 1292 bp, Homo Sapiens
  misc_feature (555)..(575): n is a, c, g, or t
  misc_feature (867)..(894): n is a, c, g, or t
  misc_feature (1011)..(1077): n is a, c, g, or t
  misc_feature (1092)..(1158): n is a, c, g, or t
  misc_feature (1169)..(1182): n is a, c, g, or t
tctgcgggtatatttctcatgggggatgcattatgtgagagtgggcccagtgaaagagttaccaagccacccacaccccgtaacactgttctggatgagagatgagagcagaccggcttctccccatcagtgcattgtgcctgttgtacacccctggaggagccctggagccagcccaggtggggtacacaatctttttaaattccatatggttgccagcttatttctttcacttgtttactgtaatatctggcgtgtttttatttatctaattttgtattcagttataaccatggtaggggtagtgaatatatgacaggtgtaatccctggtgctgcagtggaccttcttttcttttggacaagataatactgtgagtttccctccttccttccctctaatttgttttccttttttccccagcctcttgcatccccttcttttctaccctgtcctacaactatcatatgcacagtcttctctctttgtgtgtgactgttacaaaatttcacttttcaaaatcgaaatcaggtgtttgctcaaatgaggggagannnnnnnnnnnnnnnnnnnnngtaaatgctgagacctcagcagagtacttttctttttgttgtttcccccacaaacccatcagtctgggagagcattgggagtggaaatcatgttgcctgggatgctggtttctttgtatattatataaaacgtatgtaaatgtctctccatttgggctggggtttgcattctccccttggctatttaaccaaggggagaggccagcgggcaggcggccctcaccctgcctggcacgtgcagagaccccagccactctgtgtgggcagggtgctgtcaagaccagacctcttnnnnnnnnnnnnnnnnnnnnnnnnnnnnaactcttggaagggaagaagtatcacttctttctcaagtggagtgtttacaccttgctgtaacatttgaactttcacaagagatgtaataattttgataataaaattcttaaccatnnnnnnnnnnnnnnnnnnnnnnnnnnnnnnnnnnnnnnnnnnnnnnnnnnnnnnnnnnnnnnnnnnnggtcccctgggctcnnnnnnnnnnnnnnnnnnnnnnnnnnnnnnnnnnnnnnnnnnnnnnnnnnnnnnnnnnnnnnnnnnntctttggcggnnnnnnnnnnnnnnaaaaatttttttaaacctttctttgggccccgggccccaaaaggaaagggaacggggccatagttgtttccaagaaaacccgggccagaacaagggttggaattcccccc

SEQ ID NO: 135378 - DNA, 1335 bp, Homo Sapiens
  misc_feature (727)..(727): n is a, c, g, or t
cataataaaattcattctttattgagtgcatggtggcccaggtgctattccatgtatgtcataggtgtgaaaccttaaatctttccaacagccactgccttatggagactgtatcatccttatcttcatcttacaggtgagaaatctgcagtgaagaaaggtacatcccaaggggacaccgacagtaagcagcggagctgggattccagacacgtggctgggcctctgcaggaagaaatcaaacgtgtggaagggttggggagaggagatgcctagaagggattttcctgtattctcttagtggtgggggtaagaccgaggacccaagtcctcactcatcacgtcctccccagtgatgcaaggatggagctggggtaaaaccagggagaatcaggaccctcacgtcgctgcgtttattaagcatcagggtcagagctgggcaggagaggaggggaggcaaggtctaggtgagagacgttctggaaccatccagtggggtggtaggtcgggaggtagatgtcacatgtcagggtcacttggcctgaatggtttttttggatccagttcgtgtatctgcagacgttggtgtagactcctggcttctcctttgatccacaggggatgttaccccatgacacaaggcctcggaggtggtctccacataccagcgggcccccagaatcaccctggcaggaatccttcccgtacttctcatccccagcacacnacatgttctgggtgatctggccagggtaggcatgctcacactcctcacgggacaccaggtggatgtatgcacactggatggtgtcagggaaatcaccatctgctgtcttgccccagcccaggatgtggcagctggtggtgttggctgagcagtccctctccaggggaaggggctggatgagttcagagagctttggctagggcgtgccaggcgcaacagcatgatgtcctggtcatggctggcggcatcatagtcaggatggatcacagcccggacaacagaactctgctcctgggaactctccctttgccgaaggttatgcttccccaggaagacctgaagattcggtttttgtgcagtgggcacgctgtgaggacccacagtggatggataaggaccccaccacagagcaagtggcccgaggtgtagagggcagcttgcgtaggggtgagactcgtctttgtcgcagggtccgccactgcaccaacttattctgctcctctgcccaggctgcagcaatcagactcagcaccaccatcagcattcgttcatgccgcgtcctgcctgtcaggcctccgggcctccggggattcttgagtcgggggaag

SEQ ID NO: 135379 - DNA, 1297 bp, Homo Sapiens
cactgggtcagatgatttcatttcagtgcatgaatagcgccaacaaccctgcacatatccctcgggctaacaaaacacagataagctatagttaagaattcagtcactcatatacctcctgacataatttcactacatgatgaatttggtattaaaataagacggagacacacataaaatggccacaacacacatttggtttctgaatccctgtttggggccaaactgaccctggctgtacaggcagcctctctggcacaggccgcatctgaggcaggaggcacagagccctcaggcaggggacacagccactgccgggccccatgggcccagggacaggggaggagggacagttggctccctgggaggaggagcaggggctggcaatccccaaagttccctcctttaaaaacacgggtctagaaatgccttctcggcacacagtacagagtgcagctagaaggtccgactcgttttctgttaaagtatgttctagtgggaaggggaggagcttgcactccacatcacgtgtttactgaaaaagccctgtggaagatttccatttggcatctgtgtagcagcatcttgggttaacaagagcaaggaccagggaggtgggcgacgacactctgtgagcttaggcgctgggtcggggaggagggctggctggcagaccccaggctggaatgacaggatgaagtcaacttgcctcttgccaatgataaaccatgggttttaaattcattaacattcattttggtgataaaaattccttagggtgggagcaaaatcacattcccaagcaaatgttaaatcttcctgagggaaaggggtacagttaaacattaaattctcaaaataccactgagctcagagaggtgattgcaggtccctctgaggcaggctacaccccacagtgatgacagacttggcaggttctgcagtaacacggtcttcttcattcagccagcgagatcgacggtgatgcccactggggcacagaggaagggtgcccctcgctgggagggccaaggaaggctaccggaggggcaagtccagcccatcagggtcacatcatgggatcacagcagagttcagacagaacaacttaaaactctgcaaaagacactttaaaaacatgatctcttgaaaaaataaatcgcaacaattttcaactttatgcaaatcgagggcagaggagtgtgaataatgataaaagggagagctgaaaaaataaacatgattctatttgggcggaatcagttcatctccaaaatcttgaacgccatgccccggc

SEQ ID NO: 135380 - DNA, 695 bp, Homo Sapiens
  misc_feature (255)..(265): n is a, c, g, or t
caagttacatttattactaatataatttcaattttccgtatgcatatttcaaatacagtcttttgtgataaacagaagtggaaatgttaatctatttaacaagagaacacaattttttaaaatagaaaagtgtggaccatgtagatattagtactttgaatagaaatctaatgtgaaaatttactttctcttaaaaaaacaaatatttctggaatttctctctagttgtaataactgtgcctgtttgatataacnnnnnnnnnnngcatatacatacttgagccctaataggttggccctttccaatgtgtataattgtgccaaaatataaaagagacatattcagagataaatgaacaagaatccacgcatttaagaaactcaaaatacaagacaaattttaaatcatcttaatggatatttcaaacacatgcattggtataacatttaaacctaagaaggaggaaaagtgccaaattagtgtctctatgactggcatgctctctttttagggaaggctttttaatccacagtaaaactcaaactctttctacctatgtgattgatactaacaaacaaatgctttataacaaatgtggtatgtattttcaaagcaacggctcttctctacacttgctattattttagaactttagtgagaacaatagtcatctacatcttctcacccataggaa

SEQ ID NO: 135381 - DNA, 763 bp, Homo Sapiens
  misc_feature (741)..(741): n is a, c, g, or t
cgtggtggtccatgcctgacgtgtcccctagttcaagaaagctaaaaagcccatttaaaaattcacagtaaatatatccttattttattgaacacttaaaaaaatctaaattagtacatatctgcaaatttataaatggcaatttcaatggaaaacaaattttataagtaccacaaagcagacaacaaaaatgtctctttaaaaaatgaacaaattcaaatgtataaggaaatttcagctcattttttcttcatttcctaggggaacgcaattgttttcatgctaaagatggcgcttccttgaactaggggacacgtcaggcatggaccaccacgtggagagggaggctaacagcatctgcccacatcccagccgcctgtgacagaatcttccatacacatggctcccagatgagcaccaaagggagaccacagcagatacgattctgtggacttgagaaccaaatctatacaaatattttcaactctaagtccccaagagaacattaacatttttgtctatgaaataatttttccagcaatgaatttttttgatattccacgagctgggagggaacaagcataccttgaagacatatgtattggcatcaaatgtcacataaacacacaacagctgggaacacacatgctatgtatgtcaccatgtgatcacaaccacagcacatgtgaagtgctacaattactcctcagagcggtggaatggcagaggagcttgcatganaaatcagaacatacccgtacac

SEQ ID NO: 135382 - DNA, 686 bp, Homo Sapiens
ttttttactgtccaaactttttattgatatagttaaactgtacaacgatgtcatgaaatactatacacagagccttcaggtaaagagaaaaaaagcaaatttaaatatgttaaccagattaaagcatgcaaaagatccaatgataaagacattaaattaataatatgctaatagtatctaatttacccactatagggtctttatactctgtcacaaaaatattagtaaacatcaatttgaagttcggtgaacggacctgattcctgatttgtatatatgatatacccttgcatttatatggctaactttacaggctgtgttacagtacagttagaggaattggtataaatttactccccatactgcagtaaataatggttggaaatgattctcctaatttgctctgtgaactcagaatgcattaatgaattaacaacacaggtcactgagggaccaaaattcctcagtattcacattaacttttcccatgaaaagctttaaatataactctaataaaaaaatagagttctcaaggcaaactttcagcataatttacagaagcagatttaaatagaagagtcaataatcaagctaatactaaaaaatactctttactaagatgtctctcttttttctacatttatattaaaatataatgggctcagcaacagactgacatgccatta

SEQ ID NO: 135383 - DNA, 604 bp, Homo Sapiens
  misc_feature (300)..(389): n is a, c, g, or t
  misc_feature (458)..(458): n is a, c, g, or t
  misc_feature (564)..(564): n is a, c, g, or t
tttttttactgcccattagaacatttatttctcagagagaaaataagtttcagacagtcatattatagtaggtaaaattaacttttgtattctttacaagcatagatttttctctgtttattacctctcttataccatctgttataaacaattctagaaagcaaataaagtcactctctacaataaatagagcatcatgtgcttcacagcagacgcgacagagacacataggccccgtgccacagcaggatctgagccgtttcccgttctaaaagagcattttaaaaaatgagactcagnnnnnnnnnnnnnnnnnnnnnnnnnnnnnnnnnnnnnnnnnnnnnnnnnnnnnnnnnnnnnnnnnnnnnnnnnnnnnnnnnnnnnnnnnngaagtcccaagatcttacaacacaggtttagacaaaggtcacagagtccacagctgaccaactacctgnggagaggggaagcactggctcctttaaatcaacgacactgtgtggccacacaatggaggactccagtaatggaaactataggcctgaataatttagaacagtattntacaattatatacaccatgtccttccctagccatatgctg

SEQ ID NO: 135384 - DNA, 726 bp, Homo Sapiens
  misc_feature (43)..(61): n is a, c, g, or t
  misc_feature (553)..(563): n is a, c, g, or t
gctgtgcagaagctcttagtttgattaggtctcatttatcaannnnnnnnnnnnnnnnnnncacaattgctactggagtttttgtcatgaaatcttcatcagggccaatatcacataatggtatttcctaggctttcttctagggttataattttatagttttaggttttacatttaagtctttaatgcatcttgagttaatttttgtatgtggtgaaaggaaggggtccagtttcaatcttctttacatggctatccagttaacctggcaccacttgttgaataatgaatcctttccccattgcttgtttttgtcaactttctcaaagatcagatggtcgtagttgtgtggctttatttctgagttctcttaactgttccattggtctgtgcgtctaccagtaccatgctgttttgattactgtacccttctagtatagtctaaagtcagatagtgtgatgcctcaagctttgttctctttgcttaggattgcattggctatccaggctatttgttgttgttgttgtttttccatatgaattttggaatagnnnnnnnnnnnctaattttgtgaaaaattcattggtaattttgatagaaatagcattgaatctgcaaattgctttaggcaataaggccattttaatattgatttttccgatccatgagcatataatgtttttctacttgtttgtgtcatctctgatttctcctcgtgccgattc

SEQ ID NO: 135385 - DNA, 1790 bp, Homo Sapiens
ttttttttaccctttgactctcttttaatgccacgggaggatctccttgcccagctcccaggaatgtttgcccttctcagtctgttccacttctaggaggcagccaccaggcctcagccatccggccaagaaaacagaaaatatggggacagaacagtcattcgtgcacatcccagatctcagagagcagcggtgggagctttttgtcctgcagacgcagtgcaaacacttgctctgagtggacgctgctcagggtccggaggctcaccagtttcattagcatccgtgggaacatcagtcggtcatggggatggtggatggagacgtaggcatgcagggcttccacatatgtgtgctgcagcctctctacctggagctggtcctgcacgttgggccggtctgcagagaagatgctgatagcaatgagcaaggcaaactcggcatcattgagttgcagctcattcatggccctggagaactcgaagatggggttgatgaattccacttgcagccctgctttggcaaagtcttcccggttataactgaaatccttgaggaaggtgatactctcactcccagggttgtacctccgagatgtctccagaagcatcacctcgatcgcagaggtcttcagcagggcaatctggtcctcccggctgagctgcaggaagccgggtagctgtttagcaaagtcaactatctcctgcacagagacgatggccagctcagtgaagtgggcaaagcgctgctgacgggcctcccggctatggggatctggtgccatgggccaaggcgtgactcgaagccggtcagaaaaggagcgccggttacactgttgctgggcagcgacgagcttctcgatcatgcccagttgttccgggctgagctggggcaggatttgggggggtgaggaagccctggggggcaaggaatgtggcatgagcctgttcctcctcttgccgcttcagtttcttcaggcggatctgttcttctgacaggacacactcctcccgcatgccagcctgacggcatttgcgaagccgacactcctggcacttgcgacgcatgtaggtgtccatggggcagtggccgccactgtggcagatgtagtgcgctcccttgatgacgctgcggcggaagaatcccttgcagccctcgcagctcagaacattgtagtggaagcccgaggccttgtccccacacacactgcatagctcgttccccagcattttgggggctggcccctttttccgcttttgtggacggatctctgtgggttctgaagggggctctgccctggtgagcagggctgtgggctctgcagcctccagccccacccctgcagtacccccagcagagtggggcatcctggcttcctctctgaggatgcagctgctgcctccctgggcctggctgcttgcatcctgtgcgcctggcttccacagctccaccgcagagtcaggaggaatgtcaggcacaggggcccccagccacaaggacatctcttcctggagccctggtcattaccaaggcactgtccaaatccccaggccaccagacttcctgggtgggcagtctctggagcccccttgctgggagaagaggatggtgcagtttcctgtccagaagtctcggtggccagccagtgagctggagctgagcacaagcaggacctggagccccagagaagtagcaaggtaaggaaaggccagcgctcttgattggaagaattccggacccgtaccatccttgttgtgtgttgtgggtttgtacggaataaaatttaaagt

SEQ ID NO: 135386 - DNA, 1038 bp, Homo Sapiens
  misc_feature (919)..(929): n is a, c, g, or t
ttttccagactgaccaaaattgtttattgatttattgttttaagaatgtttgttgattcatggtagataataaagaatggtgcttggatttgagattgtcaatattttattcttctcatctagagcagcagacactttgtttgtgtggtatgaattcaattcagagaaaaactgaagatgtataaaaattcagggagttgctcagtcttgaaccgtccagattgctttgttttcctgaatgatggtaaacagatctggagagtttgtcatgggtgtgattaaaataagtttccagccagtcttcctaaacaatgcttgttcttgagagctccattcagatagacatgatgtgcttgacaaaagcttcgtagttgatgcagccattggagtcttcttgacctgccatcagggcttccacttcttcctctttcatcttttcacccagggtggctagaacatggcggagttcagcacccatgactgtgccattgccttccttgtcaaagacacgcagaccctcaacaaagtcttcataggtggcctggtccttgttgttggaaatggcttgcatcataggcagaaattgttcaaactcaattttcttggcattcagctcttcattgctggggtttcccagaactttcctgacctctgcattggtgggatttgtgcccagagctcgaaggacatcaccgacctggcttaaggtgatcttggaatcacctgttctgtcaaacaggagaaatgcctctttgaattcatcctgctgttccttagagaactcgatcttaatggcagagaggtcaattttttcttctttgggtttggctggggcaggggcaggtgcaggtgccggtgccggggctggggcagccgcagccgcagccacaggtttcttcacgtctttctttggtgccannnnnnnnnnnaaaagggtgggttaaaaagagaaggagttcctccaaaagaacctgtcaaaatgattcttggaagaggagtggtggttgggttgatccacagcccagtgtcttgaagatc

SEQ ID NO: 135387 - DNA, 1402 bp, Homo Sapiens
tttttttcttgttttacaaaactttttattcatcagagctgtagtgaaatatcatcattgtaattgatattctagcactacaaaaggcacaatgaagcttatttagttccagtactggaaatcagaggtaacagcacatccttccttggacatgctttactctgctgtagtggtcatcacagttttgattttctggataagaagttcaccacagcatttgtgcattcatctgatagccatcttccctgaaggacattgcattcttcagcattaacagcgtgtagtttttctctctctcttttcctgattacctcttttgaaattctcaaggcatttgggggaagctttgcaaatgccttcagcctggtccagacttctttctgaaaagtgctatcagggaaaacttcagtaacaagtccttgagcacatgcctctcccgctgttaacttctttccaaaaataagcatctctgttgccttggctgggctcattatcttcggaaaagtgtaagaggagcatccttccggactttggcctaggtgactaaatggtgtatgaaatgttgccctgtcagatgcatacacggcatcgaatagcccaaggagggtgacggagatgcccacagctggaccattgaccactgcaatcagaggcttaggaaaatctataaaacagcccacaaattccctcagtaaaacggcattatttttagctttctcctctactccaccagggggaatatcagtgaagttagtcagatcattcccactactgtaatagtcaccatttcctgttaaaacagtgatgattgagtcatccttgctggcagctttaagtgcacgcataatttcatgatacatctcagtgtttatggcatttttctttttgggccggttgaacatgatctttgtgatgccatcttcggaggtcaccaccagagtttcaaacccagttgatttcctgtctgttccaggctccacctgactagaggattccaatgaaggactcaaactggacaccaaatccacatagttctgcctggcagcttccttgggcaggctgccaagggcattccatgcgtcccatttggccttgttgatcaagtcaaatacacctggtttgggcatgttacaaggtccttcagtggcctgcttatatagcgcgtagagttttagcttcacttcgtttcctggatcctttttcaagagtttcacttgattcattgaattttcaaagtccttctgactggctctcattgctgttctattcatgtgcagctgaactaccgggaaactagtgacctcggacacgaacgccgcgccagtctccaagccaagtacgccatcgccatcccttgggcggctctagggctgcggatcccgggaattccggaccggtccac

SEQ ID NO: 135388 - DNA, 802 bp, Homo Sapiens
aggaaggatgccccaccaggctgggacccattgaccccactgcaaattcagagggtttagggaaaatctataaaaacaagcccacaaattccctcagtaaaaacggcattatttttagctttttcctttactccaccagggggaatatcagtgaagttagtcagatcattccccactactgtaatagtcaccatttcctgttaaaacagtgatgattgagtcatccttgctggcagctttaagtgcacgcataatttcatgatacatctcagtgtttatggcatttttctttttgggccggttgaacatgatctttgtgatgccatcttcggaggtcaccaccagagtttcaaacccagttgatttcctgtctgttccaggctccacctgactagaggattccaatgaaggactcaaactggacaccaaatccacatagttctgcctggcagcttccttgggcaggctgccaagggcattccatgcgtcccatttggccttgttgatcaagtcaaatacacctggtttgggcatgttacaaggtccttcagtggcctgcttatatagcgcgtagagttttagcttcacttcgtttcctggatcctttttcaagagtttcacttgattcattgaattttcaaagtccttctgactggctctcattgctgttctattcatgtgcagctgaactaccgggaaactagtgacctgcagagaactcggacacgaacgccgcgccagtctccaagccaagtacgccatcgccatcccttgggcggctctagggctgcgggggctcccc

SEQ ID NO: 135389 - DNA, 439 bp, Homo Sapiens
tttttttaccatgccactttatgtattattatgttggggaggaatgataacagggaacaagaagagaagcaggggttaatccactcactttcctctttagagaagctccctcacccatcccaacacctcaagtcacactcatgaagatagagacagtcatttgggagatttaaagggatatcctcaaaacagaacaccagcctctcaccaccagagatgaccggaaatatgttttctcttcttccttccctgcatcaggggaagaggctggtgaagttggtgagcatcagctggaccagctgccctgggtagagagcatgggctgctgggtcagatgtctcctgctctggccgaaacagggttggtccaaacacaattcccaggttgtggggtgtcatgcgattcttatctgagtgtgctatcaccctgcataaatgct

SEQ ID NO: 135390 - DNA, 307 bp, Homo Sapiens
cttcttctgcggagggctcagtttcctcatgcctcttatccgagaaagcagctctttgataaattcctctgttggtttgtagcagtctacaagagcttcctgtaattttgaagctctctcttcatcactgtctgcatcaagaagatcatcaatgtcaatttctacctctggcatttcttcttcctcgcagccgtagagctgacccagctgctccacgatccattcctccagcaccagccgcttccgaagctccttacgatcgtatttcactgtcacttttccctgctggtgtcgccgctgctgttgc

SEQ ID NO: 135391 - DNA, 766 bp, Homo Sapiens
ccaattttgcaacagagtttattgaggtgcccccccgtgggcctggccctgcccctcattcctctttctcgtctccatgggtgatgatgtagcacagtgacttgtagtcgatgttccccgccaggtccatgggtgtcagggcgaacatctgctccacccttccagcaactgcctcactggtactgggctctgggtcatgggtgaaggcccagagaaggtgctggggatgagtattgaaggggctgggcagcctcacctcagctggagagaacttgtctgcctgggtcaggagaagctgcttgaactcatccttgttcaccacccctttgccgctggggtcaaacatgcggaaggcactcaggatggcttcctcggggtctgtcccattgagcttctccccaaagagcgtgaggaagacggtgaagttgagtgggcccttgccctcttgcagcattggcgtccagctcctcctctgggacactcaccttccccagctgggagtaggtctccctcaggtctgccttgcagatgatgccatcacgattctggtcgatacagctgaaggcctgtgggatgggggccttcaggtgggagcagcccccagctctagggaaggtgggaggtgggggagagacttctttgaactcctgtatctgggcttgttcaaacatggaaaagacgttggaagaaccacgttgggcctgcttggtggctgccaccttgccccgggtccccgccttcctgctggccattctctctgcagagg

SEQ ID NO: 135392 - DNA, 607 bp, Homo Sapiens
  misc_feature (595)..(595): n is a, c, g, or t
tttttttccaattttgcaacagagtttattgaggtgcccccccgtgggcctggccctgcccctcattcctctttctcgtctccatgggtgatgatgtagcacagtgacttgtagtcgatgttccccgccaggtccatgggtgtcagggcgaacatctgctccacctcagctggagagaacttgtctgcctgggtcaggagaagctgcttgaactcatccttgttcaccacccctttgccgctggggtcaaacatgcggaaggcactcaggatggcttcctcggggtctgtcccattgagcttctccccaaagagcgtgaggaagacggtgaagttgatggggcccttgccctcttgcagcatggcgtccagctcctcctctgggacactcaccttccccagctgggagtaggtctccctcaggtctgccttgcagatgatgccatcacgattctggtcgatacagctgaaggcttctttgaactcctgtatctgggcttgttcaaacatggaaaagacgttggaagaaccacgttgggcctgcttggtggctgccaccttgccccgggtccccgccttcctgctggccattactnctgctgcagagg

SEQ ID NO: 135393 - DNA, 417 bp, Homo Sapiens
  misc_feature (88)..(88): n is a, c, g, or t
agcaagggcagctacatggaggttcgaaccggggaccctccggaacgcagggactgtgagctgggccggccgggccccgacaggcagnagttcggtggccgagatctccaccatcgccaaggaggtggacaaggtcaaccagatcatcaacaactgcatcgacgcgctcaagtccgagtccacctccttccagggcgtcaagtcggggcccgtgtccgtcgcggagccgccgctggtgctgctgtccgagccgctggccgccaagcacggcttcctggcgcccgggtacaaggacgccttcggccacagcctgcagcggcaccacagcgtggaggccgccgggccccctcgtgccagcacctcgtccagcggctccgtgcgcagcccccgcgccttccgagccgaggccgtcggggt

SEQ ID NO: 135394 - DNA, 476 bp, Homo Sapiens
tggcctgcccggtcgaatgtgtgttttaaaggaaatgttattttgtctttcaaattagcagagaaagaaaaaaatggcattacccaatgctggagggggtaagtgccgatatcgtgtcaattgatctgaacccttgggaaaataatttggccatatggcacacgtgctttaaaacagctctattctttcacccagtaatttgattttagaaacctagagaaaaaaattttatttaaagacacattttaagtaaaatgaagaacattttacttatttttatgtccagtacagtcaaagcagccacattgcataaccccgggggacccccttcctctttgtgatgccccagaacaatattgatttgattatagaaagccaccggcagcctacatgcgcaacggtgagttgttggttatatacactgtggaccatacagtggaatattacagtcaataaaaggtatttttagagagaaa

SEQ ID NO: 135395 - DNA, 339 bp, Homo Sapiens
gacattgcagatggtgcagacccttgctttatttgtctgacttgttcacagttcagccccctgctcagaaaaccaacgggccagctaaggagaggaggaggcaccttgagacttccggagtcgaggctctccagggttccccagcccatcaatcattttctgcaccccctgcctgggaggcagctccctggggggtgggaatgggtgactagaggggatttcagtgtgggacccagggtctgttcttcacagtaggaggtggaagggatgactaagttctttatcacagacctacaaaaaatgagataattagatattactctcactagtttgggcttc

SEQ ID NO: 135396 - DNA, 339 bp, Homo Sapiens
  misc_feature (307)..(307): n is a, c, g, or t
tttatgtgtacacaatttattcatgggataaattggacagaatcagcattttgtgccatgaaatttttccttgagtatattccttgtatgggaaagcatcacattcttttcaagaacattctccaatcctttcctcttatgtaatagggtagtggtggtagggagaagaccagatcttcagggaaaattagaagtattaaaagggagtcagcctgggcttgggttggctctagcccaaggacccttccatatgcttcaagtctagacctagaagagaatcttctatctggacgtggctacacagcangaggttcccatgatttccttctcagatttcac

SEQ ID NO: 135397 - DNA, 703 bp, Homo Sapiens
tttttcatatatatatgtgtacacaatttattcatgggataaattggacagaatcagcattttgtgccatgaaatttttccttgagtatattccttgtatgggaaagcatcacattcttttcaagaacattctccaatcctttcctcttatgtaatagggtagtggtggtagggagaagaccagatcttcagggaaaattagaagtattaaaagggagtcagcctgggcttgggttggctctagcccaaggacccttccatatgcttcaagtctagacctagaagagactgttatggcaaacattagtatgaccattgggtgccctctctagatattcaaatccagggtgccaatgtcccagttcggcagtgtaacctcctctggaggatcacccttgggccactggagactcctcacctggagttttctggggaatgctctctcttggctgcaatggaagccccagagcacagttgggatcaggagaaatctgacattccagagcccccccataggtcaagctgaggctgaagtcccagaatttcctctgggattgattgagactccacttgtaactgcattctttcttgtgtttatcctgctaatatgtttctcctaagaggatttccttttaataaatcatgtatacacagctccctgtgtcaggcgcagcctctagggagcacatccagaacgcacgag

SEQ ID NO: 135398 - DNA, 505 bp, Homo Sapiens
  misc_feature (286)..(301): n is a, c, g, or t
ttttttccatttggaatttttattgtcatttaatgccttatgctttataggtacaaattcattctgaagcaatgcttgtggaaattttaatttacattttcaattctgaatagttgacactgaaatagttcagctgtgttacagtcttccctcacaagagaaaagcattgcttaaagacaggccacccacagaatttttcagaattgaaagataatctccccattgtttcagtcttgtcagattttgcctatgaacgccctgactttgtagctataaagaaggtannnnnnnnnnnnnnnncatgcatcaagtattacactcaagtgaacagaatatgtttaagtttgcatttcaatatatatgggtgttttcttaaaaatatgaaaggttgaaatatttgatcaatgaatcctgataaatgatacagtgttaaatacaaatttcatgttcaatactaaaagaccaaaaaagtcctctgccattgtccatgttttatctgttttt

SEQ ID NO: 135399 - DNA, 536 bp, Homo Sapiens
actaatcctttatatatattagtccatctaaaactccccaatgcctaaggttctagtcgtggaagggttagctgcagaattccagttcagaagccaacggaggctcagtccagacagggattaaccgacttgtgctggtatctaggtgcttggattgccgagttgagtttgctggaagggaaatggggcggcgtcggggggcccgacaggcctggctgccagtcggcttccgcgaaaacgactcttgctgtccacatagccagccgtgaagccaaactgcaggcctctgccctcccctaaatgtcctcctaggaggcagtcactcgggaggaagatgtgcctgttaccaagtgcttcgtcccggccccagcgcagacctatgaatgaagatggagggagagctgatgtgaaaggcctgggtcccggccgcagaaggggcgccagaccgaaatcggcgatcgcgtctctcccaccaaagcctcccggccagcggccgcgtctgaaagtcctgggctaagcaccacgccgggggggta

SEQ ID NO: 135400 - DNA, 789 bp, Homo Sapiens
agtatgacttcagtttattacttgtaatttcctctatttttttctttattggtcttccctgtttccattcttccattttcctgtatttttgggacataactgtctctttcttttagagtttgtttttcccattaattactgaacacaagaaaaatgttttgcaaaatagtctttcccaccaaaaaggtataacagtagaaaaacgtttatgtgacatgctatgctgtattcataaggtaatctaatttccaagctattttaaggatatgagtactcaatttttaggggaaagataatttagctttgtggactttagagcacaaattataagcatagttgaaactgatacctgaacctggtgttccagaaaagacagattctcctttgcgttcaccattgacattgtgagtcactgacaaggtcttatgatgaaactgtttaccaatatttgcaaagtcatgtttatgaataaaagcacctaaatgcttaattttgaaacatttaaaaaatgtgagttgcacctcacatttatttcttggctgaactgcatacaatcccattgcagtggccttagttgaatggacagaggctcaggaaaggccaacagtaggaacatttaccatatgttaggtgaaatgtatagaccagttggacagctgttaaggggataatgttacaatacaaaagctgcctatatttttgacagtaaaatgagcagatcagccatagtttcctcctgtgctcaaaaagaatgatagcacatgcctgtaatcccagccttgttataca

SEQ ID NO: 135401 - DNA, 560 bp, Homo Sapiens
  misc_feature (64)..(76): n is a, c, g, or t
agcattgacatttgtattttaataaaggataataaaagccaaattacagccaactgttaaagcnnnnnnnnnnnnnaaattctatggtaacaaaatcagttcaggggctttttttctgaacaaatgatcatgatccctcagtctttcccgtggcatgctcctaaaacaaccctctatgtctaatcagtcacctaagatattgagtggcaagtctttcacagttgctgcttataattcctaaatggtccatattgagtattttcatttctgggtaagggaaaaagcattttggtccattaattcacccactcgctcctggaggacattaaccaattctgctattacaaagacgtgagtgtcatcaatgtcttgaatgatgaacttcttccccagggcattggactcatccaagtacagcagaaactgcttcatggcaggatcacattctataagcactcctttcaagacgttgaccatgttttctcagaaggttcagatgacctgaagaatgctcggcccacagatgcagaagcgcctcggcgttgccggcagagtgcccc

SEQ ID NO: 135402 - DNA, 459 bp, Homo Sapiens
gttttaaagaaggcgaactggggaagaagagagctccctgcttctagtgagcaaaggcagcccctgagcttccacagccctccacatttattgggtaggatgaaagggaggaggaggtaacgactggtcagctgcttaattgatcacaagttcacattattgttaacaggcttcaattatgcctaatcacaagaaacacttgtgcctgggtcgtgactgccttcagcattccttctgggtggcagacgcagtttgtcagtttgccaacatcctgctttcatgagaaacggtttgctgtttactcatatagcctccagtggcatactgagttgatcacgaccctcattctttcggcctggacgctgacggaggcaggggcgcctgcagccgactcagccgatccgcactctagcctctgtgtagaaggaacaccgcttctcgcgtttttccgctctttca

SEQ ID NO: 135403 - DNA, 862 bp, Homo Sapiens
ttcttgagtgaaccactcaaaaaactattttacttttatttgaaatacaaagaccccacattttcccaggccacagatcaaaaggagggagattactagagcagacaaaagcaaagcaaatatagaaatctagagaccacacagcataggggcaaacatgcccatatttccacattgacctttggtattggtgcatttcctagagcacaggaagttaactgtttttagagataaatgaaaatggaagagttactttaagaagctagtgaaatatacaatctattttatagctttgattaaaatcagaagtagcccacttcatgtagaaaattcacttatgtacatgttgctttccccatagaagccagattagattacacagtataaataatatgttcatcctccttatgtcaaagactaaaccattcattgtagccttcagaatacccatgtgtatccatactgaagatttttttcacctggtacatctgtctcagttgtgtcttgcttgcttatgggtgcctctgttgatattattccctgttaatatgtggtaacccacaggttttttaccccttaagatacaccttctccaagtagcctttctgaattaagatcagtactttgttgtcacatgattcagctcttcaagtctgaattttcccatttattttggttttctaatgtttcacataggcacgttcctgcttttaagaattcagttccattttggcagcaactcagtaagtcttacagatgtaaattttactttagctaataagggagcaagaggaaggaataggtggctttttgttatgttttcttcattctgtcgatttatggatgtactgaattgaacctt

SEQ ID NO: 135404 - DNA, 878 bp, Homo Sapiens
  misc_feature (253)..(286): n is a, c, g, or t
tttggttagaagtgatgagatatattttaaaagtccatacaacaaaattacaataaacatttattaagctgtaattttcacaatattttaattctgttctgagatctacaaatatctctacataacaccaaagccagtgatttaataaataagaggaatgtatatatcgctttgcaaaaaaatgcctgatacatttatctctatataagatatttgtagaatcagtttcccaaggctcacgaaactaaagtgnnnnnnnnnnnnnnnnnnnnnnnnnnnnnnnnnntattcaaatcaaatggatttatattaagtgccaaattaaatgctatacaaaatttataaccagatacacaaaatatgaagtcaatcatgaatccactgttgataatggataccatacctcacaagtgtgatttccagttaagaagagggagacaattgcttcattgggtttttagtgtgtgctaatcaccatcaccatcacaagttaatcagtttaattacatggtattcagagattaaacacacatgcagatattaaatggacactacaataaaacctttaaatctgcaaaaagacatgagaacacatggtcaataataccactcgctgccacagcttttcagtagacaatgcaaatggcaatcagcgttttaagccaccacaagagaaaaactggtactggtgcacctcctacatatcaaggaaaagcaaaacacagaataatttaatatgctgaataaaatttgtttacaccagatactatacatcacactgatggttgtccagtatgaattttaagggtattatgttagattctgcaaaatatattcctattattcacaagtgatgagtcaaagtccaactattcaaa

SEQ ID NO: 135405 - DNA, 678 bp, Homo Sapiens
  misc_feature (585)..(615): n is a, c, g, or t
gcggccgcactgagagctttacgcccggaggcgtcggcgctgccactggcccgcgacgggaacggggcgaaaaggcggcggcaccatgttctccctcaagccgcccaaacccaccttcaggtcctacctcctgccaccgccccagactgacgataagatcaattcggaaccgaagattaaaaaactggagccagtccttttgccaggagaaattgtcgtaaatgaagtcaattttgtgagaaaatgcattgcaacagacacaagccagtacgatttgtggggaaagctgatatgcagtaacttcaaaatctcctttattacagatgacccaatgccattacagaaattccattacagaaaccttcttcttggtgaacacgatgtccctttaacatgtattgaacaaattgtcacagtaaacgaccacaagaggaagcagaaagtcctaggccccaaccagaaactgaaatttaatccaacagagttaattatttattgtaaagatttcagaattgtcagatttcgctttgatgaatcaggtcccgaaagtgctaaaaagcaaacaaaattaatggaattccctcnnnnnnnnnnnnnnnnnnnnnnnnnnnnnnnaatggagctggtggtggcagcagccagaaaactccactctttgaaacttactcagattggtaa

SEQ ID NO: 135406 - DNA, 1520 bp, Homo Sapiens
gactgggacccggaaggttttgcccgggacccggttttgagtactcctgcgaggcactgttccagggaaatgcccggaccggggttaggcctgtggccgcccatggttgccaccggaagaacagtaacagttggtccacaagaacaagacgagaatcttgcgccccccatactgggggagcatgggctgctgggcggcggagccattgggatactgcgatggggggaacacggggcttgagtgcactggttgggcgccgcccggcagggccaccaagtgctgcgtggagctgcagggccccaggggctgcccagactggccctcaccgctggctgtgcccgccgccccgtactggccgcccacagggcccgacgacgtctctaggaaactggcctctgggaaggccgttgagtgcttgcgcttttccgccccagagctgctcacgccgcaagggtacagggggacactctgcaggaagggcaccggcgtgctgaaggggccttctagcattttccgcagctgcttctccttcttggccacttcgttcaggaagagcttggagttcaggtggccgatcttagtgggggaaaggctgctgctcgtgcaggtctgggtcctgtccatcaggattttcacagacttggtgttcttcatgaagctgacatcctccgtcttatcaaagagcagctgcagggagcccagcagcttcttggcctcctgcatgcgctccccgaggtgcagcgcctgcgctgcgttctcgctgcagaacttggcctgggccttgtctaggacctccactgtctgccgcaggtcctcgtccagcagctggtgcagcttctcgtactgcagccgaacttcctccttcagttggttcactttctcctccaccaggcgcttgtctgactcgagtttgtacagctggtcctcaatgtcctgctctcgctcctccagccggtcctgctgcttcatgagcatcttccggatttcattccttcggatctccacgtcgcacaccgagtgtccctgatgcgcgccgctgtagtagcagcagtactggcacacggccacctgctcggcctcgcagtggtagaggcggtaggcgttgtgctgcgggcagctccaggcccgcacgtcgtccgcctccaccaggaggtgcccgcgggcggtggagggctgctgcaggtgcgtctgcacgtgggactggcagcagggcgcctcgcagcgcaggcagaccttctgcgcgggcagcggggggccgcggcggcagaacacgcagtgcagcgccgccggcggcttctccacgtgcagggcattgaacttctccacgatgttggtgagcttcaggttcttctccaggcccggcttctggttgtaggcctggttgcactctgggcagcgtacgaggccgctgtccttggcccacgcctcgccgatgcagccccggcagaagttgtgtttgcacggcagctgcactggccctcgtgccgaattcgccacccaggcctcgctaccttggaccg

SEQ ID NO: 135407 - DNA, 1218 bp, Homo Sapiens
  misc_feature (16)..(16): n is a, c, g, or t
  misc_feature (53)..(53): n is a, c, g, or t
  misc_feature (90)..(90): n is a, c, g, or t
  misc_feature (145)..(145): n is a, c, g, or t
  misc_feature (186)..(186): n is a, c, g, or t
ttggagtttcaggtgngcccgatctttagtgggggggaaaaggctgctgctcngtgccaggtctgggtccctgtcccattcagggatttncacagacttggtggttctttcatgaaggctgacctccttccgtttttttatcaanggagcagctgcagggagcccagccagcttctttggcctccntgccatgcggctcccccgaggttgccagcgcttgcgctgcgtttttcggtgcaagaacttgggcctgggcctttgtttaggccctcccctgtcctgccgcaggtcctcgtccagcagctggtgcagcttctcgtactgcagccggaacttcctccttcagttggttcactttctcctccaccaggcgcttgtctgactcgagtttgtacagctggtcctcaatgtcctgctctcgctcctccagccggtcctgctgcttcatgagcatcttccggatttcattccttcggatctccacgtcgcacaccgagtgtccctgatgcgcgccgctgtagtagcagcagtactggcacacggccacctgctcggcctcgcagtggtagaggcggtaggcgttgtgctgcgggcagctccaggcccgcacgtcgtccgcctccaccaggaggtgcccgcgggcggtggagggctgctgcaggtgcgtctgcacgtgggactggcagcagggcgcctcgcagcgcaggcagaccttctgcgcgggcagcggggggccgcggcggcagaacacgcagtgcagcgccgccggcggcttctccacgtgcagggcattgaacttctccacgatgttggtgagcttcaggttcttctccaggcccggcttctggttgtaggcctggttgcactctgggcagcgtacgaggccgctgtccttggcccacgcctcgccgatgcagccccggcagaagttgtgtttgcacggcagctgcactggctccacgaaaacgtgcaggcagatagggcagatgagctcctcctcgaagcagttcttccaattctccgccatggcggccgcgggcagggggccggggcaggcctccccgactccccagccccgggggtccgtccggagccgctgtaggcccaccgagccccgagctccggccccagccggccccgacggtcgctcagtcagcagcgccttccgcgtgcccgcctcgtgccgaattcggcgcgccgtcgacttcattactctct

SEQ ID NO: 135408 - DNA, 1496 bp, Homo Sapiens
  misc_feature (59)..(76): n is a, c, g, or t
  misc_feature (1379)..(1413): n is a, c, g, or t
gtgccaagctaaaattaccctcactaaagggaataagcttgcggccgcatacgcggtcnnnnnnnnnnnnnnnnnngaaaggcatctatatataaaatctttattacaggcagtattggtccatacactaacacaataccaacagtacaggtttaatctttcaaaatcatcatttaaacagcaaaagaccaagaaataaaatttgagtcaattatttttcaaaatattctcaatgcacattatccttaattcccttattatagtgaaacatacaaatacagaaaaataacccatttaacaaatactagtgttaaatggttatttggcttaaaatctgagttaagaaaatcctttttagcaacctacatacagataagtagcaaactttattatattaaacaaattcattctgctaaaacatgtaaagaatttcatccatcatgtattctgatcccagtacaagtgtttattctcttaccgtcacgattcttatatgaaggaccaactcaaagagttgtcctagatataaccttatcctcttccccaacacacttcatccaaaagtctgttcaacagatggcaaccgggtagcagtcacttcaccatctgatgccagtggttccgtgagagcgtggccaggcctgtgaaacagcccattttcctacctactgtgggttgctgctcaggaggaacgatatacgccaatacaagcaggaaatctgcagctcctctgctatgtgcctcaggacactttcaatttttctggtcaatgctctgattaggtatcatacataaaagccagcatattagtttaaatctttaaacaaaaactatattttccacaagtcattatcatttgggcccattaagtgatcttttcgtgctttgttgagcttcatctttagggcatctcttctttcttcccattcatgaagttcggcatttccatgtgcaaatttacagctgtttccttctgggcaggtgccattcatatacctatcacaaatactgaaaatagcctgttgggaaccggtgctgccagcagtactggtcgtcctcggtgtggaaaaccttctctttgtgcttctcggaggagatgtggccctgccactgcttctcactgttgcagtttttcccacacatccagcagtgaaagtccactgtaacttcagcataatctgttggcatgtgaatttgttttccattttccttgtttgactgactggctatgtcttcacttttttcatgttttttgactcttgagccatagttcgtaaaattgctccatatcttgtactaaagaaaaatgaattactttcagcagcagccccggccgtaatggccgaattcccgggcatatgtccggtaccgtcgactgnnnnnnnnnnnnnnnnnnnnnnnnnnnnnnnnnnncggccgcttcctcgctcactgactctgctgcgctcgtcgttcggctcgaacgagctagcgccctatatgattatacatctttt

SEQ ID NO: 135409 - DNA, 689 bp, Homo Sapiens
  misc_feature (456)..(456): n is a, c, g, or t
  misc_feature (463)..(463): n is a, c, g, or t
  misc_feature (476)..(476): n is a, c, g, or t
tttgttggtaccagtcactagatgtgatttatttgaggggctgttgtagggagttaggatacacagcatgcagggagaggaacgcagactagccaaggcctaaggtaccccaagactcactttcgccactggtccttggccttgatgacctgagttggcatctgaggttggcacgcatcccatctccacccacctgccaccaagggcagttggtggttttgccatcccatccctgtcccctgctgcccaccctctgccacctaagcaccaggatgagggtgagttgcattagggcttgccactcccctcagggacctcaagctgttgcctgagaagcttgagagggtcctgtggtagtgccctcttctggcaccaaggaagaccaggacatttcaggaaagcaggcaggagagggttggagtaaagggagggctgaaaaaagaaggctggggtcanaggtcanccacaagcctcanggtggcttgcgcaccctccagggctgtcaacacaatgctgagctgtctctggacctcagcccaagcttcagattcagaagctgtgtccctgcccctgagcaggcatttgataggcccgggatgtgaactccggacccctgcgaggtgcccagagcacattgctgtagtagcgtttctcctggaagctctagggttgagaagggccggtcccaa

SEQ ID NO: 135410 - DNA, 1519 bp, Homo Sapiens
caacatgtgataaagaattaatttttaatattctaaaggtgcttactcttacaaattaataaaaattagatagaaagcacaatagaagaacgtacaaagataaatgtttcttcacaaaacggccaaatcagtaacacaggctttgtgttcaaagtattgattagtgcatacttcactaataaagaatctatagtatgtattttattagtattctagaaaatttcagacaatcagcaaatggaatgaattttattatcaatatgccatagaaattcagtcatctaatttttctagcttatgttatgttgagcctgcttgtggtctctctacctggaggagggacaggataagaccagcagtatcccatatgattccaaatggaagtccaataatgtattggaatttgctacatctcatatccaaacagtgctttatctacattaatggatgagtttgtgattttaatatggaaataaatgagtgattcgagttgttcaaaatataatttttgaatatacttttgtgattgatagttatgcctcaatcactatgaaactcagagtattattaaaaagaaccttcccctctttcttagcactaaattcaggctcttgtagatctttcccaagctctgctctgagatcaggtggtgctgtggcattaaagttgcaggtttcagtcaaaaaatcccaaagcaggtctccattttcattaccatcaataaagcagtcagatatatccatggtggacaaaggtcatagcactcatacttaagccctaggttgtccagcatctgagtgaggtcatctgatgtgatatactggcagaggtcatcctggggaaagcgtgatccgtactttttccacagcttgtcccagccactgcttcctgacacaacaataatgagcatcttagcattggtacctaagagactatggaagaatttcagggtagctgggatgtcttttacataatacagcatttgaatcatatgaataaagtcccacttttgaagctcctttttctccaacattctactttggtattcagatgatgtctccttatgccaagcaaactttacgttctcgaggttcgatgtcttggctacaagctctttgtatttggcaatttgttcagcacttggctcaacaacttcattgttgatacaaactcctgggtattgagcctgaactttggagagaatttgaagatcaatttcacctgcacctccgcctatgcttagaatcttaatttctgattttgtgtctccaatccttcctattatgcctggcagcttcttgtccatgaattcctgcatgcactggtgttccgtggaatggttgagaaacctccggaaagattcaacatatttcccgtggtcagaaaacaagctcctcatggaagatgccatatttggttttctgagaaagacagagcaggaagcaaggtttaagttcccctccttctcccccggccgtaatggccgaattcccgggcatatgtccggtaccgtcgactg

SEQ ID NO: 135411 - DNA, 667 bp, Homo Sapiens
tttttcttattttttcagaagccagacaattttatttggggggcaaacattgacacttttgggtgtggaccttgcatgcagacatatcaagggatgacatgtcacttcttcccaaagcgttgaggggcagccaggctccagaactgggaattcagcccctctccagcccggggactcagccattcattcctccaggatccctgggtatttctgccaaacctctggggctgaaacaggaaggcttggctccggccaggtctctccattgcctggagcaggtagtgcaacagtgacccagaggtctgggcatcctgtggtgggaggggttcgctgtcttcctcctgtgccaagggggtatcagggaaggaagatgggcaaataccctggacacgtaagtcacaaggggaagggactggcttccaggggcaagtggtaggaggctgcggaaccatttcctcagatgtgaggacctaatgacaaccttggcagccagagaaagtatcagaacctagagcacaagtctcaaccgaagtagaggcaatggtgatatggggatgggacacacactcaccgcggagagctggtcttcctgctggccttctggcccttcagcacagcccccgtctattaacagcagcagcaccagcagtgcagcagcctgcctaga

SEQ ID NO: 135412 - DNA, 495 bp, Homo Sapiens
catcatttaacgattatttattgcacacgtctgttcaagcaccaggctcaggctggaaaccatccaaagcgcaatccctgacctcaggcagctcacagtccagtggggaagccgagaagcaaattaatgactctgaagaagcgcaggcaagtgctatgatcaaggcatgtgtgtgggtagggtgtctgggaaccccaaagtcagcctcaggtggggaggtaagtcaaggaagggtgaggggactgggctcagcctgggtctcggaggagagcggggccagccccggggatggtaagagtcaacctgccaggcactgtgcactgctggccaggcccggccaatgagagcacaacttgttcagggtccaggaagcaaccccaggagaacaaagcctcgtggggagggaggaacctggagggtggaaggagtttgggcttttcctgaaggtgatgagagccactgaaggattctgggggaggagacatagggttatcc

SEQ ID NO: 135413 - DNA, 497 bp, Homo Sapiens
  misc_feature (484)..(484): n is a, c, g, or t
ttgcaatgaacttggtttattgttagagttggaggtggctccgttacagcagctgggaactatagcagggaagcgtggggaggagcagaacacagcagcacggggagggtggagctaggaagaacacaaggtgggctcattttggtttcccagtcgtttggcagagaaggcaagcccacatgactaccagcttctgggtttctcagtctggcagtagtctggcagggctgctcactggcttgcttggggcgaggtcctctcctggggtggtattttcagcccgttttcatttcactctgtaggagttaagctgtggctcagcttctccctttttccttcctccatctcattttccccaagtcctctggcctggcttccacctcccagatcctctgtccaagagcgggtttggagaggcagccagtgttcccatttcagctgcaggatggcatagtggaatgttgggggagtcacacattgctgnggtgtcaaatgtt

SEQ ID NO: 135414 - DNA, 818 bp, Homo Sapiens
aaacctatcccttcgggggcccgcggcggcccaaagccaaaggtttaggaaaaatccttttaaaggggccaagggggacccccaaaaaacccaatttgcaaatattcattcggggtgttgctgagggcctaggaagtgcctgtggtttggggcacatggggtggggacaggaacgagggcaggcccgtgggttaagattctgaccaaaacatttaattaacaaaaaaatattacaatagcagagaaaataataataataacaataaagagaaattagaagtgggagtcagggtagaaaaaaatgcaaaggccttggtccctaggagaccaacactccagctgagctggccttagccccagccccttctgagttttccttggctgctggcttctcatcttctcccatgagacgaatgttgtgcttttcccggaattcatttagttcttttccctttgcctgaagctgctgtgtcagtgtctcaatgatcttctgtatctgctccttgttgttctccaaagcgggcagcacctctttgacagttcgctccaccagcactcctccaaccatgcggtagcacttacgagtttcatctacctccttcagtgtatcgatcactaggctgtgctcattcaactccatctccaactcagctgctttggatgccaggcctcgctgttcctgccgaaggcggttgaagccagcaatcacctgctctgcggacaccgcccccttccccgcgccgctcccgctgctcttgccggcgcgaccgctgttctccgccatcttcgccgcctgctgggtttccggccggcgcccc

SEQ ID NO: 135415 - DNA, 698 bp, Homo Sapiens
ttttaaaagaaaatcatgtacagattttatttctgctgaagatcacaaaacaatttcaacctctgtggttcaaaataatttaaggatcttgtacctttgtgtttattttctgtttcaactaaggatagacttcagaaggcatagcttcccttgtaacgtttttaaacatctttttcatttgtagaagaacatttcaaaagcccaaattaaattatcattaaaatactttgacactttacaatcttccaagtggaatttaagttgtatgccttgatactgtagttttacagtttccccatcattggtaaatattcttctatgatgccactataatgctactggtagaaaatatgtgcatataatttatcagtatattttcatgtaaaattttataaaaatctcaaagttatgaagatagttttacacaccctctaaactaggtgtcagcaaactataacccataagccaaattcaacccaccacaaaaatatttgctatcaggcctttacagaaaaagtttgctgaaggtgtctggaattctggacagattgtttacagtggaatcagtgtatgacttaattttgcttcctttatagatatcatatacattattgcttttgaatattatcatctacttggaaaacaaataaagttatattaaaacaaagacttacatccttgaaatgtttaggaccagc

SEQ ID NO: 135416 - DNA, 511 bp, Homo Sapiens
ctgattttgaatagtttattaaaggaaaggtgaagcatcagtttcaaattgtacaaaaggaaaaaaaacctcatattgcaaatgtacaatttacagaattactagcaaaaccaatcaaggagacaccgaaaatacaaaaatttgattgacttcaaactgaactggaaacccattggagtagatatttagcctttttgtgtggcatggtagtctacaattctgtcagcatctgttttccatacaagactgtcacgcaaaggatcaatttgtgcatgtgccagggcacctcatggcttgctccctggccaaaaccacaggcaggcagggctggggtggacagtccagtcattcctgcaccttcacttccagtgaagcccacaattctgggagaaagtgaggccccagctcccctaactggagcccaagaattgctgaattagcagagaagatatttttggtgaccaggtttttttcagaactgtacaaatgttgagaaaaatgttttgtgtct

SEQ ID NO: 135417 - DNA, 555 bp, Homo Sapiens
caggtagatcgcggtgccagttgccatggagccggccgggccctgtggcttctgcccggcgggggaggtccagccagcgcgttacacctgccctcgctgtaatgcgccctactgctcgctgcgctgctaccggacgcatggcacctgcgcagaaaacttctaccgtgaccaggtgctgggagagctccgcggttgcagcgctcctcccagccgcctagcaagcgccctacgccggctgcgtcagcaacgcgagaccgaggacgagcctggggaagcaggcctcagctccggcccggcgcccggcggcctatcgggactctgggagcggctggcgccgggcgaaaaagctgccttcgagcggctgctgagccgcggtgaggccgggcggctgctgcctccatggcggccgtggtggtggaaccgcggagccggaccgcagcttctggaggagctggataatgccccgggtagtgacgccgcggagctggagctcgcccctgcgaggaccccgccggattctgtgaaagatgcctccgccgcggagcccgcggccgc

SEQ ID NO: 135418 - DNA, 608 bp, Homo Sapiens
  misc_feature (562)..(562): n is a, c, g, or t
tttgaaagactgtatttcattatttttattctaaaccttactctgtttgatgaagattgggggaagagccctcccaattccaccgctcacacataacagcggttgctagcattctttatttgtgctaggtcatctgcatattgtttaaacatttttcgaggctggaaagactgctcccactcaggcaattctgacgtggcggcccttctaatttatattctctaaataattcttcatttagagaaaacagtcagggattacagtgagggagggtgacgtgctgacggggacagagcttggcttttgatcattctccccttagctctgcccaggcaagcgtccctaactcagggtatcggaaccgatctcccttagaggattatgtttcaaccaccagcctcagcggtttactcaaatgtccttccagccaaatgcagaagtctccctgggagtaattttggtgaagtcagcttttgcctttttcatcacaggcaggctttagtagttcctcaaaacgtgcaccacaactgcccggctgccaaacagaaatgctgatgcctgngcccactctagccatttggcctcggcatcacggtgcgggagcgtgg

SEQ ID NO: 135419 - DNA, 1352 bp, Homo Sapiens
  misc_feature (53)..(61): n is a, c, g, or t
ttttcaaatacaagactttgtttattaataaagtaattcattatgacttttgnnnnnnnnngttttaaaatgttctgtgtacatgtcaatgtaggttaggccagccaaaagacaaagcaaagcatcaacattaagtcacaggctaggattatacaaataagaacaaacacaaggcttatggtacttgttaggtaaacacaaccaaactaaactgtacttcaaatttgtttatataaaagcatattaaagctcactttaaaatagtgtccatcttttcttttaaacgggcatagactcatttgcagtcatgtacaaatatacctaatagctttcttcatcttttaatacaagtacaattccttgcttctttatgcaacctaacaaaataatatagaatgaagtcattagaaaaatatgaacctttctgaatctacattacatttttaatttaaattggaaaatacagtttagatcatatgaaacatatggatttcagacatgtattatctgtttctaacagattattacaggcggtctttattttggctgaaatgcaaaaatatgactttcttaataacagattagttaaaaatactttccattgatagcagtgctagtccctagaacaaaggtaagcaaacttatttgtaagttactgcctattcaatgcccagaatatgtagatcctaaatctaagcccttaatatacatctactttaaagataactgaaagatctcacatgcctgataatccttaatttaaaccgtcctgtaaacatagtcaaaatctgctaatagaaatacaattcaagtaaacattgcatatttgatttaaaccaccttacagttaaattcactcatgacacattggatcataaccactaatatgtaaaaagttttaaaaaaatcatccttacgtatagatgaaaataaactttgtaaacttgttcatttaaaataacgaatgtactgcagctgctctttggtttggcatagtttcaggtactgaatattcaagtaaatttgttcccaggtaaaccaagtctcctaatttgtctgtaatggcaatggcaagacctgaacttcaactttatttttcttaaggtgtcatcacaaagtgtttgaaggaccaaagatagtacttctaaaatttgacagggcttcattttgattttttctccccaaatagttgatagcaataatcaataccagttgtagataccaaagaggcagcctttccctgattcccacaccacttgtaggcctttgctcgacgcgtgggtcgacgatatcccgggaattccgaccgtaccagcctgctttttgtacgactgtcataggtacagatgcga

SEQ ID NO: 135420 - DNA, 463 bp, Homo Sapiens
  misc_feature (412)..(412): n is a, c, g, or t
cccctgcttcctcacaccgctttattgcagaatctggaagggggatgagccaatctcacccctctgcccatctatgggcaaaatggagctgaaataaaatgagaagacactcggtggcgacctgctgggcagcaccctgtaccctagggccccttatcagtgggctcctgatctgctgcccccacagcctcaaccgcggggatggggtggggcaggtcaagcctgagaacagtccactttcaaggacttcccaggcacccataggagacctgaaacctataaagagaagtctagatttaagggggcctaagtcccagagtccaggtttggagggctcgggtctagagccctgatttggggagaggactcagtctgggaacccagactgcaggggagagggtgaattctggantccatgtgtggagagcctggtttctcagtacttccagaccgtgactgacta

SEQ ID NO: 135421 - DNA, 1032 bp, Homo Sapiens
  misc_feature (53)..(53): n is a, c, g, or t
caactatggaaactcgggaggcccgttagtaaacctggacggtgaagtgattngaattaacactttgaaagtgacagctggaatctcctttgcaatcccatcctgataagattaaaaagttcctcacggagtcccatgaccgacaggccaaaggaaaagccatcaccaagaagaagtatattggtatccgaatgatgtcactcacgtccagcaaagccaaagagctgaaggaccggcaccgggacttcccagacgtgatctcaggagcgtatataattgaagtaattcctgataccccagcagaagctggtggtctcaaggaaaacgacgtcataatcagcatcaatggacagtccgtggtctccgccaatgatgtcagcgacgtcattaaaagggaaagcaccctgaacatggtggtccgcaggggtaatgaagatatcatgatcacagtgattcccgaagaaattgacccataggcagaggcatgagctggacttcatgtttccctcaaagactctcccgtggatgacggatgaggactctgggctgctggaataggacactcaagacttttgactgccattttgtttgttcagtggagactccctggccaacagaatccttcttgatagtttgcaggcaaaacaaatgtaatgttgcagatccgcaggcagaagctctgcccttctgtatcctatgtatgcagtgtgctttttcttgccagcttgggccattcttgcttagacagtcagcatttgtctcctcctttaactgagtcatcatcttagtccaactaatgcagtcgatacaatgcgtagatagaagaagccccacgggagccaggatgggactggtcgtgtttgtgcttttctccaagtcagcacccaaaggtcaatgcacagagaccccgggtgggtgagcgctggcttctcaaacggccgaagttgcctcttttaggaatctctttggaattgggagcacgatgactctgagtttgagctattaaagtacttcttacacattgaaaaaaaa

SEQ ID NO: 135422 - DNA, 815 bp, Homo Sapiens
  misc_feature (674)..(689): n is a, c, g, or t
attgcattttgtcacaggggaggaaattacctggtaactcctgattaggaacaaaatgaagcttcccctttttacaaatcctggctaacattccatttggctctcttctgttgaccacctctctctctcccctccctcctcactccattttctcagttattttattgtttactattggaagtcacctcccaactcaggatacttgttagtccattttaggaaaaatatcaccattctttcactattattctctgttgaagttgaagaacagaatattactttttttctttccattattggttacaccagctagttagagacttggggtaatactgtgggcatgggttggatcctgatatctgtgtcagttagtgagagttggttctatgaccctagagctctttgtgtccttcaaacgagggtgctgaaacaagacgaacatagaactgtctataccaagcaaaaaactcctgaaagcacatgcccactgcaggtgaattggtagcatagtgtggagataagtgggcagtgcttggtcctgtttctgcctcctagagagtacctctcagcatccagggatgctttagtaactcttagttaaaacgaaatgaactataattaattacctttcttttgggagggacacagagagtttcaacagcatctacaatgcnnnnnnnnnnnnnnnngaaaagaaaatatgatagaatattaagattgacagagctggggatgggttggaggctgaattatgatgtgtgttttctttatgcttgaattatttcataattaaaaacaaaacatataataacaaa

SEQ ID NO: 135423 - DNA, 702 bp, Homo Sapiens
tttttggaggaaatatagtttttattaaagtgtgtttattttgcacttgatatttactagcaaactaaaccacagccataaccttggcttcttttaaagtcaaaatcagtttaacagtaaaaccaggtgaattttaacccactaagccttttcttaatttaacatgaatagctaaaacagtaagctttggacaaaataagatttatgacacccacccccacccccagtctctaagagctctgctggaatacagcaaaacataacaccaaaaataagaaatactaaaaaccggcatctcagaaaacaatgcaaggatattaggatatcactctacatgaggaatcttttaaatgcatttaaaagtaactgcaaaactagatattactgaattacatgttatttttagtctagtctttcaccgatttccctatatctagcccttgtgaaatgaaacacagattatagagataataaggatgataatcaatctgagccaactttatctcccctaccagcattcggagctatggccacagaagaacgggatttgaagccagagcttctctggagcacagtctgagccaccttctgctacacattcatcaaaggtctttttgtctccttgttttcgtctccgtaaccctggtctataatcatctccaaatctcagaaagtaataataagaaactagcctctcaatag

SEQ ID NO: 135424 - DNA, 487 bp, Homo Sapiens
attttccaaccagtatattgtacgccagaatattacatttttcttttatcatcagagaaaaaatatttttctaaagcatattattaaataaaatgacccttagcatgaataaaaatgagttaaaactttctgatcatttgagtcaggcactattatacatactttatatttaccaagtatttactattttaacaccctcataagggaggttctactgtaatcccatttcacaaataagaaagctggagcatcaagagattaagaaccttgcacagggccacacagctagtatgtggagaagacggaactggagtccaggctttagcccctttagcctctaaggctgtattgcctctcaaacaactaattatagaaaatcaatcctttgaatattacacagataagaaccttattcaatactaaacccagctcacatacaaacctgggctacagacaacagacagctaactagctccatcctcctgag

SEQ ID NO: 135425 - DNA, 807 bp, Homo Sapiens
  misc_feature (663)..(663): n is a, c, g, or t
ggtcgggcttgccggattgtgcggtgaccaggatcctgtagtaggcgatggccatggcccgtctcctcgtgcccgcagtcctggctaacgatgtatcggggaaggagctcagcccgaggtccgataatgcagcagcttgtccaggcagcgccgaccagtgctgcggtcacaggcgatgaccaggatgggaatcaccgccggcgcgggggtcacaggcacacgcggctgggcgggaggggccgcggtgggcaccctcccccgctggctcgacagggcatccccgatctgctgcagcagcccacgctgccgctccagctccacctcggcgtcttgggccaggcgaatcacttcccgggtgaggctggcggggtcgccatcgagagcgctgactgagggtggcctgccaggtgctgggcgcgtccagaagaagaggagcagcagggcattccaggccacaaagaggatagcgccccacagcacaagccctgcagactgcttcttcagcatcctggcccccaccggggagggcaggccaggggacggttcaaggctgccctgggcttgcccggctcccttgcccgcagtcctagggatgcctcctctggactatgggattaggaggcagccatgcacctttcttctcttgtctcagttgctctccanggagatcatcaaatccccattcagcactccattttcaaaactgagaatcccaaatcagatccaccaaagtgcagcttctctcttcttatccaggtccaaagtccacctcgtgccgaattcggcgcgccgtcgacttcatactct

SEQ ID NO: 135426 - DNA, 936 bp, Homo Sapiens
caggtcatcctccaccaccacggccgcggggaagcgaaactgccggaagacctggcccagcgcccagcggtagtggcgcgcgatcttgtagtacccctggaacttgcggtggtccggcggcaccgcaatgctgctcaggtcgggctgccggatgtgcgtgaccgcgctgccgtaggaggcgatggcctgggccgtctcctcgtgcccgcagtcctggctaacgatgatggggaagagctcagccgagggccgataatgcagcagcttgtccaggcagcgccgaacagtgctgcggtcacaggcgatgaccaggatgggaatcaccgccggcgcgggggtcacaggcacacgcggctgggcgggaggggccgcggtgggcaccctcccccgctggctcgacagggcatccccgatctgctgcagcagcccacgctgccgctccagctccacctcggcgtcttgggccaggcgaatcacttcccgggtgaggctggcggggtcgccatcgagagcgctgactgagggtggcctgccaggtgctgggcgcgtccagaagaagaggagcagcagggcattccaggccacaaagaggatagcgccccacagcacaagccctgcagactgcttcttcagcatcctggcccccaccggggagggcaggccaggggacggttcaaggctgccctgggcttgcccggctcccttgcccgcagtcctagggatgcctcctctggactatgggattaggaggcagccatgcaccaggtcctcccgacgtcctggccccgaacttggcctgctccggggcgcagggagcgagcccggtgcccaggcgcgtcccaagcgctgccgcggccgcctcgcctttcgactcgccagccctttctgcggcgcgcccctcgtgccgaattcggcgcgccgtcgacttcatactct

SEQ ID NO: 135427 - DNA, 596 bp, Homo Sapiens
gcggccgcatatagactaaaatatcaattataacacattcaaaatgtcccctacactggcgaatgtttaatccataaggtttttttagtagtttgtcaaacagtgaccttctcacttcccagctgtaacacatagcaaaaccaattttcctacccttggctcagcaatctgggtctcaggattatttgtgcccaacaaaatctcttagccatttcttaaactactggcaggtagttagattttccacttgacattgctaagagattaaaattgtttatctcattgtcatacacaggccttttcagtttcctgctaacagattcaggttagataaggattacagaagtgatactcccaagttcctctctataacagtcgtcatcctttccccataatattatgaggtatattttattaaatctatcattcagatagctaacgcgtaagagcattatataacatataaaaagcattatacctcatgcataagcagaggcttagacaaacaccagctcctattcaactggggaagaagcacttcacaggagatcctgctgaattacacagtcagtcatcaattgccatagagaagttga

SEQ ID NO: 135428 - DNA, 921 bp, Homo Sapiens
atttgggtgtgaggaaaatccccaaagcccctcttatttcctctggccccacgggatttctccctaggggaaaacaaggttattggccccaatggttccccctttaacctttatcgggggccccggccgccgcaccaaaaaggaaattggtttttaggaaaacgctttctcggaggggcccggaagggcgggcccgaccaaggggtgtttggggaggcttattgggttggttggggggtccttgaacaaccagccctttaattttcccgacccttggatccctgctcggaatgcttgggggagggccccttaggcttccgccccgcccagggctttggtgcccgcctcccccgcagggcgcagatttcatggaccacggtgctccagggggacttgaggcccgtactccccccagcgggaggctggtcctccagggggcttcccctcgaaggtcagccagaacaggtcgtcctgcacaccctccagcccgctcacttgctgcttcaggtgggccacggtctgcgtcagtcgcacctcgtaggtgctgctgcggcccttgttattcctcaccaggatgctcagaggttcgtcgcatttgtccaccaccagcaggaccgtgctgccggggcccaggccctggctggcaagggggaccctgtcctgcagcgccacaccgctcgggtggacagccagacgctgctggaaggcgtgcacgccgatcttctgggtgatctgcgccttcagctctgacaccgacatggagctgctcagggacacctggaattcgttgcccgccagcatcttcaccgtcaggtcccagcccatggctgtgggctgtgggctgtgggccacggcacgagctcctgtactggcaaagatgagttcgctgcctctcagccgccggcttccgcaggcagcccc

SEQ ID NO: 135429 - DNA, 679 bp, Homo Sapiens
gtgttgctcttttgtctttttctcgtttacaacagcctttatttccggcccttgatcctgctcggatgctggtggaggcccttagctccgcccgccaggctctgtgccgcctccccgcaggcgcagattcatgaacacggtgctcaggggcttgaggccgtactcccccagcgggagctggtcctccaggggcttcccctcgaaggtcagccagaacaggtcgtcctgcacaccctccagcccgctcacttgctgcttcaggtgggccacggtctgcgtcagccgcacctcgtaggtgctgctgcggcccttgttattcctcaccaggatgctcagaggttcgtcgcatttgtccaccaccagcaggaccgtgctgccggggcccaggccctggctggcaagggggaccctgtcctgcagcgccacaccgctcgggtggacagccagacgctgctggaaggcgtgcacgccgatcttctgggtgatctgcgccttcagctctgacaccgacatggagctgctcagggacacctggaattcgttgcccgccagcatcttcaccgtcaggtcccagcccatggctgtgggctgtgggctgtgggccacggcacgagctcctgtactggcaaagatgagttcgctgcctctcagccgccggcttccgcaggcagcacccccc

SEQ ID NO: 135430 - DNA, 525 bp, Homo Sapiens
ttttaagtcatatgtattatatttcatttattttgagacacattttttctaacattttaatgtgtgtaaaatcagggtgaatcacactgttagtacagtctcataataaatttacagttttaagtacttttttgctgatgtttaaataataatttattttaaaatacatgaaaactctgatttcatcaaatttgaaaatcatttgaaatatgataagattgacttttgggctgatatcttgggcttcttggtacttattgcgaatgggagaggagacatgatgatggctcatgggatattctgatatgaccggcgcctcatataccataatgcaaggcatagcaaaaggagcaaggaaggcactattattgccaaaacaattgagccaatggaggtggggtttctccagtagaggatgatgtcctggccctcttaactgctgtgcttcacccgacaggacaggccagccgctccccatctgccacatcagggttgccggagatccatgtcagttacatggcagga

SEQ ID NO: 135431 - DNA, 566 bp, Homo Sapiens
taagtcatatgtattatatttcatttattttgagacacattttttctaacattttaatgtgtgtaaaatcagggtgaatcacactgttagtacagtctcataataaatttacagttttaagtacttttttgctgatgtttaaataataatttattttaaaatacatgaaaactctgatttcatcaaatttgaaaatcatttgaaatatgataagattgacttttgggctgatatcttgggcttcttggtacttattgcgaatgggagaggagacatgatgatggctcatgggatattctgatatgaccggcgcctcatataccataatgcaaggcatagcaaaaggagcaaggaaggcactattattgccaaaacaattgagccaatggaggttgggtttccccgcatccacatcacccacacgggctttgggtagaatcctgagacatggcacacaagctgcagacggccaggtccaggactggggccactggacagccaggcctcaggcttcacttgtctttgcagatctgcttttcctgcattgaggacgcccaagagatatc

SEQ ID NO: 135432 - DNA, 1102 bp, Homo Sapiens
  misc_feature (54)..(54): n is a, c, g, or t
  misc_feature (65)..(65): n is a, c, g, or t
  misc_feature (88)..(88): n is a, c, g, or t
  misc_feature (90)..(90): n is a, c, g, or t
  misc_feature (100)..(101): n is a, c, g, or t
  misc_feature (124)..(124): n is a, c, g, or t
  misc_feature (149)..(151): n is a, c, g, or t
  misc_feature (157)..(157): n is a, c, g, or t
  misc_feature (161)..(161): n is a, c, g, or t
  misc_feature (250)..(251): n is a, c, g, or t
ttcccggaatggggaaaaggattgggaaattttcccaccccccaaaggggaggnggtattagatncctggcccccccttaggactggncntgggtttcanncccgacagggaacagggccaggntgcctttccccagccgggccacatnnncagggnttgnctcggagatacccatgtctcgtcagcccattaggccaggacgttccccctcggcttgagtgccctgctgctccctgctcaccccgcatnnccacatcacccacacggggctttgggtagaatcctgagacatggcacacaagctgcagacggccaggtccaggactggggccacaggacagccaggcctctggcttcactttccgtttcagttctgactcccctgcttccatgagccccgctagaaatcgagggcaggtgtgaccaagaaggctttgcagtatttccttaatatctaggtagcgattgagcactttacagatgttctgggcccggatccctgctcctggagatggctcccaggaaattccttggaaactcaggaaatctgacccttgatatgccatatttaagaagatttgtggggcattcattctacagccagctaatatctggatctcgaaggggtatttcaagctgaaattgaccagcagaagcttgcactatctggataaaacttatggaagtataactggaaccagtgactgtaagtttttcagctcctgcttgctgaagtttccatgggaccagggtttcagaaagcggatggtgcccaagacagtgtcccagccatgagtctgcaggtcacccagccatcctgagccctcactgtgtgcccagctgtggttggcaaaggaggaagtttggagcatgcggaaggacagctgctcctctgctgctagatgataggattgtagagcctggggagctgctgtattttccccaggacagcagagaccctcgaagaggaggaacaggagcagcattgaagctctgttaaaggagggattccttggcaggacacctgccctaataattcagatatcagtacccctctccacaccctcttgcactctcgtctatcccgggaattccggaccc

SEQ ID NO: 135433 - DNA, 500 bp, Homo Sapiens
aatattttaaacatgatgatcataaataaaatgtattatttattctaaacccaaataaaatgatacattatcttttctccttgccactctcttaaaatgtatacaaggaaataaaacattctaagccagaaaacatattttggtatcttagatttttcctttacatttatagaccaacttttcaaaaggaaaaaacaaaaccatggtactgaagcaattcaccatgagctgtacaatgagccacatcattcggttccaatcacagaatttgaacaagcagcttccaatctcagccttttacctactctagaccaggggcagctaacattttctcgaagggccagacgctaaatattttaggcctttgtgagtcgcatggtttgtcaccactggctcaactctggccattgtagcacacgagcagccacagacaacacagaaacaaatgggcatggctgtcatccaatgtaactttatttatggacactgaaatttgattg

SEQ ID NO: 135434 - DNA, 557 bp, Homo Sapiens
ttaagagcatgagtggtctttaattcaaagcagggaagctccaagagggtgactggggctgagagttagcggtgggtggaggagggggccttggcatcttctctttatgtctctgagctgtgccttcgccaccccttctgggtcactcagttctccttcatgtccttgatatagtcctggacccacttgtcactggggttggtacagacggaatggccccttttggtgatgaagacaattccgggcttggagcactggctgttggtctcatagtaatccataatccgctgacgcgggatcttgtaggtagtgtaggtgaagcagcactctgaggggtggtaaggtccccgtgaggaggattcagtcttggtccctagggcgatggtgatgaggaggaagaagggaatggcagccacggagatcttcatgctgtgggaagctgttgtgggaggagagctggcctggtgggagcttcagaggctcctgcggtgaggaattgctgagaaataaaatgcaggcccgagattcaggcccgagagataggcacgagaggcggt

SEQ ID NO: 135435 - DNA, 844 bp, Homo Sapiens
aggcccgcttatcgcgagggggcgcgggcgccctgggctggcatggcgtggccctgtatcagccgcctgtgctgcctggcgcggcgctggaaccagctggaccgctccgacgtggcggtgccgctcactctgcacggctactcggacctcgacagcgaggagccgggcacgggcggcgccgcctcgcgcaggggccagcctcccgcgggcgcccgggattccggccgggacgtgccgctcactcagtaccagcgggacttcggcttgtggaccacgcccgccgggcccaaggatccgccgccggggcgcggaccgggggcgggcggccgcaggggcaaatcctccgcgcagtcctccgcgccacctgcgcccggcgcccgcggggtctacgtgctgcccatcggcgacgcggacgcggctgcagcagtgaccacgtcgtacagacaggaattccaggcttggactggagtgaagccctcaagatccacaaagacaaaaccagcccgagtcatcacaacccacacttcgggatgggacagcagccctggggccggcttccaggtcccagaggtgaggaagaagttcactcctaacccctccgccatctttcaggcctcagctccccggattctcaacgtgtgactgcctgcaccgtgacaaccatggctgccgacaggacagggctggggagcggcctcaggacccactgccgcggtgctgggcgagagcatggcatgggcccctgcgggagggcacagcccctctcaaagctgtcaccagggccaaagtgctggtgtggagcagatgcaccgatggacttggcacacccagctcagcctcaagc

SEQ ID NO: 135436 - DNA, 586 bp, Homo Sapiens
  misc_feature (104)..(104): n is a, c, g, or t
cctaaagccctgtacagtggactcgagggctcacacccgggactgcgctcggtctcccacacggcgcacactaggcagtgacggagagagctggggacatggcngcgcgcactctcgcacggctaggcccggcggtgggagttaaagggaggccggttccaactcggctgaaggcaggccattctgacggctgcccccaggagggcggctgcgagggcagcggtgcgctcccggcacgggggtgctcgagcactgagtccgggcatggagcagcgaaggcgccgcctgcagtgcccacgggaccaaacgggggtgacctctgaggccgccggcagctccgaggtcgcgtgggatccgggctccaggcgcctccgctctgccgcccaccccatccctctggctccgggcctccgcgtcctcccaccacagggtggggactcgttgcggtccctacccagcccatacctgtacgacgtggtcactgctgcagccgcgtccgcgtcgccgatgggcagcacgtagaccccgcgggcgccgggcgcaggtggcgcggaggactgcgcggaggatttgcccctgcggccgc

SEQ ID NO: 135437 - DNA, 505 bp, Homo Sapiens
ttttttttatctcaaaccaaacgtcactttacttttttggtaacttttcattataataataaactctattcatgaatatgcagcctccataatcttctcccttgtaacaaacgtgcagtccgttcacaagctgtaaaaacaagcccaaacccaagacatcacaagaggcaagagcagtggcagtgagaagggagcctgtaaaggatgtttcaaaggagggtcccaggctatgtggccactggatgtaggcagtgagctgagtccaggctttcggtctgggaagtggcagaggctgagacaatggccaaagaggagttggagaggaaactatgctcggtttcactcctgccagcccaacagcctattccctggtgtgaatcaactggtgtttgatcaactttgatcgctggctgaaggcttttccacaagcagcacagtcatagggcttcaccccagtgtgaattctcttgtgctggatgaagaccgaacgctgactgaaggcttt

SEQ ID NO: 135438 - DNA, 448 bp, Homo Sapiens
cttctttttaaacaatttgcgattgcagcctctccttttgtttccggtattacctgcccaggagcagaattccttactttctccggagagaggccggtccctgggagcgctgcccagccacccgcacgcctagccgccccgagagccgcactcggcggacccggttcctaggctcgttcccggggcacctggcgggcgcccacctcccggggggcacgtgctcccgtacgcagcgcgagggcagcgggtgcctggctatttattaggaaaagccccgcgcggactctccggattgaggagggtgggaaactcggctgcccagcgctccacccgggcgggcggggctggggcttctctgctttcggccggggggctcatcctgggacagggaaccatgagtcatccgctccgcgggtcacatgggcaacgtgaccaaaataaagtttcg

SEQ ID NO: 135439 - DNA, 869 bp, Homo Sapiens
  misc_feature (252)..(252): n is a, c, g, or t
atctcttgacctcgtgatctgcccgcctcggctcccaaagtgctgtgattacaggcgtgacacccgtgcctagccaggtcttgttttgaaaacctcactgtgggagattcaggcatcctccctaagccagctggccgctgtgctaaagcctgttcagagttaataataatcattagctgaatggtgctggggcctttcagcttcagatctctaagcacttgcaaggctgagtcagtcagccctcaccttccnccctccttcctgggggctgcagaagtgtaacaagaatgggaaggcactgtgggaaggaagtcaggaatcttgctgctagccacgccttgcagtgacttctcgtctgggagtgggcactgagtcctctcagtaaactaataagacttgcacctgacaaaggtcaagatatgtagggaacacagtgtatgctaggctgagacctatggtggtggcaggggtggctgttgagcctgaacttccagtactcctgcccttccttctgtttacctggcttggcctacagggggcacccctggtcttgatgcctcaagcccagcatttctgggtcccctctgcaagctcagagagcagggaggcttctggtagtgctcttgatgctcctgtgtctggttggcacaaagatcctgtgtaacatgaaatgaaaggtgcatcagcttgggggctgggaaacctgcagtatgggtttactccgtccctatcactggtgtggctgtgggcaaaccacttattgcctgacctacctcacagggatgttgtgagggtttgatgagagaatgaatgttaataggaattggaaaattcaaagcattaaacacatgtaaacaggtggtattatt

SEQ ID NO: 135440 - DNA, 1063 bp, Homo Sapiens
  misc_feature (67)..(81): n is a, c, g, or t
aaacaatagtacaaccctctggttctgttaaaactacatggttttacaccgagtcactcacaaaagnnnnnnnnnnnnnnnaagtaagacttccctgcaacaacagcaatggaggagaacaacaacaacaaaaaaatcagaatctgcaggtgcttgaagaagcaggagtctacacagtagtggaaaccggaggcttttttttaactttatattctttcccgttttcctccttatatagaacgtggggtatctgtgtggccctctgtttgggacggaacagctgcagcgggtgaaggaagactgctgtcttgggggtgttggggtgggggtgttatggatttcttctcccttgcgtctctgcaacaccgtctccccaaagtctcgacccccacttgctctctcacttatcctcgatccggggtgccagagttagccgggcctgaagccgtcgtcttcttaagaggagttcataatgggccgggagtacaccccctggtacgtagcgaggtatctgcgggcaggggccgaggcgtccaggcccgtttaggttcgtgaccgggcccatggccaagctgccaggcatgggcggaaccgtagccggggatagtgcatcaactgttcgtaggggcttgaggtccatttcgtgcggctggtggtgcgtggtggcctgtggtggctgctgctgctccgacgaccatgaccgtgctcgatcgcccacccggctgccttgacggcgctacgagcgtgcatcccagcactataaacgatgcgccctcagcgccccccggcccgcggcgcgtgccgccagtcccaacacggtgggacccgaagacattcatgacttaatgtctcgcggacaagggcaaccgggcactcagggagctcaagacccggcaaaccggaggtcaccattaaagacatcccaagggccccccgctatgatggccccaggaccagtgcaagccgcaccacatgacgcgaaactcgagaccaccgaaaatcagtaaggcagacccctgggaccccccaagttatactataaagaccgcgactccggcgcaca

SEQ ID NO: 135441 - DNA, 549 bp, Homo Sapiens
  misc_feature (181)..(221): n is a, c, g, or t
ttaagaggagttcataatgggccgggagtacaccccctggtagtaggaggtatctgcggccaggggcgaggcgtccaggcccgttttgttcgtgaccgggcccatggccaagctgccaggcatgggggaaccgtagccggggtagtgcatcacctgttcgtaggccttgaggtccattttnnnnnnnnnnnnnnnnnnnnnnnnnnnnnnnnnnnnnnnnnccgaggacatgaggttgttgatggagaacgggtggttgaaggcgtagtggtgttccggcttcaggtgggcctcaggcggcaggcccgggtggtggggcgggcccagcaggtgggccgcggcctgctgctgctgcccgggagagggcgccggctctggggggctcagcgccgcagccggcgtccccttcagctctcccaggccccctcgcttgtgctcctggcacggggaggcgctcgagtgaggcgactcggtgcccgccggagtctcggaggccggcccggcggcctccccgagttgagcctgtgaggcctgggctccggcggccgc

SEQ ID NO: 135442 - DNA, 508 bp, Homo Sapiens
  misc_feature (342)..(437): n is a, c, g, or t
tgaaatgtcggaagcatgcacttctgccctccagctccaccctgaatcatcaatgcctggagaaccactcacacatgtgcacaaagagacatgggtgagcatgctcggtgcagaattgtttgtatggtaaaaactggagcccccttatctcttcatcaggcagggctgctgcattctgggtgtggatggcatcccctggaattgtgcagaggcaccatttaccatgaacaccttttgacccatgccctctagagctgggaccctgagtgagggggagtgagaggggcgtggttgaatcaactgtgttacaggcacgcatggaatattaggtagaggttaaannnnnnnnnnnnnnnnnnnnnnnnnnnnnnnnnnnnnnnnnnnnnnnnnnnnnnnnnnnnnnnnnnnnnnnnnnnnnnnnnnnnnnnnnnnnnnnngagggtgcagtaagctatgattgtattagtgcccttctagcgtgggcaacagagtgaaaccgcatttttag

SEQ ID NO: 135443 - DNA, 874 bp, Homo Sapiens
  misc_feature (312)..(312): n is a, c, g, or t
tagggaggctttggcttggggactccccggttggataggatttccagtaaaatggcctccgagaactcgccattgtggaaatttggttcaagaaacgctttcgggttgcccgcccggggcggtttttttatgtggtgggaaattccaaagcgcttaattccagggcccagggattttcctggggaaacaaggttattggcccatgttccactttaccttactggggcccggcgcggccaaaggaaaggttctggaaaagcttttttgaagggcccgaggcggccggacatggggtttactggatggaggatnttcgggggggaaagaatcaactttattgaacattcagggtcagtttctcttcttgctcttgcctgtgaccttggctggtgtgaggactggagctgctgcctggtacagggtggaggagatcttgttgatgtagtacagaccaaccatggagaagatgaagcaggtggtgacacagactcggtggatgaggccagatgcaaagagagccaacaggaggcacaggagaatctcagggaagatctttgcttggaatcctttgccaaagacaagattctccagattattgaaggcagtgagcgagaacacgaagagacccgaaccaagcaggccgccctggatggtgagccactcggtggaggccagctgacggctgtacatctgcatcccagcaaagagcagcagggacaggagggaggagagcgccagcgaggtgcccgtacccaccaccatcatgccccgcccgtgagtccaaccggcgcctctggccaagaaaggcgagctgaaccgggtgcggttagctatgcgcatgcgtcagcgcttaccgcggacttgctactccccc

SEQ ID NO: 135444 - DNA, 1049 bp, Homo Sapiens
gacaaattaaattcatcatttaatcatgtcatttgtattgcagtctcatgatactgtctctgaggatcaaatattcagttaaagccatactagactaccaaataatatataaaacatttatgaacattttatgcttgctttacaaggctgatctattaaacttgtgacatttttatttaaaaagaataaacaagaatatcaatggtattattttatccttatatgggttaagaaattatttatgagttgtctttagaaatctaccaatgttagatgtgtgcataattcttctttttcattgtagctgggggccaaggaagtggtcaattaatatttgtactgcaaatgccttaagtggatacctattaaaaggtatacaaaatataaacagtactgcatattttcaaaacttttaaataaacacaaagaatatataggtatacatgttataatttcaaagtcaacactagcacataagtttttcatatctaaatacatactaggatacttcctatttcaacacatgcacctacaaacacatggccatgcacataaccttactttctgccacttgcaacaaagaatatacaatattgtacattgtttcaacttatattgtattggaaaactaatgaggatggcattaaaaaattctgatctaagaaatcaaaatgcaggaagataattattccttagattaaaaacactgaagactgatggaaagttaagattcaaattgcttgtcggaagagaacaggtccgcctgtaaacactcagaatgctctgtttgacaagtgggactagaacttctgtaatatagcaatccaggccaaagacttaaaccatcaatgcttcggatcgcagagaaatggtatagttgtgggtagttctccgcaaggcagggggtgcagatggagatctggatgcccatctggaggggagacgacgatttgctggtctagcaggtcgggaaaatccttttccatgtgaggcgttcactgacatggattcctctgttatctttttcggatctattccttgcttcactt

SEQ ID NO: 135445 - DNA, 438 bp, Homo Sapiens
  misc_feature (425)..(425): n is a, c, g, or t
tttcaattagcttttttgttttcttcctatattagtttcttattactggctgtaacaaacttgtcacaaatatggtgtcttaaaacaatacaaatttactatcttacagttctgtatgttagaaatttgtcagacgtctccctggcctaaaattaaggtgtcagtaggactgtgttcctttcttgaggttctaggggaaagtccatttccatgctttttctagcttctagaaatcacgcatgccccttggctcatatttctctttcttcattttccaagccaacatcattggattgagtctttttcacatcgtatctctgacttcctcttctacatcatcactcccttttggattaggatgtaggcatctttgggtgatgggggtgttggggcattattcttcctatcacacttactggcaagtncttcagagtcctt

SEQ ID NO: 135446 - DNA, 826 bp, Homo Sapiens
  misc_feature (127)..(204): n is a, c, g, or t
ttttttttcaactcatacaaatttaattttttctgcatggcaaaaaacactactatgtaaaatcaaaactggggtaaagtatttgaaacccattcaaaaattaatttccctagtttccaagttcttnnnnnnnnnnnnnnnnnnnnnnnnnnnnnnnnnnnnnnnnnnnnnnnnnnnnnnnnnnnnnnnnnnnnnnnnnnnnnnaatgcaaatcgctcttaaacctcacttatgatacaagaatgcaaattaaaatcaccaatatctgaaatacactatgtgctggggcgtggggaggaggaactgatgagggactctaaccctaatgctgggaggtttgggaacaactattgaaattacaaacgcccgtgctttggctgagcaattccacatctaggttttcatcctcccaatacacgagtgtgggggatttgattttaactcttgcaagctaacaactcgttcctgtttcgtggaccctggaagaagacatgagaccccggaggcggagacaaagggcttactactcacggcacagcaagctacgtgagcttccgcgtgttcatcattcacccaggtccccaggtcccgcggggggatgtggaagcatcctggctgatgctgcatctgcagtgggttcttgtagcagcagaggaagacagagctttatacagggtgaggctgaggtctgcaggtgaagggccgccgtccctgggggccaaggatgaagccgggtgcacgtagggggccaggaagggttgagacacttccatagctgggtcccccgggggtgggcgacggaatgtgctcctgagcctgtgcactt

SEQ ID NO: 135447 - DNA, 908 bp, Homo Sapiens
tttttttgaagcttgttgctgctttattgaaacttcctccctgtcgcacacaaagcaattacacaagggggtattgccagggagctcttgcagagccttctccctctgtaccccccgacagtccccagagaccctgcctccgtggcctccacctctgggtcagctccctggaggaccccgacacacagggaagcaggcacaggagggctgttggggccaaacctccccagctgccacaaccgccatgaccccagtggcagggtcagtgcccacaagggggttgcctgctttgactgaactaacctgtgggtttagtccaacgaacagatgtgcctgatttcagggctgaatttttgcttgaccacaagcctcgggcagaacagattcgcctatgactgaatcgactgaatggatggccagcgacagcctggcctgggaatggactggcagctcatcactaaaatgactcctttcatggaatccactgttatgcagccacactgaccacagagcaactgaataggtgagcattggattgttgatgacaactcttcagcagaacaattgtgtgtttgaagggactgttttatgatgaaataactgttatttcctggagctaattgttgaatgacagtttgtcaactgtttaaatgaatttcatttgaattaacaattatacagccactcagaggtcctacattcgccagagttggcatccagttgatgggttcatttgaattaaatggtttggaggctaacgtgattttttaaattgaatttcatcactattctgtgtattctatttatcactattctaaatcggacgcgtgggtcgacgatatcccgggaaatccggaccggtaccagcctgcttttttgacacactgtttctatatgtcccaatagct

SEQ ID NO: 135448 - DNA, 1039 bp, Homo Sapiens
tttttttgaaccaaaatgtcttttatttgaatactgaatacatctcagttaggaacataacagtgtgctaagaataaaattttttaaagaaaaaaatagcactggcagcaatacaattaaaatggaaaaagcataatttctaataatttcaaatataacacaaatgacaaatagatacattatcattctgtgaactccacttaagacttcctttatgtgacaagttgtagtttaagcttacttgagacatgagtatttggaattttcaaaaaataccaaatatataaaaaatagacacaacaaatggaagagtatatcatgattcattagacacttttaatgaaaatagtgcttgacaattagaaaacagttaaaatttttgctttagaaaaaaactacctcaaactaatgttcatattagaggtgacagtgctatttgtgtttctagcattccatattgaagtttatcttttaaatacaaaaaaaatatgctctgcccattacagcaggatgacatgaacttagttttctgttcctccagatgctcagagcagcaacaagacaagtctcaggatcatcatgaggcttaaacctgcaaccaaaccagcaggcattattttcttggacctcttaaatctcacacccattatggtagccaggaagaaagctgtaaacagtgacacttttacatctcgtttgtcattggagacacggtaagctccatagccggccaaacatccaacaaaaagaccagcaatcaaagacggaacaccacctctccgcttatatccaaaaatgcttccaaatgtcacgagggctgcataaccaaaaccgatcaggtccattggcaaggttgcaattctgcagccccgagccttcactgcagctgaaaagacagaagtctggggccagctgccgccaagcgcggtacctggagtccggaagcagtctccgcaccagcgctgtcccactcggcgcccagccgtctccccggccgtaatggccgaattcccgggcatatgtccggtaccgtcgactg

SEQ ID NO: 135449 - DNA, 839 bp, Homo Sapiens
aaccattataacatttcgggagaccttcccctttaagaacttccctttaagtggacaagttgtagggttaaggccttcttgaggaccatgagtatttggggattttccaaaaaaattcccccaattttttgaaaaattgcccccaacaaattggaggagtatatcatgattcattagacacttttaatggaaaatagtgcttgacaattagaaaacagttaaaattttttctttagaaaaaaacttccctcaaacctaatgttcatattagaggtgacagtgctatttgtgtttctagcattccatattgaagtttatcttttaaatacaaaaaaaatatgctctgcccattacagcaggatgacatgaacttagttttctgttcctccagatgctcagagcagcaacaagacaagtctcaggatcatcatgaggcttaaacctgcaaccaaaccagcaggcattattttcttggacctcttaaatctcacacccattatggtagccaggaagaaagctgtaaacagtgacacttttacatctcgtttgtcattggagacacggtaagctccatagccggccaaacatccaacaaaaagaccagcaatcaaagacggaacaccacctctccgcttatatccaaaaatgcttccaaatgtcacgagggctgcataaccaaaaccgatcaggtccattggcaaggttgcaattctgcagccccgagccttcactgcagctgaaaagacagaagtctggggccagctgccgccaagcgcggtacctggagtccggaagcagtctccgcaccagcgctgtcccactcggcgcccagccgtccc

SEQ ID NO: 135450 - DNA, 1150 bp, Homo Sapiens
  misc_feature (547)..(608): n is a, c, g, or t
ggatttggtcttcctgcgatacccaccttgctttcaatgtcctgtctgttacggcctttttgtgttgcccgtgttctttagtaattgtcccctgggcgtcgtttttgcaagaaaatgcctcgcccggtggcttcaagattcagatttcttgtctcaaatataggacagaccaatgcagttaagtggcttgcatcaaatttatattcatcgtactgggaaaaaacaataatggggttcagtagtgtcgttcagcactaaagtggaattcagaacattacgccactgcaagaatacacccagcgtgggtataaagtgattcctttcagcacagctgcacattgcggtggactcgtccacaagtgtgtgccggtcactctgaggacgccacctcgctttcatggtcaatagactggggcgaggacatagtactcttgtttcgtcctttggataattagcctgacgtgagagggggccttcttcacacaagaaagctgagggttcagaagtattgaaggtctccctgggccagctttgtgcgcgcccctgnnnnnnnnnnnnnnnnnnnnnnnnnnnnnnnnnnnnnnnnnnnnnnnnnnnnnnnnnnnnnnttctgtagaaaacatttaataatagggaggtgacagggaaaacaaagcaagggcagtgttggggcatcagaccagggcagggctggaactagggagaagcaaccagttaagaggcaggctactacaggtagcaaatggagagccctctcacccagccaactccaagagttcctcttgtcccttgtgctctaccccaaactttagccccagcacctgttcctcatctccagcaaagaacagcagggcaggacctgaactggtctcttttcaggggctgtcttgaagatggctgttttagcagacatgaggctgcccaaaggtttctacaagccacctgcgtggactttgggggttgttgaacacatgccctgataaccatgaattggagacctggatctaaacatgggctagctacccatcctggcatctttggctaatacccttagcttgggtgcccctatctgagaatgatactttgggctgttcaagatcctgtctgaggagcctcacatgggtttcctagttaagttgtaaagtcactc

SEQ ID NO: 135451 - DNA, 625 bp, Homo Sapiens
gccaacacagtgtgtcatgtttattgggctattcacaggtacgctttaaaatacaatgaaaagaaaagaccagacgtcatcaggaatgtcgagacacaaaatatttagcatttcttagtttcaaatgttaccatttcattgcagctgaggaatataggccattcgttgacataactgcaatgggtgagacttatttttagccacaggaagcaaatacatttaaccaatgacttttaggacaggaagcaaaaaagaaaatattttcatgtagcaaggacaagaaaatcatttatacaaattaaagtgatataaaatacattataaagagagcacacatacaaaagtcattaagttggtcagagagcaaaggatgtcacagaacaccgcactgagagcacactggtgtgaattcatttcagttacgaaagtatgtccagagtttgtgttacacatttactgaggtaaaggcacgatcacttccacgtaattaatggggaagaatcccgattctccgtgtatcattccttcataccagttttcatctatttgattggttaatgtaatgatgtccccttctttaaatcctaattctccttggttttctggctcaaagtcatcctcgtgc

SEQ ID NO: 135452 - DNA, 532 bp, Homo Sapiens
gcacgaggtttggaagggagacgcagcagggtctggaccgcattgtgccccatggtcctcccaagcctggaagtgcgggttcgcctccctcggggtagggtgggcaggagttctgtcccacgtggtctgggcctgcaggtggggtgggtctgagagattgggcagcggaggaggcggagaccggtccaggttggcgcgagggcccctcgggcagggtcctgtcgagtttgcaggcccgtgttgcccagcgccggttctctcctcaggacgcaccggttctctcctcaggactcgtcggttccggctcgctcggccaccagcgggtcggtcagcgacagccgggctgcggcgcgagcgcgggcccgggcccgcagcctccgcaggcggcacagcagcagcaccagcagcaacgcgtgcagcagcccaaggcccagcagcgcaagctgcgccgccagcgccccccagcagagcgggccgggagcgcaagcggcgcgcagctcgtcctcggccagatagggcagcaggcggccgc

SEQ ID NO: 135453 - DNA, 1488 bp, Homo Sapiens
  misc_feature (136)..(136): n is a, c, g, or t
acggaccagtgggacccccccaggggaaggcctcgggaggggctagggctacaccaggacgggctcccagtgcccaaggtccagaaacaggatctgtctgtcggtgccagttccgttttcaacggctacagccaanggtgtctggtttgtagcggccgaagatgggttttctcaggacatgggctgccttgggtgtccagcgaggcgtcagctcctgcccgtccagcagcacgaaggcctctgagcccacaagaagcacatctgcaccggcgttccctgggacatgcatcaggtagcgcactgctccagagctgtgggaaagcatcctgcgggtggtggcattgagcatgctctcccagtgcgggtcactcttgaacgggccgccgctcccggtcaccttctcgtagagacccttcacagagcagccgcagagggagcttgcgcagggaaagaggatgtagtgggcacctgtcctggtgacgtgaaggaggaagccactttccccgtccacaccaaggctgcctctgaggccaatctggtgcccggtgctgccggagtagaggtggccactaacctcctcccgctcctgggtgagaaccagcaggtctggggccccatcgccgtccacatcaggcacctgcagcagagggctcaggatggacgcattcccgctgaagctgctgctgtggttccacagggtttcccctgtgaacaagttgactgcaatgaaagaactgggtctgcccaccaggatgcaggcagaaggtgcctcactgcctcttggctggggcacagcacactccacgagggccacgtcttgggccacaggtctctcccagagcgtgctgccgttggcccccgacacagcagctgcaaaggtgcagggagaggaaaagccttcgtccacacaggatcggctgaaattgttgctgctgttggtgtttttataaagaaaaagaacatcttggatcctgtccccgtttatatcatccacagccagaaagtcatagatagcagcggcactgtagtctatcctccacattcgctgtgacgccggccggtctggacacgggatgacgaatgagacgacgaacaccacaaaaaggcagagaaacaatgaaagaaaaaacgccgccgctcggcaccgggagagccgggactgtggaggcgcgcttttcacgttatcctcattttttgatggatttcccagattttcctgcgattttctttcttcatttttcaaggggtggatttcggcctctaagtccttgtggtccaacatcacgggcacatcccaaagtttaactcctggtcactggtcgtgggagtgcccggaggacgtcctcgatgtggactcctgctggtgcatctggtcgtgagctgtggacggggaatctgtgccttcgcaagcccaggtggacctgccgccgcggcctctcacccctcgtgccgaattcggcgcgccgtcgacttcatactctctccccc

SEQ ID NO: 135454 - DNA, 1214 bp, Homo Sapiens
ttttttttcaaggtttacatatacctttttaaagtaacatttaaaattacttcctttaatataaaagaaacacacaagacacaaagaaagcccaataaagctgtgagtcccagtttggtagctgaggaggagtctaagaaaacaagccattcctcagtatccctgggaaagaaggggtgagaggacacagatatcaccaggccctgggtgactgcattgctggggccatgcagggcctagctctccaccaagggaaagtgctgattttccttgtcatggtcctggccttgctcccatgctcgtcctccagttttcagaagtcgtccagttccaagaatggctccttcctttagttcactaacattttcacttaggggtgaaggccgcttaccctgtcgtagtgtcagggtgccaggggagttgtcatcctgcaggatggtgaggggggatctccctagtaccttgctgctgtttggtttccatctattgcgcatagaacctgaagatctgggagtctcagggtcccttgagggcttgtcggagctctggctggccacaggggtttctgtgggctgtcttgcttcctccttggaaaacacctgtttggaggggaactcagtctggttccaaggtggcatctgttcctcaacagataactgggtacccagaggcaagtccaattcagaagataaaggtgcctctgggggcagaacaggctctgggggaagatttgatttagagtcttcagtttcaaatacttcactcagctgtttcaccagtgggcttggggggtctccactgctggtcttcataggtgtccgtgcaataccaagagtaggagagcggggatctgagtcctgggcatgtttaagaccctccagttgctcccctgctggtaggcctggctgtggagagctctccacctggatgggagtgcgcaggatgccagcactaggtgaacgggggtccgccactcgagccagatgcttgttgtgcggcggagtccgcgctggtgtgactgggacgctcttggctgagcccatctcaaccaggagttgcagggtgggggcaagggccagcccgggacgaggagggaatgccgggccccgattccacctcgtgccgaattcgccacccaggcctcgctaccttaggaccgtattgttactgccgtcgttattccgcctgcttatgtcctggcttccttgttcttg

SEQ ID NO: 135455 - DNA, 1410 bp, Homo Sapiens
ttttttttgccatacaaaacaggtaaaggtctttattggtcagccactactgcccgggcaagcagtggtgtgagaggtacagaacggtgcaggttggggaacactctacagaatctaaacctaccgtgacatcagctgagaacgtcttgttccttacagagggagcgatccatctctcacagactgtaatgtaccattaccacttaacacagcatatagatatatgcatatacggatagattatatttatttattacaaataaactgtagtttcacatctctcaaaaatggacccagttttcacatggatgttcaggttctgaatgtacaagaaaaggtcaatgtgcttatttaattcgtccatgcaaagcttatacgtgtatcactaagtactttaaaaaatagaatggtctccttttgagcaaatctgtttagactcaggattagtaaaacagtatgaaataatgagatacactgatagaaattaggaagtgacatactgatgattctgggtatgtaaagggtgaggggtacaatcttcccttaagacctgccaggaaaggagagacttggaaccaggagtggcagggccacccaagctggaggaggtgggtctgctcagtcctatgcagcgcaggctcagagcaccaccgaagacctttctgccaaagatctcatcctacccatgagaaccatcatactccagagactaaaaaacgccagtcccagctggagacggggaaggaggtccattcctatgggcattgtcccaacatgtttgatgggggcggcaggtgatgggggcaaggtagatccacctggctgggcagaccttgtcttgtaatgacaaaccatgtgaaagaaaacttccaaaaagaaaccagatgttcagttaaatattggcaccctttgcctatgtggaaactcctcatctcaatggtctcatgcggatgctggcccccttcactcaaacatctcgtagtgacgtgtctgcctcaccctcggcaccatgtcgatgaggagtttgaccccataggcaaatatggtgaggccgatcagaacgcctatgctgccgtccaggtaccagaccgccgagtcatgcttgaacacttccgcgctcagaagaatggagaagcccatcacgccacccacgagggagttaaacccatctgttatgagtgctctactggtcagaaccttccccagcatgaacttcaacacggccaggatgctgcaaagaatcccacttaaaatggagacactgaacaggaaatcgtccacttctgggagcagcctagttgagaggtcatggatggctttgaccactatacatatggatgacagaaggaatatcacccccaagatgacacaggctatgtactccctatgggcagagtgcacagcggccgc

SEQ ID NO: 135456 - DNA, 1268 bp, Homo Sapiens
  misc_feature (91)..(153): n is a, c, g, or t
  misc_feature (507)..(666): n is a, c, g, or t
  misc_feature (867)..(894): n is a, c, g, or t
  misc_feature (1098)..(1161): n is a, c, g, or t
tctttctttcttccgtttgcctgcgttcgtgctgtgctgtctcgtcgcgtcttctcccctggccttcctctgctgcctgctgtgtccttcnnnnnnnnnnnnnnnnnnnnnnnnnnnnnnnnnnnnnnnnnnnnnnnnnnnnnnnnnnnnnnngtgtctggttcttcgttctctcctcccgtgctcctttcgcttcccatcttgtctcgccctccctgccttcgtgtctcctctcctctcgcttctcccgtcctcgttcgcttttctcgtcgtgtggttcgtcgggctcttgttcgtctcgtcggttctcgggtgtcgtttctttgtcgttcgcgcttttgctggcttgttggtttcttgcttttttgctcgctcttgttgtttttccctgcggtgtttccccgtgggtgtgttgtgcgatcttgttgcttttttgtgtgcgttacttcctcgtgtgtgccgcgctgtggtcgtttttttggtgctggctctgtagttgggcttggnnnnnnnnnnnnnnnnnnnnnnnnnnnnnnnnnnnnnnnnnnnnnnnnnnnnnnnnnnnnnnnnnnnnnnnnnnnnnnnnnnnnnnnnnnnnnnnnnnnnnnnnnnnnnnnnnnnnnnnnnnnnnnnnnnnnnnnnnnnnnnnnnnnnnnnnnnnnnnnncttcgacttgattctttctgtcgttgccgtgttttgtcctgtgtgttcgggtgtgtgtttttgctctgttcccttcgctcctctggctatattatttgtgggtgctcctccttgtgtgggctccccttgttgcaccgtgtggtcctggcgtttgcctgctcttctttgggtcctctctgggttttttttgtggcccccccnnnnnnnnnnnnnnnnnnnnnnnnnnnngcacatgagaagtgtcagtttaatgaagccagcttatcagcagggcgggggagcacacctgccccctcgcaggtgtgcctggctcgggctaaagtgcctgtgcagaatcgaggtctgccatggcggggttaggagtcggcgccctacgtcctcctcctcgggcaaggatctccaggctgctgtcgggctgcggggctgtgtccnnnnnnnnnnnnnnnnnnnnnnnnnnnnnnnnnnnnnnnnnnnnnnnnnnnnnnnnnnnnnnnnaggggctgtggggctctgcgggcggggccagccccaggatctcctgcacgttgtggggcagctcggggcaggcggttagctggcggtgcagggcctcggcgcgggtc

SEQ ID NO: 135457 - DNA, 1029 bp, Homo Sapiens
ttttttttgaccaggaaactgggtttttaatgaagaaggtgtgatgcctgtggacactgtacacacatagaaggagtgtggcacagggctggaggaaaggtgttctcaccccctcctcctcctccacttgttacaccacggggtggctgagaagccccaggtgcctcatgggtggatagaagcccaccctgccagggtgaggtcttcagacactcgcgtttttcctgcctcttgggtatctgtttaatcccagttccagaggagggcatgcaggctggagggaagaagtgggggagaggtgggaagggatgctccagacacaggcagagaggtgagtgagctgggttggagaagaagcatgaagcaggagctcagagcgcagcacagcaagctggcctctattgtgaggtcggagacttggcggcatcaaacatcttcttccggccttccatgccagacatggcctccacgttcttcctccagtcacccacctccacaggccgctccttctctgtgtcttccttcttcacagacttgaggttggcccgcagatccatggacaccttgtgcttggagcccagcagggcccggagcatggcgtcagccgagacacggactcgacgcaggggcgggcgcttgaacttcccacggaggtccatcaccttcagcttcaggtccttaatctccctggtgttgtggaggcatttggcctcaatgtcgtatcgctcctcatccaccacctccaccttggcgtgcagctcccggcacaggtcctgcagggcactgagggacaggccacgggtctgcagcgtggggatgcgctctgccaggtagcgcaccttctcagcctcgcgctcctcgtgctcctgctcccagcattccttggccttggccagcatcaggctcttcagcaagagtttgcgggaggcagtgatcttgggttttctctcgacttccggcatggtggcagtgagacagcaccttgttcagtcctcgtggagctgggctggcctgtgcctcgccgtagac

SEQ ID NO: 135458 - DNA, 420 bp, Homo Sapiens
agtggcagtactgcagggctgacagaatctgcctgaacatggtccgggcctcctcttcctcctcgatgtggccatagtggtatatctggtggtgcaactctcctcctctggtttactccctcaccacctggaagagctgaatgatatttgggtgatggaaagtcttcaagatggcaacctgggtcccagttggcctatgctgagccagttccctatcagatggtgtctatgaactgatagttttgtatctccttgtcaagtgaggtggagggtgatccctgctccatggtgcctcccaactatactgactacaaatcctgcctctaaaagctatgctgtgatgcacagcactaactgtgctagctaggctaaggccacttgcggtgacaataccccaggctccaaaccctctgggtctga

SEQ ID NO: 135459 - DNA, 288 bp, Homo Sapiens
gcttgctgggccactgtcacagtgcctgacttgtgcactgtgatgatagggcgggtagacgtgttggtggcggaggaaaccgatgttccccacctgggcggctgcagtcttcagcatgcgagtggcagggttgctcaccatgactggcgaggaggccaccttcacagtggctgggagggtggtagtgccaggtgtcacagccatggtcttcacgatggtggtacccgctgggacactcagcaccgtgggtgccgaggaaggggggatcttctgggtggcagcggccgc

SEQ ID NO: 135460 - DNA, 641 bp, Homo Sapiens
ttttttgttttatgttctttacttgccaatgcagaaaaacagacaaatacatcttaatggtatttccaacaattaacaaaagaaaggagttcgtgcttaactcagagttaactagaaaaatcccttttattaaaatacattgtaaatattgctcattaatttcctgtacttgaaacattttttctgaacccctaagcaccacttaggatagatgaagcaaacctgatgtgttttattcttctctattacctgagtatgaatgtgacatttaactccttgaacttcttgctcctctgaagacatgaggtgctatcactggatttctctaagtaagaatagcagaagtcgttttaaaaaaatactgcagatagtttttctttccaaattttatgaaaataggtataggaaagaaaatctgaatgtccttggtgtcagtatccatctgctccatgcatccaggcagggcttctttccattcccaaagagggggacagtctgcctaacagggccattgctaccaactgtggagccagctcttagactgaggtaaggtctgaacattgggtgtttcgttgttgaaaatatcagccctatcataaaaacaaaaatgcagatgaggacacagccatcaatacttttat

SEQ ID NO: 135461 - DNA, 241 bp, Homo Sapiens
ctataaaaagtcaaatgatattttttcaacttttataaagtttgggtggggaggtgaaagtggggagaaggggagtgtaaagccgtaggggtagagggggtggccggccagggagggcggtgtggcgccagcagccgcggcggccgttagcgaggagtgcacaccgtgcagcgggtgcgtggggtacaccagcgggtatccggacttcagcgccgcagccgcagcagccggatcatgtgcg

SEQ ID NO: 135462 - DNA, 502 bp, Homo Sapiens
  misc_feature (197)..(199): n is a, c, g, or t
  misc_feature (203)..(203): n is a, c, g, or t
  misc_feature (207)..(208): n is a, c, g, or t
  misc_feature (210)..(212): n is a, c, g, or t
tctataaaaagtcaaatgatattttttcaacttttataaagtttgggtggggaggtgaaagtggggagaaggggagtgtcccaccgggtctcggtcgctgctgtcgggtagatagatacggtatacatttctttcctttcgtggcccgagtcctccccacgcgcgggtgtcagcagcctgggccgtgatcccgcttnnnttgnattnntnnntccctccctctccctcctctccctcgctcgccctcccggccgccctcactgataccccagcgccgaggcggtggtcagtctctgtccgtagagggcgtagggggagtagtacggtccggtggcggcgggcaccggcacgggggcgccaggcgtgggaagcgggctcttggagtaggggtggtagcggctgctgagtcccagcgcgtggtgggggctgcgcagcgccagcgtcccagggctgcccggtgcgcccgaggtggggatgtgcatgtgcaagccatggcggccgc

SEQ ID NO: 135463 - DNA, 378 bp, Homo Sapiens
  misc_feature (72)..(138): n is a, c, g, or t
atacatttctttcctttcgtggcccgagtcctccccacgcgcgggtgtcagcagcctgggccgtgatcccgnnnnnnnnnnnnnnnnnnnnnnnnnnnnnnnnnnnnnnnnnnnnnnnnnnnnnnnnnnnnnnnnnnnctgataccccagcgccgaggcggtggtcagtctctgtccgtagagggcgtagggggagtagtacggtccggtggcggcgggcaccggcacgggggcgccaggcgtgggaagcgggctcttggagtaggggtggtagcggctgctgagtcccagcgcgtggtgggggtgcgcagcgccagcgtcccagggctgcccggtgcgcccgaggtggggatgtgcatgtgcaagcatggcggtcgc

SEQ ID NO: 135464 - DNA, 478 bp, Homo Sapiens
tttttttaatataaaaagatcaatgaaaaatttatttataaatttttcacgctgggctacaggtcaatatcgtacactcaggaatgtgctgcacaaactttatccagttagcagtgatcaccccgtgacccacacacagcttcgatataagcctagaaagtcttaacattaattaacataattaaaaaggtatttgcatctagaaaaaatatacagaagaactccttgtggagtaatctgtgcctccatttcaatgtctgcttgtttcactgacattatcaatatattcttctcacacaaagttttataaaaagcgacggagggctgcccgaatacgaccagccacgcacaaagggcctccacccacctgtgtcctcaagtgctccccatttctgcacgaagggtcagcagcacttccatgaaggggaaacctcatttaaatttgaataattcagcctcccttttatttctcaggatc

SEQ ID NO: 135465 - DNA, 991 bp, Homo Sapiens
  misc_feature (871)..(905): n is a, c, g, or t
  misc_feature (909)..(951): n is a, c, g, or t
  misc_feature (961)..(961): n is a, c, g, or t
cccctccactgttgtgcgcggctccttctgcgatgcctgcagcacaggctcactcagcacacctgtatcatcattcgacgtcaccatgttatcaaggccctgctggactggatgcggtcccccggttgtagaagggtttgcacatcacgtctgtgtaggagttgtgtagcttccggaacatgctgcgaatttcgttgtctcgaagggctgtgttggaggaatctaccaccatgacaaacttcaccttggagttggtgacgtagccgtatctgcacagctggttagggaaggcactcgtaacacagggactgccggtggagggccctctgtgggccctcactttggagaaatgtggcaaccttgaatcacaggaaatgcccatgctgggctggtcctgcagtggccgtgctgggtacaagcctaaatactttgctagggcgacgtctggtgtttgcaggagaagcgaagagcaggcagccaagccttacccagttcacactccaggagccgaaccacctagactccgagtctgtctgtctggaacacctcaccctcttcatgaatcaatgcctggcccggaaagttaacttgtagtcctccgtggggtagagcaggcccaggtacagctccctctggtcgaccagggccttccccattgcggagatcttctcatccaccacgtccagagatgtgtgcaccatgtagtggaacttcagctcgttctccgtaggggtgctgcgactgtacgagggggtaattctccttggcaatcaccgcgatgcacaccgccatcttgggaggctcggcgccaggcaccgcccccggccgtaatggccgaattcccgggcatatgtccggtaccgtcgactgnnnnnnnnnnnnnnnnnnnnnnnnnnnnnnnnnnncggnnnnnnnnnnnnnnnnnnnnnnnnnnnnnnnnnnnnnnnnnnnacagacgacntagcgccctatagtgagtcgtatacatttc

SEQ ID NO: 135466 - DNA, 854 bp, Homo Sapiens
gagtccacccccttccagaccagcccagctgttcagccagtggttgacccacatggtcacaggtccttgcaggctcaggaactcttggctccaggcacccctgcctctgcccctttgggacaactgaggacaggctacctgcgccatctgatcccagacctcgtgcccacaccccagaaaaagtccttagttgaattcttcttaattaaatccttggctgacacggaaggaaaaagccaaatctcctgctcacaagacctttagttgagagaacatgcacagctgcctgccctgaaagccccaggcgtcccattcaggaagaggcaaccagaacagaccgacggccccaccacagtcgtgcgcgggctcctctgcgatggctggcagcacagctcactcagcacacctgtatcatcatcgacgtcaccatgttatcaaaggccctggactggatgcggtcccccgggttgtagaaggggttgcacatcacgtctgtgtaggagttgtgtagcttccggaacatgctgcgaatttcgttgtctcgaagggctgtgttggaggaatctaccaccatgacaaacttcaccttggagttggtgacgtagccgtataccttgtagtcctccgtggggtagagcaggcccaggtacagctccctctggtcgaccagggccttccccattgcggagatcttctcatccaccacgtccagagatgtgtgcaccatgtagtggaacttcagctcgttctccgtaggggtgctgcgaatgtagagggggtaattctccttggcaatcaccgcgatgcacaccgccatcttgggaggctcggcgccaggcaccgcgtcacgtccc

SEQ ID NO: 135467 - DNA, 778 bp, Homo Sapiens
  misc_feature (609)..(609): n is a, c, g, or t
  misc_feature (659)..(659): n is a, c, g, or t
ttttttgcaatgcaaaaatgtatactttaattttaaaacccaatttttgttctcaacttgaaaagggaacacttttttgtttcacaaacaagctggtcggttggaattctttttggaacagtagtcccgcgctaaacactggttcttgcctccccacccccattctctaaaataaacccagcaaactgggaggtgcatttgtgccgctgcaggcttctactgctcactccatgcagcacacttagaccaaggagaaacggctgctttccagctcaaagtcgactcattagaagaaaaggtgggagactgggggtgacacatcgctgatttgtccggggttgttatctgctgctggcctttgcctcaaaggccaggggcagaggccttgccaggcactgtgttctggggccctggcctcatgctgtgctcagcgggttggccacgcggcccaggaagtgcagggcagtggcgctttgatcatacacagcaaacaggaatgggcggttcagggtcacctccaagacctcaggcttgttaagctgttgggtagactctgtgggctctctctcatccgcttcaagctcaaaaaaaatctgttcagcacgtccnccaccctgatgcggtcattgctcaatttttgcaggttcagctcggtgtgnagaatggcgggcagctcagcctgggcgagcaggtcctgcaggtcataagatccttgcagcaccagttggggcatggtcaggtggatggtccggggagacagtttcttcatccagttgag

SEQ ID NO: 135468 - DNA, 1153 bp, Homo Sapiens
  misc_feature (263)..(294): n is a, c, g, or t
ttgttcattaatcattgtgaaaaatacagaaaccaaaaccaatatggctggtttctttcccacacccctccaccctgttcaggatagtcatttgttctcacaaccggcagaggcagaagagggttggaatgaagactccgaaggccaccaggatgggaaacatgaggctgctgttgtccgaggcataggggttgggtgtgcgggggcctgactgcacccggttcttattggtctgttttttgagattagacccttcatcatannnnnnnnnnnnnnnnnnnnnnnnnnnnnnnnccaatcccggatgaggctgaagctttggtacatcatccactgtcccagccatgatgtagagtgcacagaccttgggattgtcatagtaccccttgacaaactcaatgtagagtttccctgtgaaggtggacacctccccctggacactcagcttcccctttctgatgctcataggtataatttcatcgtgagctgtgctatgcccaacacgatcaaagatatccaagtccttcaccacgacgtggccattcaatcgtacatcaaataccttttgctgggactgtgcaaagtagacctctgcaaatttcaagaccagcacgtagtccccctcctctttgatgggcacttcgtagccaaaggtctcctcattgtaccgctcagtttgatacaggatctggtcctcagggttggaacgcaggattggcagtttcatgccatagtctgaggctcggcccacccggccttccaaagggtccttgcggaagtggatcccgtgcacgtccacatgcgcctctccacccgcgttgaccgcccaaatgacgctctcgggcagcccggcccccgccgcgccggccacgccggccacgccgagcccgggtccccggatcgccggcgacagcagcagcagcagcagtcgcaggagcgccacagcggttccctcaaccgcccaggctcccagcatggcggccaccaccacgggggcagcccccgccgaccctcgtcctcggccggctgccaggccaccccggactcagaaaaacagcgccacgggccgctccgcctgagccgccgggacatgtcgctctcaggcctccttcttcctcgtgccgaattcacaccaaggcctcgtactagactt

SEQ ID NO: 135469 - DNA, 716 bp, Homo Sapiens
  misc_feature (621)..(621): n is a, c, g, or t
ttcaacgcactctctttaatgggaaggggatcgtcatttcttacagcaataggtaaaaacataaatacgggtgggtgcgtgggcgggcgacggcgagatagcaaaggcccgggcgcccggccctggctcgcggaatgggcggccagatctcaggccctgcgtgcccgagctcagtcccagttccaaccgggggtgcccatggactctcggagggcactcctggggggacagctaagacaccaggctgcaggatcactcattgcacgctgcataatcgccgccacaaactctcccgtgcgcaagaacaaacgcgcgtgggacagaaaaagttcctaggtctccgcaggagtgaatgcaaaatccaggggactcagggtcatgttgggagccccttctccccccgagagtcagggagctgttgaggtgggatcggtcagggtcgcgccacgcgggtcccttccctaccaggctcggataccatgcagcgtggacactcccgagttgctctgcggaatcccggggctctgaaccgcattcaagtccccgacgccgaagttcacgaagttgttgttggcggcggcagtgggcggctgcgctggggaaggccccgcggggtaggcngcagtgcagctgtatccagggctgctggccgcgccgacgtaacccggatagggcgggtaggcgttataaccgttgggattgaggcctacgccgta

SEQ ID NO: 135470 - DNA, 338 bp, Homo Sapiens
ttgctttctctttgcccaaatctgaagccaaaacaagaaagtgtgcatccaggactgcttctcttgctcgggacacttcattaaacagagtgttagcctcttcaaggacctctgttaatttgtcaccggcattcagtatgttctcacggttttgttggacggagttgatgagcgcccggtactgatggcggatgctggcggtacatgccttgtcgcgcctccgcctccaagctggccgggtccatcatctcgtccccggaatccgacggctctgtgtcctccaggctcgggcgctctgggagcacttcgcttccgcagagccgcggcgggacctgggc

SEQ ID NO: 135471 - DNA, 844 bp, Homo Sapiens
  misc_feature (196)..(196): n is a, c, g, or t
ttccaatcagtaccagtacatataatcatatccccaatctgctaacacggaaggcctgcctgtactgacgtacacagtacattatctgcacgaacaactcgcgccaccggacaagggactcacagtaaatgaacccaccagatatccattgtatgggtatataaaagaggttcctgctggtctgcctgtattctcncaggagtcatagactatgaattcaaaatcaggactatcttcatcacggatgagttcttcagcttctagcggatttacacccatatgtgtgagtagagtttcaacatatcttaacatgtcaaaggagctcaggtctgagcgcagctgctttgctttctctttgcccaaatctgaagccaaaacaagaaagtgggcatccaggactgcttctcttgctcgggacacttcattaaacagagtgttagcctcttcaaggacctctgttaatttgtcaccggcattcagtatgtcctcacggttttgttggacggagttgatgagcgcccggtactgatggcggatctggcggcacaggccttggtcggcctccgcctccaagctggccgggtccatcatctcgtccccggaatccgacggctctgtgtcctccaggctcgggcgctctggggcctctctgcgctcccgcgcagagccgcggcgggacctgggcgacaaaggggaccgcgagcgggagcgggagcgggtgcgatcccgatgcgggtcgcggccccggccccggccctctggcccgcggccgctgctgtccccagacatagcgccaattcaccgtgcaacttcggaacggcggaagttcgcgccagaaactccc

SEQ ID NO: 135472 - DNA, 732 bp, Homo Sapiens
  misc_feature (585)..(585): n is a, c, g, or t
tttttttcggcttcaaggaaaattgctttattctgcttcctcccaaggagctgttacacaggctccagcatggggctttgctggcacctccagggctgagcagatcaagatgtggcaaagctactcctcattcaagcccttcgtgccaatgtcacggctcttggcccgcagcttgttgacctgggactcggcgatgtccgcccgctcctctgcctcatccagctcgtgctgcaccttgcggaacttggacaggttggtgttggcttgctcctccgcctcctcggcctggcgcttgtaggccttgacctttagctgcagcttgtctaccaggtcctgcagccgcagcaggtttttcctgtcctcctccgtctggtaggtgagctccttgatgcgccgctcgctcttcctcatgcccttcaccgactctgcgttgcgcttctgctcggcctccagctcattctccagctcccgcacccgcgcttccagcttctgcagctgcttcttgccgcccttgagggcgatctgctcggcttcgtccagccggtgctgcaggtccttaatggtctgttccatgttcttcttcangcgctccaggtgggcgctggtgtcctgctccaccacggcacgcaactcctcccatcttcttcttcaccctcagggcctcgttgcggctgcgtgtctctgcgtccagggaggtctgcagcgagtccaccacccgcaggtggttgcgct

SEQ ID NO: 135473 - DNA, 358 bp, Homo Sapiens
  misc_feature (35)..(35): n is a, c, g, or t
tggagcagacagagcggtcccggaagctggcgganaggagctgattgagactagtgagcgggtgcagctgctgcattcccagaacaccagcctcatcaaccagaagaagaagatggattctgatctgtcccagctccagtctgaattggaggaggcagttcaggagttcaggaatgctgaggagaaggccaagaaggccatcacggattccgccattattgcagaggagcttaagaaggagcaggacaccatcgcccacctggagcgcttgaagaagaacatggagcagaccattaaggacctgcagcaccggcttgacgaagccgagcaagattccctcaagggcggcaagaagcag

SEQ ID NO: 135474 - DNA, 478 bp, Homo Sapiens
ggcttcaaggaaaattgctttattctgcttcctcccaaggagctgttacacaggctccagcatggggctttgctggcacctccagggctgagcagatcaagatgtgtcaaagctactcctcattcaagcccttcgtgccaatgtcacggctcttggcccgcagcttgttgacctgggactcggcgatgtccgcccgctcctctgtatgctgtagaatttgtaagccacacggggggctctaaaagccccagacctgaaagcaccatgccaggtttcctaaaacctctggcaccaccgcagagtaatggcagattcctggcctctgggaagcggtccaggcccaggggactccagggcgctgattatgcatattctggagccagagaaaggcacggctttgtggattctggagtgcaggaacttggaaactggagctgggagggggttgagtgtttggcggactgggtgggggcactgc

SEQ ID NO: 135475 - DNA, 1149 bp, Homo Sapiens
aaaattttaaatccgtttactacacttgagttgatcttaaaaataatatcaatctttgggaaaacagaggtagaagtacatctggattaatagaatttacagttcaatcacggtgaatttaaaaaatacatttttctttcaataattattttatgttctaaatgaggtaaaatttataaaatctgcattaaagtaaggtagagggcactctggtgataacaacgatgaggtttatttttgtcaaaacatccaagggaaacattaattgttgtttgtcaactgtgaacttcacactacattgtctaaggatagaaaattgatgggtatcactctgtcagaaaatcctcaccaagaagccaattcaaggaatatgaaattgacaagcctttcaaacaaagatgtgttcggacttcactgatgcgatggtaggtcttttgggttacaatagatagggatgatataaaacacaatcttttcctgtctattccattttagaaaccggtgggtgtgctcacgtttgtctgggcattgcagcactgcacacatacatgaattaagcaaagcatcggaaagtattgacacatgagactaaaataaataagagaaacgagctgctctttatacctagaaatagctggaaattactgaaaaaaattaaagtgcagaggttttcattttagcaccatgaattgtgatgaaatcccatttctctcactatggcaggactgtatgcagtaaggaagctagagtgatgtgtttgaggcaatgtagatttttgcttcaaaaacagaagtcatgttatcattttagaacaatgggacatagtgaataaagtctgtaaaacatttcttctttgcttttcttaggcggattttcctgcattgggggtagtagttgcggaagtactttttggtagaggaaatccaagtcctaatccctttggcctctgcatggcttgaattggctcagagatccccttgccatctcgtccaaggcctgacccaggcgtccagcccatattctgaagcattcggtttccaatattattttctaggattggctgggcattttcacctacaaatcctgcagtagtaggtccaggcaaaggtgcagcttttcttctccgtttgatatctcccgtgcataagg

SEQ ID NO: 135476 - DNA, 464 bp, Homo Sapiens
  misc_feature (156)..(166): n is a, c, g, or t
tttatttttaaatttatttttacttttatagaccttagggatacatgcgcagttttgccacagggatatatcacataatgttgaaagtctgcacccaacttctgaataacgttcatatttgtctcattcccctcctatccttctactgaggaggcnnnnnnnnnnncctatcctgaaaaatgtcaccgtaggtctatttgattagggaaaacaatgttttgtttgaccccgacgtgatttgaacacgcaaccttctgatctggagtcagacgcgctaccgttgcgccacgaggcctgtccaacagcgtgacttgatgggtctgttgagcagcaataacgggcggacttttgtcatgaagccccacctttaagatttgtcagcgcatttctctgaggcaccagctgacgagatgtgggcgcatgtacgtaggaattaaattcatcctctggataaataatagaga

SEQ ID NO: 135477 - DNA, 539 bp, Homo Sapiens
  misc_feature (316)..(356): n is a, c, g, or t
atgccttcaaatcagtttttcaacaagtggtggtggggaaatagtttctgggcttgcacccgatttttcctgtggtgccaggaagtcatgcctttactgtaaaacacgaaaaacaaatggaaggaaaaaatgggggacggaaggagggtgactgaaaagatgaacaagaacgtcaacaactgccaccacgcaggtgtttctaaaatcactttataggtaactacaaacccgatcccaacgtttaccctaacacttcccctcccaggtcctcctcggtggtccgcccgcttggcacctcctccagctccccaggccnnnnnnnnnnnnnnnnnnnnnnnnnnnnnnnnnnnnnnnnncgttcccggcgtctgggctctctcctccggcgccaagcccagcacgccggcgcccagccgtcccgaccccgctagctgggcaaggccgagtcccaggtgccagctgtgggcccgggaactcgacagccgacttggcggcagtctcaagggaggcggcggcaggcgcctggcggaggcggccgc

SEQ ID NO: 135478 - DNA, 877 bp, Homo Sapiens
ggggcaggcggacggggcgcggcgggggacacggcggccgccgcggggctcgatcgggcaacggcggcgacggcggcagcgacggatcctcctcctcccttattcccttgctcctctttcttccttttcttttcctttccggccgggcctcgtccactttccctaacggcggcctcgatcctacgtaaaggcatgacttcctggcaccacagggaaaatcgggtgcaagcccagaaactatttccccaccaccacttgttgaaaaactgatttgaaggcatctccggggttgaacaaacggaaagtgccaggatttgatgcgtctctggtttcgctctggagaccattccctgctaagtatcaagacgaaaaaaactggaaactaatccgaaccatatttatttagagtcagaatggagcgatttgtagtaacagcaccacctgctcgaaaccgttctaagactgctttgtatgtgactcccctggatcgagtcactgagtttggaggtgagctgcatgaagatggaggaaaactcttctgcacttcttgcaatgtggttctgaatcatgttcgcaagtctgccattagtgaccaccttcagtcaaagactcataccaagaagaaggcagaatttgaagagcagaatgtgagaaagaagcagaaggcccctaactgcatctcttcagtggcacagtactgcgccaaccagagaaagtcagtggtatccaggacttttgggaaaatgtggccgggaagccaacatcccaccttgaggaaggctggatccccccacaaggtccgtggctttcctatctccgccatgtggaagaatgggagggcctcacttactctaaggtcagaaccaaacttccgggg

SEQ ID NO: 135479 - DNA, 843 bp, Homo Sapiens
ttcctctcttcatcttgttctccttctagcataactctgagggctctctcttcagcttcatacagttcagagcgctttttaatgagttttctcagtcgctgaagatgatgcgtaaaagtctcatctgctgaggctggaggacagacccctttcctcgctgcagcctctttcctcagtttcctcaatttctccaaagcccgtagaatgtccaccattcttttggtatctgcttgttttttcctcacttcagatagtacgccatcagcggctgctttgagttcctgctcccgcttcttctcctccacctcctgcacacacttcaccctccagcggtcaatctcctgctcgcgttccactgcccgcgcggcctctgcctcccgctcggcctcgcgttcccgggccctctcgcgaagccgcagccggcggcgccggaccctctccagcctcctccgcgcctcgcccacataggcagcctgggtcaacggctgtagccgctcggccagttccgcgcgcagcggcgcggtctgggagtacagcaggacccaggccgcgccgtcggcttcggcctcgcgcagggcctggctcaggccgcgcagccgccgcaccaggcgcagagcccggagcaatcgcgcgcgcacttcgccaaggctgggcccggcatgcgtgcgctggggcaccggacagcctgcccgccgcggggtcccgaacaccgcctccagccactgccggtcgcgcaggcgttggagggccgcatccccgagcacgtcggccggcggcggcggcgcctcaggccaccgcgggctccagggcggccccgggccgggaggcggtggccgcggccgc

SEQ ID NO: 135480 - DNA, 895 bp, Homo Sapiens
tagtgataaaataaattgttttaatggaaggctttctgagactgcaactttttcttctgctatcaaacagccagtttccctgccctggggtttcttagggagtgcacggctgagctcctggcccacaggaagctggcatgttactctgacacactacattcagcccctccagggatccagaggtgtgtcttaatgtcaggagactggagttagctggtagtcagtccaaggtatgctgtccccataagtgtccaggcccgcgggagaggacaaggggcttcacttcccacttaggatgtttctccatgaggggagaggggacagatcacttttgaaatgactctgacctttacaaagaaaactaatagacactttagtattatatacagggcagaggggagaggacacagaggggaaattgcacttaattacagtagtttatagtttacagccattggacaaatttacttcttttaaagaaatctcaagatcatttgggatgggggcaggggagggagtctgtggatatttacagtgtgtttggctcagttcaatagcacatgtccttctctcctcatttcagtaacagattcaagttttcgcatcagtttgttcgatgaaggatcacaacatagacagtacggctttcttgcttcctcttcggaggttccttgtctcccacctccaggacagacaggagtccttgacatcgtgggagaggcattgtggcaatactgcatagaagggaaactgggcttcgggctgcgcctcctgagagtggattgtctgaggtgccagcaggacgtccgtcaggtaagcagggacctctcgcaggtgctggtcaggtcactgggcttttccatgacagctgcccagagggtgatggtgtgaaaac

SEQ ID NO: 135481 - DNA, 519 bp, Homo Sapiens
ttttttcacttaaagaacatctttatttgaactttaatatacaatattacctttaatttataaaaatcacatactggaggacatgactggaaaccagtttaggagcagccagtgggtaccaatttaggagattatacttaccccacttattagtttaagaaaaaattctatcaatgaatttgagaccagtgatattgaaggatggcatttcaacttccaaatccagtaattaaaattgaagatactttaattcagcaaaaacttctaaattttctttaaaaatattttttcccaatgaagaactgagcttatctttattatgttttctggtatacatcttacagaattttgtagaaataaaacagccacaagacatttgcaattatttaaaatcctctgcatattaatatgtatgtgtataggtgtgtgtgtttgatccccacacttacattcacaccgagctgaagcaacctgacagcatgttggacctggaaaggcagttcatttataatgtggaag

SEQ ID NO: 135482 - DNA, 1033 bp, Homo Sapiens
ctttatcctcctttaatttcagttataattccctttataaacattcttttcctaaggcacaccatgccctatttattgccacaaagccactaaaatctgtgcctcaatctgtctgcttcatcagtatggttaaatacaaaccacttactagtgtctgctaaaacttagtatcatcaagtctagaatgccattggtctgttctactggggcaaaggccaaaatacacaagcatgtgctcatatgctcttttccctacaaactaaccatattacctactataacagtaaagcttaatgacatctctggctacatataattcatacccaatattataaaataaaatgttaggccagtaagctttcacaatttttattaaatcctagtctagttgaacaatatctgatgttacagacatcatcccatggtgaacatgtttaataagtgaaagcaagtcagacatctcatctaagtcattattttctgcagactaagcaataactacacagaacactatgggtaaacaaacacctgctcagttttcacacaagccatgttgtttatcaaattagatctgctaatattgaatacagtagattcggtgattgtagttctcatataagtatcttattgagataacattttgacagtttcactgactttccaaataagcataccataatcaaagaaaagaataaagagtgaagtaaaaactgaacatgaagagattaagttattaaaggaaaatgaagtaaataaaaagagtgaaaaaccattgggggtggaagtcaaacaagcctagacatttgattggaagagaaaagatcaaatatgaagttcacaaaccaaaagtttataaactcaatgcaatacaaatcctttttattgtaaaagctgagttgaaactaaaagatctataaaaactgttacttttggccttaaacagtaccaactcttatgatcaaaaaaggccacaacagttaagattgtattacttgattttattttacactaggtggtgggcagacacctcgtg

SEQ ID NO: 135483 - DNA, 1743 bp, Homo Sapiens
tctaaggtagcgaggcctgggtggcgaattcggcacgaggcgcagtcccgggccccgggcggaagtgagacgcgctcggcgcgggggccgcggcggccgcaccatgagcgacatccgccactcgctgctgcgccgcgatgcgctgagcgccgccaaggaggtgttgtaccacctggacatctacttcagcagccagctgcagagcgcgccgctgcccatcgtggacaagggccccgtggagctgctggaggagttcgtgttccaggtgcccaaggagcgcagcgcgcagcccaagagactgaattcccttcaggagcttcaacttcttgaaatcatgtgcaattatttccaggagcaaaccaaggactctgttcggcagattattttttcatcccttttcagccctcaagggaacaaagccgatgacagccggatgagcttgttgggaaaactggtctccatggcggtggctgtgtgtcgaatcccggtgttggagtgtgctgcctcctggcttcagcggacgcccgtggtttactgtgtgaggttagccaaggcccttgtagatgactactgctgtttggtgccgggatccattcagacgctgaagcagatattcagtgccagcccgagattctgctgccagttcatcacctccgttaccgcgctctatgacctgtcatcagatgacctcattccacctatggacttgcttgaaatgattgtcacctggatttttgaggacccaagggttgattctcatcacttttttaaatactccgattgcggccaatctgccaataaggattcttagagctcaccccgctcgttggattgatccgctggtgcgtgaaggcacccctggcttataaaaggaaaaagaagccccccttatccaatggccatgtcagcaacaaggtcacaaaggacccgggcgtggggatggacagagactcccacctcttgtactcaaaactccacctcagcgtcctgcaagtgctcatgacgctgcagctgcacctgaccgagaagaatctgtatgggcgcctggggctgatcctcttcgaccacatggtcccgctggtagaggagatcaacaggttggcggatgaactgaaccccctcaacgcctccccaggagattgagctctcgctggaccggctggcgcaggctctgctggtgggcatggcctcaggagctctgctgtgcacgagagatgacctgagaaccttgtgcttccaggctgcccccataataacctcctcccgctggtgatctcgggtcccgtggaggaggtcggcatcagccgcggttccccccgggtttttacccccacatccaaccaccccccgttgggttaaggggcttgtcccgaagccaccccgtccgcacccccgaccatgccaacctaatccgtgccctcaccgtcagtccggggcgcggaacttgccccgcccagtgccactcctctataatgctgtccccggtgtgggaacccccacgctcttcgcgtggtaagaatttttttgtataagtgaaaggcgagcccgcgaccccccactattatacaccccctgcggaatggggcccgggcaattctctttctcgtccgcgtgcgaacagatcatcagcagaccgtgaaactcgctgtggatcttcccccctcgtctagagtgctttgctacccgccaactgtagacgttcgtacggatcaagttcgcgtgtacgctccaaactccctgtcg

SEQ ID NO: 135484 - DNA, 395 bp, Homo Sapiens
cagggtatgaactcaaacctggactgctgtttaagagagatttataatgtatgtgtgaaaagacacaggaaatgaagctgtgcttccagtctgttcccctctcaccggcccattagtgtcccgttagctgtttccctggtaagggctgggtgcatctgggcagggctagcttttggctttgggcaacaatgtcaggtgcattgagtcccatagacaaaagcagctggcactgaagcccagcctgttgcaatctggggaattatgcaggctgggggttgcccatcagtgtcttctgagtgcccggtgtgccctgtcaaggtgtctggtcggagagcagggtggagaaatactttctctgtggcccggtgcagtggctcacgcttgtaatcccagca

SEQ ID NO: 135485 - DNA, 963 bp, Homo Sapiens
  misc_feature (723)..(723): n is a, c, g, or t
  misc_feature (727)..(727): n is a, c, g, or t
  misc_feature (733)..(734): n is a, c, g, or t
  misc_feature (736)..(736): n is a, c, g, or t
  misc_feature (746)..(746): n is a, c, g, or t
ggtagtctttttaatccccggcagttccatctcacaatattaagttcatttgaagatacaatagtaatctttggataagcatgaaaataaaacattagaatcccaaatatactcccctaggggcaatcacataagcatattagagataaatgaaattttttacaaatagcaaacctttatttaccaatttgtggttttttccccccggtcttaaatcttgggtattttgtattttcacatttttcactttccttctgtccctagatcctcctaatttcctattactcaagtaatttgttctgtttaatcaaagaaatcaacctgatatttcattacattttgctaaaaactcagaaataaacctatttatgaagcgcactatgtcatatactgtaaaaacttcattttagccgtgttatattgctggcaattactgaactacgaaaggctttttttgctcccctctctctctctcaacttaataaagcttgtcaaagtttccaggaaacaaactgtgacttccgcttttattgcattctgatgggatgagtgattacagaagctcagcatcacagatcgctctccccgtagagtgcggaagagaacgcagcgtaatccagtgcaccaggcacactgcctgggcccgagtaggcgggaatcctcttgatgcagtactgggcctgatccgggggcagctcccgacgcagctcctccgccagatantatngcttanncnaaacccagantccggaagaggcgatgacctgctcggcagtgtcggtgtcagccgtctctctagtcatgaagtcgatgaaggattgggaaggtgacggtgccttgcccgttgggatctaccagggtcataatgcgggcaaattcggcttcacccaggtcataacccatggaaatcaggcaggctctgaaatcctcatgatccatcaggccattcttcctcctgtcaaa

SEQ ID NO: 135486 - DNA, 571 bp, Homo Sapiens
ttttttttaaaattgaaaaagtttatttatctttgaatatatcacaagtatactcaactggcaatattttttttaattaggtaaaatgtacaaggtgtatcttcccacaaattaatgaaactgattttgaacaaacaaaattgacacacagatacattttctaagtgatgcacttttccaatgatgtcagcattactcaaaacattttttagaatataaacatataattgattttataattgctgtcagaaacaaaggcacattcttttactgtcccagaacattcaagatgctttcaatttattacaagtaccaaaagcagccacaactcaaatggctcaagcagttaaaggaattattctttcccataaaagcggtcctgaggtagggctacagtggctgaacttctgctatgataagtattcaggggtttcccaggacacagcatcaatgctaaaactggcaaaatcccaatggactgatcccttcaatggatgacaggaccctctatggctgaaagactctaaagttcttagttcttagctgtgacaggacagagaaccgacatgtc

SEQ ID NO: 135487 - DNA, 1353 bp, Homo Sapiens
  misc_feature (235)..(249): n is a, c, g, or t
gaagggtgttcgatttacaaaaatttcatgtttatatttattaaaaacaaaataatgcaagttctgttaaagtaacaatatatacaccaagataaatatttggaattgtggaaacagaaatagtaaaaatttcaaattttttctcaatatcttaatgacttaaataatttagcttttttcaggcattttttgttaaaaataaacttacttaattttcaacttaggtcaatgtgcnnnnnnnnnnnnnnnaaagacaaaaattagtaaaaatggcaggtactaggtttgcactagctaaaaaaataatgtttacagttgtctacgatgtaacaattttaaaaacatacaaattcagtatgtagtatgaaaatacattaaaaaaacacataaggaactatgccccataaaaaatataaatgcaacttctattaattatatgaatatcaaaaattaaatattctgatttaaaagtagcttctataaaagtcggagtagtaggcattatttgctttcctaaatgtataaataagaagtatttctagctcaactaaacagaaatatcagtatttcttagcaaaaaatgtagtacatacatgaaaaggcaagcattgtcctgtattcaagtttttgagtttaaattccattaaaatgtttcctacaacttgaaagaactacacacacaaaagtaaaaagatgaggtaaacatcttatactctgaagaaagtacttaatactcagatattcccaattaatctgtatcttaatactcagacattctaaaacaatgctttaaaaggtcttccataatgaggatgattgtgataaatatctgaactacataatgaacagcaggtttctcagtcttctgagtagacagtgatgctccttcttgttattacaaaacaatcatgattaagttttgccaacaatatcgctccagtgtgggtttacatgaggcaccatgctacagtaagagcagctacgatgccattcaaaatcgccatgctatagcccatgtggaaagaatgtccagtcagtttcttgaacctggcaggtgaaagaggagtaggaggaaacattcctggttcaaaagaatcaaagtaagtcactgtccaagaaaagctgcaacaggagaatccagcagttagggatattataagtagagtccagaatcctaatagtccagtgtctacatcatcttcatttttcaaattctcagcatgcaactctttaacgatcaagtaggcgatggcgaggaggaaggcgagaagaatggcgaagagcagcgagcagagaatagagaggacctggaccggccaccgccgaggctgggctctgctgcccgcggccgca

SEQ ID NO: 135488 - DNA, 439 bp, Homo Sapiens
ggccattgaacatggcctattttaattatatgcacttttcactgtctccttttaatggtgggtgtttcgcattttgtttaatcttgacaatatttcatccccagtgttcaaggacttgaagatatttcttcaagagtacccatttaatcaaacgatcctttttaaaaatacgtctcctgatcatggatcaggacgctccacttagaaaaggcaaagggcgggagagcaaagtaagatgcaaatgaggactctgggtgaaagcagctgccagcctgagggcttagcgcgagggaaagggagatgggtggagacgagagccacaccctggctcaactttactctggacagactttcaaggcgtcggcttcaatacctttaacgatcaagtcggcgatggcgaggaggaaggcgagaagaatggcgaagagcagcgagcaga

SEQ ID NO: 135489 - DNA, 560 bp, Homo Sapiens
  misc_feature (108)..(108): n is a, c, g, or t
tcttgttattacaaaacaatcatgattaagttttgccaacaatatcgctccagtgtgggtttacatgaggcaccatgctacagtaagagcagctacgatgccattcanaatcgccatgctatagcccatgtggaaagaatgtccagtcagtttcttgaacctggcaggtgaaagaggagtaggaggaaacattcctggttcaaaagaatcaaagtaagtcactgtccaagaaaagctgcaacaggagaatccagcagttagggatattataagtagagtccagaatcctaatagtccagtgtctacatcatcttcatttttcaaattctcagcatgcaactcattttatgaagaggtaaaacccacatcaactggccaaagtgtcttctgtatgaaaatcaagcattgtaaggttttagatgccatgccatctgtagcccactaaacgctttaacgatcaagtaggcgatggcgaggaggaaggcgagaagaatggcgaagagcagcgagcagattatagagaggacctggaccggccaccgccgagggtggggtttggt

SEQ ID NO: 135490 - DNA, 1192 bp, Homo Sapiens
  misc_feature (569)..(569): n is a, c, g, or t
  misc_feature (571)..(572): n is a, c, g, or t
  misc_feature (580)..(580): n is a, c, g, or t
gcggccgccgcgctgtctgcacagctgggggcctctgagcctggtgggcttcctggactcttggcctcactccttgccccctccccacgacacccatgagccgaaaggatgtcactaaggatggctgattccccaagggcacccgctctccctccctccctgctggaggaacacgtcatatcagatgagaggaagatggcctctgatggacagaatttttctcttaactcagcttttgctactttggcaaaaactagcgaggggtagcagaaacctgcaccaaggattgtccctatgtcttggcccctcctagagcgtgtgcagactgatgattttatatgtaaatcaagactcacatccctttcctagtcccccacatccaaagcccctcagcctgccttgcagaccaatgggctccatgttctgtagccccctcccctacgcctcacccctcctccctctcacaggttctgggcggccagtgagagaaacgcagtgggggaggcagggagtctggtgcctgcagagattctctgcttctttcctggggggaggtggggaggtcttancnngagcgggncctgtacccacctgctgacctgctgcttggtacagaaataaaggctgtgtggactggggggaactcgcactgtccccttccaaacaacacttccctgtgtggcccgctttccgccccccggagaaacctctcctgagacccatccccctccgcgccccgggggctccctgtacgccaatcggaacctggcgccccccgcttggttccctccgggaccaccccccgcgacctgggacccagccgcccagggagtcgtccctacaccacacaccgaaacccacgtgctgcccgatcttaccccctaactctcccctcgcaaccaaaacgcaccgcgccatggcgcacatcccaacacggcaccgcctcacaacgtgtcgtgcgcgcaccgaagccttacgaccccgacgggcggtggggacacctatcaggaaacaaaaaacggcggcaccgctgctaggccccgcaaggagagaaacaacacgaacagcgagtgatgccccactaaatggctcgcttttaatgacggaacaagccgtctgcgccccagaaccgcgagtgctcaccggaatagaatccgcaccagcgctaggtcgcacagccctttccgccgcg

SEQ ID NO: 135491 - DNA, 469 bp, Homo Sapiens
caggggaaatccatttatttattcatttattggacaaatataaattatgttcttgctactttccaggcactctgcaaagtgctgggaatacaatgtaaaagcaacagacacagatatgtacctttaaggagcttacagcctgtccaccaccaggtggatggacattaaataaccacacacagaatagacagagtgagatgacgaaggaggtgggatcccttccccaaggccatgccgcctctaagagtacgaatgttaaaaaagggttatgctggagcaccgccactctgccctgctgcttggtggctgcagaaggcatggatcctttagtagccaggcaggacagctgtagacaggcccttctggcagctccacattcaactggcaccatggggacaaggctaaaagttaaacattggtgttctgcaatgctcacgtgtataggagctgagcttaaagaggaaaggga

SEQ ID NO: 135492 - DNA, 490 bp, Homo Sapiens
  misc_feature (34)..(34): n is a, c, g, or t
gaggattgaaaaattatctttattatcttgagtngggagctggagctggaagtctccagcttctccctccaacaactcagctcccattgtacccatctggggacttagatgaagttacaggtcagttattggactgctcacaggcctcttgattcctaggagtcaataagaaggctttggagtccaggcaggaagtcagggacttgaattcctccacacacttttcgggaggatgtggtgagcgattgtagaggagaaagcgctggtaaccctggcctgtctcattcaagcatgattccacctgggcatgagctggaaaaagagctcagtcttcatgtcagggcgggccttcagttctgagatctggtgctcccttcagtcaggtggtagatcccatttccgggggcacacaagagcccatcttttcatgcggatgggtagcaccgaaaggttggaagctgcatcgggggcagaaccaagcaggccaata

SEQ ID NO: 135493 - DNA, 807 bp, Homo Sapiens
  misc_feature (64)..(64): n is a, c, g, or t
gaaatcttttccgagggcccgagggcgcgccgaacagggtatttttgcgggggttgccgtgctncggagggatgaaaaattatctttattatcttgagtgggagctggagctggaagtctccagttctccctccaacaactcagctcccattgtacccatctggggacttagatgaagttacaggtcagttattggacagctcacaggcctcttgattcctaggagtcaataagaaggctttggagtccaggcaggaagtcagggacttgaattcctccacacacttttcgggaggatgtggtgagcgattgtagaggagaaagcgctggtaaccctggcctgtctcattcagcatgattccacctgggcatgagctggaaaagagctcagtcttcatgtcagggcggccttcagttctgagatctgtgctcccttcagtcaggtggtagatccatttccggggcacacagagcccatctttcatgcggatggtagcacgaaggtggagctgcatcggggcagagccagcagccatattgaagacaatgttgtccacagggtcaaaagttgccaactcctccttggtgggagctgcccctgcgataaagtaccactggcccaagtggacctctgggaactccttcccatccacgcccagagttgtcagttgactgtgctcagggcactggtagatggagttaaggataataccatagaagtagagcagagctgcccaaatttggtggaacatcttcaggcaggagggagctggtgctctgtgtgccttaactgctctctcccctccc

SEQ ID NO: 135494 - DNA, 395 bp, Homo Sapiens
ttttttttgaatgttaataattttctaagtattagaattgtgttcctcaacctcaatagaaataggctttctctaaacaaaattttagaggcatagaagactcaagttaactagatatatggttgctattatttttcttgcactaagcaaattaaaaaggtctttaacaatttagttcttgacacagatgaagacttgatttagatgaacaagaaaaagagcatctgaaatcctttagcttgttttgagctactaatgagttttcacttctctccattgtaactctgctaggctagactgaggtgccttaatcctgagccgccaaggtgctcaagtccagacggcatcatgatgtatgtaaacagcaactctgcttttgtgtagtttacttaaca

SEQ ID NO: 135495 - DNA, 564 bp, Homo Sapiens
gccctctgcatggactgttgcatgtgagtagacggccatagtggcgagtcaccttctgactcctgttgggtgcggcatgacccaagtgcagcgcaggccatctgcaggcaccagcgacagacgctgcaaggggtgcttcgtttcagcgttaatgccgctcaagttatcgtttgtcctgagaggtgctcccatgtcgtggtgctgagacctcctctgaagatgggtctttattcctcctgtaacctacctctaacagtccacccagctctgctttaaactgtatgtagaagaggcccatttccagaagcccctggaatggaggagacaggggctgaagcagactcatctgtgcatgactagttcattaggagttcagttgaaattagattagatgctcctaaaaccatgggcaaccaaatacataaagtggggctttcttttccccttgtaacagtgttttactttatagatttatttaaagaaaaaaagttttatcttccccaggtggtcctggtgttttcctgacgcagttggtgagaagcctccgtgctcctgagcggccgc

SEQ ID NO: 135496 - DNA, 1272 bp, Homo Sapiens
aattcccgggatatcgtcgaccacgcgtccggcgggcgcgtccccgcgacggcgctgcctgcccgaggcggttcacgtaaagacagcgagatcctgagggccagccgggaaggaggcgtggatatggagctggctgctgccaagtccggggcccgcgccgctgcctagcgcgtcctggggactctgtggggacgcgccccgcgccgcggctcggggacccgtagagcccggcgctgcgcgcatggccctgctctcgcgccccgcgctcaccctcctgctcctcctcatggccgctgttgtcaggtgccaggagcaggcccagaccaccgactggagagccaccctgaagaccatccggaacggcgttcataagatagacacgtacctgaacgccgccttggacctcctgggaggcgaggacggtctctgccagtataaatgcagtgacggatctaagcctttcccacgttatggttataaaccctccccaccgaatggatgtggctctccactgtttggtgttcatcttaacattggtatcccttccctgacaaagtgttgcaaccaacacgacaggtgctatgaaacctgtggcaaaagcaagaatgactgtgatgaagaattccagtattgcctctccaagatctgccgagatgtacagaaaacactaggactaactcagcatgttcaggcatgtgaaacaacagtggagctcttgtttgacagtgttatacatttaggttgtaaaccatatctggacagccaacgagccgcatgcaggtgtcattatgaagaaaaaactgatctttaaaggagatgccgacagctagtgacagatgaagatggaagaacataacctttgacaaataactaatgtttttacaacataaaactgtcttatttttgtgaaaggattattttgagaccttaaaataatttatatcttgatgttaaaacctcaaagcaaaaaaagtgagggagatagtgaggggagggcacgcttgtcttctcaggtatcttccccagcattgctcccttacttagtatgccaaatgtcttgaccaatatcaaaaacaagtgcttgtttagcggagaattttgaaaagaggaatatataactcaattttcacaaccacatttaccaaaaaaagagatcaaatataaaattcatcataatgtctgttcaacattatcttatttggaaaatggggaaattatcacttacaagtatttgtttactatgaaattttaaatacacatttatgcctagaa

SEQ ID NO: 135497 - DNA, 887 bp, Homo Sapiens
tattctcccctccccttttttggctttggaggttttaccctccaggattataaaattattttaaggtctccaaaataattctttcacaaaaaataagacagttttatgtttgtaaagacatttagttatttggtcaaagggttaatgttccttcccatcttcatctgtccactagctgtcggcatctcctttaaagatcagtttttttttcataatgacacctgcatgcggctcgttggctgtccagatatggtttacaacctaaatgtataacactgtcaaacaagagctccactgttgtttcacatgcctgaacatgctgagttagtcctagtgttttctgtacatctcggcagatcttggagaggcaatactggaattcttcatcacagtcattcttgcttttgccacaggtttcatagcacctgtcgtgttggttgcaacactttgtcagggaagggataccaatgttaagcgtcactgcatttatactggcagagaccgtcctcgcctcccaggaggtccaaggcggcgttcaggtacgtgtctatcttatgaacgccgttccggatggtcttcagggtggctctccagtcggtggtctgggcctgctcctggcacctgacaacagcggccatgaggaggagcaggagggtgagcgcggggcgcgagagcagggccatgcgcgcagcgccgggctctacgggtccccgagccgcggcgcggggcgcgtccccacagagtccccaggacgcgctaggcagcggcgcgggccccggacttggcagcagccagctccatatccacgcctccttcccggctggccctcacctcgtgccgaattcgccacccaggcctcgctaccttagaaccgtatagttactgcc

SEQ ID NO: 135498 - DNA, 484 bp, Homo Sapiens
tatattctttatattctttaatatacttaaaaataatattctttaataattcatttgtttcactactacctctacactgatatgccatcatttattatcacaactgcccaaacatgatattattttgtattttttcatgcaaagtctgttacagttctgcagtcctatcctgttgctgatgattgcaaaagtattaccttgtaataacatcagcactgctctgacttatcaaatcctgatgtgactgtcagctcaacctttaaaagaaacttaaagaaaatatgagttgtttatatgaaatgttccttaggatagtatcatttaaatgagaccaacttccatggaaattatctagtatgtctttcacaaaattctataaaagagctctgatggtgcacttaaaaggctatcattaaaccatttattgctgtgtaggtgctgattttaaaactttttctcagacataaaagatatagttcttttg

SEQ ID NO: 135499 - DNA, 932 bp, Homo Sapiens
  misc_feature (911)..(911): n is a, c, g, or t
tgcctggcacgtgcgccgatctcccccaccacgtgccgggcccgccggaagccctctttgctcaccaggtccctggcagcctctagctcttccagttgtacctcccggaggctttccttgcccagcgcccgggccacttcttcacattggcgccgccgcacagggtactcgctggaggccagggagtggcggacattagagttggtgatgagcacggccagcttggggtccgagagtggcaccaggctggtctccaaggacctgcagtcaatgagcagcgcgtggcctttctgtcccataagtgagatgaactggtccatgatgccacagggcatccctgcgaagctgtgctcggcctgctgacacacctgggcgcgggcagctattgtgcccgagtctggacagagctgctggaggaaggtgtacgtggccacttccaaggatgctgagctggacaggccaccccccaggggcactgagctgaccaccactgcactgaagccagggaggggggcagctgggtagtactgaatcactcccttgacatagttggcccaccgaggagtcccaggctccagcgagcgctgggctgtgggcagtggaaactgcagccgctggggctcatcggcaccctcagaggtggtgaggagagacaccagcccatccttgcgggggctgcccaccagcaccgtcatgagctccagagccataggcagcaccaggccctggttgtagtccgtgtgttccctcgatgaggttgacgcggcccggcgctgacacggccagctcgggctcggccccgaactctctcccggaaggctcgccgggcctcggccagcagctccgcgacctggggctgtctcaaagcagccatgacgcgcgcctgcagctctgcacagctgctccggcgnacgcgtgggtcgacgatatcc

SEQ ID NO: 135500 - DNA, 750 bp, Homo Sapiens
gggccgggctgtgcgtcctcctggccgcgcatgacagttctccatggcaactcagtcctccagcagacccctgcatacataaaggtgcaaaccaacaagatggtgatgctgtcctgcgaggctaaaatctccctcagtaacatgcgcatctactggctgagacagcgccaggcaccgagcagtgacagtcaccacgagttcctggccctctgggattccgcaaaagggactatccacggtgaagaggtggaacaggagaagatagctgtgtttcgggatgcaagccggttcattctcaatctcacaagcgtgaagccggaagacagtggcatctacttctgcatgatcgtcgggagccccgagctgaccttcgggaagggaactcagctgagtgtggttgatttccttcccaccactgcccagcccaccaagaagtccaccctcaagaagagagtgtgccggttacccaggccagagacccagaagggcccactttgtagccccatcacccttggcctgctggtggctggcgtcctggttctgctggttcccctggagtgctcattcacctgtgctgccggcggaggagagcccggcttcgtttcatgaaacacatttacacatgagctagagatactgtcttggtgtcctgctactaaatgacattcgctcagtaacgagcacgacgtcggaacatgatatcagcgaccatccaccctgaagagtacatagctgctgaacctgactgct

SEQ ID NO: 135501 - DNA, 581 bp, Homo Sapiens
gtttatctttaacctgggactttatttgtacaactaagacatttgtataaaacaaacagaaaatgaaagaagcatgaagccatgggagagtagaaatgggagctgagaaacttaagagtagaaatgggagctgagaagatgaagtgaactcctatcctcaaacccgcaagttcccggccccaaaggaagccctcagagactgatatgccttctgggaactggacagcccctctcagcaagcctcattcccaacctgcacctggcctctctgcgaggaaggtcagccccagcctgggaagaccaagagggagccagcccagcatcaccccatgaaagacccaggacccaatgttactgtcctaccagggcaaagcaacctgcagagatggtggctaaatggccaccactaaaggtcccagttcatggaaagcacaggagccggaagcggtggcatgggcagcatttcttactcagttctcccgcacactctgtgaaagtgccctggggcaatgaacccttctacctagtaatcaccgatgaccacgaaaagatgctccatgccatcacacaaaaaggttgca

SEQ ID NO: 135502 - DNA, 438 bp, Homo Sapiens
cacacacagacacagaatttatttctggacgcattctgcaggctggaggtcccggcaggcacagggctcacaccttgggttttgcaaacacctcccagccctccagccggcccatcttgaccagggaggccgctatgccaaagtacacgcaggcggcggcgccaatcccgtagttgtgcgctgtgggagggggagggggattgtcagccccgggtgggggctcggccggaccaagacgctccacgccctggccggtgcccaccctgggagccagactgagacccctgacaggacactctcttcagggattaagtcactcaggaagagggccctagactctggagatgtggaaactgatgcacagagggaggccggagtccaggttgcttcccagcaggaacccaggctgtgggtcctcatcccgtcttgcacagccta

SEQ ID NO: 135503 - DNA, 982 bp, Homo Sapiens
ctggaatgggtaatccacagacaaatgtattgtgggaaactacaccaacggatacacgtggggtgttttcctggaaacaagaagtttcacttaagtaggccacgggtgtctccagtcgagaccccggtcggccccgtgttgttgtggaccaggttcttccgggacagttggttacatagtgggcgaactaatgggggccgcaacggcctagtctatccggccatggcattggtagtctaagggagcacatgccagggagcccacattccaatgggaggcgcagccacgttggatataatgtgatcgagcggtcgggcctatcgttgcttggctcaaatgttgtcttgcttgaagaagcttccattcatgcgctttgggttgaagctctggtgggcatcttggttctgtgttcacacagacacagaatttatttctggacgcattctgcaggctggaggtcccggcaggcacagggctcacaccttgggttttgcaaacacctcccagccctccagccggcccatcttgaccagggaggccgctatgccaaagtacacgcaggcggcggcgccaatcccgtagttgtgcgtgcgtgctcccagagtcaggcctccggcgcagccaccgaggaagtagttcagggggtcgtcgggcttctcgcggacatgggcgctgatgcaggtggtgaggccaaacacggccccgacagcagctgcagtgaacgtgtattgtccaaccttagccactccttcaaggaaggtgcccggaggattgagtgtgactctgtaggcagcggcggtcaggccagcgacgctggcaatactggtggtgctgtaggctttgcggtggcaatcggtgccatcggggatatcccagtactgacgaaaaaccttcggcgccatagcccgcaatctcgatcccgcaccacggaccccgccagctcgggaagcgcaagcctcgtgccgaattcgccacccaggcc

SEQ ID NO: 135504 - DNA, 920 bp, Homo Sapiens
gcaaaagttgaagatcgtgatgctatgatgttagttttccttagctgattttgagggtttttaaaaataaagcaaggttgactaacctacggccacgggaacaggaccatggttaagcaaccatatagaaagctttgttgaaagaaagtatggcatcttgtaccactgccctgactgtcacaactcctaaccttgccattgcctgcctccccctccccttctccttaagagacaatttctgcaggtggcaggtgagcaagcccaggagaatgctgcaatcttgggggtggttttatttatttcttttttgccaaatagagtgtggattcattttaggggctagctaagccaagaggcagtggtttgggcttgttgtttgtaacaagaaaatgatccacaccactcccccgattcccgggtgcagaattgtaactcggggttgggcctctatatggagtggaccaaaatgccaaaattgtccatctgcctctgagtagggcaatggaaataccaaaccttctgactttgccaaaaagcatacaagcaacctggtcatacataggatgacaaaattctttctggttgtttttaaacaataaagcaataagaacaaatacaatacataggaagttaaaagcacaaaggaatgaacttattaatatttttgaaaaatgcactgggaaaaagttgatgtcaataacagtataaaacagccctatttcttgataaaaaatgacaaatgactgtctcttgcggatgcttggtactgtaatgttaataatagtcacctgctgttggatgcagcaataatttctgtatggtccatagcactgtatattatggatcgatattaatgtatccaatgaaataatcgacttgttcttgatagcctcattaaagcatttggtttttcacataat

SEQ ID NO: 135505 - DNA, 558 bp, Homo Sapiens
  misc_feature (57)..(65): n is a, c, g, or t
  misc_feature (511)..(511): n is a, c, g, or t
tttttaaaaatataaaaggataactttattgaatatacaaattcaagagcattcaannnnnnnnnaagattatggcataagacagatcaatggtaatggtttatatatcctatacttaccaaacagattaggtagatatactgacctatcaatgctcaaaataacaaaatgaatacatgtccctaaactatttctgtattctatgactactaaatgggaaatctgtcagctgaccacccaccagactttttcccataggaagtttgatatgctgtcattgatatataccatttctgaatataaacctctatcttgggtccttttctctttgcctacttcattatctgtcttcccaacccacctaagacttagtcaaaacaggatacagagatctggatggctctacgcagagggaaaaatctccaataataccctcaattctgtattcacttttccctttcagcagctaccttattatatctaagatggtgtgaaaaaatatacaactcanaaaagaaaagcatttggactatcaatcttcaccttggtcctgcagct

SEQ ID NO: 135506 - DNA, 417 bp, Homo Sapiens
ggaacatcagaatttttcttcctgtaaaccacaaaaaagaatttttcatatgaaagaaaaccatgaggtttatggagctccagagcgtttgtgagcaaatccaccggggaagcccatggtggcatctctagactcaggtgagggtaatgcgtctgcagagtgagcctcagcattgggaccctgtgtgaccaaaggcaggacacggccatcgcagcacagaggggtcaccgacgcacaacagggctcccggtgcacccgcagcagctttcttcaaaattacccagacattagagcaatgctagcccctcaacgtgggctccaagaacgtgggaagtcagcctgccagccacaaagctgccacgtcctcccatccgggtgtgaataaagcacccacaaatgcctccttagttggaactg

SEQ ID NO: 135507 - DNA, 1536 bp, Homo Sapiens
tatgatacacaataaagactccatttatttgttcctcctcccccaagtttagcaaaataactcagatcctgattttctttaacttgcaaaaaatgccatccttctgagttcagagaccttccgagccctggtgccagctttggtgcaggtccagttcatatgtgcttctgcttatagtctactgcctactgcaaggctggctcactgtatggttttatcaatataggcagtttgaattttttctgtgctatgtgaaagttcaattggaaaagaagaataaatgaagatttcttttaaaaaattagaggatgatagtaagttctcctggagcaagcttcatgtaggggttcatgactgtggttgattgcagctttttcagtaactccgtgatgtatatcagaaatgtgtggtagttttgaatggacaggtcaatcaatcttttggattcagcaataaatttttcatagtaatcagagagttggtctgaaaaatcttgcagtttatatctaaactgctggtggtaatcagaaattattttcttcgtcgcaatggcctggcttttaattatttcctgagcagtggcagaaagctctgcaatcttctctttcccttttccatctggatcggtaaggatgctaagatattcctgaatatttctgtgcagaaattgctcaacttgacttgagagttgggaagtaaagttagaggcactgacaatatattcagaatggaagtccttaagagcaactaacaggttcttgatcagactgactatcttttcttcaagttcataatatttcactgtccagccaactatacttggatcaaaatattcttcacgaagggccataatgtattgatggatctgctgtaactcttgagaagcttcctgaagctcgttttgaataaattcattgaacttatgaagattaaggcataggttttctttcaacaatttaaaaacatatgggatataatcactgaagattgtgttgatctcatcttggatataattaataagataagtaaatttcatctctttcagctgtttaatgttatcttctattagttggaaaatgaattgtaaaaggtcctgaagattacgtagcacctctgtggtcttgagagactgaatggctttaaatacctcttgggcttcttttgataaatctttcaacagttccctatacatcgagattacatctattagtttatgtttccttaactcgaaaggaagtgtaatcactaggtcttggaaataggaaaacagtatttctgaaccattatggactttcgaatatacctgggacagtaccgtccctacctcccttatgaacatagtgcaaagttcctccctagtgtatatcccaggtttccccggaaactggaatctggggaagttcagaaaatcaatgagtgagtcaatcagatgcttgactttcatatggaattcttgagtaactcgtaccaagccatcaaacacgttcccggccgtaatggccgaattcccgggcatatgtccggtaccgtcgactg

SEQ ID NO: 135508 - DNA, 491 bp, Homo Sapiens
ttttttttaataaaaagatggttcatttcaaagaactttagattaactgggtttggatcattggattttattaaataaaaaagagaagcaagtacaaacaccagtcaacttcagaaggattttaaaattgcaagtgtgccatgcagctaaggtttatcaggctcctcagttagtctgcactgtccttggggaggggacacagctctgaggacaggggatatttcccagggggttctgggatgaggtcagcactaactgggacagcccctgtacaacaaaggagcaaacctaggccccagggggatcctgtctcaggagaaagagagaggcaagaagggaagaggacactatcatccacttccaaggaaagccacctcacagctcagtgtgtgcaaacagcagctccgctaatttccagtaaggaggccaaagtcaaaggcacccatggagaatgggataattcaacaggaaagactcggtcattagggaaa

SEQ ID NO: 135509 - DNA, 556 bp, Homo Sapiens
taaattagttcagcttgtttccacatggtccccaaatctccatttgttccatcatgaaaaacaactttcatttgcgagtaagtctgaggctctcaaattgtctttcagaaatgtaacagaaataatggcactacctgtaacagacacacagcctaacggagcgatcagagtaatgggagcaaatccataggctgcaaagttccccgtctctcccacggccatcagcaggacaccaccccaccacagcacactcttgaagtatggccttgggtgctcttgttgtgccagctgaaggtgagaatatttctgaatatttagagaaatactgatcaccaagtttcctaaaatagccagcaaaactccaaaaaggtgaatctggttcctgcggtaccagtcgcccgagagggagccgttgccggcgcctggtgccccgtacgtgaaattcagtgacagctcgtccagggcggccgaggcggagtccccggggcccgcgggcgccaccgctgccatgaggtctcgctcccggcgctcgggctccggctcgggctgcggccgc

SEQ ID NO: 135510 - DNA, 397 bp, Homo Sapiens
aggccggaataaaggtttattgtgctggtgcattatatctcagcacctggagagctgtgcagaggttgggggagccccagatggagggatgggggagaggacctcctgccagagcctccctaaagcaggacggagcccaggctccctgtcgaggactgacgaatattgtggacacaggctgccagacaatgtgtgagcaacagggggtggccagggcccccctgctccaggctgggcgtcagaaacccttccccagcccctcggacttccccagggtagaggtcccctcaaacacagcccctcagcttctaggctgctttggaggccagacaggaagagttccattcattcaacctgatcccagcagcagtagcgggatgagaaactcacccccagg

SEQ ID NO: 135511 - DNA, 1616 bp, Homo Sapiens
  misc_feature (996)..(996): n is a, c, g, or t
tttttgacactcaaactatgaaaattgtttttattttaaatcaaagtaccaggcagatacttgcaaaacaacatacaaagcaaaactcaaacatggcccttccctagggcgcctctgagcaggcacagagaagttctcaccctctgcaaaatccaatccaatcctatcttctcagaaaaccaaaccaaaggcagccatgaaaacccgtgttctgtacgtggttgagaaggtcctcctctctgagtactggctggccccaaggcgcagaactgggaggtccagggaaccctgcccccgaggagccagcaggacctggaggagccgggggcggtgctgacaacaaccttccccacccactgcagtgtggttcccatgaggatgagggcttctccagggcccttccccacgctggggcttggagcccctgccagaagcagctgggttggcggtagatgtccccgagggccttgggaagcactgggaatgggctcccagccctggtggaatgggggattgggaattaattctgaagctggttgtggcttatttttgtatggctctgaaattaacttcctctccctatgcctcagtagctaaggggcaggggcagaaaaggtcccaaccctgttcttaaaaagaaaggaaatgaacccacaacccactggaagttctgttgacgagggctgtcaaggcagacgcactcgtgactttgacaaagggaagcagctggaaggttgcgggtcccagggtcacaggcagctgtattagtgacaggttctgagctggtgggtgggggccgcagggctctcctgacccccgttgggtcataccgctgcatgcttgcagaactcaacttagagtggaaatgagtttaaaacggagtatgtactatcaaaaggtcaacatcacgccgaaaccagctgactgtgacaacagcaaacaaaaatgtaacagagaaaacaaacaagacacagcctcagtagcttgacatgggtngagggcagccaggacagggccctggtgacaatggcgcagaggtggggtctgggccgctcactggacggacagccagccagttcccttcggagcagtgaagtgggacacaggaccctcgcattgcggggcctcagacgggccttcaactgccgacagaatcagcaggagcgtccaggggaatctggcactcagggtcctcccgggacatgccctgtttggagacggcaggaggcctgggctggctgctccctgagatgcctgccccaggacctggcctggaggggcctcagcctggtcttccttgtgagtccaaggccaggtctcaggacagccacagacagcccttccagacaggctctgggctccaccttcggcagctgccctgagcagcccacccggggcagcctcctgaacacccaggggctctcccttggacagagaccaccaagggccagcccaggggctgcatgggggccgggggccagggagccaagggctgttccgtggccaagcagcccaagctgaagggcccacatgggaatcctcgacctccatagtgactggttctgtttatgcatctgccgcagaccctcgtccgattaacacccggcctcgaccct

SEQ ID NO: 135512 - DNA, 1023 bp, Homo Sapiens
  misc_feature (911)..(945): n is a, c, g, or t
  misc_feature (949)..(980): n is a, c, g, or t
gtcgcctccgtgccttgtgccaggcctcccctgtgggtgccagcgcgttgcccgcctgtttttgggagccgccgcgtgttgacccggtgtgtgtgaggccgtggccctgtgtgtatctctactggtcccggcgcccacgaggtggtggtggagaatttttcggggccggggcccccctttgtgtgtgattctttttgtctcttttttgatctggaggagggggtaatttatttaatttgttgactctggcttacaattttgtcttctgtttccatatctgggtcattagaagccccttcaatcccatcatcccttttcccttcaaatcagggcaactcagagatagctttcttggctggggggcctgttggcttttccttttctctcgctttttcctcatacatcaggatcatttttaggatggcagatctcttgcccagcatcatcctgagaaagtcagggtagctgaacgtctccccggagccactggacacctctccaattaatttctttagctctaggtgagtcttggggactccaagtttctccagcattcgtttcagggacatgatatcaatatcgccatttccattaaggtcaaactccatgtatttctctttgaagccttccagtttggagggcagatcctcatcactgctatatttgggatcgtctaggaattgcttgttgatctcatccagcctctcttcctgctgggccttcagcagtccgaaagcttttcctccctgtaaatgccctggtttggctcatatgctcagcagatgctggtagagatggggagacagaccaagctggaggcctctgtctgcaggctctccttctctcccaccagtcttctccccggccgtaatggccgaattcccgggcatatgtccggtaccgtcgactgnnnnnnnnnnnnnnnnnnnnnnnnnnnnnnnnnnncggnnnnnnnnnnnnnnnnnnnnnnnnnnnnnnnntccttcgcttcggcgactgcgccctatatgatcgatacactga

SEQ ID NO: 135513 - DNA, 465 bp, Homo Sapiens
ttttttgaggttgttctctaaatgtttattataacttctaatgtgatggagtcagtgtgttcccattagtccttctcctcctcatttagtagctcagaggagtcccagagcaaacttcctcaaatcaggtcggttcatactgcactgccttcagcctgatgtgagtcttactgtgctgggtttatgtccaagggccagtaaatattcccttccttccagggctcaccactgtttcaaatcctctggcaagcccagtggaagaacttctctgtatgggaaattcagcaagtaaacttggaagtatttgttcattggagtttgaatctgagccaaacagttcactcaaaaccaaccttccactcagcaaaccagtgttatgaaagtttgcatgcatttgggcaggaaacaaaggacattaatgagtttaaagatttttttttaaatccatgacttttggacatttat

SEQ ID NO: 135514 - DNA, 847 bp, Homo Sapiens
ttttttcagaatcccagagcccagcctggccgtgttagagctgtttattaacagggagggcctgtaaggtccttggggcagtggtgtggtgataagtcgaggactccatctcagctcacccagccggggcctctctttaactcaccctggtatggctaaagccaagggccaggcacctggaagactctgcttcaccctgacatgatgtgcttgacaaaggcttcataattgatgcagccattggcatcctcttgcccagctaacagctgctccacttcagcctcagtcatcttctctcccagggtggcaaggacgtgccgaagctcagcacccatgaccgtgccattgctctccttgtcaaagacacgcaggccctccacgaagtcctcataggtgccctgctccttgttgcgggaaatgtgctgcaggatgggcaagaacgtctcaaagtccagcatcttgacattcatctcttcaggcttgggcttgcccagcacacgcagcacctcggcattggtagggttctggcccagggcccgcagtacatccccgcactggccgtaggtgatcttcatctctccagtcggggtccggtcaaacaatgaaaaggcctctttgaactcttcaatctggtcggcagtgaagtctatctttacactcttggggtcaaaggcaggttccttgggagcctcaggagctggggcaggggctggtgcaggggctggagctggagctggagctggcttggctgcctccttcttaggctcaggcttcttgggagccatgttgtcttgttgggatctttggcagaggagtgatctaagaagaaaccgagagacgtggcgtc

SEQ ID NO: 135515 - DNA, 434 bp, Homo Sapiens
  misc_feature (13)..(13): n is a, c, g, or t
  misc_feature (273)..(273): n is a, c, g, or t
cctaccaatgccnaggtgctgcgtgtgcctgcaagcccaagcctgaagagatgaatgtcaagatgctggactttgagacgttcttgcccatcctgcagcacatttcccgcaacaaggagcagggcacctatgaggacttcgtggagggcctgcgtgtctttgacaaggagagcagctgttagctgggcaagaggaatccaatggctgcatcaattatgaagcctttgtcaagcacatcatgtcagggtgaagcagagtcttccaggtgcctgnccttgctttagccataccagggtgagttaaagagaggccccggctgggtgagctgagatggagtcctcgacttatcaccacaccactgccccaaggaccttacaggccctccctgttaataaacagctctaacacggccaggctgggctctgggattctga

SEQ ID NO: 135516 - DNA, 1497 bp, Homo Sapiens
  misc_feature (679)..(739): n is a, c, g, or t
ggttttggggggtaattggacccgaatggctttccgggcaggtttcggacagctttattctccccaataattggcggagggtttgggcgtgaaaatcggtggacaaatttgggccgtaataggcgttaaaagggtgataatggggtttcgtgtttcaggcctattcacaccgaatgaatttgggcgcagtttcgcacattttatggtgggccaaatttggccaaatattgttcaacccccgtttgtccccccatggtgcaccatgtggcaaaatcaattttcgcacagggtgctcaatggtccctgagcgagtcagggcgttttcagggtcattcatgcacggttttccatgtcttgccagaatggctaaatagattacaacaatttctcaccatgacttggcaggagtgggcacggaagttgagtataaatgctcgcgagggtctccttggtgatagatccagtaaattccctcaaagaccccatatgtctcatttgaaaacggttcggttgcctccgggcctttttggctggtttgaatgcgagcaattctaccagtactggatgtctggagagccctaggaaacccctgtttcccttttttaattggcctagcgggcccaacgaatagtttaaaaagtttttaaagcgtctcggggggccagcaagcctgacatannnnnnnnnnnnnnnnnnnnnnnnnnnnnnnnnnnnnnnnnnnnnnnnnnnnnnnnnnnnntgatacaactagcaaatgttcattggtttacaacaaacccaaaatactcatcaaatatgggctgttggatttagaaaaataagattcttgagcgattccagctgcatttgtttatacagaacacatttactcaggaccctgcagtgtcagcttcgttctttgggtatgcagccttctatctggatctctgcaggccagccagaatatctgttgttcttagcatcagagtggttgatcttttctctctgaatttcggaagggagttccaagccttttgctgcaataaatacccagctagacctgaatttcatgttcctgatttctttacttccaagtgcttctatggcattcttggcatcgttattcagtcttgtgcttccgtcgtcataggtcaccatgaagagcagggattttggagcagcactctgaataaactttgtcatcggtccagagttatcgccttcatacatatcaaaacatcgtgttgctgtcacattcccagttacatagttgacaatggcaatgtttattcctctggcaacatttcccagctgttctcccataagtaggttatcctcaaagcagattttggcgtacttgcttctgccacctccgctgagtaacctgtaggcataggtgtcagatgggcagggagtccagtggtcacatttttgccttttggggactggagctttgaggacaggcctctccccgatgctgcggatgctataggcagcactggacaggggtgcatctgg

SEQ ID NO: 135517 - DNA, 453 bp, Homo Sapiens
tttttatggatatttagttttatttgatacacttggatgcaactttactcattaccatttttaaacccatgtttgaaagttttaaaatttgggtagaggcagaaagaggaggttgagttggagatgctgggggtagtcagcagctcagtcatcggtgcttgtgggctttgtttgatccaggccttgactctctctggaatgggaggcttcgacgtcaagagggagctgctgccacccgtagttctgagcttgaagttgctaggacttctttcaaacttgtgtgctgaagagactcagatgttggtctcagctcctaggctgaattcagcagatcggcccatgaaaaatcctatattgagacaaagcaaaggatctgtcagaaagcaacacctattgtcctgggcttgacaccaaggaagaggacaggtagtggaaatcctgcaatctgaaaag

SEQ ID NO: 135518 - DNA, 1034 bp, Homo Sapiens
aagttggactgatactaccattatatcacagtgcacacaacacgagatggtctgttttttttacattaattagttctacacaaatagattccctagcgaatttatttcagaccaattgacaactatccgtgaacataactaaatttaaacatttgtcttattttatacctgtactttaagtaaggttttaagttgaaatgtcattatttccttatctgaaggattaaaggaaacagggacccagtggcttggtggtttgggaagaacacttggtgattgcggctccactaaatttggcaccaggcatagttctgattagcttgagatttaaaaagtaacctgggacctgataagctagaattccaactttgattatttggaaaatttttgttcttccccccattttgcatggcctgccaggcagctgctgatgagttataaccatgtcctctttcttttttcttatgaacaatcttcatctgggaattctgttccttggtcttctgtctgttaagctgttgttggttcttactaacatttctagattgaggggctggaatgttatacctctctccaccacccatcttcagcttctttgtcacctttcagtctgcttttcagattgcaggatctccactacctgtcctcttccttgctgccaagcccaagataacaagtgttgctttctgacagatcccttcctttgtctcaatacagaagttttcatgggccgatctgctgagttcagcctaggagctgaggccaacatctgagtctcctcagcacacaagtttgagagaagtcctagtgacttcaagctcggaactaacgcggcagcggctccctctcgacgtcgaagcctccctccctttccagggagagacgaggcacggaccgacaaagcccacgaacaccgatgagcgagctgccggccaccccagcttctacaacccgaccttctccttctgcctctaccctcgtgccgaattcgccacccaggcctcgctaccttaggaccgttatagttactgccc

SEQ ID NO: 135519 - DNA, 951 bp, Homo Sapiens
cacgtattaagcgtcagggtttagtcaagtggttttgaagtatacttgaggagggtgacgggcggtgtgtacgcgcttcagggccctgttcaactaagcactctactctcagtttactgctaaatccaccttcgacccttaagtttcataagggctatcgtagttttctggggtagaaaatgtagcccatttcttgccacctcatgggctacaccttgacctaacgtctttacgtgggtacttgcgcttactttgtagccttcatcagggtttgctgaagatggcggtatataggctgagcaagaggtggtgaggttgatcggggtttatcgattacagaacaggctcctctagagggatatgaagcaccgccaggtcctttgagttttaagctgtggctcgtagtgttctggcgagcagttttgttgatttaactgttgaggtttagggctaagcatagtggggtatctaatcccagtttgggtcttagctattgtgtgttcagatatgttaaagccactttcgtagtctattttgtgtcaactggagttttttacaactcaggtgagttttagctttattggggagggggtgatctaaaacactctttacgccggcttctattgacttgggttaatcgtgtgaccgcggtggctggcacgaaattgaccaaccctggggttagtatagcttagttaaactttcgtttattgctaaaggttaatcactgctgtttcccgtgggggtgtggctaggctaagcgttttgagctgcattgctgcgtgcttgatgcttgtcccttttgatcgtggtgatttagagggtgaactcactggaatggggatgcttgcatgtgtaatcttactaagagctaatagaaaggctaggaccaaacctatagacaaggtagagccgagagacaaggtagagccgcgagacaaggtagagccg

SEQ ID NO: 135520 - DNA, 1003 bp, Homo Sapiens
agccgctaacttgggaatcaccaggtggggggggcccgacgggaaggtttgcaatagtccacgccagattcaattcccctggggccgtgttccccgcaaaggttgccagttggagccctgggggtccgccagccgaaatagagccggaaaatccctctccgggccatcaaagagcaacaagctgcccctgtaagaggggcccagaccggcagggattttcagcacttccaagccctgcaggcagcccaggaccccggtaacgacaccgagcaccccgccgtccgcgcagttggtcactgtctccgctgggggtggttgggggaatatgcagcgatagcaagggccaccgtcataatggtagactgtgatttggccctcgaagcgcaaggcactggcagacacgaggggccgacccgccagcacacatgcgtcattaaccaggtagcgagtgggcacgttgtccgagcagtcagccaccacatcatatcggcggaccaggtctagggcagtggctggcgtaagggcctgagtgtacggcacgcattccactgccgaattgaggcggcgcagcgaggcggcggccgaaaaggccttggcctggccagccagtgcctcgccatgcagcacttggcgggccaggttgctcatctctaccacgtcatagtccacaaggccaaggcggcccacgccggccgctgccaagtactgcgctagtggacagccgagcccaccgcagcccacgattagcacgcacgcggtccccaggcgcagctgtccgtgcacgcccagctcgggcagcactagctgccggctatagcgcagaatctcatctcgggacagagcggccttcggcggcagcggcgacaccggaaccagccgttctggctgcggttcctgctcagccaaaagagccgacgccagcttctgcttcagcgaattcaattcctcctcacgttgggcaacttcagcttgtaaggcgagtacctcctcccgggaagccatg

SEQ ID NO: 135521 - DNA, 545 bp, Homo Sapiens
tgtttatcgatgccactgtaagaggggcccagacccgcagcgattttcagcacttccaaggcctgcaggcagcccaggaccccggtaacgacaccgagcaccccgccgtccgcgcagttggtcactgtctccgctgggggtggttgggggaatatgcagcgatagcaagggccaccgtcataatggtagactgtgatttggccctcgaagcgcaaggcactggcagacacgaggggccgacccgccagcacacatgcgtcattaaccaggtagcgagtgggcacgttgtccgagcagtcagccaccgcggtcacacgattaacccaagtcaatagaagccggcgtaaagagtgttttagatcaccccctccccaataaagctaaaactcacctgagttgtaaaaaactccagttgacacaaaatagactacgaaggtgcctttaacatatctgaacacacaatagctaagaccaaccctggggttagtatagcttagttaactttcgtttatgctaaaggtaatcactgctgtacccggggaggg

SEQ ID NO: 135522 - DNA, 424 bp, Homo Sapiens
actgctcgccagaacactacgagccacagcttaaaactcaaaggacctggcggtgcttcatatccctctagaggagcctgttctgtaatcgataaacctcggtcaacctcaccacctcttgctcagcgtatataccgccatcttcagcaaaccctgatgaaggctacaaagtaagcgcaagtacccacgtaaagacgttaggtcaaggtgtagtccatgaggtggcaagaaatgggctacattttctaccccagaaaactacgatagcccttatgaaacttaagggtcgaaggtggatttagcagtaaactgagagtagagtgcttagttgaacagggccctgaagcgcgtacacaccgcccgtcaccctcctcaagtatacttcaagacgttaactaaacccccacgcataaggtggggtacc

SEQ ID NO: 135523 - DNA, 1114 bp, Homo Sapiens
  misc_feature (145)..(165): n is a, c, g, or t
  misc_feature (169)..(169): n is a, c, g, or t
  misc_feature (171)..(171): n is a, c, g, or t
  misc_feature (519)..(519): n is a, c, g, or t
acctgcagagcccgggtgatgcagccctcgcagaatgaatgccggcacttctccaatgtcttggcattctggatctcccccagacagatggggcaggtgctctcctgctcttctgcctcctcccgaaggcgaggaggaagaggtnnnnnnnnnnnnnnnnnnnnngggngnagcccccgagctcctgggggcagaagtggggctgctcggagagggggtgggcctgcgcggtgcatctcagggtgcttcccctccaccccccagagccaggcagcccatcagctccccctgcctctgagctttcttcagctctttctctgcctcttttagcagccccttgagagccttccgggctaggtagagcccatttggaggggccgggggaggaccctgtggggaaagctggagaacatagatgtcagaagtctcgccatctatgaggatggacacacggtgctcctcccgaagccgggccagccgggctgggggtctctttgctcaggaagtcccacacgggcnttggacacagtcactttgttcttgcaggtgcctccacaggctgccattctggacaggacgaacgacatttgatcctgaagagcttagaattggcatgcaggcttcactcttcttttccctggtcccctacttgtaggtcgtgtgacctggaaagcccatggaagatgatggcagcagaaatccttctatttccactcagctgaccaggacttttaaacccagcacaggcagtgctgtctgtcagctcccaagtctggcatttagggaggggcggggctcacacaagggctcagctggaggggcctgatgttttccctgagtctggtcgcattgggctacggggctgtctccacaacacttccaaatgcagctcaaacagaaagaagggccattagtgtgacctccatttattgactgatccaagaaggagcagctgtcccttcatgcctccatcatcgtcccccaaggccagatgcacctcgagattcataagtgaaaatggaaccctagagtctcagcccatacagtctatccgcgatgcaacacttctctccccatcacgggggacccaggacctaggtgtcctaggtccaag

SEQ ID NO: 135524 - DNA, 504 bp, Homo Sapiens
cagttcattgcttgtagatgtgagtcttagtttttcttcaatttcctttccaattttctgaacagttacctgagtctgtttaattgcacactgggctctatgaagccgtagcaaagagaagacatcgtaagaattgcgaacacagttctgatccacctgcagaagaatagtcttctgagcatttgaataacccttatgttcaaatggagcaccatagtatccatcattcagcccaaaaattatttcattttggtttcgggcatgaatctgctgacccaagtatttcagcccatccaaacagactttccattcaatcaacagctggtagatgttctcctttccaccccatatcttcaccacgaaacaagacacagatgtatcaagacggtctggcataattccaaaatcgagacttcgccacgtgggattcaagggattcttaatcacttcacttctataaaattctttatatatcttttcagtactacacaagtgaagtgtaaa

SEQ ID NO: 135525 - DNA, 486 bp, Homo Sapiens
  misc_feature (254)..(262): n is a, c, g, or t
ttttgcctaattgctctattctctatactataaaattgctctattctaaaaaattatatacatagtattaattctaccagtgtattttacaccttgaaatgttttcttctgcacattagtgttttctttcagactgaagaactccccttagcttttcttgcaggatgggtcagcttttgtgtctgggaaagactatatctttccttcatatttgaatgacaattttgctggacacaatattcctagatgacagnnnnnnnnnaaaatgttccaatacctactggcctgttgagaaggctgttgccagacgatttggagctctgttatatgctatttgcttcttatctcttggtgttttaaggactttctctttgtccttggcctttagcatctgattactacatgccttcaggtagtcttatttgggggttgaatctgttcggtgttaaaagaccttcctgtacctggatatttatatctttctca

SEQ ID NO: 135526 - DNA, 608 bp, Homo Sapiens
  misc_feature (542)..(542): n is a, c, g, or t
tttctacacaaagcttagaagcactttatttgggagcaatcagtatttttgtcaaaacttttggacaggtctttatttttgttttggaaggttcaacacgaattgtgcaaaatctctggatatattagtttagcgatatggttgttgaagaaaataatatgttttaagcattcacaacgtgacctccccctagagcttttgttgatgatatgaatgatctggattcagtgagttcagtggtcatttaatccagtcctacctctcatacagcagacagatagatagatgaacagacagacagataactagatgtcaaataaactcctgctccctaaaagtacttttgcaatttcagtgaagacatggctaaaactgagtggcacctttatgagactggtgctttttaaatcaaagaagatagaaatgtacctttaatctacggcactgcaccagagcagaacataagctattccttcccccatgacagaggcatgaagctgtggaggacacaggcattcaccttgacacagaatgggtcctgngatgtctacttctgggatgaactggaacatgaagagttaagtgcccacatgttctctcaccaacct

SEQ ID NO: 135527 - DNA, 470 bp, Homo Sapiens
  misc_feature (139)..(139): n is a, c, g, or t
  misc_feature (243)..(258): n is a, c, g, or t
ctgcactagttattattagatattcttagtcttttttgtacatggagatttaagtttaagatggtttatataatgggttatacctacatttatattgtagaataaatattaaaaagcctgttccagagactcccaagcnagcctgggcaggcagatgtaccattgttagtggtgtatgctcggcctcgtggtccatatattctgcacttttatatttgccaccagaatggtagtttgctggcnnnnnnnnnnnnnnnngagagagagaaaaaattacaactcttacaatctgaatttttttcttagccttgagtgaccaagaagaatttgcttgaggcaaattgtggcaaatattttcccagacaggggaagagtcctgcagattacagattactggtgttttcatgccttgaggattcttttatttttacataggggtctaagtgaccaatggattgttcatacaaaca

SEQ ID NO: 135528 - DNA, 334 bp, Homo Sapiens
gccgacagggatatatatttttgggcttgttagtcccgggttagaaactgattttaataagtcacatgatacaaaagaatgagaacattcaaagaatgagtaaaatactgctttgtcccaaaggacaagcagaaaatgttaaggcacaacggatgctcagaaaacgtaagaagctgaagggaaaacacatcatctgtgtactcagacacacacactccaacccatcacacgaacacaccctcgcccgcccatcagagaagaattcgcctggaatcagctgggggcggtggctcacggccttttgttttgttttgagatggagtcttgctctgtc

SEQ ID NO: 135529 - DNA, 974 bp, Homo Sapiens
tttgtaggttaagaaaactgcaggagttgtcatgaaattctattggaaagaatataaaaattatcttggttttaaattgataccaaagtctgtctagaaacaacccaaccactgcaaatttggtttttgcaagttaatttaattcaaaaaaatacttgtactcccgtgttttaaatggtcttaattattcatcaccataaaaagtagtttaggagaaaataaaatatttgaacaacagtctaaaatttaatagcactgtttagaataggtctgtttgtggcagacagaatccaaaatggctaatttcctaatcccgatgctctgtgtattaccgggagaaataatgaaattcatttaaaacctcagtctaagaaatcaaatgttcaatacttgctaatctaaatatctacattagtctgaatcaacttgttattgtggatcctattcacatctttcggaacaacatgatcgatctgtaaattccattgctaaaggcaactttatttataaccatcaagtcctcttggctctgaaaataaattctacccataccccattgcacttgtcaccaaggaatcaactaggtacgttctgattccctctcacctctctcttccccgactgggatggaaaccagactgatttctcccaactatgccaaactggcccatccatgccctctccttactaagctctcctgtagtatcattttaaaaacatttactgattgattgcataataattgaacaagatactgttctctccttcctttaaaaaaatcagtattttacatcaatttatagctaaagtatctgcataaagtttttgttttcttacataataagaataattctgtagcaattcacattattaggctggtaaccaagtttattcattctacctgttgttgacttgaaattcccccccggccgtaatggccgaattcccgggcatatgtccggtaccgtcgactg

SEQ ID NO: 135530 - DNA, 763 bp, Homo Sapiens
  misc_feature (123)..(138): n is a, c, g, or t
  misc_feature (150)..(151): n is a, c, g, or t
  misc_feature (225)..(320): n is a, c, g, or t
  misc_feature (743)..(743): n is a, c, g, or t
aaaaaaacccccttgtttgtaagcccgggggttttttcggaagagagacctaaagggcccctgttttttgtcctctcggggggccccgcgcccccacaaaaagggttttaaaaaagttttttnnnnnnnnnnnnnnnncgcgccaaaggnngtcttttttgttcctgcgcgggggtgtgctcgtcggaacttctttgggccttttcgtgttggtggggttctccnnnnnnnnnnnnnnnnnnnnnnnnnnnnnnnnnnnnnnnnnnnnnnnnnnnnnnnnnnnnnnnnnnnnnnnnnnnnnnnnnnnnnnnnnnnnnnnngacattgctttcttttaattggagtgaggacaaaacctgatcccgttcagagatgaacagaatcatctaggtcgttaagaacagtcttatctttctggttaaccaggtcctaaattcaagggatttccacgtgttctttaaaaccacctgaaactgtcctgcgcaggctcacactgcggctctgtaccaagggcttggccccgcctgcagccagagggcatctcactggatgtcatcatcatcaaaaagatcttcaaaatcgttaaaaaagtctgcatgaacggccttttcattggctgccaagtccatcaagagcccggtgctgcctcccgcctcgtccaggtccacgtagggcccggcgccctcggggaacatctcgtccaccgccggcttcatctcggggccgcggcgctctaggctcanttccggcctcagagccgctc

SEQ ID NO: 135531 - DNA, 461 bp, Homo Sapiens
ttaggattgtcttttaaatgaaagctagaaagcactctagccaacactctccccttggactacatgtacgagccctggttggctgaaactgaaagtctgttacgggaaaagtcttttatttcattggatcattgacgattatctctgtattttggactactatataattcattctgaagtgatttcttcagcccttacccttgtaggtgtaactacgtggttttgcttatttccctagattttgaagatctttttgatgatgatgacatccagtgagatgccctctggctgcaggcggggccaagcccttggtacagagccgcagtgtgagcctgcgcaggacagtttcaggtggttttaaagaacacgtggaaatcccttgaatttaggacctggttaaccagaaagataagactgttcttaacgacctagatgattctgttcatctctaaacaggatca

SEQ ID NO: 135532 - DNA, 2136 bp, Homo Sapiens
  misc_feature (646)..(668): n is a, c, g, or t
  misc_feature (1021)..(1109): n is a, c, g, or t
ccatctcgccccgctacatgtcccgtcgtcgtgtgattgacgtacattcccgaacagttgaatatagattatcgatccttaggactgcctcggtccagatttgcagaggaaccgaatgaacatcgctgtgcaaataactgcatgacacaactactgcctagggcgtgcgcagtgacacagaaaacacaagacagctttctgtgaacaaaatatgaactaggggtagtgtgggattcacatgaggtaactagctgcacttggaagaggagggtcaggatcatttgttcaggaattctactgttgtgtcctatgattcctctccgagccttcggtatcaatctctctcccctcgttctaaatgcaaatgagtagaaattttttgtacgttccccagctgtttatttccacctttagagctgtttagacaaggaggagtaagcaaggaacttgatctgcgttctatcgtggtcacagtggtgatgatcgggacctcccagggtccgaatttctggatatctgaaccctgaccccgttcattgtttcagtccactaccaatccacatcagtttgatgtctcccttggagagaagacccaaaactggggtgggcgggtgggtggcggagtccaggatataaatgtgtaagnnnnnnnnnnnnnnnnnnnnnnncttagtgaattattcacccacagacatgagagaaaaaaagagggagggtgtgtggagaaaaaatgtttacagggctaacaagggatgatgtgtcatttagtatgttactaaaaagtgtggaaatgacttgattttaaggggagggtgaggccgaagagggaagcccaaagcagatcttaatgtttcaaaggagtgcagcccttcacagccatcagatatgagggcactgttctgtctggtgttgtagccatctcaagaacaaatcaacagcaacaaaagagaaagaataaatttttaaaatttagaaaacaaacccaaagaacgcgctgaatacaagcaggagcagagagacnnnnnnnnnnnnnnnnnnnnnnnnnnnnnnnnnnnnnnnnnnnnnnnnnnnnnnnnnnnnnnnnnnnnnnnnnnnnnnnnnnnnnnnnnctagaaaattcttccccaccacttcctttgggcacctccgcccaccccgaagaacgcggaacaccttgcccctctccctccgctttcccacgaaaaaccaggggtacacaacataggggtttgtgattttccccgcgagaaaaacaaaacccccgccggcggcgccaccaccgactccgcgtctctcaaacccgtccttcccaatggggagccgcgcgcacgagcgccctctctgatcgggggactccctcctcccacgcggggtggaccgcgcaattagccgctcggtcctcgcttgtatcgtaattgtcttcccgcgcccacgccccgctccctgcttcacccctacttctcaccttcacgtccacccatcgcataggtgctcgctagaaaataaattccgccgctcacgcacacgccagcagtttcttactcgcgctcgacactaaaacacgccgagtgcccaaaagcgccacgcccgccgcccctataaaatggacgcgcacgaacgaatcatgtaagatcgaacaccacccccgccttccacacagacacccctcttaataacaaaaccgagcccgcgtctctctttccctccaccctctcttgcggtgagacacgaccgctaacttagggatgaaaaatgttatacaaacaagaaattcaccaccccccgcctgaccgcggggggccagagacaacgtatcgagcgggggcgcacatacaaaccgaatatattcatcttctcgcgcccagactattgcgcatgggcgagagcccagtgaggcatgttacgaacgtcgcaccatacggcacggtagtgtcgagaccacaatgatctcactcgctccgctaggcgccctaaatctgcttacctcccatttttaccacaatacaaagataccctttctcttctcattccccgcccttatacgccacaccttcgtttccgacgtgagaataccacacctaggtcctccacgattcttcttctactacactcgccccgcgtacgcggccgcgcaag

SEQ ID NO: 135533 - DNA, 1076 bp, Homo Sapiens
  misc_feature (353)..(353): n is a, c, g, or t
tttttctaccatcctcctatctagtagaaaaacggagggtaggtcttcgcagccatcaagttgtgaccacaatcctctgtcatagtggggtagcatccgacgtgctgcaggcctcaggacccacgtgagtcaacttgattgtttgaaaagtgctcaaaagccaggatgttctctaatgtgagttgtaggatgatgatagcccttctgagcacagctaaatgtgacatgtatgtgtctattgcacaggattttataagggtccagaaacagtactgtatttctttccttgcctattatatacatttttctgataaagttcagtgtttcactggggaaatgtgacttgcagggangttccccttaggggcaggcccagccctgccgctcccaccagcctcatccaccagtaagacactctctgagtcctgaccctgtgaagagtctgaggtctctgatattcgcaaagtcctcagtgaggtggtgtcttcctgggccaggcccatgccaggcacacctggaagcaaattccttcctccaaggccattttcactgaggtctggcagtgagaggtctggcaggagggtctgagatgtactgctgatctccttcagctcccgggagatgaaggagcgagagtggcctgacatggcagaagatgtcctttgactgtctgagcagtgctgtccggagcgctccctgcgggacccgccaatgcggcagaagaggcatttgatcttctctattgctttactgagcactgtctttctcaggaggatatatatccaggggtctaggatggggttcacagaagcaattcggatggcctgcaaatctggatttttactgacttctcgctccaaacttggctgatataactggttgacgaatactcgcaccacgagcgggatggagcagatgagcaccaccagggaggtggcaatgagtaagatgaccatctggatctcggcgcccgcgatgcggcggaagctccggcggcgccgaaagtcgctgaggcgcggcaaggctggggaggcagcggggtggccccgggaggcaaccgaggcggccgcggccgc

SEQ ID NO: 135534 - DNA, 711 bp, Homo Sapiens
  misc_feature (18)..(18): n is a, c, g, or t
  misc_feature (54)..(62): n is a, c, g, or t
ctagaaggaacagacgtnccagcgcaacaggtcgaggcctttgtccttgatgannnnnnnnncctctggctacgttcagtccgactgagtgcagcgctatgcatatgtaaacatattcgttaaagccgatcacctttaaggtcattcggaaaaaagcggtccttgttttcgcggtgtgggtgtgggtcgtaacagcagtctcattcccccgggaggaaggctcttgggcgttggagagtcccactcgggttgtgccacaggacaatgtgggcagggcgtgagcggctcggcgggcgcggcccgggcgttacctcctgccgatctcgctctgccgcaggaactggatgttgttggcgctgtcggccagctcggggtactgctccaccgagagtacgtagtacccgtcgtagccctgcaccttgccggcgctcagcagctgccgcttctcgccctccgtccagaggcgcgcgccctcctcgccgtcgcgcacgcgctgctgctcgcgcgcccaggcccgggcgagcgcgcgctgccgcgcctgctccaggatgcgcgccttctcctcgtccagggtcatgccgtagcgcacgtgcagcgccagcgcgccgaactgcatctccacgtccgcgaacctgcgcgtcctgccgttcaccaccgtggtggactgcgacaccgtcacgttgatgccgttctccagcgccttgcggccgc

SEQ ID NO: 135535 - DNA, 444 bp, Homo Sapiens
cccccctttcttctgtcccaggaaatagatcatcttttgaaaagactcttgtctaggaaaagttgtgtccttttcctaatttaacgtgttctttcttaatgaagttttaatttatttttgttgagattttgctagatggcttttgcatcccctgtagatggtgagtgttggcggtgatgtccgtctcggcgttcggaggccccacggtcccgaggctgggccggggccccccagggtggctgtgctgctgcctgtaggagggtgcgggttgtgctgtcatcctcgggtttgcacgcccttttttaggagcctgtggacatctgtggttttgtactttggggcttcaggggaggtgtttaactttctagtgattgatgattgtcaggttttgaaataccaaagcttttttgttctgtttttaaataaatatctttcaaactttca

SEQ ID NO: 135536 - DNA, 518 bp, Homo Sapiens
ttcactttgcaagagatgctatcctgacatttaattgtgtattatttaatcatttaaaacaaacaataataaaaaactcagccagaacacgcaaacgtgatctctgggggtcacaagatgaaatggtaggtgaatgttatcttctatcagccccttttgcctccgagttgggaaagtagttgtttcaacagatcagcttcatcctttttcttcagaagccccaaaccgagatgctgtcagaataagtcattttgctgctgcaaaaaatgatcacagtctggtttctgagtcatctgagttttaaaacgtaaacttccattaacaacggcccttcaccaacagtaaaatggggcagcaaaagttctacttagaatttccacgtgaatgaaacccgcaacctacaactctgctaaggaaaccaggatctcaaagaacagattcatgttttagggactttaaaagaagaaatccaagcagttatgcacatggacataattctgaaaacccagtcaggggct

SEQ ID NO: 135537 - DNA, 488 bp, Homo Sapiens
gcgtcgtaatgtccctgctcgttcaccagcacgcggtcgaagggcaagggtgcgtcagacggcgtaggcacccggctctcggagcgcttggcgctgaaggcggatcgcggaggcaccgagcactccccggcaggcccggtgggccccgcgggtcccgcctctcctcgcggcccggggtcccctcgaggtcccggcagtcctgcggggtaagcggggcggcagggtgagagtagcggcggctcagcccgcagcggggcggcgactctaaggtcaccgtacccctccccgcccctgcctgagcttcggccagcgcctcctcccgcacgggtacctcctccaccccttcccgcagggcagatctggggggctggccaagggggctcccgccgcctgggcccctcccccgctcagggctgcaaagcgcggggagtggcgccccctggcgggagacccgagtcccggacaccgggagctggagctgcggccgc

SEQ ID NO: 135538 - DNA, 1295 bp, Homo Sapiens
tttgagggttcttaggtttattgagtgatctctgagaaaagggccggccccaggagcaggagggggttggggaggatccagagaagcagaggaccaggaagagagcaccccaccgtgggctcctggaccagagcaactgggggacttacacttgccagcacagcacactcctctggtcttgggcagaaatccagccactgccccatgctgccagacctgatcgcagacagccactgttcccattccttgccagcagcaggacggagagtgctctaccccacctccctagtcattcacaatattccaggggggccagccctcctggatgacctggttgtcagcctcacaccctccttctaggagtgagagcatgagctcactttgcagtgggcactaagcaaagactggggagctgtgccagtcggagtacaccagaaatccggagaaggtgctgtctgtcttgatgctggcatagatgccaatgtagtcacccacacccacctgcacccacacttggtcctcaggctccagcctcaccatggccccccccgagagcgaggctggcttgggccaccccccgaaaaactggaagaaagaggcaatggattcgccattcttcaccagatcaaactgcaggctggcccggtagacggtggcatggacggcgaagtagtagaccccaggcacctggcaggtgaacttgccggtgacggcgtcgtaatgtccctgctcgttcaccagcacgcggtcgaagggcaagggtgcgtcagacggcggaggcacccggctctcggagcgcttggcgctgaaggcggatcgcggaggcaccgagcactccccggcaggcccggtgggccccgcgggtcccgcctctcctcgcggcccggggtcccctcgaggtcccggcagtcccggcctcccgccctcgcctttctctcccggagccccgggcgcgccgtcgcggccgtcgcggccatcgcggcccggcaagccctggctgccatggtggcccggcgtgcctggaaggccggggtgccccgggcagaggctggggatcttgttgtcgtccagtgggggcgagccggccgccaggcccaggagcagcaggacgaggagtggcctcatagcgctggcaccgggagcccggacgccggggtcctctcgcagtctgtggaccaggcaggactggagtcgggacccagaatcctgggacctgcctctctccccaccccggcgcggcccagtcggtcacccaccccactgccgtgcacctgaggctgagcgctcgcaggccg

SEQ ID NO: 135539 - DNA, 868 bp, Homo Sapiens
ctggtccctcaggctccaacctccacaatgccgcccccgatgacgtaggcttgccttgggccacccgccccgaatacctggaacgcaagagccaatggattcgccattcttcaccagatccaactgcagcctggccccggtagaccggtggcatggacggcgaacgtagtagaccccaggcacctggcaggtgaacttggccggtgaccggcgtccgtaatggtcccctgctcgttcaccaggcaacgcggtccgaagggcaaagggtgcgtcagacggcggaggcacccggctctcaggagcgctttggcgctgaagtcggatcgcggaggcaccgagcactccccggcaggcccggtgggccccgcgggtcccgcctctccttcgcggcccggggtcccctcgaggtcccggcagtcccggcctcccgccctcgcctttctctcccggagccccgggcgcgtccgtcgcggccgtcgcggccatcgcggcccggcaagccccatggctgccatggtggcccggcgtgcctggaaggcacggggtgccccgggcagaggctggggatacttgttgtcagtcacagtcgggggcgagccggccagcacaggcaccaggagcagcaggacgaggagtcggcctcatagcgctggcacacgggagcccaggacgccaggggtccatctacgcagtcccccctcccaggctccccgatggcctccttcggggcgctcgctactccggaccctccagttcggtggtgctccagcccccgcgcttctccccggccaggcgccccctgccctgccgtcaccccagtcctggttcgctccctgccggctccgctttcctcctcccagactccaag

SEQ ID NO: 135540 - DNA, 1020 bp, Homo Sapiens
gcggccgcgggcagccccggtggcccgcagcccgggcccaggctcggctgcttgaggtccgacgtggcgatctcggccagcgaccacagcttgggcttgctggcggggggcggcgcgcccggagacgtccggctgccctggggcgtcttgcggccaccgcggggcgcggcctcgggcggggggctcagcagcggcgcctccaagcccggtaagcggcgacgaggtcccgggcttgggcggcgccaggccccgctcggcctcctcgtcgtcgtcctcgtcgtcctccaggtcgtcatacttgtcccttgcactccgagcccgattcgcacaggggggtccccggcgcggcacggaagcttctccccgtccgactcggccgagcacgagtgatccgtgagcgagtccacgtgcaggctgatcccttcgtcctctgccgaggtctccgtgccctcctgcgccttgtcgggactctcgtccttgcttctggtagcgtcgccctcgtcctcgtcctcatcttcgcttttgtttctcggggcccatgtcatcttgttctccttcttgaggcgccggcgcgcgttggcgaaccaggtggagacctgggtgagggtcatcttggtgatgatggccagcatgatcttctcgcccttggtggggtaggggttcttgcggtgctcgttgagccaggccttgagcgtgctggtgctctcgctggtggcgttcttgggccgggcggggtccccgtactggtactggccgtaggggtaataaggcggggtgcgtgtgcggaactgcggcagccgtggccggatggtgcaccccggggttgtccttcagttcatactgcgcgcccatctgcgggaagatggtgagatccgcggcgtagggcaggaaggcgctgtagttgggcgcgcccgcgtacggccccgccgccgcgtacatgcccagcaccgaggtgactgcagccgcgcctgccccgccgcccagctccgcggcccccggtcggcccgacgagacggcggc

SEQ ID NO: 135541 - DNA, 541 bp, Homo Sapiens
  misc_feature (519)..(519): n is a, c, g, or t
gcggccgccgccgccgccgccttctcctcgtacgtgggctctccctacgaccacacacccggcatggcgggctccttggggtaccatccttacgcggcgcccctgggatcgtacccttacggggacccagcgtaccggaagaacgccacaagggacgccacggctaccctcaaggcctggctcaacgagcaccgcaagaacccctaccccaccaagggcgagaagatcatgctggccatcatcaccaagatgaccctcacccaggtgtccacctggttcgccaacgcgcgccggcgcctcaagaaagagaataaaatgacgtggacgccgcggaaccgcagcgaggacgaggaagaggaggagaacattgacctggagaagaacgacgaggacgagccccagaagcccgaggacaagggcgaccccgagggccccgaagcaggaggagctgagcagaaggcggcttctggctgcgaacggcttcagggaccacccacccctgcaggcaaggagacgganggcagcctcagcgactcggatt

SEQ ID NO: 135542 - DNA, 470 bp, Homo Sapiens
tttacctatttgtaaataagtttaattttttagtttttcaatgacattcagtagagatagttttattggctatatactcacaagtaaagtggtgtttggaaagttcctccattcatttgatttcctttagaaagctaattccatggtgtgcaatttatccatgaccacatacaatgattcaatgaactagataatgttaaatctttcaggtaactgtttaatttttaggtaggattaaaatatactttaggggttctactctgaccacgttctttactgatctgttgcccttggctttggggtcatggtaagatagagggagaaattgttgagggagaaggataaggggatgagaggagtaccccttagaagtttgagcccattgggttgggacttttcctcccccaatcactgaagctgtagtaagagcaaatcaatgtcacatttacagttatctcttggttagccac

SEQ ID NO: 135543 - DNA, 820 bp, Homo Sapiens
  misc_feature (324)..(332): n is a, c, g, or t
tttcacatttctttacatttaatgtaaataccaacagtggtcacctatcaacatcatggaagagcacacttcacaggtttcataatcaaattttaaaataatcacatgtaataaaaacaaatgactaaaatacaaaaatgtaatgtatttatttactaaatggttagctataaagatacaatttctgccttggagtttaaagcagtttcattttttgccatagttactttttctgataatatgctagaatcacagtcttctctgttttatctggattgtagggattgtttacattttatatgtttgttcacttgagaaccaaannnnnnnnncttcatgatgatggaagctctgtaatataaaaatgtcattgtgctcatatatttgaataataccgatcacggttttcaaagtctctatgagcatatcttgcataagtcttgttatgtgggatccttccaaaaggttcatggtcattgaaacaagattcaaaaacttcatcaacagcctttttagctacttctttgctgatattcctaacagccaggatagaaagagtggctctgtctcgcacacaagtctggtggtgttgttttaatccaaaatgtaacctgaatatttcattgacaagtgagcagtctccactaaggttagcagctcgaacctctgagcacgccaaatgtctgatgttggtgaaccagtcgacatgggcacgacaatgatcaaatgcatgaataagctcgtgtgtgaccactctgttcatatgggcctgattatggatattattctggcacaaaactatctggaagaaagtccatta

SEQ ID NO: 135544 - DNA, 1094 bp, Homo Sapiens
ctcccccaaacctcttaaaaaacaaaaccccctctctcgtttacgattttaaggatttttacacttaatatgttgtccacttgagcacccaaatgttgttttcttcaatgatgatggaagcttctttaatataaaaaatgtccttggtgctcatatatttggataataccgatcaccggttttcaaagtctctgtgagcatatctggcataagtcttgttatgtgggatccttccaaaaggtttcatgttcatgtgaacaagattccaaaacttcatcaacagcctttttagctacttctttgctgatattcctaacagccaggatagaaagagtggctctgtctcgcacacaagtctggtggtgttgttttaatccaaaatgtaacctgaatatttcattgacaagtgagcagtctccactaaggttagcagctcgaacctctgagcacgccaaatgtctgatgttggtgaaccagtcgacatgggcacgacaatgatcaaatgcatgaataagctcgtgtgtgaccactctgttcatatgggcctgattatggatattattctggcacaaaactatctgagatgttgaagcatcaaaacctccactgacatttccattacagtcttcgcaagaaaagtgtctatctttgttaacagcacaacctgagtgtttcatagcatcaagcagaagtttgacatatggatttgtctccagcgtcttcaggagcctaagctggcacttctggttgctggtgaagaagctggagaagaacccttgctggggattcccctgggccagacgctcggggaagacctggcaagagacgtgttgctgctgcagctgctcccctgccgcggggccccgccggcgctcgtccggagctcccgccatgcctcccgcagacctcgccgctgcttcctcctggctcaggcggccagagcgagactgggaaaggtaacctccctcccgccaacgcgaccgcccaggccctccctccgcagggaagaagggcagcctggctgggctgaagacgttaggcgggagggggctttgaacctgacggggagcgcgggaggcggggcgagaggcccc

SEQ ID NO: 135545 - DNA, 806 bp, Homo Sapiens
tttccattctgtagtaaatgtccagttgcttttgtctacagaagaatgtttggggtccaccaaagcatccaaggtctcaaggatcagtggctgcaaaatgctaagtttcccctgaagggtgttgatccaatattgcaggagtgcttctatagctctaaactcaaaaggtaaagggtatgtaacgagttgaccctctccagacaactgtgaagggagttcccggaacagccattgctctaagtttaaattacgataatctaatatcagaagacactctggagttatcacagctttcaaatactccattctcatgataatcctattgtttctgactgtgatactcattacatgctgaaatctcaaatctctggcttgaagacctaactcttggtataattcagttttcttcctttcaaaagaagtaacgtttccctgtttgtcaaattttgtcacagtaaatactggggctacactggctaaagtggcttgagagacgtcagaggttctaaaccggtgcacttcacctgccacgcggagccggtcgggcccgcaaagctgcgccgctcggctccttccaatcaggttggctcggcggccgcaggcagcaacgggaggacccacagaggtcacgtccaaggccagggcacacagcgtccgccggggaagtctcatcgcgcggggcaggaggcagggtaaactgcgcaggcattccatggtgctggagcaagaagcaggcagcagccagaccccagaccttcatgccgaacgctggggctccctcgccgattacgcgcggcctcacctag

SEQ ID NO: 135546 - DNA, 511 bp, Homo Sapiens
ttttttttgaggtgcagatagcttgctttattttgttgttactatctcaaggaggtccaacaattataactaacaattgaatttatacttgcatgaaaagaactacatcaaattgacattttgggcaattagtaatattgtttaaaatttaacaacagctttattttgttgttgttctttactttttgctgtggctcattgcttaggtgcccaggtttttcaggtgcaattaaaatttagaactaccacacaaaggcattggctgcactctgggacctccaagagttggcactgctctggcataggaatacttgaatagcttggttaaatgaagggatggccaggagatgttacttttccaagctattcaggcactccttatgtcagagacagcgtaaaatgagcgaacaaagtgttggccgttacactttgctctggtaatatttgtcatgataattttggtgtgacatcatcagagaaaatgtaagacgttaaagtggtgcctacagga

SEQ ID NO: 135547 - DNA, 705 bp, Homo Sapiens
taaagaaaagaggtttatttggttcacagttctgctggctgtacaagcgtggcaccagcatctgcttctgatgagagcctcaggaagcttccaatcatggcagaggtgaagggggagccagcttgtcaatggtgagagggagcaagagagagagggaggaggtgccagcctcttttaaacaaccagatctcttgtgaactaacagtgagaactcactcattaccatgagcacagcactaagccattcatgagggatccatgtctatgatgcaaacacctcccaccaaaccccacatccaacaagggaatcacattttaacatgagatttggaggggatgaaacatctaaaccatatcacctggcaattttcattgtgtacaaagatttgtagaggcattgagtggtttttcccttgcctctgtgtaggtctgagctggcatggggctgacctgcagtcttgcagaggctccactggactctggttcccctgcctttctgcatcgttccccagaggtcccaactgagggcctggaatgtgtcaacaccaaaaaatggctgaaaatacagcccttcttttttaagccatttttacaattgttttttaacctcttatgttgtacaacttagtcagtaaatgtgtcgaggagataaccagtattggttggctttcttctctgacattcatattccctgaaattgcggcc

SEQ ID NO: 135548 - DNA, 962 bp, Homo Sapiens
  misc_feature (527)..(527): n is a, c, g, or t
  misc_feature (703)..(703): n is a, c, g, or t
ttttaaaattaagacaagtttattgagtaaaaaaatgcatacattggaacggcaaaacatcaataaggccctaaaacaaaaaatacagttatgctttaacaaattcttagcaatgtggcccacgctttttaaaaaattgacgtgttggcagtgtttgttagaacattgacgtacatcccaaatagtaataaattcagtatgaaattatacgcataaccttactcaccatactactttttctcccaaactattgtgacttctttttgctctctgattaaaacaaacaggtaacatccttacacctttgctccatcccttgggctttaaaaagaatggctgtagttagttttgattcactatatactctctgtacttgaggaagagtaagctgtgtttaaaagtgcccttttccatgtcgtcatgtaccaataccctctgcatttgaaaatgttgactcagatgtttttccctctacagaactagaaaattgtccccccactttggtctatttactcatttgaagacanacagggttactaagagttttacataagttatttctttagagtgacgaagtgttagtttacttcttgcttagtggagacaaaattgtgagataaagaggaaggaataggatgtacacatttacccatcaatatagcacccagtgttatttgggcaggacccttctgttaccatctanggaaggttaggacagtcaagataaatactggatttggccaggagcgtggctcaaactggtatccaacacttggggaggtgaggaggagatcataggtcaggaatcacaccatcttggtacacaggaacctggtccactaaaataaagaatgattattaggtaccagcgtgtggggggccgtatccaccatcgggagtgaggagggaatggggaactggaggaagctgcagtgatgacatgtctcactgggcaaaagaac

SEQ ID NO: 135549 - DNA, 1675 bp, Homo Sapiens
  misc_feature (121)..(129): n is a, c, g, or t
  misc_feature (195)..(203): n is a, c, g, or t
  misc_feature (307)..(445): n is a, c, g, or t
  misc_feature (454)..(590): n is a, c, g, or t
gggcccccggcgtttttctccaccgggggggagaaaatttattttctccacaaggggccgccaaggggggtggtgaatcccccggggggggtatcaaagggttgtccaacacccccgtttnnnnnnnnnttctcccgcggggcgcggaaagttttttaaataattatccaccactctccccaaaaattcgccacnnnnnnnnnaagatttatatataagagccccctggggcccccctggtgagaaatcccgaaaagaccccccaaaaccccctttgggtttttttaaaaaccccgggttccccccnnnnnnnnnnnnnnnnnnnnnnnnnnnnnnnnnnnnnnnnnnnnnnnnnnnnnnnnnnnnnnnnnnnnnnnnnnnnnnnnnnnnnnnnnnnnnnnnnnnnnnnnnnnnnnnnnnnnnnnnnnnnnnnnnnnnnnnnnnnccccaaccnnnnnnnnnnnnnnnnnnnnnnnnnnnnnnnnnnnnnnnnnnnnnnnnnnnnnnnnnnnnnnnnnnnnnnnnnnnnnnnnnnnnnnnnnnnnnnnnnnnnnnnnnnnnnnnnnnnnnnnnnnnnnnnnnnnnnnnnnattaaataaaagttttgcttttatttaaaataaaatgcatttatacagtctttgaaccatggattattgaacaatactggtaatccacctctccctcgcacccttttgggctatgtgagctaggaattttctgactagcaccaatacagattgtaacagcgcaacagactagaacatggccagtccaggcattagagttaaggacattgtggcaaatcatgatcataatgaagtcattcttaatttagtagatattaaaactgcacgttaattatatctcttaaaggcatttaattaacgcagagattgctacatttaagccatctgctagttgtgagtagtttttaaaaaactgtacaattttataaaatttgtgtttttacattagttacacaaaatgcatacttcatagaactttacttcatattgtaatgcaaagagttgcatattttaggcagacagtgattatgctggtgaatactaaaagtgtaatacaatatggtgtaaaaataaaaacacgagacaatatacataacatgcttattcaaggacaaaaacaaatcaagcacgacggactaatagcattttccttcaaggtcaaacacaatgacattactaaatatcaggcctcctgcatgcctgatttatttgggggtagggggaggaattaatgggtaccagaagtagggtattttaaaacatgatatcaaatttaacatacattaaatcacatgcattagacatgataaatagagttcatataggttaagcctggatagctttaaaatagatggcttgtttcttacagtttggctagcttaaatcagtaaatcagtgatggtttgttcctgatttgcccactatttcagttttcaattcatggccctaaggaatgtgtgccaaattcaagtttattatatcataacatgatagattaatagtcgtgcttgtttagtgcacatattaactggtctggtaaggcaaagaagttttcatgataaaatgataaatttcaagcttactttattaagcagccccggccgtaatggccgaattcccgggcatatgtccggtaccgtcgactg

SEQ ID NO: 135550 - DNA, 1915 bp, Homo Sapiens
ctataaattcgaaaacattttggcccaattcaactataaacgttaaaccacataatgttttcagtagatgacttcatagactgtagccttcttgtccccccgagccagtgactatgtacttatcatccacagagatgtcacagctaagcactgacgaggactctttggactggaatatgctggctccatagggggtccgccaagcattgaggaggttatcttttccaagtactcacaaaccatttaccacagtaagcaaatttcagggacagcacgcagctctcaatgcaggtgcagctggtacttgtcaggcttgttcacgtgcagcacctccacattgctgctctccatgcccactgccagccactccccggtggggcagtaccccagggagaagatctgggaggtgaagtcgtgctgctgcagctgccgcccctcgcgcaggtcccaggacctgactgtgttgtccaaaccacccgtccagagcttggtgccatcattagaaatgtcaatacagctggctccgtctgtgtggccctggaattgcctcactagtgtctggttgtgcagatcccacacagcgatgttgccgtcgctgcagcatgagaagcagaccttggaatcggggctgatggccagggcgtagcaggcgggggccgaggacgtcagctccgccttgatgcgcggggttggagccgccaggtcccaaatggacaaagtactggcttcccctcccactatgagagtgcagccatcgggtagcaatttacaggaacggatataattgtctctgttcagacagtcgagctgggagacagggctcttattgccagggtggctgatgtcccagaccttgacgcagcccttcccgcctgtgtacacgtgtctcgtggggttgctgatggtcacagcgcacaccacctccccgtggttgagggtgttgatctggcgagcatgccgggggattccgggtccgatgagggcgtcggggggaaaagggacaggctgcatctgaccgtctgcagtaacgtggaaggagtatgcaggtttccccccagggattcctgccaggtttggaggaatggtaggtactctcatgtgagggggaggatcaaaccccaccatgggggagcgcccgtaggccaccacggcggccgcggcggctgcggcgctcatctggggcgacatgttgtgtaaactggcgtaggcagcgcctgggctggtcagctcgccgttcatgccagcgtgggggaccatcccaaaaggagcaggatatgggccgggcactgccaggggtgtcctcaagccagctgccgcttggttaacgagggggtctatggctggaggcttgccgagacctggacggaggcctggagtggcgctggtgcccggcgttggcatgtcgctccgaggcgttggtgtgctggatttcagaacaggcgtgctggctttttcatgcaagctcatttctttggatttcaaagaagtggaacttgccgaggaggccgtggaagctggactgctagaagcatccttgctttagcaggcgatttttgtcgattccattttcccggggcgagtgggcagggcttgctcgcggagaagaagggtcctcattagacacatccacaactaagttgtcatcgcttttgtcaccatcactgtcatagtggctggagtccttatcatccaccttccttcttcttgatgtcactggaaaattcagctccatttctgcgtttatctgtgcctcttagactgtctgggaccaggagggaattacttgtgcccggctctctgtctctcgtggtgctctgcatcgtggtgcttcattgtcatcttttagcgccaagtgagactgcccactcagagcactagacagctacaagaaggccggcacagccccacgaggggc

SEQ ID NO: 135551 - DNA, 573 bp, Homo Sapiens
aacgtcaaggaaacaaaatgtttatttaaaaaaatgagatcaatatcattttaatgtagaagatgccatctttatttacaggctaataaaaaaatattaaactcaactagatataatacattatcataaatgcaatagatttgaggccaaccataagtgtaagactggattgatggaatagggattacataatcaggatgtcaaatactgtgcatcttacacatgaatcacatgaaacctttttgtttctaaacatgaaaacagcataagtccactgcagtggggaaaaaaacagcaccacagacaagctgtgctaactttcgatagctgttgacttgtaattatcaagactcacaaaattttcgtctttctcaaatttattttaacaatagtctcaccaccaaaatgttgcttttccatcatattcataacagagatactgtagaagagaattttagaggttaagtgtaaatatatacacgcacacatacaaccctcacattttattaaaacgttttctcaaccattctgtttgtgtatacatgtgtgtatttccccttctgtcgtcttctc

SEQ ID NO: 135552 - DNA, 1379 bp, Homo Sapiens
  misc_feature (718)..(728): n is a, c, g, or t
  misc_feature (802)..(815): n is a, c, g, or t
ttccttcccagttttcttcggtgtcatgggaatcatttcttcctggagctcactgcgggagttctagcatttgttttcaaagactggatcaaagaccagctgtatttctttataaacaacaacatcagagcatatcgggatgacattgatttgcaaaacctcatagacttcacccaggaatattggcagtgctgtggggcttttggagctgatgattggaacctaaatatttacttcaattgcacagattccaatgcaagtcgagagcgatgtggcgttccattctcctgctgcactaaagatcccgcagaagatgtcatcaacactcagtgtggctatgatgccaggcaaaaaccagaagttgaccagcagattgtaatctacacgaaaggctgtgtgccccagtttgagaagtggttgcaggacaatttaaccatcgttgctggtattttcataggcattgcattgctgcagatatttgggatatgcctggcccagaatttggttagcgatatcgaagctgtcagggcgagctggtagaccccctgcaaccgctgctgcaagacactggacagacccagctttcgggaccctcccgcgtgccgaactgatcttcgagctgcatggacctaatcacagatgcagcctgcagtctcgcctaatggagctgccattaggggagtgtaaaactgggaaatgctgctcactgacagaattnnnnnnnnnnntaaccagtatgaaagtcgttgcgccgtgaatctctactgtagccatgaatttatggacagttagatgcttaccnnnnnnnnnnnnnngggagggtaggggacccagatgtacttgaatgtgcagaaaatacattcttgtcctcatcttccgtaattggagggctgggagaggcagctttgctcttcaccacaccttggacggaccaccttctttctgttccatggcctgaaggagtgcatctcctcaaagactcagcccctcacctgggagggcagtggtttgtgggcatccctccatgtacattttaggaaacacttgcaactctcatctgaagaagaaaacaactcatctttgggttcagattttgtggtggtattcagcaagtcacttgggcgagcacacttggtctatcctggaaagtctccttataagagaagttgtgtatttcatgtgcaccgagcaagggcattggaagacgtcatgaggctgtattttagcaggactgatcgtttttctaagtagacctgagctttgtttatcagtgaaattcaaggagaaaatgaggttaatgaagaggtatccgttaaatatccccttcttctcaccctgccaaaattagcagttgggatttttggaaactctggaatatt

SEQ ID NO: 135553 - DNA, 895 bp, Homo Sapiens
ttttttgttgggggaggtgcctttattgcccaagcccacccctcacttggccttgccctgggcagccacagcctccatggccttccgcaccgtttcctcatcacccaggaactgcatgggcttggtgggcttcagctccttgttcagctcatacacaatggggatccccgtgggcaggttcagctccatgatcgcctggtctgacatcccttccaggtgcttacaatgccccgcaggctgttcccgtgggctgcaatgagcactcgcttgccggccttgatctggggaacaatctcctcgttccagaagggcagggcccgggcaatggtgtccttgaggctctcgcaggtggggagttccccgggcttcaggcctgcgtaccgacgctccttgctaatggagttgtagtaggggtgcttctcgtccatcgggggcggcgggatgtcgaaggagcgcctccagatcttcacctgctcctccccgtgcttggcggccgtttctgccttgttgaggcctgtgaggcccccgtaatgccgctcattgaggcgccaagtgcgcaccacaggcagccacatctggtccgtgccgtccaggatggcccagagggtgcggatggcccgcttcagcactgacgtgtagcagatgtcaaactccatcttggcatccttgatggccttggctccccgcttggcctcctcggtccccttttcactcagctctgcatcgaaccagccacagaaacggttctcctggttccatgtgctctcgccgtgccggaccatcacgaggcggtgagtggccatggtggcagcagggaccacagaggactctggacggggacggctgcttcccaaccctcgtgccgaattcaccacccagcctcgtacctagccta

SEQ ID NO: 135554 - DNA, 843 bp, Homo Sapiens
tttttgatttttaatgaatttaattgagtgttcttgtatactacattgagcagtttgcttctataccgtgtcacaaaattcatgtatttcttgagaagccctaaaagctcataaaggaaaatgccgtgaactatgtagctcaggcttggtaaggtgccatctaaattacaaaacaaactaatgcataattttgcttaaatttcatcccagtatgattgtcttcccaacaccagcatatagtatagattgtctgtcttttttatattttttagttcttcctgtacatgtttttggcaataaagttataggaagaacaaaattattttgttagaattaaaacatgcttaatatttagtctgtttgtggagggcaggtattcacgtggactgagatacaatgttggatacagaaaataactttcattgtcttcctgacactgtgctaaggacatgctgttaaagcttcaaagtgaccagatgaggaaggaataattaattattactcctgatttgtagataactgaggtaagagtgtttcaaatttatgatagtcttttgggtattcagaaacctttccttatactgcactggcccccagaagcttaattttcccagcagttacagcaatgggagatagaacagtctcaatcttttgccaaccatcaggttcctagaaaccaggtaggtgtatcccataacaagggaggagcataccacagcccctcatttgattaattcatttgatctatctatgttattaagtacctactaggaataaggcattgtggaaatactatacaaagataaacattgtttagatgcttatctaaataccttttcacca

SEQ ID NO: 135555 - DNA, 853 bp, Homo Sapiens
ttttttggggggaaaaaaggtaaacctttatttggaaaaagagtttaaataacaatttaaaaccccatttcactttcaaaacagaaacaagaaagcaaggaaaagataatctatcaagcatctgccctctgctgtggttagccattttaaagctgcatttcccagcagaagagaacagtgatgggccctagtcctaggaacccacagggcactgtcttgagacccttttaggcagtgtccagggaacagacagacagaatgaatggtggggtgtagacagacctggggctcagacaggcacatgcccagtacccaggaaacaaagtttgaaaatatatacacatagaaaaataaattccctagaacctaggcatggaaagcttctaaccatgaatgcagcagcacaatgcaaactgggtctttggctttcaaaaaaaggaaagaaccttaacccctggcttactgtcccgaactcaagtctcttgaccactgtcttcagtcccactttggaggtcgagtgaggcaagagcaagtcaaatctaccagggccagcagccactctgacttatggagatgtgtggaggggctggccaggatctcccaagtcaaacccagcattgaagttaagcatgcagtgcacagttggactaggagtccatgataagcaggttacatctttagaggagtaagcagggcaagacactagctgctggaaagcatcgcatctgccttcattttgacatttgtcagacacttcgtaggattgcggcaatacagttcagaggattaggacggatgggtcgattaatgtgagggacaatctcgatttggaggtattgttctactggccatt

SEQ ID NO: 135556 - DNA, 573 bp, Homo Sapiens
ttttttttatgggttgcattatatttcaatttattttgatagcaaatcatcatacttgtcattgtatgaagatattgtagctagaaaaagtagaaagtatcctagttgtcttcccagaagctcagtggttttgcttaggttaggtcatcagagatcattcccctgggtggctccaactctggtcaaagttaataaacatgcttcaggactacaggatattcttcaattcagcatcaatctctgaatcacagtaaagaggaggtgagtttatggaacagcagttggaggcaaagtctgagcgcttgttaaccagctttgccagttccgtgggtgtggcctcaggcaattttgcttttagtcgctctgccagttttttcttgtactcagtaaatgtattttctgaataatctgcacatagttcttgtcccttgtcaatgaaagaagatagttccttctttagtagagggcccttagcattaaaacaggtagttgagtcttcaacatcacagcattcacccaaggctttttagggtttgctcaagttccttactgaggaatattctgggagatgag

SEQ ID NO: 135557 - DNA, 1150 bp, Homo Sapiens
  misc_feature (20)..(48): n is a, c, g, or t
  misc_feature (166)..(180): n is a, c, g, or t
  misc_feature (452)..(460): n is a, c, g, or t
  misc_feature (1064)..(1064): n is a, c, g, or t
  misc_feature (1083)..(1083): n is a, c, g, or t
  misc_feature (1093)..(1093): n is a, c, g, or t
  misc_feature (1102)..(1102): n is a, c, g, or t
  misc_feature (1107)..(1107): n is a, c, g, or t
  misc_feature (1112)..(1112): n is a, c, g, or t
  misc_feature (1119)..(1119): n is a, c, g, or t
tcggggaaagggcccccttnnnnnnnnnnnnnnnnnnnnnnnnnnnnngggttaaggttatttttcccaaataccaaagttcttttgggaggtaaaattttgcttttttaaaggtttccaacaaaagttttccatttcattttgatatgtgacatgtcaattcccnnnnnnnnnnnnnnnacatatgctgaaatgcgtgcactagtctttggtttcataaaaccaggtttcacattataatttaagagtttcctttgtcaaatacagtaattaataaatgtatactgcctgattttacatgtatatgatgtgccattttcatatgtgcacataatcagattaagagaaactgacctttaaactttaaaatatccagaaaaggtatctctttctgcaccattctaattcatatttaagtcccttatcacttaattaactaaagttcccttttnnnnnnnnnttgtgtaggcatgaatgaagcggcttagcaaaacagtaatactgacaagacatcatcttacaccatgagctaacatggacatgaagggagtgaccatctacagtgtgtgaaatgccacaagaagtcatcaacaagggaggagagttatgtcagtccaatttcttcaagaacactacgtggggtttcagcttcctcctgcagtagatcagcctgctcaattgctttaaggacatttttcttggatgtttcctgaacttcccctcccaaaagaaactcatccaaaataaaataagccttctcaaaattaaagatgatatctagttcacagacactgccgaaatacttgtcaagtaattccacataacgatgaattatttccagggtaattagttcattgtcctgatcctcaatagcacagcaaaaatacagactagcatatcttttgtaaacaatcttcagatctcgccactcaaggaagctgcacattttaggtttccgtgctaaaacggtctgaacaagttctcttgtgatctttttcttctctttgtctgatagtgggacataccatttttgcagtcgaagctttccctgacgactaaaaagnaacataaactgcaataggnccgcaggacncgggcgcgncggancttgnccgccgncgacggcggcggcgaaggggaagcccctgtc

SEQ ID NO: 135558 - DNA, 514 bp, Homo Sapiens
ctcgctggcgtccgggccgctggtgatctccggtagcactcgggccggcggacagtgagggcgcgacaacaagggaggtgtcacagttttccatttagatcaacaacttcaagttcttaccatggaaaattccgagaagactgaagtggttctccttgcttgtggttcattcaatcccatcaccaacatgcacctcaggttgtttgagctggccaaggactacatgaatggaacaggaaggtacacagttgtcaaaggcatcatctctcctgttggtgatgcctacaagaagaaaggactcattcctgcctatcaccgggtcatcatggcagaacttgctaccaagaattctaaatgggtggaagttgatacatgggaaagtcttcagaaggagtggaaagagactctgaaggtgctaagacaccatcaagagaaattggaggctagtgactgtgatcaccagcagaactcaccccctgcactccaggctgggcaaaaaagcgaaactccatct

SEQ ID NO: 135559 - DNA, 984 bp, Homo Sapiens
caagtttctcttttccacacattcgctcgattctattatcacctccacttcactggctcttcgtagggtcccatcccctgtcgacttgagggcatttaactcttcttttgtcatcttggtaggaccttggtatccaacattattgagggtgtcggaagtctctccattggtagctatttctgaatttaggattattccatgtttctcgagcatttcctctctttgcttcagggcctccttgacttcagcaaactgaaattgcagtatactgtgggcgtgtttttccctttcaaattctttgtttttctcttcgtactgccgcctagattcagccagctgttcttcaagctccagcaacatatcttttagggtatcaacctggtacatgaagtttgtcttttcattgtctagctgagcattggaaaccatagccttcttatatttctcttcaacttctgctagagagtccttgatttccctgatggatgcctcggtgtcgatggagatggaggtgtctccgctgcctctccgagaggaagtcccacccagagaggccagcgtggctgcagacaggcccggcatgttacgagaccccttctcagtaaaatctttttctggtctctcttctacctccttctgctgccgctccagctccttcatgcggatctcgcgagcctccgcgcgggccgcccgttttgcagcgagccgggcttccgccagcttctgcgcttccgggctcaaacagtcgatctcccggctttgagcggccgcggggctggtcatcctgccgggctcggcccgctccacccggcgggaaatgctcggggaccgcgccgggagcccctcgcgggccgggccagggggcgcgcgctctgtccgcggagacggagccactcgccgctaagtgaacgctcgcgcttcccctcgtgccgaattcgccacccaggcctcgctaccttaggaccgttatagttactgccgtca

SEQ ID NO: 135560 - DNA, 420 bp, Homo Sapiens
  misc_feature (408)..(408): n is a, c, g, or t
ctatgaaccatttttctgttctcttatttattgacagtttcttttaattacaacacaatgaattgatggtaaatacagaagatgcaatagtataaaaagccatttaacccttccctaggttaagacacttacagcagacaaaaactgccccacccctaatcccctccttgaatggaaacaaaataaatataaattaataaatacaaaacaaatcactgcacagcccttaactctttgattgccatggcaagaaccatgctgatgattctagcttgtgacatttgtgtggttaaaggttgccgcagcagtcaaagggttatagcattgtaaacataagtactttgtggaaaagttcagtcctggttaatgggtctataggccatgagattaatagcatgaccccctggnccctttaattga

SEQ ID NO: 135561 - DNA, 504 bp, Homo Sapiens
tttttttgcgacagccgcactttatttggagttttccacctaagcagctcccagctgagctgcatgacatgtgcaaaagtcccctagaaagctgggcctcgcagtgtgtaaaaaaggccccccatggggcagagccgtgcaaccattttaaaaaaagagacagtgagagagaaatcaggccccctgggagcctggcttgggtggagtgcacatcgctcaggccggtccatgtgccaggccactcctgctggttcgggggctgttttcttctctgattgtgctttcctttccaagtccttaaaactctggggttgtagccaccagagagaccagaccaagtcctcggggtcaggagggtatctggccggcggtgcagtttgagggtgacctcacacacagacacccacaacacaatgctcccccactgctcagccccgccagaaactcagggcttccctggcctcgcagccctcgccagccccttgtgtcccagcctctgcccct

SEQ ID NO: 135562 - DNA, 658 bp, Homo Sapiens
  misc_feature (551)..(572): n is a, c, g, or t
tggtcatttcctttttatctgtcaggcagccagctctgactttctctctgtttctgtcatctctcccccacataccaacttcttcaccatgatgattataccaataatacagttccttatatgaggggctctggaaaattagacagtgaagcatgttgcagattacatgttaaacaggtctaattcacaatgaatgacaacctgagacaatatgagacagttttcagacaacagttttgtggcaggtaggggactcctttctctgcatactcttcttggctgaggttgtgttgcactggctgaggttgctgaaacagtggcccatggatggagatgtagaatcagaagcaaggagacacagttctccgctggagtcttctaaagaaatcaagcctgcccatacttttgattttggccttctggtctccagaaccatactgttgcaaacaaggtacacatgtggtttccagagggaaacaaaatgagactcaaggcagtagcatttgtagtggttcctaagcatggagagaggacctgagctgtaagccgtnnnnnnnnnnnnnnnnnnnnnntcagctatctgctcctggacaaatcttcaacttcctggctggctctcttcttcccattgatcctcactcatttcctctgggttttc

SEQ ID NO: 135563 - DNA, 2246 bp, Homo Sapiens
  misc_feature (49)..(72): n is a, c, g, or t
caaaggtgtgaacagtcaacctgtcgaattcgattgtggtgagcagaannnnnnnnnnnnnnnnnnnnnnnntcggaactttgtcgggtggcgcaatcgccggggacaacttgtgaatgttgcggccggcaaccattggaaccacattgtgttcgaggaagacaacacacccacaacagggtgctgcgtcactcgttagctgtccgtctccacatggtccgcggtgcgggcgaatcaaggtttttagaataacaaccttagtgcacaatcggtgagagtgttggtgcgcaaaccggcgcacgatgtcaaaacagcgtgcagcaggtggggggcgaagtgtgggaaaagcaagaaatgtttgccgggaggggtatgaaacaatggggacagcacgggcgggtgaattgagtgattattgtgggcggggccgagattgcgggggagggtcgggggatgttgaacaaagggcaacgggatcaaaaaggcggcggcggggcagtaatttaaggaaaacggtcgggccaaaaaaaatgattgtggaggacattgagagttcagggggggagtcctccttgacgccccgtgagcgggatggccacgtcgttgttattggtctcgagggagatcctgtggatggcggctctgttggtgaagaccaagaaggcctcaggcacgatgcaggtcttcatgtcactcagcagctccaggccgatggggcagccacaccgggttgcgtggggtgtgaagaagcacaggtggctgcaccccccgttcctgtccgcacacgggttggttccgacgaccttggccacattcacagctttgagccccatcaggtcgggcagctggtcaatgatgacgtcccggctggccttgaccttgtgcacccgctcgatgctgcggcgctgccagtcagtccagtagatgaagtcccccagcagcgtgaacccgaaaatgtgcgggagcttgtcctccaggagggtccgcctcttcgtcccatcaacattgatcacctcgatcttgtctgtcttggcgtctccccagtagagcttcccctcctgcaggtccagggccaggccgttgggccacccgagggaggcattgaccagcacacgccgctcctgcctgtccaagttggcacgctcgattttagggttctctccccagtctatccagtacgtgaggcccatctcgggatgcagtgcaatggcacggggctcgtccatgtcctctgacaccaggatcttgtgggaggtgctgttgaggcacgtcacctcgatgtgttcagtgcctgtgtgggtccaatagaggcttcgggccacccagttgactgcgatgtcatcggggtcgttgatcttggtgttgatcagcgtctgcgccccagacccatccaggtatgccctgcggatggcccacacctcgtcatccgtccagtagacgtggccctccattgggtcatagttgatggcgatggcatgctggatgtcgtccagctgcagcacgatgtcggtgaagtccggtgtgtccagcgagaccctccattggtccgtctactgggccagcagcaggacctccttggctcagaaaggctgctgctcctggctcagcacctggatatccatgctgagtagagggcgctcaagatctcgttcctcttccccgcagtgttcctgttgcaggcatggatggagcacgtcagccagtccatccagtgcagagtgtccccggagagtgtcagggtgaaggggtgcgtcaggctgcccttcaccaccttctgccggaacgagccgtccaggttggcacggtggatgaagctgagcttggtgtcagcccagtagagcttcttctcctccaggtcgatggtcagtctattgggccagtaaatgtccgagtccacaatgatcttccgggtgctgccatccatccctgcccgctcaatccggggcgtctcaccccagtctgtccagtacatgtacccgtgagcggggtccaaggcgatggccctcggctggtcaaggtcctgccagaagagcaccttccgggatgtgccattgaggttggccacctcgatgcggttggtctctgagtccgtccagtacagcttcttgcccacccagtcgcaggcgaggccgtcgggagagaccaggccggagatgaccacgttctgcacggcggcccccgtctggttcaggtaggtctgcttgatggcctcctcgctcacgtctgtccagtacacggctcccttg

SEQ ID NO: 135564 - DNA, 1861 bp, Homo Sapiens
atagtaaagtgaggcacaaacaaatgagcctctgttcactttattcaaagagtatttttttcctctgtgaaactaggtagaactgaggaggaatcaaagaaagcctcatatattaaactcttaaatagattctttgaattcaaagtaagggtcaataggagaggcacaggttgtgggccttgtcccagcaaacaaagccaccaaggcagtcctgcaaattaaggaggatggcaaatctgtctcttaaaaaaaagttcttgaggggaaaaatataaaatacctaagtttcaaaagccggactacttccatacccttcattctctaccctggagtgtccagagatagagagtttcaaggtacgttttcaatgattcagcttttgcaaacatatgcaaatacattcctcatcagcagtcctgttttggcgattaatagcaagcaatatgcttggattagaggtccgatttccacttaaatgcattttcttctcttcttggcaatgaagtcatttgcggagatctggaaatcacgagcttcctaagtgggaggaggtgctgttctggttcacctgaaaatatcctttcagattggctggtgttttatagtcccctttcaagacccgctgtgtgttgttgatgacgaaggggtcagggttgccatagttgggggggtttgcataagggtcatagccgagctgagccagcatgggggcgatctgggccatgtcccgcaccacatccccagggatgtggccagtccacttggagagcgcttccaggttaacaggcttgatgacctggtccgtggaccgctcgatcttggacagggagacaccaccgggcttgccaatgaggtcttcatggtggaggacagcgtcgctccaggcgatgccgaggaagtcgaggatgagcttgagtgagcgcctggggtgcagcaccagctgctcgtagtacacaggcaggcacttctccttgcctacctccatgcactgggcgtacatcacctcgatggccttgttccacttggtgaggcagtcacggtagctgctgaggtcaaagcccgcaatggtgactttgcgcgtgatcatggagtgcacggaggcccggccgtcccgcaccatcagcaggaacttggagttggggaacaggcgcgacaggtagaccgaggacttgagcgtaaatgggtccttgttgcagagcacgcgggccggctctccgtgcttggcaatcacctccaggatgaaggcctgcatggcggcgtccagcacctcatccgtcacccccgcctcatccagccgcagcttctcacggccagacttggaccaggcctggcgcatggccagcacgcgcgggatgatgcgggtctcctcgccgcagcgcacctcggggtgggcgtccagcatggcgcgcatcaacgtggtgccactgcgaggcacgccacccacgaagatgagcggcatggccttgccatagcggtattccacgtggttggtgcccaccatcaccagctcctcctgctcaggccgcatggccccccgggggctccgcaggcccgccagcaccgcccggcactctagcacctgctgtcccagctgaaccgccagcaccaggaccagggcgcagccggctgccagcagcaccctccgcaccgacaggcgcatgctgggccggaggcagggtaggcctggcctgagggcccgcttctggggcttcagcgacaggttagcgggcagcccgccaggctcacatctcccttgggcactctcatctctgggctccagcccttgtgcctgtgtgccaaggctgtctgctggcagagcccgtggcgagacgcggcgaggcagccccacgcacccagcgac

SEQ ID NO: 135565 - DNA, 455 bp, Homo Sapiens
tttttgcagcagagaaggaagtttaatcataaggctgccgaataaggagacagggggaaacctcaaatctgcctgtctgagccgtttaggtctaggtattttaagggagttggagtgaccgaggtgggggatcactggttgaagaatacaggatggtgagatgaagaaactgcattttcatgctgattcagttcctcttggggagaggcgggggggcggtcttcaaactggttggcaatagctcttttgctggaattcaggatctgaaaaacatcttaagccatttttaaacaaacaaaggccttatgattctaacatcagaaatcttctctgtaggaacaatgaggaggcaaatggttagcatctggtgctctgggacttttggttacgaagaagtgggccaaagtgcagcctgattaatgcttaattacaactatatttctgtccagaaccca

SEQ ID NO: 135566 - DNA, 870 bp, Homo Sapiens
ttgccggcaagaagccatttattcatgaggcccatggggtggggacagagctgctgtcacaggtaagcacagcctgagaggggccagagacggcaaccacgtggagaggtccaagggtttttgcaggagtcttggtaaggctcccctccttcccacgactccaggccgctggtgtcagcatcacacatgggagatgagacgtccctgcacagccttccctgggcttcctgggcacgaggtttagctggacatgatgtgcttcacaaatgcttcatagttgatgcagccattggagtcctcttgcccagccatcaacttctccacttcgtcttctgtcagcctctcacccagcgtggccagcacgtggcgaagctcagcacccatgacagtgccattgccctccttgtcgaagacccgcagcccctccacgaagtcctcataggtgcctgtgtccttgttcttggaaatgtgctggagcataggcaggaaagtttcaaagtccatcatcttggtattgagctcttcctgtcttggcttccccaggacacggagcacttctgcctgtgtggggttctggcccagcgcccgcaggacatccccacactgcccgtaggtgatcttcatctcacacttgggtgtgcggtcgaacagcatgaaggcttccttgaactcttcaatctgctcaggtgtgaactcaatcttgatcttggaagcatcaaactcgacctccttagggcgctcaggctcagggggaggtgcgggagctggagctgccttgggggctgccttggcatcatccttcttgggctctggctttttgggggccattgggggctgtaagtacagagagggatgtggagagaagaatgc

SEQ ID NO: 135567 - DNA, 461 bp, Homo Sapiens
  misc_feature (324)..(324): n is a, c, g, or t
gccggcaagaagccatttattcatgaggcccatggggtggggacagagctgctgtcacaggtaagcacagcctgagaggggccagagacggcaaccacgtggagaggtccaagggtttttgcaggagtcttggtaaggctcccctccttcccacgactccaggccgctggtgtcagcatcacacatgggagatgagacgtccctgcacagccttccctgggcttcctgagagcaaaggcagtgcagattacagaggaggagggagacggaggcagcaggatgtcaagtgagcactgcagctggtggagtgtgggcaggtggcancagcgggttcaggagggagtgggtgcctacctgggcacgaggtttagctggacatgatgtgcttcacaaatgcttcatagttgatgcagccattggagtcctcttgcccagccatcaacttctccacttcgtcttct

SEQ ID NO: 135568 - DNA, 940 bp, Homo Sapiens
  misc_feature (105)..(105): n is a, c, g, or t
ggcattttttcgtgagcagcatcttgcagatggactggcctccttcggagaaacttgtgggagtacactcctcccgtctccaggaaccggcgggtccacttcctncccgcttcactttctccttgcggccgcggaacggcgactggccctcgatcatctcatagatgaggcagccaaggccccagtagtcggggctcaggccgtacctctggttgttcaggacctctggagccatgtagccaacagtgcccacccggccgcggatcaggtctccctcggggatcttcacagccaagcccaggtctgagatcctaatgtggccataatcatctaacaggatgttttcaggtttcagatctcggtagacggtgttctcacggtggaggtcttctaagccgcagaggatctctgccgcataaaacaaggcccgctcctcctcgaagccagggttgcccatgttgtagatgtggaacttcaggtcacccccattcatgatggtcaggaccaagcacagtgcatccttggtctcgtaggcataggccaggttgaccacaaactgactgttgaccttctcgaggatctgcttctcattgagggccatggactcccctttcctctttttgatcctcttcttctccaagcgcttgcaggcatacattttacccgtggcccgaacctggcaggcacagacctccccgaagcccccttttcctagcactcgatactgcctgaaagtgtttttggtcaccggttgcctttccaaccacttccactggagaaagcggtcaaaaaacatgctgtccagatattcgtgggatggttctcccctcaggtactcgtggacagactgtgcacaggcagaaaagagttctttgcacggcttctgtaggagcttctcctccgtctgggagaccagttctggccaactggggctatgaaa

SEQ ID NO: 135569 - DNA, 545 bp, Homo Sapiens
tttgagacaccacatcatataattttattggtaaataattctttagcaaccagataaaaattaagagagactcatgttctctccatgtgtgcacaatgggggcctccagtacaggctctggcacatgaaaaaatgctcaataaatgctcactttatgaaaaagtgaatcagtcaatgtacagaccaattctctcataagtagaatagttgacagaccacctaaattctatggacctcccttacacatgaataagaagagcttattatctatccctacaatgacagataccaatccaaccacctgttcatggagaatgttcagttcataagtggatcttcatcatctcacaaactgacctttgaggaccaagacaattaacatcattccagccccatcttttgggtgatttacgaaaatttagcacaacgcagcgctcattgtgatcactgggctcacgtggatgccagaatgtggaactttcattgtatggtgtctgatcaacccattgccaatgtcgctgaccttcttgatctgagagccccac

SEQ ID NO: 135570 - DNA, 483 bp, Homo Sapiens
tcacagtactgggaaatggagcaccagtattcggaaatgggagcacagtactgggaaatgggagctcacagcactgggaaatggagcatagcattgggaaatgggagcacagtactgggaaatggaagctcacagtcctgggaaatgggagcatagtgctgggaaatgggagcacagtactgagaaatgggagcacagtactgggaaatgggagcccagtactgagaaatgggagcacacagtactgtgaaatgggagcacagtactgggaaatgggagcatagtactgggaaaccccagacctggattttgagtttttcagtctagcccagacttcttatcttagtagacaaaaagagtcaataccagagaaccagaggcatcctctgtattttaatgaactctgcgttttagtctgtttagtagtcattttttaaaagataatcagttttctaaatatatctataagttactacatgcaaa

SEQ ID NO: 135571 - DNA, 499 bp, Homo Sapiens
ccattccaaccccacccagtgggaaaggctttaggagcatttggtcaggtgggggtgctgtcagggtttacggttcaccttcaaggaagccctgggtgcgctgactccggggtggggggcacctggcaaggtagcggggacccccgtaggcccggagaagctggggcagcctttgccacgtggacagcaaccgcgctgctgcaagttcccgggcgtgcccgtcgaaagcggccaggaggtcaactggggcggcttccctcagtgccttgggcaggggacccacctcggcagccgccccaccagggcccaggacgcagtggaagagcgtatggcgtcgcagcaggcagtccctaaggaactgcaccaactcctccaaacaccttcccaggtgctcctcgtcccagcctttcccaggggcccccttgcgcagcagcactgccagcagcactgtcttgagcacatatgaggataggatgcgtccccactgggtggcggccgc

SEQ ID NO: 135572 - DNA, 650 bp, Homo Sapiens
gacacaccgttgtgccttggggcttggaggcttcggtggcattgggcggcgtcatggcgatgcagacgtccccctcggggaacttgtcacacttaagcatctcgggccagtagaagccgaagaactgcatgaccggctcgcacgagtcgcgcacggcctcgcagagccagcgacacgggtagatgggccggtccaggcagacgggcgcgaagagcgagcagaggaagacctgggtgccggcgtggcagttcttgttgagcaggggcacccagctgctggcctgctgcttcacctccgccatggtctcgtgctccagcaggttgggcagcaccatcttcttgtagcccacgttgtggcacagccgcaggtccgcggggatgtccacgcactgaggtggcttggtgtagaagcgcccgctctggtacgggccgatgtccgactggaagctcacgtagtcgtactcgctggccgagcccacggccagaagcgccgcgcccagcgccagcagcacgcccagggctgccccgcggcggcccccctcgctgcgcccgatgcccatgccggctctgcgccctgttctccgcgacgtcggggctgcctccgccgcctccccgcgcgcgtcctgccgcaaacttccagggacctccggg

SEQ ID NO: 135573 - DNA, 550 bp, Homo Sapiens
tttttaaatgtttcaaatctatttttaatgttgcttgttgaacattaacattttcacacttccagaaatgacattaataaaaatataaacaaattgatataaaaatctgtgtagactaagctagaatttacaaactcttaataaaaggtgtatttaagctttctcaattatgggacaacaaataatagacttcattgcttcatactaaaatggtatttttgactaatcacaaggaaacttaaactaccatatagttataattataggtattcagtccaaagaggaagaaagttttagtgttactataagaagctgtatctctgaaaatgttagctccataagtgtaagcactcccgaagattataagataataaaatatggaaacaggcaaactctggggcgatttaaagtttctaccacttcctaatgattttctttaatagaatcattcgtgctaagtggataaaagttacaaattacaaaagaaagatacagaatacatccaataacaaattaatcagactgaggaacatttagtgtaaaactggct

SEQ ID NO: 135574 - DNA, 440 bp, Homo Sapiens
caataggaaaagttatttactatcctgcaatagttaaatgtacactttgtcctatagttaaatgtacactttgtccgatggcaaatagcatgataagtgggaagagagcacatttaagaactaagaatttggtgtgggaatccaagctcttctatcaactggcagtaaaatatatttgaggagagtttaaggcgtatgagtcgtcttaccaacaagtaattatgagtttagattttatttgaactatctctcttgtttgtattttataaagtaatggtgtgttaagcgcagtgcaccaaaatgtaactaagacttagtagcacctaggactcagatcttggtttttcttacaacattcgcactgaaaggaaccctggctctttggaaaaatgtttgattccaaggatgggattccttatgccaaaggaaggaaatgctta

SEQ ID NO: 135575 - DNA, 1111 bp, Homo Sapiens
attcacgccactcttcttcttgctgttgctgttgttggtgttgccaccaccagagctcatggtgctgccccctgacatcttccgtttccgccgtttgctagggctgctgacgtgtgggctccgcagggggtgctaccatgcgctgccacttctggaaaaggcaggtcttgaggcagtcgcgggggctgaggctgtaggtcttgtggcgtgacatgagctcttgcatgggctcgagtatcacacagagtcggaggtagttgagagtggaattggacagcccacaccgagtgatgtttttggagagctgatccaacatctgggggtcttgggcatgcatggcaaggatgctgcgggggatgagctctcggtgctgccggatgctgaagtgccacgtctttatccgcatcatgtcgtcaaacatgaactccaggtacaaccggccctccacacacacctgggtgaacatgggcttgccatgctgggtcaccatgctgccctggtcacagtcgagggacacaaagttgctgtggaatgcctccttggggtgcttaagaacatagtacagctccgtagcacccccctcaaagatgctgcggaagtagcgtgggatcagggtccggccaatggtatatctctttggtccatcctccaggcagaaagtgatggtcaacatggcatcatcctcaaagaactcagtcgtgaatgcatcccaccagagattgtcacactcctctgtccagttctgaagccgtttgttaagctcaaatattctgtagtcagtttggttgccatatggtgtgtgcctcccaatccctggctccaggtatgtaggcggatacatgggagttgggcccacatccctatccagcatggtgccgggatggaaggggggaaaggcgttgccgttcgggggctccttcggcgagtacagcttgaatgactttgaggaacaacctgggagaactgagggggccaggagaggtacgggggagcgactgcaagcccagaggagtcctggcaggggtgagggctgacggggggacaacttcagcagctcatgtcccgagtgggacgggcaggcccgactgggagctccagtccgccggccgca

SEQ ID NO: 135576 - DNA, 517 bp, Homo Sapiens
aacatgcctacccgcccttcttattttgacagttcacattatgccttcctggggaacagctgtgggtatacactgggagagaggatgggaatccaaccccggtgccaatggtgttccacatccagctgggttgctgacctgggtgaacatgggcttgccatgctgggtcaccatgctgcgctggtcacagtcgagggacacaaagttgctgtggaatgcctccttggggtgcttaagaacatagtacagctccgtagcacccccctcaaagatgctgcggaagtagcgtgggatcagggtccggcccatggtatatctctttggtccatcctccaggcagaaagtgatggtcaacatggcatcatcctccaagaactcagtccgtgaatgcatcccaccagagattgtcacactcctctgtcccagttctgaagcccgtttgttatagctccaaatattctgtagtccagttttgttccatatgcacccagtgggagccgagacctctagatcacca

SEQ ID NO: 135577 - DNA, 501 bp, Homo Sapiens
  misc_feature (435)..(435): n is a, c, g, or t
  misc_feature (438)..(438): n is a, c, g, or t
  misc_feature (490)..(490): n is a, c, g, or t
aaaactcgggagaggacgggttgtcactgcacgaacgatttctcggaagccgctgctcaccaacgtctagtatttctccgtgtacgcgtccctctcgcgcaccagcctggagatgtcctgcttaaggtggtcgacttgctgcagcagctggttcttctccgactccaggacgtgtctctgctgcaccctcttgaagcggcaggacttggcatagccgcggtttttcagggtccgcctcttctgcttcagccggatcacctcctccttgctgacgccgcgcagctgccggttccagctcgcgcacagacatggtcaccagctgctcgtcggagaagcggtcgtcgaagtgcagggcgccggcggcgtggtgcgggtgcaggcgccccccgccctggagctggtggctgttgctgatgagcgcctcgaccgcgtccntcnggctgaagcccagcgcctcggggttcagctgctgcgggtagccggtcatccnagtagtagtcc

SEQ ID NO: 135578 - DNA, 534 bp, Homo Sapiens
ggatactctagagcggccgcggcgatcacggcggacaccacggcggcggcggggcccatctcctcgccgctgccgcccaaggaggcgccggcaccggccccggccgccgcggccagctgctgcgccccgcgcgcgtagccatcgaagccgccctggagctggtggctgttgctgatgagcgcctcgaccgcgtcctcggggctgaagcccagcgcctcggggttcagctgctgcgggtagccggtcatccagtagtagtcttccaggtgcgccttctgctcgctgcccgagcccgggctgggcgccgagaagctgggggaagggggcaccgagctgcacggcgtgctcatgggggtggaggacagcgagcccccggcgatgagacggccgcactggctgatgatgcggtcggtctccaccggttcctttttcacttcaaacttcatcagatcgaagtcattaacatattccatggccaggggactggtgggcaggtcggagttgctcattgccagttctgatgccattctcctg

SEQ ID NO: 135579 - DNA, 843 bp, Homo Sapiens
  misc_feature (306)..(306): n is a, c, g, or t
cggggtttttcagtggaagaacctgttgggtggaggctgacaatgaggtcttgggagatggggaacgggcccatggctgggaccatccgggctcttgcagaagagggagggctgagtctgtttcttcggacaccttactcccttttggtccagccttttctttgggtgatttttgtcttttctgagctccaggagttgcctctgctccttcagttttgacagtgctgcttgtggagggtgcaggtgaagtagcatccacttccttcttcctctttcttgatagggctggtccttttactttaactntttcttttttaagagtttcagccaggtcttcaagcgttggtatatcttcgaaaatttttattagtttgcccaaaccagcatcacctcggaacttttcttccatcaagtcagcaatctgaattttgtcatactcttctctcatttttaaattaagttttaaatcgttgctcagtaaggacttaaccattctaaaatgataatcattgatgacctctaatccttttagtagaacaatgttcttgtatttttttcccatctttacagacataagtgagcctcactggaaattttttcaacagtagtccagatcttgagatcttcagaaatgcaggaatcaatgcttatttgtgtgaggggggagataaatcagtaaagttcccagaaacggaaccgcaggatgttgtaatctccagaaacgctaagaaaatgaagtatctgcaaagataacaaggaaaaaaggccttggttgagtcacttagttagctgactagtgctggcttgctcctattctgctattgccccagagaaaatggagtt

SEQ ID NO: 135580 - DNA, 872 bp, Homo Sapiens
  misc_feature (751)..(785): n is a, c, g, or t
tctttttgtttcagtctttcttcagttgttttttcgttgtctgattccatgtgttctccttgctcctttatctgtgagatgtttgctttgtggtgcatgcaggtgtagctggatacacttctttctgtttcgtctttttagtatgtgtttattcctttgatcttgtatggattcaatgtttatttgctacttttaacttttctcttttaagtagtttcatcaaggtcttcccagtgttggtatttctttgaagaattctattatgtttgcccaatccggcatcacctggtaacttttcctccatctagtcagccattctgaattttctgtcatactcttctgttcatttttggaattatagttttttaatcctttactcatgtaatggacttttacatttctaaaatgattatcattgatgacctctaatcctttcagtagaactattttcttgtagttatttgccatctctaaagatataagtgagccttactgggaatttctctccacagtagtccagatcttgagatcttcagaaatgtaggaaatgaggattgttttgaatagggaaatcacgtcagtaaagctctcagaaactgaaatacaggatgttataatctcctgaaatgctaagaaaatgaagtattttcaaagacaacaagggaaaatggcccttcttagagtcacttgactagtgctccccggccgtaatggccgaattcccgggcatatgtccggtaccgtcgactgnnnnnnnnnnnnnnnnnnnnnnnnnnnnnnnnnnncggccgcttcctcgctcacaacatcgctgcgctcggtcgttcggctacaaagagctagcgccctatagtgagtctatacattctttt

SEQ ID NO: 135581 - DNA, 434 bp, Homo Sapiens
accgtgtgcttgtaaactttattttccatacagtagagaaacatacagtacaagcaacactgggaatccatttacagcaaagctcacaaatgccccttgagacacactcgttccctggatgagggggtggtgcccagcagcctgcatgcctctgggcggtcacttccatgcgagcggctgctgcatcccagagctgcgtgggaaggggaagccggctcagtcctcacaccccgcagctccacgtccactgtcctctgcaggctgccccatggccgccttggggaggagaagcttccccaggcagcagccaactttccacgtgctccccgcggcctcctgcctgcctggggaggaaaacctcatggcagggcggggctcaacttcgcagccagggggcattcactcaatgcctgctttgggctggaccccacccc

SEQ ID NO: 135582 - DNA, 467 bp, Homo Sapiens
  misc_feature (245)..(245): n is a, c, g, or t
ttttgtgcttgtaaactttattttccatacagtagagaaacatacagtacaagcaacactgggaatccatttacagcaaagctcacaaatgccccttgagacacactcgttccctggatgagggggtggtgcccagcagccttgcattcctctgggcggcacttccatgcgagcggctgcatgcatcccagagctgcgtgggaaggggaagccggctcagtcctcacaccccgcagctccacgtncgactgtcctctgcaggctgccccatggccgccttggggaggaaaacctcatggcagggcggggctcagctccgaagccatgggggcattcactcagtgcctgctcttggctggaccccagccccgcaccgcaaagggattcagatgtgacctgtcctccagggaccccaggctggcaggcagcagccctggccctacagcttggcctcgtgccgaattctt

SEQ ID NO: 135583 - DNA, 189 bp, Homo Sapiens
tttatttttctattaatctttatttatatgatggttctctggaaagcacttcattttaaaacctgtttctgagataagtagcataaggcgcatttgaagaaatactattgttgtatcacagagaacttccatgccttgaaatcatttttttcagagtattattaataagatggtctagctatgcagagc

SEQ ID NO: 135584 - DNA, 453 bp, Homo Sapiens
ctggacagcattttttaataggctatttcctgggccaggatgaagacttgttcactgcctagattttgtgtaatctgattatcccatgtcctagcaaattgccttacagcacccaaatcaaatacacccatttttttggtaaaatgccactctaccattaatgttgaatctaaatggttctataaaacctgccttatacatccatgctcctagtgactcaatttcctagtgtatcttactttttgaccatgaccagcagtaaaaaatttacatcacgatttgctacacttaatgcatatatctatgcacagatctatactgcaatgcaaaaatgcaccatcacaaaactgtaggtgacgtgcttagatgttctaatgcatttcattaaaaaattgcaatcacccacaaaaactgatttcaaaccctgcagtttgaaagacaaatgctaccctg

SEQ ID NO: 135585 - DNA, 481 bp, Homo Sapiens
cagcatgagaagctggctgctaagatgtcactgggggtcactaaagctgaagcctgaaggaaagcctctcattgctgtagagctctccctgcctctctctctgggggcgatggggaaggtcaggagtccagcccattcccagggtgtgtgggatagcgattgcattttccttttgctctggagtttcactccccttctgggtcccaagggcccaatggcctgacttttagaattgcttgcaattggtgttttctcttgaatttgggggctgccatttaaagccaggtttccatgagctgaagaccagccattcaagaatctgaaaagtagacaagaggactccagttgcctcaggttggttctgctgtgctctggaaagtaactgcagccaccaggtatgaaaaggagcctggtggggagaccactgcacccaaaacaaatcctttcttcttctgagaatgtgactttttctggtgttgta

SEQ ID NO: 135586 - DNA, 1241 bp, Homo Sapiens
  misc_feature (477)..(486): n is a, c, g, or t
  misc_feature (1093)..(1127): n is a, c, g, or t
  misc_feature (1199)..(1199): n is a, c, g, or t
tttattccatacatagtattacttatatttgtatataaatacacacaaaaagtattttagtcaatgctggttaattaaacctttgctctaatttgaataataaagtttatgttgtagtcaccttttattgagaatggtctctgccagaaattcaagattcctgaattcatacaaagttcaaatagtatagggcaagcttaaataattggtacagtatttcctgtaagagtagctatctatataaattgctagagtgtcatctcaatatagtacctcaagactgccccaacctttactcaattaataattattaaaactcatcactaatttcctgtaaggtttaaagaatgcatacaagatatattagcacaaacacatttatttattaaccaaagggatgatcctaattaatccaacacactttgaaatagctgcatgtaaaatgtttatgataaagataattgaacacagtaatgnnnnnnnnnngaaagaaacagtatggagatttgctcattgaactgagcttggtcattctcttaattaactcctgtccaaagtgatgatggaatttttattctactttttcatagatccgagtacaggtgacattgttcatgacacactccaccactaatttcccatctttcaattttcttgttattgtgctttccttcccatcccactcctgatgctgaaccaatgcaccatctgtaaagttgcagacagtctgagtttttctgccatcagctgtggtttcttcaaacttctctcccagggtacaagaaaactgtgttgttttcaaagtgctctcagtttttatggtgaggtttttaccatcacaagtgatgatacaatctggcttggccattgcgcccatttttcgcaaagctattcccactcctagctccttcatgtattcatcaaagcctttgctgtccaccaggcgccatcttccttccagctgctgaactgtggccatggtgggtgcgggcgggctggcgtgcagagaggggtctgcgtcggcgtggcagcgtgctgtgtccccggccgtaatggccgaattcccgggcatatgtccggtaccgtcgactgnnnnnnnnnnnnnnnnnnnnnnnnnnnnnnnnnnncggccgcttcctcgctcactactcgctgcgctcgtcgttcccgggcttgatttaacaggcccgcggaggcgnccctcttattgatgtggaggttctgatttaaccaaaggttgg

SEQ ID NO: 135587 - DNA, 1143 bp, Homo Sapiens
  misc_feature (40)..(40): n is a, c, g, or t
  misc_feature (830)..(830): n is a, c, g, or t
gcccctgacggcagaagagcccagcttcctgcagcccctngaggcgacaggctttcctgaggagtgtgagtatgccagccgagacagcccacatctcttcaccccaccatgagctccggcggccggtgctgcaacgccagacgtccatcacacagaccatccgtaggtggaccgccgactggtttggagtgagcaaggacagtgacagcacccagaaatggcagcgcaagagcatccgtcactgcagccagcgctacgggaagctgaagccccaggtcctccgggagctggacctgcccagccaggacaacgtgtcgctgaccagcaccgagacgccacccccactctacgtggggccatgccagctgggcatgcagaagatcatagaccccctggcccgtggccgtgccttccgtgtggcagatgacactgcggaaggcctgagtgccccacacactcccgtcacgccgggtgctgcctccctctgctccttctccagctcccgctcaggtttccaccggctcccgcggcggcgcaagcgagagtcggtggccaagatgagcttccgggcggccgcagcgctgatgaaaggccgctccgttagggatggcacctttcgccgggcacagcgtcgaagcttcactccagctagctttctggaggaggacacaactgatttccccgatgagctggacacatccttctttgcccgggaaggtatcctccatgaagagctgtccacatacccggatgaagttttcgagtccccatcggaggcagcgctaaaggactgggagaaggcaccggagcaggcggacctcaccggcggngccctggaccgcagcgagcttgagcgcagccacctgatgctgcccttggagcgaggctggcggaagcagaaggagggcgccgcagccccgcagcccaaggtgcggctccgacaggaggtggtgagcaccgcggggccgcgacggggccagcgtatcgcggtgccggtgcgcaagctcttcgcccgggagaagcggccgtatgggctgggcatggtgggacggctcaccaaccgcacctaccgcaagcgcatcgacagcttcgtcaagcgccagatcgaggacatggacgaccacaggcccttcttcacctact

SEQ ID NO: 135588 - DNA, 495 bp, Homo Sapiens
tttcagtgtgtggtggctttttattactggtgtggagtgggtgtgggggcaggcaggagtggtggctcccacctaggccagctccccatttccaaacaggagctgcctggggtgcccaggagggcccgggaactgggggagtgcaggccggaggcaggtgcgagcgaggagcagatctttggtgaaggaggccaggctctatttccagcgcccggtgactttagccttcccgcgggtcttggagactttctggttatcgttgatcctgtttcggagaacattgatctcatatttctgctgcttgaacttctcctgcaggtcgaacttctctgcctccaagttatagatgctctgccacagctccttggccttctccctcagctgatcttcattcaggtggtcaatggccagcaccttcctcctctcagccagaatcttcttcttcttttcccgctcagtctgcctcttcccacttttccgctctgggcctgcttc

SEQ ID NO: 135589 - DNA, 1067 bp, Homo Sapiens
cagtcgacggtaccggacatatgcccgggaattcggccattacggccggggtggatttccagtgtgttcgaagcaaatccctcacgaatctggtagctgctggagatgatgtcttggaggaccaggagatattaatgcatcacccaccccaagtggatgaacttgaccggctaaatgccccactttctcagatggcttctaacgactttcaggattagggccagctgtgggtctactccttgttggagcccatctcacctgggatgcctgcagccagccctccctcgtgatttgtctcaccttgagtaggagacatgcttctcccctaaccttttcctttctgccataattaacatatgtccttttcagtaagtccatgcctctggcaggggatgaagaagtactcactggtaattagctaccatctttgcagcagccctggtaacttgaaaaatttgggtctggtgctgttcattgagtctttgtgtaactgcaaaagcaggaaaggaagtcaagactcctgttgcctcgtgcttagcaaagcagtccttatcctttatactctgttcttgggttttgtttttgtcttgttttataccaggcaaattgcttagtagcaaagggaccaaactgaaaaggtgacaatctctaacttctaaaagcagacaccaatcggatgctcattagaggttaatgaagatgccattcttggtggcctctgcacccaaattgcatctggaaagaactagggtctcattcagaatgtccaaaaggaaattcttaagagcttaaattcagtgccacttcttgccatcactttgcaattattgaaatgggaatactgagctcagaaagcaaatatgatgctttcatgggagatggagccacatttgtgttctgggtgggatcactagtgcaggagaacattacattttcttctgaaggcaaaatgcttgtaggttttgcctctactttgtatttacttttaaaattgcacttgttcacctaccagtgtttacgaaatcctgtatttgggatgctttttctataataaaatattataattt

SEQ ID NO: 135590 - DNA, 334 bp, Homo Sapiens
tttacaaattataatattttattatagaaaaagcatcccaaatacaggatttcgtaaacactggtaggtgaacaagtgcaattttaaaagtaaatacaaagtagaggcaaaacctacaagcattttgccttcagaagaaaatgtaatgttctcctgcactagtgatcccacccagaacacaaatgtggctccatctcccatgaaagcatcatatttgctttctgagctcagtattcccatttcaataattgcaaagtgatggcaagaagtggcactgaatacattactacaaacccttgacttaaaatattgagacagggtcttgccctgtcat

SEQ ID NO: 135591 - DNA, 576 bp, Homo Sapiens
gcggccgctgctgccgctgcaaacagtgccttgaggagaggaaagcggggaaccgtgttttcgccgcctctgtaaccactgcacacaagaaaaccagcttctgggagagggggatgattgttgggactttgcgaattacctaaacagcccagggccgaggcgccgccgctcgcgtcctggtcctcctgccgggtgtggggctcccctgcccgagatggccagcgggcgcgccgagagtatcctggagccatctagtcttgcctcggaggcggggtgggcttatttgtgcggagaagaaacggatctcttaatggggtgagatttttcctccgtacattgttcccatttccgcagtttcacttggcctcggttttctagcagagtaatcaccaaatgaaattagctggagagcgtttgatggcgcagaatcacggtctgaagatgtttacgctgtatgccggacgcgtttgatggtgttctcttcggcacaattaattttgcaaagttcagaaatgtgccagacagagcccctggcacgcagtcaggactctacagacacaccttgagtaggaaaca

SEQ ID NO: 135592 - DNA, 439 bp, Homo Sapiens
gaggtggccagagccctcttgccactggataaacaggcccttggtgacatcccccaggctccccatgactctcctccagtctctccaactccaaaaacccctccctgccaagccagacttgccaagctggatgaagatgagctgtaactggtgaaaaccatgggggtggtgctgactcagccgcctattccccaaggagcttcagggcagtccttctggcactgctccagaattcctccttcttggtgtgtctggagggtgggcaaggctgggagggatatcaacttggaggagaacacctagacccaaggacttttttctgcccaaggaacacagtttccttcagctcccatccctatgcatgcatcatggtccccccaaaaggaggatatgtgggtgggtgggagggctggggcaggggccagatagaaattattgg

SEQ ID NO: 135593 - DNA, 1176 bp, Homo Sapiens
  misc_feature (175)..(183): n is a, c, g, or t
  misc_feature (379)..(380): n is a, c, g, or t
  misc_feature (387)..(442): n is a, c, g, or t
  misc_feature (446)..(446): n is a, c, g, or t
  misc_feature (448)..(449): n is a, c, g, or t
  misc_feature (1033)..(1067): n is a, c, g, or t
  misc_feature (1071)..(1111): n is a, c, g, or t
tattccgcggtgaggcccaaaacattttcgagagcgcccgaccgacgcaaaaacaccaggcaaagcttgtgcagccccctttcattccccagtctagaggtgtttttataattcccgcgccgagaaacttttaaattttatgttaaaagaaagtttgttcggaaaatcagttctnnnnnnnnnagaagaaaaggggttcccttaaccaaaggtcgccccaagcggagggaggttttgtcccgggccgggccgtctgaaaaaagggggggcccagggccaaaacctgaataaaaggcgcccctttaagggggccgcctttttgccagcaaggtgggggtccctgtaaccttttccccccccggggggcctttttggttcnnccccccnnnnnnnnnnnnnnnnnnnnnnnnnnnnnnnnnnnnnnnnnnnnnnnnnnnnnnnntttntnntttttcagagggagcagaggcagctgcctttattgggggccatgggctggctgatttcagtcaaaggccacacatttgatcttgaagtcaccgtcagctgccatgtagttgatggcctccaggttgaggcggttggggaacttgaattcgtatccatctggcagcttgacggtcaggttggcctggtcgaaggtgatgcacacctctgcaacacttccaggctggaagggaaagacagcctcccgctgctcggtcccccaggccccgccgtccttgctgttgcacacgatggtgttggcgtcgccgtgggcgttgaagcgagggttgaagtgcaggcacaggttgttgctgtctttgcccaggttcagcacgaagctcttagcgtcaggagccacctcgcctcgcactcgaaggcactctccaggtttgagattcaggttgctggcgaccagaccacaagccatgattgagtccaggaggatgttcccgggcaggcgcaccagctgtcagaagactccacccgagagagatcccccggccgtaatggccgaattcccgggcatatgtccggtaccgtcgactgnnnnnnnnnnnnnnnnnnnnnnnnnnnnnnnnnnncggnnnnnnnnnnnnnnnnnnnnnnnnnnnnnnnnnnnnnnnnnggaacggcgagctagcgccgtataggatcggcatatgggccagcgggccaggcaaggaggaaaaa

SEQ ID NO: 135594 - DNA, 1062 bp, Homo Sapiens
attttctcggctgcgctctgccgccgcgtgttgctctgacccgtccctgggtttgctcgcgcgtcctcgggtggcggttggcggggtgccgccctcgcgtagtgggcttctcggtttcggtcttgttgttgtccgcgcctgggttgggcttgcgcgatcggcgggtgtctccttgtcggtcgtgcgttggcgggcctgctccgtggggctcctcctgctgtgtttgtgttgactgcttcgtgctcgtctgtgtgcggccgtggttttgtgtggcgtccgcccgtgtctctgaggtgtgtctgtctctcgtgtggttctgtctgctccttgtcttctgctgtactctgcgtatgtgtgtgctgctcgttgtccggcgcgcttgttttgtgtctgtcgctcgtgtgactgtgttcttgtttctcggtttgtttctgcgtttgttctttttgtctgtgttttgtcagagggagcagaggcagctgcctttattgggggccatgggctggctgatttcagtcaaaggccacacatttgatcttgaagtcaccgtcagctgccatgtagttgatggcctccaggttgaggcggttggggaacttgaattcgtatccatctggcagcttgacggtcaggttggcctggtcgaaggtgatgcacacctctgcaacacttccaggctggaagggaaagacagcctcccgctgctcggtcccccaggccccgccgtccttgctgttgcacacgatggtgttggcgtcgccgtgggcgttgaagcgagggttgaagtgcaggcacaggttgttgctgtctttgcccaggttcagcacgaagctcttagcgtcaggagccacctcgcctcgcactcgaaggcactctccaggtttgagattcaggttgctggcgaccagaccacaagccatgattgagtccaggaggatgttcccgggcaggcgcaccagctgtcagaagaccgacgcgtgggtcgacgatatcccgggaattccggaccggtaccagcctgctttttttaacacgggtcataggtcacaagtcaggatgcgc

SEQ ID NO: 135595 - DNA, 1171 bp, Homo Sapiens
ggcttgatggagctgtgagtatagaggtttgagtgcgaatagtgaggttgcacaggagtgggagtgtaaagtgggtgtagaaagtggtaatgggggtggctgtggttgcagcttgcgtgtgtagagtggtgagcgtgtgtggaatggcgggggagcgtcgtctgtgttgctgtagggggggtttgtcacccgtgggtcaagggcgtggtgagtggttgggggtagtggatgttgtgtgccctgggggagcccgtgcggtctgttggtgtaggggagccggcggaaggatagtgtggctgtattgatggggtgtgagtgggaaggggagcgagggtaggatggatggattgtgttgggaggatcgtgaaggagaggatgcggattatgggctcgggcgagaatagggctgttgtgggaatcttgttggagaatgggtagcggggattcgtgtcgttgtgtttggggagttcctgggaacggtggaagcgagcctcggtgtaggaacgtccgtagaagtggccgttgctagtgtgccagagcagggtgcgtaataagccagcgctcgatgatgatcgtacctgcgctgcgctcctgtggagtggagtgaccgctgcgtgagcgcgcgcttccgtctgtagcccatagatggtcggtggtgcattcgcgtgcggagtgtagtgttgctgtaatgcgcgacgagtagatgctgctagaatagcatacgatctctactgagcgagaccttgaatatgttctggaacgagacctagaactgtatcgcttctttctagaatgagatctgtgatcttgatcgagaactagactgtgatctagactttgagccttgaagaatgtgatctagaattggagcgacccatttcttttctccttggttttatgcaggatcaagaagtcaagtgaagtctttgagatactgtaaaaattcttcctggagagaatgctctgagaaattaaactctaaattcgaattcctgacacgccgaatcgcggttccgggaatttatctccgttgcaacctactacagcggccatttcccgactcaagaacgcgtacgcgtgggtcgacgatatcccgggaattccggaccgtaccagcctgctttttttaacacgggtctataggtcacctatgctgttgggaggggtgaga

SEQ ID NO: 135596 - DNA, 1621 bp, Homo Sapiens
  misc_feature (236)..(248): n is a, c, g, or t
  misc_feature (262)..(262): n is a, c, g, or t
  misc_feature (396)..(396): n is a, c, g, or t
  misc_feature (424)..(424): n is a, c, g, or t
  misc_feature (454)..(454): n is a, c, g, or t
  misc_feature (510)..(510): n is a, c, g, or t
  misc_feature (519)..(519): n is a, c, g, or t
  misc_feature (532)..(542): n is a, c, g, or t
  misc_feature (594)..(602): n is a, c, g, or t
  misc_feature (646)..(646): n is a, c, g, or t
  misc_feature (737)..(737): n is a, c, g, or t
gagaaaatctagggcgcgggggggtgcgtttccttcacacaaatattttatcttaaatagagtggtggggcgcgccgcctccacactttccacgggggggcattccccccggtttcgggaggggcggcagcgcgagggtgttgttttgggtgggattatataattggcgcggtgtcttttttgtctgttggagaaaggaacccccccattgttttgccccccctctctggcggggnnnnnnnnnnnnncgcagcacggggtngggcggtgtaagggcccctcttctcgtggatgaaaaatgcccccggggcgccccaaagacatccacaaaaaagcctcccctcttccttgttggggtttgtaggggtataaaataggcccccaatgagaaggcgnttctttccattttcccttgggaaatttnggaagcaacaaaaggatcccggcgcgggcntcacagggaattttttggcgtcgtttcgcccgccgcccgggggttgttgaacctcnccaatcccnggtgggggggaannnnnnnnnnncccctcaccaaggaagaaataaccgaacaactttccccctcctctaacggtnnnnnnnnnaggtcttctctcaccccccccggttataaagttcaataatgganagtggcctcgccgggggatttgtacactatatatattaggggcgcgggcgggcttctcaaaaaaattatcctcacgcgcgggttttatttntggccaaggcccggaagatttccactgtaaaaaatccccggggtgtttaaccctggcggcttattctgggaaatatttattttcgccttcccccttataaggggggagccggggccaggatattaccgccccttgtctccaagagaagagttgggttccgggaaacagttatttggccatggggcccattttcatttccttcttttttccgcccccacgacgaaaagaagcctctgaggttttataaattgtgcgttcttccttgcttgacgagatagaagggactggtatgctttcttttttttcagagggagcagaggcagctgcctttattgggggccatgggctggctgatttcagtcaaaggccacacatttgatcttgaagtcaccgtcagctgccatgtagttgatggcctccaggttgaggcggttggggaacttgaattcgtatccatctggcagcttgacggtcaggttggcctggtcgaaggtgatgcacacctctgcaacacttccaggctggaagggaaagacagcctcccgctgctcggtcccccaggccccgccgtccttgctgttgcacacgatggtgttggcgtcgccgtgggcgttgaagcgagggttgaagtgcaggcacaggttgttgctgtctttgcccaggttcagcacgaagctcttagcgtcaggagccacctcgcctcgcactcgaaggcactctccaggtttgagattcaggttgctggcgaccagaccacaagccatgattgagtccaggaggatgttcccgggcaggcgcaccagctgtccctcgtgccgaattcgccacccaggcctcgctacttaggacgtttaagcccttgtccttttctctggtgggggggg

SEQ ID NO: 135597 - DNA, 496 bp, Homo Sapiens
tttttttcacacatataaacaagtttattagattgtcagtgatactttgagacaaattcaagttatttcattttacttcatataaacagaggaagggaggaaagttttaaacttcaagctttgttcagcatgtgtgcagttagcatccacaaaagcaccattgggtatgggagaattagcaccacagaattttaggacctaactgttaacatgcatcactgaaaaacttggaacataaaaactgaagtagtacgtggtatggtctattataaacaatacaaggcaatttatgatttgttctcatacagtacaatacaatcacaataaatgagaaccttttaagaacaatacgggacaaaaaccaccttgcaccctgttaacactaaagcagttacagatttaaaaaaatgtttctggtaagaggcagtgggttgaaattatccctcccccctcaatttttaaattcagagttatatagttacatgatctcttaaga

SEQ ID NO: 135598 - DNA, 525 bp, Homo Sapiens
ctgaattaagaataaatttattaggaaattattagtatagttagacagtatccagcaaaaaaggttattttatacctctacttttccaaaacgaagaaacctccccacaaatcccatcaacacacagtcatgctggaaggcattctgtcttactctgttggtttcatgtaaatgtttggggtgactcattccgcctcttcttttctcaagttccaggcttcttgggtagaccaaaactaatacacaatgttagagcacacaagagacccattctaacaggcttttattaccttttcttcggagtcccctggttgacaggtaattactccatctcttgatccccctgcaaatgttgccttacaatttgcaagccaagagagtgtggcctctttcctgttgttgtaggtatccaaatattcttgcagttctaacacactgaacttgagcttgtccagaagtccacatgaaaggagagtctcggcatccacaaaaagtgtaggacattcagagcaggaggtgagcatc

SEQ ID NO: 135599 - DNA, 225 bp, Homo Sapiens
agcagttagcacatctgggcctaccttcagcttcttcatttacaaacttctgaccttttgacactaaagctgctcctttatctttctgagtctcagattgttcatctgtaatctggagttgttaattccagtccttactaccttttagagttggaatgagatggaaagtagatgaaactactttgaaaattacgacagttaagggctgggtgcggtgtctcacac

SEQ ID NO: 135600 - DNA, 698 bp, Homo Sapiens
  misc_feature (591)..(591): n is a, c, g, or t
  misc_feature (605)..(605): n is a, c, g, or t
  misc_feature (670)..(670): n is a, c, g, or t
  misc_feature (683)..(683): n is a, c, g, or t
ctttactgaactaaagacatgcctggataaattacacacagttaaaggagagaaaattagggaatgtgatatttttgctaacaggttgggccttatttataatgtagtgtcaaggaaactcctagcgtcgcaacattgggcagggtaatgacaaaacatcccagcagacatatctactatcttgaaacccttctagatgtcgagttatacatttagtttctattagtcaaaaagaccttggagacatttccttcattaggtggcaagaaagaaaagatggagaaaaggataaacttaatataagaatccacagagcagtagtttgatagatatctgagaatagtaggaaaaaaattgggtaatcccaaaataaatcagtgatttcagtatgaagttttctcaacataaatctgctataattaaaaattacaggccttcaggaagtgtcgagtctgggacgcccagcgcgggcccgagcagggggaagggaagcgcagctcggtccgcgtgggtggaggggacgtgaagccgccctgagatgatggttgaggaagggctctacggctcccaagctaggccaaatgcctccgngggcgcgccgggcncctttcccctgtgggcaaaccctagcttgggacgcgtgaaccacctccgtagctgccccaccagnacccccagccgtnggccctggaccatgc

SEQ ID NO: 135601 - DNA, 791 bp, Homo Sapiens
tttatgtattatatatacagctctatgtataaacactcacatagagggagtgtatagcttttaattgggccgtcttctcaaaataattaagccagttttaatgaaatactgtttaaggctgctggcaagcaaagaagccatctttagcagagcattaataaactgagtcattcgcacaagggaatggctagctgtatcagtcacattcatggtgctaataaaagagctcagttctctgtggcaggccaaggattggagggccgggagggagcacagagcccagtcatctcgggctcactgtcacagacagtccttacggctgcagtggagttcacagtccgagctggaagaagggtctgcttgccctcaaaggatcccagcaggaatctctgtccatagaagagtgaggtgaccaatcccaggggctggtgaggtctctagagctccttaccatctgtgggtgacactggaccaggattgggaacacgggtgcaagcgtggccagagtttctccttttggtgtcccagttcctcgtctacagtgacaatgagaatctttacaaactggactgactttcaccaaagcgatgagatggacttgctgccacatataggtccatgccgatgagactggtgtagcagtatctggtgctccatcctccactcctttccaacgtcagtagctggctccaccaggctggctaaggagcgaggagaccatcacctcagaaagcagccccgctgggaggtccacggagcagttcgccgagctgtgcacaggccctttattt

SEQ ID NO: 135602 - DNA, 551 bp, Homo Sapiens
tttttggaacatttgcttttattccttccagacaaagacccacaaggggtcgcgcctccctggtggggacccggcagggcggagtctcccacaccctagggacacgcgatcttggtagaggcgactgtccactccttactgcacgccctccatcatcttcaggaactcgtcgaagtcaatgcggccgtcgttgttcttgtcgccgtctttcatcagagattcgatctcctcgtccgtcacgtgctccccggaggccctgaaaatctcagccagctcctccgggtcgatgtagccgtctgcattcctgtcgaagatgcggaagcactcggccagctcctcctcgctcttccctttcgcgtcctctttcatctggcgcaccatcatgaccaagaactcctcgaagtcgatggtgccgctgccgtcctcatccacctcctcgatgatggcgtccagctcctccttggtgggtgtctggcccagcatcctcatcaccgtgcccaactccttgacgctgatgtccccaccaccatcagcatcaaacatgtcaaagg

SEQ ID NO: 135603 - DNA, 1219 bp, Homo Sapiens
  misc_feature (724)..(732): n is a, c, g, or t
  misc_feature (1050)..(1078): n is a, c, g, or t
gtaatattcctttggattcagagacccacaactaccagattgtcaatcatgaccaaaagttgcttctcatcacttctacaaccccacaatggaaaaagaaccgagtgacagtgtatgagtatgatactagggaagatcagtggattaatatagggtaccatgttagggccttttgcagtttgactctgggctttattttgcctttgtgctcgtgtttatccttcctgccttgaacctgggtcagagttttattacttgagggaagatgatgcacggagtgagtctagtactgaatgggacttagatggattcagtgagctggactctgagtcaggaagttcaagttctttttcagatgatgaagtctgggtgcaagtagcacctcagcgaaatgcacaggatcagcagggttctttgtaaatagtattttgagacactaagatgtttctactgctacggaatgtatattaaacacatatcgtttctttttcttggaaaaaaagttgattaggaccacagatttggtttagaaagggtaatattttgaaatactacaaggtttagacagtccatgaaatcgacctgtttaataatttaccatcctgaaagtccagaattaaaatatggaagcaagaactatataattgattaggatgcttggtaggtttttttcattgttcaaatattcattgcacagtggattgttttgattagttagtatgcnnnnnnnnnaattaattcagtcttctgttaatttttaagttttggttagtgccacaaggaatttaactttttgatttgtataatagaaaactgaactaggaattgttagcggggttttgaaggatgtgtactttccttcaaaataaagtggtagattttcaaaattttacactagtcagttctttatattctaagttaaatgtagtttgtaaaattattttggttttcttctacaaaggaaaaaattggatttatatatataaggttactgcataatgatttcattttgataatgtgcagaatggcctcataagctcacagaaagtnnnnnnnnnnnnnnnnnnnnnnnnnnnnntcaggattccactgttttaaaagaaatctcagtttttattttggaatataaaatgtgtatttggtatatgtgaccaattttctatcccaaaaaacacccattcttagtaatgtcatgaattaaacacccttctaaaccaaa

SEQ ID NO: 135604 - DNA, 544 bp, Homo Sapiens
ccagattatttcttaaattgctctcccccctgctgggtgttctgggacacagacgccagtgtgtggggtccccggctttcctttctcccagagcagctggaggagagcctcagtttctccaccgcacaccctggcctgagggtagcagccgacccagtcgggggagtgggcctcctgcgccctcggaggcacaggaccgcggggccccaccgaggaccccctgaacggcagcccgccgcgaggcagcgtggggaccaaactgccgcgccccagagcccgccgccgcctgtccccgcgtctgaggtccgcaaggaagagctgcgggaatgcacgcccggggaagaggctttgtgaaccgaggctcggcgcgccccccacccgcgcccctcatgggcagccgggcccagcccgccgcccgggcccctctgggaagggcttggaggcgacgcggggggtcgggggaggagggagcgttcctgcaaatcacatgattttcccgcttatatccatcacagcttgtttttctcaaccagaaacaagactt

SEQ ID NO: 135605 - DNA, 946 bp, Homo Sapiens
tttttttatccagagagattaatacacagattaatacacaaaacttttgtaaatagcattccagttcaaagttgcttgtgatcatagccacgtgtgaaccgttagacaagtgtatgctatgccccaaaatgttttataattcttcagtgcagtttcttactgatgtttcccttaaaattaaggcttaatgaaagagaaatccatagtattatgaactgattttctttagcttctgaattaagtgcactctttccaaaatcaagtggtcctggagtaacgttaagacaacttgtattaatcagtgtcatgactgaagtagtatcttactggaggtcccggcaaatcttcatctccatcaatgtctggagcaaatgacacagtaagatccacatatttcttttcagtagtaggttttacaagtttatgcattgttaacttcaatctttttgcatgaccaggcattacaggaacataaagcattttgactccctgtaccaccattgttggctcaattccatacttctctttgactgcatttatgaaatccaagagggtgaaatcttcttttccatgtacggtccatcgatcccaaattgtaaatgatattccatttctgattttagttttccttacttcagttgtctctgtaaatactacaattggaatggctaagttaagaaaccaatttttgtaagcttcaaatggatagccaccagttactttgatcatctccaaggcaaccaagccagaaactgtagcagtggttgttgctatagcaggtataattttaccagctatgcgctttgttttgaaacggtcagctggttcaatgctgtacattttggcacgaagatttgatgcagctgtgatgaaatctatgtgtccattatgatcatcatctttttcaaatgaaagcactgccatctgaaggtcacctgattagacc

SEQ ID NO: 135606 - DNA, 1126 bp, Homo Sapiens
  misc_feature (171)..(179): n is a, c, g, or t
  misc_feature (306)..(322): n is a, c, g, or t
  misc_feature (331)..(358): n is a, c, g, or t
  misc_feature (363)..(449): n is a, c, g, or t
tttcttccaataaaaaaggccccgggcggggggggtaaattttgtatatatggagggctccccttggggcctccctcttgagatgaagattccccaataaaaacccctccaggaaaacccccacccgggaaattgtttttaaaaaccctttggggttccccccccgcgggnnnnnnnnnattggtggggaattcccaacgccctatttcttgggccccggtttttcttggggaaaccactttgggcccgtttttctttccttttgggggcccccgccccacaaggaatggttttaaaaattttttnnnnnnnnnnnnnnnnncgccaaagnnnnnnnnnnnnnnnnnnnnnnnnnnnnggggnnnnnnnnnnnnnnnnnnnnnnnnnnnnnnnnnnnnnnnnnnnnnnnnnnnnnnnnnnnnnnnnnnnnnnnnnnnnnnnnnnnnnnngtgctatgcaaggttttatttacaacttagatgactctatgattgctcagaatctgacacagactaataagtttcattgtctgaaaatactcataaaatacctcatctccaaaataattcaaatacataattaaatgaacgtttttaaaatgagagttttcagaaaggaaaattaaacacattttagtaaatatatgttttatttgtcaagagtaaatgtcagttttatttagaatattcaagtacaaaaaatgaaaatgtatatatctatgactgttaagaaatgttagaaatcattaaaatgttctgagaataccagtaaggcactgaatgcaaataccacctgaaatatgaattatgtgcatttttatatctttaatattcagatgttcatagttattttcttaaaaagtatttttaataaaatgattcaaccttattatttttaccctggaagacagagtttaaacaagtatgtaatgaaaagttttcctaatgaaagctgtgatacactcatgctcaaaggtactttatccttaggaaaaaatagcttatatatctggatgttttaacttttaaagatattttgtttcaccacagtaatacgtcagccataataaggcataataaagcatgaagtcatcatattaaataatctgacacaaaagcttaagata

SEQ ID NO: 135607 - DNA, 479 bp, Homo Sapiens
tgctgggctcaagaatgataattttattattaagcttcaagagtcacattgtattgtatgcattgaatatcacgaaatcgaaaacactgaaaagctagcgtttacattcttggatcatacccccaaaggccaaggattcccactggccgcttgcagcagggctgtctcctgtgaaggcaagagacaaacgaggagcgttatgacactttgctcccaggactttggcgcacagttcccatgagtccaggtccgtccagtcaacatcctgaagccaggactggcaggtcctgaccctccctttttgcacccgtaaggggaagggcccgggaatctggaccttgtctagagtcccggcgccagtaccagttcggagggcatcctggaggttgttactaacccgagcctcttccaggcttcccaggcaccagggttgctaacagctccacgggggcgaagaattttgtttattttgttaactg

SEQ ID NO: 135608 - DNA, 491 bp, Homo Sapiens
tttttaacttacatttttaataatattatttttaaaaaaacttggagctgggataagtggcagcagggaggaggggcccagagctttacccctctattaccagctgcctaggggaaggagcattcaacgaagccccgtaactttaagtccctaagggctgtgggtatagacaaccccaggcttgaaaggggtaaagtcagggggatgggaaacccacaatctggggtgaagatggaggcaaatgccctggggggtggtcaggacatgtctcagaggcccaggttccaagtaggcatccacatgagtaccccctccccctaaaaggctctgtagaggccaggcccagcccagggccactgggggggcaaatcttggcacctgcccccagagagtccagttcctccctgaagcgggtggatggaggctgcccattttagatgctcagtctcttcattctgtcttctgctccctggggctgtgaggggtggggc

SEQ ID NO: 135609 - DNA, 527 bp, Homo Sapiens
cactcttccctttgttggggttccccaggagcaactggaggacagtacgtctttcaagcagattttctatttcagaaccagaaagccctggttcaggacctgttggttgactactaaatgctttattttcttcaactgcatttgttttatttgagagcaaagggctatttaatctatcaatcatacctatcggtttatctgtgtttccagttaacagctgtttgctgggtctctgctcttccactgacatggatgactgcattccacattgtgctaaattttgtaacagcttactggcactaaacgttgcagagttctgtgcaccttcattttgggctggtttctctcctggtgggtctttgctttttgtaaggtccattgagtggttagatgcagtatttgttagcttttcagactgagtactgcagacatatggtggggaattccatttgatgacagagagtgttgagagagattgatgggagacgtgctttgcttgatgtaagtaagggtggagtgctcactga

SEQ ID NO: 135610 - DNA, 809 bp, Homo Sapiens
tttaattagattgcattttatttagataaatgaaaatttgccccaaacagaactaggaatcaaatattgtcttcgactagaggtaattgctaagctggaagcttatattgaaaactaaaatttccagcccttgactatctgtagttccaaacatcaaaggaaaatattggaacaatttatctatgtacagagagaggcaactcatgggtaccataagcaaaataacctgagggggaacatttgatattacaagaagtggtgagagtttacaagtcttgcattgctttctattgtacatggctctgtagtaatgccaaaaataacaaaatgtaggcacttgctctgacttctgcagtttacattagattattatgtacttcataaattaacagcagctttagaattataaaacagtattatatttcatgctactgttggtgttcttcttgttaaaataatgttctcaacggacacagatacagagcttgtacagaagtaactctgggcacatccagatagtacaaaaagcagtcataaagcagctactcatggaatcgcaactgtgatggccagcgagcacctggccacaggtggtaggaaaagacaaacgcgggtggaatttaaacaaaaacgtcaatttcccacaaactacacaaatctttaatctgttcaaaacagcacagaatgtcttcctgccatagagaggaagtcaatatgaacttgttataaattgctgtcatttccaaaactctttagttgatgttcagaactagaaaccagcacttggatttcaatctcagttaaccaaa

SEQ ID NO: 135611 - DNA, 1571 bp, Homo Sapiens
tttttttctgggcaaaactgcttttctggattgtttattatgtttaatcagcattgtggaaaatgcaacaatatctgttcatggacttgagaaccccagagtgggaacagcaggtgcggatgtggggagaagaaaggaggagggtctggagagcggccataggggaggcaagtgtgaggagccaggagtgggggccctgggctgccctagacagggacatgcgggcaccccgtggggtctttggcggctcacaggacaatggcagtggaggtctgctccctagagggcgaagggggcactgaattctcccccagtagcctcttctctgatccttcctcattcaggggctgggagctctggccacacaagtttcgaagacctactcccaaggaaaccaaggacacaatgaccttcaagacacagacagccaggaacagggcacggattgctgtgaacaacttcctcagcatctgcatgtaagctctacactcctccttctgccattggttctcttgacttcgccgcatccatctgtacccagtggtagggaagacagggtctgagcgatcacacacagtgtcgatgtataaaaagggttcagtttgccagatgaagctattcacgcagaggacaacagcagccatagctgtacaaagcctgccagggtgagcaggctggatatatagccagcagtttgcccggttgcttctcatggacatggccccagctcctgctgcgatcaccacagaccccgcccagaaggcacagcctgaggcacgcagcacagtccagggccccaagctgagacacactccaagaccacaactcacaacccccagcaatatctgagtcacccctagagccagctgctcataaccaatcctggctgtggaaggcacagtgtccccagggtgaaaaagaaacttcttcagagaacctccagctttcagcagttgtgtcaaagctgactcctggtggatgtggacgttgacgtgggtgggctgggatggcctagaggccatagcaactccattcacaatcaccgtgttttgcgtcatcctgcctccgcaccgcagcgcggtccttcacggggcaggggcggcgtgaacccgtcgggcgtgagcagcagtcggtggagcgggaggtcgcggtggcggggatgggggtatccggagcgcagccggggcgcagctgctggcacaggagctccacaggcagccaaggactcggtcctgtcccagagcctgcggactgtggaggggaggccgcaggaagagcccgggaggagggggtgaggggtcgaggtgtggggcgctgcttgacccagacgccagggccctgggaggaggatgagggggacagagcagatcttgggcgaaaggggaggttcccgcaggctctgtagtcgccgcagttccagcatggtcagcagccccctctgctacacacattcccctcgtgagggccaggggtgcggccctgtgaccagacagccattcattgggtgactttgaaccaccactggcccccctcgtgccaattaacacacccaggcctgcttacctagccta

SEQ ID NO: 135612 - DNA, 1116 bp, Homo Sapiens
tttgctttccaacttaatttttatttgggaaacaaaactccccaaacagaaaatttcaactatctccaaaatggattcattttctgaattaatatacttggtttcttaattgtacctcaaattgaaaacttcccttctgactatatgccaaacccaaaaccaaatggaaaatctccaacaaaaatacctacagtgccatcatcattcatcttcaaacatgatccaaagtcagccaggcggatatgaccattcacgtccaaaaggacattgtcaggtttaatgtctctgtgcacgtaatgaagctgatggatggagtcaatggccagcaccatttcaccaatgtagaacctcgccatatcttccggaagcttgtcttcaaatttgctgagcagggtcagtaaatcaccacccacatagtaatccatgactaagtacaggtggttctcgtcctgaaaggcgtagtgcagcgcggtgatccattggcagtcgccgttcaccagcacatcgcgctcctctcggaagcacgcggtctctgctcttttcagcatctcccacttgttgaggattttcattgcataaattcgttcagtattcttcattttgacaacagcaacctcaccaaaagcacctcttccaattactttaattatttcaaagtcttctcgatgaagctgcatttctttcaccagctgtgtaaatggtttagcccactcgaggaactcggccacgtacttgtcgcggcgcagggccgagtggctgcactcggtgtacaggcagacgagcacgtcgagcagcgtttccacgctcagggcgctctcgttgcgccagggcccgtccaggagcagctgctccagcttcttgagccgcaccttggccgacatggtgccgcgcggcccgctcccgacgcgccggcctctcaccgccggctcggccagtccgtcagggcgcgccctcgggggctcggcggctgcgagccccggcagcagcggcgcctcctcgccgccccgtccgcgtcgtcgcgccccggcctaggccgacatcttgggctccgtcccgacggcgcagagtctggggcgccgggccccgcgggtccatgggccgctctcctcccctcgg

SEQ ID NO: 135613 - DNA, 520 bp, Homo Sapiens
tttctattgcattgtcaggctgcaagttttctccttaggaattttttttgttctattgtactgtcaggctgcaaattttccaaacttttatgctgtgtttcccttttaaaacttaatgcttttaacagcacctaagtcacctcttgaatgctttgctgcttagaaatttcttctgccagataccctaactcatctccctcaagttcaaagttccacaaatctctagggctggggcaaagtgccaccagtctctttgctaaaacataacaagagtcacctttactccagttcccaacaagttcttcatctccatctgagaccacctcagcgtgaaccttattgtccatatcactatcagcatttggtcaaaaccaatcaacaagtctctaggaaggaaactttcccacatcttcctgtcttgtgagccctccaagtctctaggaagtgccaaacttttcctatcttcttctgagccctccaaactgttccaacctgcctgttacccagttccaaagtcgct

SEQ ID NO: 135614 - DNA, 1162 bp, Homo Sapiens
  misc_feature (24)..(24): n is a, c, g, or t
  misc_feature (40)..(40): n is a, c, g, or t
  misc_feature (96)..(96): n is a, c, g, or t
aattaaacccactttttcctcccnagtcctcgggtaatgnctttatcagcagcgtgaaaacggactaatacagtaaattggtaccagtagattggnccctgctgaagaaatacccaaaatgtggaggtgactttggaactgggtagcaggcagcggttggaacagtttggagggctcagaagacgacaggaaaatgtgggaaagtttggaacttcctacagacttgttgaaatggctttgccccaaatgctgatagcaatatggacaacaaagtccaggctgaggtggcctcagatgaagatgaggaacttgttgggaactggagtaaaggtgactcttgttatgttttagcaaagagactggcagcattttgccccttccctagggatttgtggaactttgaacttgagagagatgatttaggttatctggcggaagaaatttctaagcagcaaagtgttcaacaggtgacttgggtgcttttaaaggcattccgttttaaataagggaagcagagcataaaagttctggaaatttgcagcctgactatgcaatagaaaagaaaaacccattttctggggagaaattcaagccagctgcagaaatttgcataagtagcaaggagcctaatgttaatccccaacaccatggggaaaatgtctccaggccatgtcagggcagcccctgacatgtgtgtgcagcctagggacttggtgtcttgtgtcccagccactccagccatggctgaaaggggccaacatacagctcgggctgtggcttcagagtggaagccccaagccttggcagcttctatgtgctgttaagcctgcaggtgcacagaagtcaagaattgagatttggaaacctccgcctagttttcagaagatgtatggaaatgcctcaatgcccaggcaaaagtttgctgcaggggagaggccctctcagcggcaggggagagaacctctgctagggcagtgcagaagggaaatgtggtgtgggagcccccacacagagtccctactggggcactgcctagtggagctgtgagaagagggccaccgtcctccagaccccagaatggtagatccaccaacagcttgcaccgtgcacctggaaaagccgccctcgtgccgattcaacacccaggcctcgctacctagcc

SEQ ID NO: 135615 - DNA, 404 bp, Homo Sapiens
tttttttcctttaaaataaaggtggttttattataaaattctaaaaatgtactttaaagtacagtcatgagaatactgcataagtagaaatgtgtcttcatactgcaaacaatcacacagattttatattgtccatggaattaatacttaaaaaaattcttctttttagttaagaagagtcttcagagcaccattattctaatagaagttattttgcatatcagagttcatctttggtctttttcctatggcaagtacaagggaagaggtcgtcctcagtctgtggttctacccttttcatgccctctcggatttggggctcactcacttgtaaattggcatattcctggaaaagtttgaaataataacagaatatgtcatcgcccatgagattatttcttgca

SEQ ID NO: 135616 - DNA, 446 bp, Homo Sapiens
ttttagaaaattgtatgtagaatatctttattttacacgtagaaaaaaaatacagagtttgaaaacatatcctttcagaggtcgtagatcagtcttctaaaataaaaacatcttacataggccaataaattaataaatgacagagctgtccaactttccagacttctccagtcttaaccataaattttccggatgcagcaatgtcttgggttttcagtgctgtcaaacttgtctactttcctcttgggaagagccattttaatccctgatccctgtcccacctaaatcaaggcagtgtgattgccaaaaacagcaaagtttctaaattagacaccgtatcagtaaaagaacagaattattccatttaatgccagtgctaagttgggctattgtctgaaataacagatttgggtaaatacatttaccaatggagcaataatattttt

SEQ ID NO: 135617 - DNA, 697 bp, Homo Sapiens
cacagaggggtggtccccaccgcgcccgccggcaccccgcgcgggttcggcgtccagcaacggtggggcgagggcctcgttcttcctttgtcgcccattgctgctccagaggacgaagccgcaggcggccaccacgagcgtcaggattagcaccttccgtttgtagatgcggaacctcatggtctccagggccgggagcgcaggcgggcgggcgcggaaaggagcagctgcttctgcacggaaggggcgggcgggcggcggccgtcgccttggcctgtcacggtcggaactggcccccgcggctgccctcgctaactcatcccgggccccgggggtcctggggcccgagacctctcatttaccccgcgccgcctgcgctccacacatcctcgcctggcagctacagctcgagcatcggcgccgccgctaggagccgcggctcggcttcgtctccgtcctctccattcagcaccacgggtcccggaaaaagctcagccgcggtcccaaccgcaccctagcttcgttacctgcgcctccagcggccctgcgtcctctgcgctctcatccttacaggggccctagacggccagaactgagcgacgcggcctcgcctcactccggcggggaccgttatgacaacccgcaactgcccccctcgtgccgaattcggcgcgcctcgacttcatactcttcgcca

SEQ ID NO: 135618 - DNA, 803 bp, Homo Sapiens
  misc_feature (81)..(81): n is a, c, g, or t
  misc_feature (84)..(85): n is a, c, g, or t
  misc_feature (87)..(87): n is a, c, g, or t
  misc_feature (89)..(92): n is a, c, g, or t
  misc_feature (94)..(98): n is a, c, g, or t
aactggggattaacagggcccgtggcccttcataccccaggtaattttttggggggttgggtttggtcctttcctaatttnttnntntnnnntnnnnngccagtggagatgggggtttcatcatgttgcccagggctagttttccctttctatatacagaaaaatttaaagtgaatgtgatgttggagagagtgggaaggaaaagtaatggcaagtatgcttgctcattaccaggcactgtgctaagctctgtgaatacacagataagtaaaatccacgctgtttctcaaagaactcacaatctgtttaagaagcagatgtctatacaataattttataactattattcaatgtgattagtactcacatagctctatatagagtgttatagaagaataaattagagaatatctcatttttcctccagtggtttaaaaagatgtcacagaaactgaattgtaaatggtacggaaatatggaggggtggtttgcagtaggacctatcttagcccaccgcttctcaggttttggcctttgaacttgagatatgactgttccaaggacagaaggtaaaacgaacaaaagcaaaatctgaagcaggctgtcaatagagattgactctcattgcggcacaccagtacaggctggggcaaatgtcagaatcaaggcaacttatctcaaatgcagggctgtaacgctctctcaattgcaccagtttcctcaagaggcaaatcttctaaaaaatcatctgcagcccgcagcatctgcctcagtgcagagaggatgagaatatccttcatgcc

SEQ ID NO: 135619 - DNA, 356 bp, Homo Sapiens
atgagccaccacgcccagccttcatagtcacttttcatactgccattttccctcttgggataaaaatgttctcagaaaaaaatggaccacgtaaattaggttgacagcttctttctttgagtcaataatgatagcttcctagtcaatcactcctttctccttaaaacattaccttggaaatattaattctgacagtcatagcaatgacatctttcctgagtcagctgctgctctttgttaattatcgctcattaattggtaaggtgagcaaccacaaaggctgccagcagtagcctaggatggcagttagataatcaagattgtttactcaatgtatgtgtgtttgaatccccttt

SEQ ID NO: 135620 - DNA, 2958 bp, Homo Sapiens
  misc_feature (50)..(59): n is a, c, g, or t
  misc_feature (64)..(111): n is a, c, g, or t
  misc_feature (2775)..(2775): n is a, c, g, or t
  misc_feature (2879)..(2880): n is a, c, g, or t
attttgggcccaggggtggttcttgaaccttccctggccttcaaggattnnnnnnnnnnattgnnnnnnnnnnnnnnnnnnnnnnnnnnnnnnnnnnnnnnnnnnnnnnnncggcccagcatagtattttttatttataacgtgaaaaaaatgaaaacagatacttcactacaaatattgaacccaagttagaaaatttttatgcagccaaaccatgactttaagctctatttacactgatggcggccaactgagatgcagaccacacccatgtggcgtgcagcaagcaggacatgcagggagccttccttgctcacaaggcttcagagcaagcgcacggtcttcccagtcactgtcaggaaatcatcatctgccagggcacgcagtgcttcttcaaacatatctttagtaattgctatgtcagattgtccccgaatatcttcaaaaagttgctggtattttagagctggtgttttgcccttagataaaataagctttttcaatgcttcagctaattcttctttccgtttacgagaggtggcactcatccccgtagtaagaatagatatgtccacgatgccagtccggggatcagttgcagactgcttcagagcttcccgatggaggcgtttggcctcttccacatcaatggcttcaactttgttagacaatcttactttagcatgggcttctgctaagcggattaatgactctagctgtcgagggtatgcagaaaccattccccggctactgccaatcttcctcatgtctacataagcctcgatgagagcctggctggcttcctcacttagccgcggcatgatggtgctgtgcgcgtaggcaatgtagtcctttagcaccgccatgtccaggagctcctcctctgcctgctcctcgctctggtagtacagtgcgaccaggtggtgagccagacgcctgtcataggcttcgtcctgagggtccagcatgaggaagatcaaatcaaaccttgataataaagtatgaggcagctggatgttttcaatggttgtttttttaggattccactgagactcaatgggatttgctgctgccaggacagaggtgcgcgcattgagctgacagatgatcccagcctttgcaatggacagagtctgctgttccatgacttcatgcaataccgatcttgtactttcattcatcttgtcgaactcatcgatacagcagatgccgttgtcactcaggacaagagcacctgtctgcaggaccagctgccttgtctcagggtctgttcattacgtaccgcagtgaggccaacttgcactggagcccttcccagacgtgtactggcccctgggggaccgagtttgtacacgtactgcagacagctgggacttgctgggtaccagggtcgccacacagcaagatgttgatctcagcccgagatttgccccttccagtgtgactaaaatcctttccttgtcccgccaaagagctgaagcaagattccccttcttgtatatcttcatgttcataaatgcttggagccaaggctgaagcaagcctctcataaatgtctggtttcctggaaagttccttaagcaattccacacgtttctctgaaaaaagtttctgttctgcttcttcatcaaggccatgcagacgttttgcatccgttttccgataatgaatgacatcaatgtgggttttgtagacagacttcacattactcactcttggattgactcgaataggcacagctcgatagatgcctgtaacattcactctgtccccaggctggaccttgtcaacgagatcattgtgagcaaacaggataactgtgtgtggtgtctgccctgcaggcatgtcttccggagactcctgaagcttgatcatctgcttgtcagagaagagggagcggttgtggatgagtgccatgctgtgggtggtgtggcagcgcccgcacacactgggctctgcaatgcggccgcggtccatctccacccgggtcgtgtgggcacacacttggcactggaagaaggcctcctgcatctcgggaatcagctgggatgtcctgatcaccatgccgctgatggtgatgagctggtcaatgtcttctggattcaggtttctcatattcttagtcttcaatgcgttgaatggtcttacttgaatctgatgttctaagattgagtcagggtaacggtcaaagaagatttcattgacagccatgtcaaaagttggaataacttcctgtgggtaagagatgagttgtctgtacaaatttttgtcaaatgatttgatgtgttcacagttcacatttaaaaatggctcaccaataacattaatctccccaagtcgttgcatgtatagaggttcagtaatatctatgccaacattttcttcttctttagccagagggtcaataaaacgctgaagaaatctctgaaagttttctttgcatgctgccacatttacatctgttccccagatcacaagtttttggcctagagactgctcacttgccactatatcttctgctgctgccccgtcagactgcagatccacttgcaggcccttctgtgcagagcccaggtcaggcctctgtctcacaggtgtgcccctaacaccacttcttgggttccctctacccgagagctgggagtgccgtatgtcagtggtgaactaacatcaaagtcaagagggatagctgagaatgcatttggggagggctggaaaacagcacgttctgcgcagcagggctctgcaggttcactccaggcgaggtttgcatcnggctgcaactcccccgtggaggttgaatcctcgcctctacgtctctgagagggagatgacctggcatcctcactccgaggcgtctgggcgggggtggcccttcnnctagccggctgccgcggcggcctcggggtcgacgccggggacgacatagtgctcggagtaccgtggaaaggcggccgc

SEQ ID NO: 135621 - DNA, 436 bp, Homo Sapiens
tcagaaaaattcctcaatcctttaccaatggaaaaagcagaatgacatttaaccaagtattctcatctcaaacgtttgaagcattttaggccatgaaaatacagtgtctctaacaacagacagtgccactggcaacagcacagggacagtgccctgaagcaggggctttgcgtgctctgcatatttagcccataggccactaacgaaacccacaagaccagagagggatggatgccattcgggaagtgaggctcagggtccgagggacaagttatagttggccttttgaggatacagacaggcaaagcatagcctggggggccagggtggctgcgcaccatctgcttgtcagagaagagggagcggttgtggatgagtgccatgctgtgggtggtgtggcagcgcccgcacacactgggctctgcaatgcggccgc

SEQ ID NO: 135622 - DNA, 456 bp, Homo Sapiens
  misc_feature (49)..(58): n is a, c, g, or t
tttgtctccagaagtgcttagtttttatttatttctaattctttctgcnnnnnnnnnncacgagcactgcttagaactcaagttcctgggatcaaacttgtatcacacaggctggagaaggctgtggagaaactgagtcctcccaggtctcaaggtgggtggagggagcctgcaggggtctccttccctcccctcttgcctgttctgcctggtcagagcctgcacacgagtgcagagggctcccttagagagggccgggctagaggaagctgaagtttcagaataagcagcttattctgtggcctcctttccactacagactccttgaggaggagtaagaccccagaaggacaggtgagtctcacctaggctgaccaaagtccagctcagccagcccttgatctatccaagacatccgcccacagcagtgagaagctgatgccactcaaagccatt

SEQ ID NO: 135623 - DNA, 733 bp, Homo Sapiens
  misc_feature (538)..(538): n is a, c, g, or t
  misc_feature (584)..(584): n is a, c, g, or t
  misc_feature (617)..(617): n is a, c, g, or t
  misc_feature (674)..(674): n is a, c, g, or t
  misc_feature (679)..(679): n is a, c, g, or t
atgtgagatggaagtagtttgtatttatttttacttctgttcacaaaccaaaaataggaagaggtgcaaagaataagaacattttacttaacacaagggttggctactctgcccatgaagataatagtgttcagaggaacttctcttataaaaaccaggaaaggcctgttggccttgaaagtcaccctgttggggtttagcgaacggccagcaatcacaacagcggtacttgcagctgcttcactgccttcttcatttacctcaagaaatgccttatggaatgcatctgagacatagaggtcatctcggccttctgcaacaatacctgggagtttggacttttcagggctgaacagatcgacaaggcccatgtcttgcagctgctccttcaaactgaagccgtcctcaatgcggaagcggggcatgtggaccaccagcatcatctcctccaattcatacagccactcctgcagcacctctggggtgagttccttctctaccttggccaggctcttctcaggcttgggcaagatgaggnaccatggtgatgtcatcaccttttgagggcaactacaagcacctgngtgccttgagccacgcgccgataacggaacttngcctttctgtacatcatagatgctgaacacgactcttcatcagccttgtagacagtnctttncttgtgtctcaggctgaacttgacttcacaggcccctgaagtaaatgtgtaaac

SEQ ID NO: 135624 - DNA, 592 bp, Homo Sapiens
ctatttgcctctagaagcaattgttcataatggaggcatattttcctttgtagaaattcacagctgtaaagagaaagtttcccagtgagttaataagttggcatttgtcagaattctctcgggtcaaagactgagttttttgttcttagtgctaatagaaccaaatcacctgcatttgagtatttaacacgttggaaagccaacccaacttaaggtcttcttttttgtaatgagtaatttgaaagtgaaagcttcttgaagcatgcagtcaaaataaaacgcatgggcgtttatttagtaaagctaaatcgtgtagcctttactcagtctgttgaactggcaaatgttaactcccctttattgttatactttcttattaatcatcctattcataaaaatcccatgacctggggaaaatgaacccgttagggaaactcactgctatcagtctaatccaagccactatcaataactttcttactggtatccctgcttccacctcgtctagctattatgtgtaccatgaagataactgaagccaacctgcctgggtttaaatcctagctctgcaatagctgtattgccagttcct

SEQ ID NO: 135625 - DNA, 529 bp, Homo Sapiens
gccccctcaaaggaaatatgctaatagacagcccctttgcaaatataattcctccttcccaacccttcaaattgctaaggccccactggtcagcaccttccctttcgagtccaggactactgttctgtcccccacatgcttgcttcctcccggacgtcctgaacactgcagctagctttctggacggcagacgagttgggagtttctggagcttggaattggggcgggggaggaggtccaagaagtcaagctccggagaggagcttcaggggaagtgcccagagtcgtggccggggaaccggctacaccaagttgacttggaaaaagttttgggaagtatccccaaccatcccttctatctgtcccaagccacaggtgcccggcgcggggtcgaggcgagcacgggagtgggacgcgggctctcccgcagccaacggcggggggcgcgagggctaaaagcgcggcccaagcagcagcagcaagatggaggcgagtggggtccaggcgccccggggcgccaagcggccgc

SEQ ID NO: 135626 - DNA, 1371 bp, Homo Sapiens
ttttttttgattgaggtaaataaaaaagctttatccagcaacacggagataagagtctgtccaacccgacaagttccagaccccaccctgccctcacatcaggctcttccggtactgactgtgcggggtggtctgtctgaggtgggagtccggggtctgcaggtccatctgtctgtacaggtctctcagctccctgacctcctgcagcaccctctttgcctggctccaattcgatgatgcctctcccagcagccgttccgtctccagcagcagctgctctgactcagaatccggcggagaccgaggggggtccttggcctttcgcttcccatctcccagtccctgaacctctgccagaagctcctgagtctcctccagtttccttgctaccaggtcctggatccgggacagctgccccgggttggggagggcaggggttgggggttcctcagcccgcagctggagggtgcgggcagaggcagcatcccgctgagataggatctcctccagggaggcgcagcggcctttctctgtgggcgtcaacttcttgggtgcctggggggtgtaggtggcccctttgtctgttttttcccaaggtcgggagagactgcttgcccggtctgcggagggctggatgcggtctgagtccgctctccgccggctccctgccagctgggccacagacttgtccaggtcaacccgaaagctctcagcacaagaggttggttcctcaggggaagggtcttcctcttggatcaagtccaaggtcagcatcccatccgaggtagaggtggaagccacagccattaggtgtccccttgttggggggcggcgggagtgctggatttttgccctgtctcgagtgggatgggcaagatagctgtcctcctcaacggtgacctgaagagatgtactcatccaagatacggttcttggctcgggtgatggcagagttgagggcattgatccacgattccttctcttctggactcactgccaggaagatcaggttgggtgccgtgttaccgggctgtttggagtgggcaagagtaaacttgctatgatttttcttgctcctgctcttggacttccggagctcttcacacttctcatagtcactcaggtcaaatacctcttgaatatttttctcatcttttacctccttctcagagatgtagagctggtcccctttcagcaccacatagcggtttttccaaatctccctgaaaatccctttcccgcagaatttccggacccagccgaccttctcgggcggtgcaggctgctggtttccatcctgaggtccccgcttggcggaattgttcttcttcatcattcccagcgggcgcgggcgcggggaattgtcttctt

SEQ ID NO: 135627 - DNA, 867 bp, Homo Sapiens
  misc_feature (456)..(465): n is a, c, g, or t
gggttatgatacacataattgcattatgatgcaggatgacataatacataagacgatgttttcaagctggttttataagtacttatctcacatccacagagagttggtttgccatgtgatgcaatgtgtcccacatagacatgaacaaaacaatacagtcactaccccacagggggacagtgatttttcaaaatgaagctttaaacacaacaaatcgtggacagacacgttgataggaaagagccttgaatataggcaccagtgccccagttcaacaatatccatccaatgtaataaagtttgaggaacaaaatatacactatattctggatgtaattacaaaattctgccatgggaaaactagaacacaagtagggcaaaagcactttttatgatattttagggacataccaacatcttccctttctgctaatttcatgctccaaagatatggcnnnnnnnnnntcataaaaagtgcttttgccctacttgtgttctagttttcccatggcagaattttgtaattacatccagaatatagtgtatattttgttcctccaactttattacattggatggatattgttgaactggggcactggtgcctatattcaaggctctttcctatcaacgtgtctgtccacgatttgttgtgtttaaagcttcattttgaaaaatcactgtccccctgtggggtagtgactgtattgttttgttcatgtctatgtgggacacattgcatcacatggcaaaccaactctctgtggatgtgagataagtacttataaaaccagcttgaaaacatcgtcttatgtattatgtcatcctgcatcataatgcaattatgtgtatcataacatgctcatt

SEQ ID NO: 135628 - DNA, 752 bp, Homo Sapiens
ttttttcatatatatttctcctttattcagataaaactacagaatacagatatcacaaattcaaactccagcacaagtcaaatacctgatgatacatgtatgattacaggaaagaattcagaaaggaatatttaaataaggttttaagtttatgatgtgctataatattgtatagacacacaggaattaaatttctacttctttattctattaagccatacaataaaagataatttacatactgtgcacatagatgtacacaccacacaaaatctaaagttgtctaacttcatcttatttttaggtttctgagttttaaaatctagtccatttatagtgaatgaatgtaaaatttaatgagagggatttgattgttaggtttgtattaaattcccatgtaaaacaattacaattatatccatggagcagattaagtttcccaaatgccggaagttcattcatacacacaaattgtttaaaactcagaaatcattgctaatgagacttttaaaaatccataaacatatgcaatttaattattaagttaaatacctgttcatgtgggcaggaccatacccaccaatggcatatatcattccatccaataccgctgcagcaaaacaacatcttgttgtcgtcattggtgccacaggttgccattttcttattttgggaatgtacttctctacagattgtaaaatagattggccatcataaccacctaaaggcataagttcttcctgcagtactaa

SEQ ID NO: 135629 - DNA, 662 bp, Homo Sapiens
gcccctctgcttcaaattaggcagaaacaagcttataaaatggaagtctcccatggtcccatgtttacaaacatgtattcagcacccgagcactcaatgcaatgcccaaagaacaatggtccagtcacaggctggtcacatagaactagtcctcctaataggatgaatcaggcaagaccacatttaatatcttgtcagttatttattatgtgtcattctaaagactagcacatttacagcatacatggctttgaatgacctaagaatatataaaacagtaactgtatgtttatatatatatagtaatactgcccaaaacaaataaataaaggtatcataatgcactaagcttggcaaatacaattgtgtagggacaaaactgtattatacaatatttttacatctttaaaggaaactaaaggcaactgtgctctgtaggagctctgacagaatccacattacattcccagttttccatagatctcttttctttttaaatggggaggcatcataaggaacactggacggaacctctgttttacggtaacctgtaaaactgccttccctgcacctctgaaaacccaaagctcctacagaagagaggagctgcttgcctctgtgccacacaccctcaccctgcaggcactggaagcgtgtgatgc

SEQ ID NO: 135630 - DNA, 639 bp, Homo Sapiens
ttttttttaagaaacaaagatcagttaaattttattgggagccggggtggaggtcgggccgaacagaagcgtcgggcagcggaggcccgcgggtgcccctactcctggtccttggcgtcgccgtgcgtgatgacgtagcagatgtttttgtagtcgacgttgccgcccacgtcgggggggaaggccgcccacatgttcttgatctcctcctgggagaagcggtcacactgcgtggtcagcagctcctccaggaacttcttcttgatggtgccctttccctcagggtccaagaccttgaaggctccggtgatcacatcctcagggtcggcacccttgagcttctccccgaacatggtcaggaagacggtgaagttgatgggaccgctggcttccttcatcatggcatccaactcctcattcttcacattgaggcggcccatggctgcgaaggtgtcccgaaggtcctccttgtctataataccatcacggttctggtcgatcacagtgaaggcctctttgaactcctggatctgagtctggtcgaacatggagaagacgctggagttccgccctctactgtccttctcttggccctcttgggtgccatgtcttcagtctccggggggcaaggcagcggct

SEQ ID NO: 135631 - DNA, 976 bp, Homo Sapiens
  misc_feature (215)..(282): n is a, c, g, or t
caggaaacagcgaaaagcggggcgggaacggtgtggcgggaatccgaaggcgggctccaacaaggagatggtgtatttgtaacacaaggaggggagggtggagctgacggggcggtgctgtgccgggggcgggggtagtttgctggttgtcgagggcgcattggtcgggtcgatgagccctggcccggcgattggcccgcgtcattgtttcatcnnnnnnnnnnnnnnnnnnnnnnnnnnnnnnnnnnnnnnnnnnnnnnnnnnnnnnnnnnnnnnnnnnnnaggacatggctggaggttcttctcttgtttcgtgagggtaaaggaatgtagaaaaagatccattttcctccaaacagatttattgaatacagcaaaattctatatacaaagtgacctggacctgctgcttcaaaacatgatcctttcttactaatatcttgatagtcggtccatagagcattagaaagcaattgactcttaaataaacagaaaagtgcctaatgcacattaaatgaatggcctaactactggaactttagtagttctataaggtaattaacataggtaggatccagttcctatgacaggctgctgaagaacagatatgagcatcaagaggccattttgtgcactgccaccgtgatgccatcgtgtttctggatcataatgttcccattatctgattctagacacaccacaggaatatcagtggggtcagaggttagcttagctgcttgctgggctagaacagatatcactccagcatgctcatctgacagggtcccgcggcaacccagattaagtccttgtgaatctgtgcacaggactccaacaatggagggattcttcattgtgtcttccaagtgctgctccaaggtcgcctccatcccacccaccgaccactccggctcagaacccagcggcacggcacgtccttctccaccacaggcctcagtcacttgacgcgagcccc

SEQ ID NO: 135632 - DNA, 936 bp, Homo Sapiens
gggctcacagaagccttggcgcagtccagctcgcggggggatgggcgagggtggggggcagaaatagcaatctgcagccggcaagggggcggcacttagtcaggctccgcccacaagacccggctgccgtccccgcccgcctgcgcgggatcgactccgcatgcgcactggagcctcggaatacagccaggactctcccgtcggaatgcgcccctaagttgggccaagcccattcattcaggggctcccgagccacgtaggcgccatccctggccagaggggttctgaggaggtgggcaagggcagacactctctcccggtctcaaattcgaaatagggactagaagggaacttcacgcgaggcctcgcaactgtcgcgagaatcagaacaggaaatctaggaaccgagaacactaagagcccgcggattttaaacaggaaaaagaaagggcggagcaaactctggcggatagttgtgagtaatccctggtccttggaataagtgtcgacctgagacagaaggggaactgtcagagagctgccggagaccctggaaaaaggccagagacggggacttgtggggctgacgaatggaatcaccccaggagaggtctctgactctaacaaaacaccttggggacggagctccttggctgggatacagagcagaaacaagtccgggatcttttagtgaattgctgccggcttctaaggcctggagcagatattcaacaacaaactccacggacctagaaactctccacttatcctactattgtagacggtggcttacttttagtcttccctatgctctaagcttctggtagtaggaatcgtgcctaactcactactgtatcttgtgaacctagccccgcgcctggtggcacgtcaacttctcggtaaatatttgtggattaaatgtgaaagactgccaaa

SEQ ID NO: 135633 - DNA, 635 bp, Homo Sapiens
ttttcacttgtttaaaacatataatgcgatggttttggtatttacagagttgtgcaatatcactacaatctaactttagaacattttccttaacccctaaataaacctcatcctcatcagcagtcacttcccatccatcccaccccaactccaaggcccaaggatccactttctgtctctgtggatgtgcctacggaatctgtttctcaacacacttctgggtgattctgctcctgcaggtccacggtcgagcattcaggaaccagtggaccagactgttccaagatcctttcctagtctaagctttcatagccggaacaatgaataccgacgaagtagcaggtgctttgcttggtgctggggttgtaaaagaaatatggtacaccctactcttgagaacctacagtcagtgggaaaaatggaatcataaatgactaactttaatacaatgtgagaagcgctctaacagcatgtgcattcaaaagaggcccaggatgcagatgaggtgattaatttgcagccaggagaagttggagggggaagggaatgctgtgttaactgctttccatgcatttcatgtactgctcatcacaattctgtgagctggatattaataccactatcatcctcaagtc

SEQ ID NO: 135634 - DNA, 1265 bp, Homo Sapiens
  misc_feature (1196)..(1196): n is a, c, g, or t
  misc_feature (1232)..(1232): n is a, c, g, or t
gcggtttattcggtatacaaatcggccattctcaaaccttgcatactccgtctctactttttctactacttgcttcccaaaggagcaaactttggtggaacaggtgactgtcatattttcagaactctcgtactgactggttacaccataaaaagccccagcatcatcttgaatattgcagtttaaatcagcccagaattttacgaggaaggagggcattttgaggggccctttccaaacagttccctttaagccacctttcttttcaggaaatttgtcataaatctgacgaatgtccactgattcaagcaatgggtcactgtaagaatggttggcatgcccaatggtgcacgaagaggtgtttgttgtacgagtctgggtctcgctgctgctcgagaaaagctgaaaattccaccaggcgaagcttggttgtgccaatggagcgaccttgccaggcagggactgagggagctggggccgatgcaggctcaaaccctggaatgggggctgtgaccgctggctggatggggtaggcctgctgcacaaaaggcttgacatcttgtgaggatcctggctgccctgtttgaatcattcccggccagaaccccggcgcccctgggaaggtcgggcgtggaatcccaggcagccccagcttgttatgaatggcagtggccgagacgatctgggctgaggacatggccgccatgtgctgcagggccttatcctttgcagtctgatcctttagcttggaatgaaaatcacgagatttccttctggcaagaacctgaatgtgactagacacctgttttctggtcctcgtcttgcctgtcctgagtttgatgtatctggctatcaattcattcctaccatacattttgccttcgtctgataagatgattttcctcctcccacatggtggatagatagccagggcctcctgaaagctttgctccgatgtcggggctccagaccccttctgcatcattgtcaattggcttatctgcagagtcactcatcctttccatgttttcggcagggctctcactgccgctccagctgctgggctcaattttggcggtgggattttccaagccgaagcctggaagccttttcaagaaaataaaccgaaagggaagggaagttttccagggagagtctcctcctggggtttggtggtaactgcgactcagtctttnttggacacaatgtttctgctgactcctgaaaatttnccactttgaatgtgcaatgaagcggccggggca

SEQ ID NO: 135635 - DNA, 340 bp, Homo Sapiens
tttacaagtcagagtcaggccagaccagaacatttttattggtttagtcacttaggcatgctaaggtccccctgggttagggagatttcagccgtgagtgtgcaggtgtgcatgcacatagggggatatctattgggatgcagagaggtgagagcagctcttcagaagcgctggcaaaagaagaatgtgtattgaaaccatgacgggttagaagctcctaactccacttccagggctgccttcagaaatcctttctctttgaccattggccatcaacacaaggggcgcttaccagcacaagcaatacagggtgggccttcccctagcaaggatctcatag

SEQ ID NO: 135636 - DNA, 1548 bp, Homo Sapiens
  misc_feature (1063)..(1106): n is a, c, g, or t
cgcggttttgtctcgtttcggtcctgtgtgactcctcgcagggcgcgctcctctgcgtccgtctccttcggcgcatgcaatctgcacacgctctagcagcaagcacaagcctacacgcaaccccgctagcaccagtaatacacagccacacaaccaccaacgccagagcagtcccaacgacacgtctgctgagcagccaccatcactcctccgcatacaccatctcgcctgccggcttgctagcgcgcgcactcgctcgctcgcccgtgccgacgccacatcagtgcgtccggggcggcatcctagtcgagtccagctcgcaccacttcgtagtattaaggcgttggtagtgtaacgaccgctagtggcttacggactgcgttcttagagattgtgtagcgtgtaggctgcatgtgagacctgtcgatgccggcggttattatctaactatctgagcggctccgcccggggggggtagaaaaaaaagggctggtgtgcagatacagacgaagattagtctcgccggtggtttgacgtcgcacaaactagtttgttttctaaaaggcagggcagccgccagggtcaattaataattgtgcccggcggtgattgtgggtggtgtgaacacgcacccagcgttgttagacagcgccggtggaaaagaggtggtgtgatatatatgtatgtggccccgccctttgaggaggcgcgtgtgtagaaagatcctgcgcttgagagaggggtaatgtttcggtggcccacatagttggtggttgctctccccccccgcgcgcgaagagatagtgggggggtgctccgctgtctcaccaaagtggctctcctacgctggttaaccgcgtttggttgtcccacacggatctagcgacacgcgttgtttataaccgtgctcggccgccgtcgcgctctctagtcgttattataatacgcgagctcctcctcttattggggggcgccacccttgtgtcaacagaaaagactgggggtggcgcgcgtgatagcgtttggggcgccccccgggggaaatttttgggggggccccccnnnnnnnnnnnnnnnnnnnnnnnnnnnnnnnnnnnnnnnnnnnnctggtctcgaccttggactttattttcccagcccctcccacaggcccctctctgtgcccatgttccagatgccataaaatccgggccatccatcccaacaggagctggtgtgtctactcaaaacaggttggggacaatgtagtcagtgtggacaccatcaatcagcccttctccgttgttgtggacgaaccagcagacaaccttcgtgccgatgctggcatcccttctgtcgtctttctgggagcccctggtgacaatcagctgatggttcttcaccaccaatgtggcatctggctttgtggggtcagagcctggccggatgtcagacactttaaagtcaaagggttggaagaattgccccagcagcccatgcgtctgtgctgacatccggtgactgtccaccacgtagaaggctagaaagtcacggtggacaggatgtttc

SEQ ID NO: 135637 - DNA, 993 bp, Homo Sapiens
  misc_feature (875)..(909): n is a, c, g, or t
gttgcttctatttctccgtcagagaaatgtcgtgaccaaatacacgacctcctgtttattggaacatggcctctggatggatttccaactgtaggatgtgcggccacgaagtacccatagccacccaggctgcaaagaagatggaggtggataaatggggcagccacatggcttaacagacaaggtagggacagaggcggtactcgggggagagagatgagggcagggaccactctgcaaagacgagcccagggcgcagcagcgagccccctcctagtccttctcttctccgtgggtgatgatgtgcaccaggttcttgtagtccaagttgccagtcacgtcaggggggaaggcggcgaacatctggtcaacctcctccttggaaaacctctccgcctgcgtggtcagcatttcccgaacgtaatcagccttcagcacccctttgccttcagggtcaaacactttgaatgcgttgagaatggtttcctcagggtccgctcccttaagtttctccccaaacattgtgaggaacacagtaaagttaattggacccggagcctccttgatcatttcatcaatttcttcatttttcacgttcaactgcgccaagggcagcaaaggtgtctctcagatcgttcttgtcaatgaagccatccctgttctggtccatgatagtgaaggcctccttaaattcctggatttgggtctgttcgaacatggagaacacgttggagttggggcccccggctctcttctttgctttcttaggtgccatggtggaaaggacccagcactgcctcccgagaagaattccacactccgcccccggccgtaatggccgaattcccgggcatatgtccggtaccgtcgactgnnnnnnnnnnnnnnnnnnnnnnnnnnnnnnnnnnncgccgcttcctcgctcactacttcgctgcgctcgtcgttcgctactacgaccgctagcgccctatagtgatctatacatccttt

SEQ ID NO: 135638 - DNA, 2879 bp, Homo Sapiens
tttttggtttaatcttttatttggaacaaaggaaaaaaggactgacaccagtttagcctttgagtgtgcagagctctgccctccctcccacccctcagccccaaatccaagatttcatagccctaacacccacccaagcagcttccctcacacatgccctttgttttcttcctctcttctatggttccttagggaaagccttctttagggatgaaaagctaactacagcccagtctggcctccagcagcccagggtcagctcagcctccactggaggcgagggaggagggcaaagggcatgggagaggtagggctgccctccaggagccttccccttccctaggagccagtcaggattggggaggaaggcagaggggtcctagccagctgtcacatagaggaataggggctgggagtggggatgacaagaagtacaaagaaagagaaagtttggggagatggataacaagctcagctgtgtcagtgatgtggaggggaggtatggtgggggaccagccatggccctatccaaccccaggctccacaggccccaaattggctttgcaaatccaaacattttaaggaagtggtttagggatggaagagaaacacggtagaggtctgtgctgtggattttcatctagggtggtgggaacaccagagatgtctcctctgccattgttttagttggctcctggacctcatcccagcagagggagggtgactgtcagcaggtcagtcccaccgccactgtccccctcgcagtgggcctctgtgtctcaggcctggccaggctccctgcccctcagagctcctcgtggacccgctcctcgtcctcatctgacttcagcttgagctcgtcgactgtgatcttgccgtcctggttgcggtcctggttctggaacatgtctcctatggttttctcagggtcctgcccaggcatgaggcgtcctttgccctcactcacttgagccttgatgaaggtggagaactcctccggagggacctcgccatccttgttgaggtccatgtcttcaaacaggttggcaggagggtccttgtgccacacaaacaggtagcctgtgggcagcccatcctcccgggacaccagctccacctcaaacagcagcacagcactgcctgggactccccgggctccactctccccgtgggccaggtgcgggggcacgatgagctgccgcctctctcccacacacatgccctgcaggcccgtgtccaggccttcgatcaccttgttggccccgagagtcgcctcctggggggccccgtagtcatgcgaggtgaacagctgggtgccgtccagcaaagaacagttgtaatggtatcgaacaaagtccccaagcttggtggtctcattgcaggtctcagatggccgggacagtgtcctgatttccaccacatccgcagggttgtggaagtcaatgacatggacgttgaagattagcacggcagagccagggatcttgtctccagttccattctccccataggcgaggtgcggggggatggtaattctccggcgttcccccatgcaggcaccctgcagcccctggtccatcccggggatgatgtaaccctgcccgatataggtattgtaggtgtggttgcgggagtagctggaatcgaagagggtgccgtccatcaaggagccattgtagtggtagcgcatgaagtccccggccccggctctgcggacacagccgggggggagctccagcgtctctagctggacagcgtccttcgggttgtgcacgtcaatcaggaggacgtgaaagaccagcgaggcctgtggggggatcactgtcccatagcctttctcgccataggccaggaatggagggatgataatcttccttctctctccaggacacatgcccagcagcccctggtccatgcccttgatcagccaaccagagccgacgtaggtgtccataagtgccgccccttaactgtagctggtgtcgaaggaggtgccttccagcagggtgccattgtagtggtagcggacaaattcgccgtcctggaccatgcgggggcagtggggcgggcgcagcaatgtgctcacctgcacggtgtcttccttgttccacacatccagcagaaccacatcgaagtagagggtggcatccggtggaatgagccccgccaggccgatgctcccatagcccaggtggggaggcacaatgaggcgtcgccgctcgttgacacacatgcccatgaggcctcggtccatgccagtgatgaggcgccccacacccaccacgatggccaccaaggtgttgcgatcatagcttgaatcaaacttcttgccatcttcaaaagtgccgttgtagtggtagcgcacaaaatcccccatctgcacttcccggggacaggccctggggatgtggtacctctcgatgaccacatcttccagggggcccccggccgggctggcgcggcccagccccctccccacggcctgcaccaccagtagcagcaactgcagcagggggagccggaggaggctgtggctgggggggcccgcggggaacatggtgcctggagttgggaccgccggcagtgagggcgagcgagggagtcgccaccaacctccttccccccgcctcccagaactggctccccctcttcctgtcctctttccctacccccgccctggctggtccacgtggaatgggggctgggaagactgagctggcctggccgggaggagcgggggagggggttgcaataggaggagggggccaggctgagtgtgttagagtctgagggaggcactacaaagaactctaggttcccccttcccccatctccatccctggctgcgagacctggggcctggcccagggagagaggct

SEQ ID NO: 135639 - DNA, 887 bp, Homo Sapiens
  misc_feature (51)..(51): n is a, c, g, or t
  misc_feature (98)..(152): n is a, c, g, or t
tgtgtgtgaatctctttattgtttctctccagagcccctgcagcagggganggggagggcgtggggaggtgggcgcccctcccaccagcctgagaccnnnnnnnnnnnnnnnnnnnnnnnnnnnnnnnnnnnnnnnnnnnnnnnnnnnnnnnttctcaatctcctgctcccacctccagcaccttcggggattccctcttgtagcccctgctttctaagtccaccctgggctggggaaaggaaagtaagagaccacggggacaatttcaagccccccagtctccacaggggctagtccccctggctacctgcctggctttctctctcctgggctaggggctggggaggtctgcggggctcagtcctggccctgcagtatcccaacaccctgctctggggctgtctccagagccaaaggctagtgcctgaggtcacagaggtgggagggacagggccaccgctcccgcctgggctccatccagcacaagagccaggctcactcactgccaacaaccaaggctcacagctggggtccgcagaggtggccgggcatgccctgtgaccaggcagggatgggctatgtcgctgttggggaccacgagggatggccagtgaggaggggtcagaggctgtgaggggaggactgaggctgggtgtggtgtcctgggatggaagaaggctggcttcagggagcagtgaggacaggggtgaggacggtctctggtggcagagggtctctgtctttagagcacttcatgctgctgctgtgtggcctcactgacgacctccccatcccgtgtctcgatggtcttgatcatcaccgtcttcttggtatggacctcagaacccctttgctcagggctggtttctcggaagcctcatgccgc

SEQ ID NO: 135640 - DNA, 712 bp, Homo Sapiens
tcgctccccctcggaaagctgcgaaagtgctttggcggtttgtccatccgcagcttcggcttttccagtctggtggcccttccggccacccctttaaccccagctttccctcccccttctttcgatcagagatcggcggagaccctcgaagtgcgcaaacttgacactcaccctgaccggactggggttttaaggggtgtggcaggaggttttggactcgatgagtttccaccgaaatgtcggagaagtcaggccagagcacaaaagcaaaggatgggaaaaagtatgcaacactcagtttatttaatacttacaaggggaaatcattagaaacacagaaaaccaacagctcgacatggattacagagtcttggaaaagtcggtatttcacggcgtatgcctccacctgctaacctcccaagtcttaaagcagaaaacaaaggcaatgatcctaatgtaaacattgtacctaaagatggcacagggtgggcatcaaaacaagagcaacatgaagaagaaaaaacaccagaagtgccaccagcacagccaaaacctggggttgcagctcccccagaagtagcacctgctcccaaatcatgggccagtaacaagcaaggtgggcaaggagatggaatccaaagtgaatagtcagtttcagcaagaatttcccagcctgcaggccagtgggggatcaggagacaaaaacgacacg

SEQ ID NO: 135641 - DNA, 450 bp, Homo Sapiens
catgacactgactttttgagaagcccaagtcaatcatcttatagaatgactacattcaggatttgtctaataatttcctcatgattaaattccagtttaacactttgtgcaagaaaactaaataggtaaaattcttaagtcacatcaggaggggcataatgttagggtgttccaccttgggtgatgctaaattgaatcacttggttattgtggtgaccattgtaaaggtacattttcccctgtataattgatacctcttctgtaggattatatttaaatccttgtagaagatcctattccacaatagcttttcatccaatagttttagcatctattgatgaacgttacgtgaaaaatctatgaactgctctttatgaacactttttaaagcctttataaaactattttctcttactgtattttcactttttggctaacctaaatttggcc

SEQ ID NO: 135642 - DNA, 566 bp, Homo Sapiens
  misc_feature (50)..(50): n is a, c, g, or t
  misc_feature (100)..(100): n is a, c, g, or t
aaaagtacataaaaagtgcagactgcatttcttctctgccatgcttttcncctcagtaaggtcacctgtgaggacttcaaaacctatccttaatacattnagagttctctacattcgagtcagcgaatgttaattctccaacataaacttaagagaatagtcagccacaaaatggactctaaattcaaaatggcaaaggctaccaagacaactccatagaaaaccccactgaaagcgggagtgaaattcaggtccactttctgagcaaaagctcattcacagatattttgtggtcgttaaaaaggtatttcattttaatttggatgctgggagccagatgtcctatttcgaagtgctaatgcaaaatgctaacccaggaggggcagtgaccccacctaggttactgtggggctcactctccttctcaggggagcccccagatttactgctggctgacccccatctgggggtggtccgcctctggctcctcttcttccacgtcagcactgtactcttcaaacgcatcgtcatctgcatccggaagccccagtaaaggtctgaaagac

SEQ ID NO: 135643 - DNA, 440 bp, Homo Sapiens
ttttttaatcaacaagtgtttattgatcacctactgtgtgcctggcactgttacagatagtctgggggatacagagaggtctaggatatggcccccacccaccgaagggtttacaatatacttgtgagatcggacacacacacacaaataacgatcaatcaaaaattgtgaatgctaagcatcaagaagcaatttatacattgagggttgggggagggaggggtaggagagggatggagtgatcagagaaggctcaatgaaggaggtgacgctgaggaagttctccaagcctgaggaggacttggctaaggggagacggccttccaggttgggagagcagctggaacatggcaagaaggtggacatgtgaaaggcatgttacagacaacagatgggccctctctgctgacaatgaggttcgaggaggtgtgctggaattt

SEQ ID NO: 135644 - DNA, 1027 bp, Homo Sapiens
tcttgtgcacgggtagggcttctcgccggtgtggatgcgccggtgcgaagtcagatagggcttattggtaaagcgcttcccgcactcggggcactggtggggccgctcgcccgtgtgcacgcggcggtgagcgatcaagttgggcttgtgccggaagcgcttgccacaacaggcacactggaaggggcggtcgacggcatctccaccgggccggggggcggtcaccgcggggcggcccctgggccggggccccagagccttggctgcggcctcctccagggcctcggctacgtgcacccgcttgtgggcaactagctggtcccactgggcaaagctccggccacagttgccgcatatgaagggccgggcctccggggcgggagggtggcaccgccgcagatgagctcgaagctgctttcgtcgccagaagcgtctctcgcatttgggacaagcgatgggccgctttgcagctgaatgggcccgcagatgcagaaccagggccacccagcctcggaagctctgcccacagaggtggcaggcaaagcccaggtctggggtggcagcagcatggacctggcggtgcagtgctaagaagggggcatggcgaaagcgacggccacactcagggcagggcaagggcagccgggcctggcaccggcgggtgtgaagccacagagccacccagccagggaagtgccttcgacagtgggcacagcgatgggccctgcctggggcttgggcaccagactgggccactgacgtgccttgttgcctcagcccgcgggactccttccccagggtctggggtgactcctgggagggcccagaaaggagtcggggctgggccaggcccatggccagggggcccctgcaacgacgttccagcatcggttcttcctctgctctgcggctgggctgtgcagggacgcggcgcccgtccatggagcccgaaggcctggcctccgcagcccactctcgctccccgacgcgtggtcgacgatatcccgggaaatccggacgcggtacc

SEQ ID NO: 135645 - DNA, 1163 bp, Homo Sapiens
  misc_feature (238)..(246): n is a, c, g, or t
tgcgcccttgggggtttttcccaaaagatcttcccacgagagaaaaaggggtgttttatgagctttttccattcccataagccccccccaggggggaggcccttttttaagcactccaattaagcgccaatctccccgtagagagggtggaaggccaaaaggaagaccaacccttttctggggggaccaggagcagaccccttgggttgctacttcccggcagtctaaccgccaggannnnnnnnntggccccagactgtgccccacattttgcccgcttggccctttttcccacccacccaaaattaggacattgcaggaaggaatgctctccctgaatccaaggaacacccacagcctgctgccctcggggcctgatcaccggctctgccgtccctcggggtgctggagattactggggccatagaaggggagggaagatgagactgcaatctcagtcccctgcccggtcctgccccaacctcgccaggggctgccccatgttcagctcttccacagctcaggggagcccaagattcctgcacaggagcctcctccgcggaaggaggaaggaagcagttaggctcctaagggcccttctgtgcctgctcacaagctccagacacatccgttctaaagttccctagagcgcactctctcgttctcagggaacacaaaggtcactcattcccagtgtcagactgtgcacagggaagaccccaggatatgagaaagggccatttccttccgccgggatggggacgcccgtgcacccctgttgtggcgtggtttgggagcacagcaaaggccagactctaccctggagactgcagagctggggatgaggctttttccagctcctcttggggatgttcctggggatacttccgcggctgcagcgcctgcttcggcccacactccggtagcccccaggtgttagagaaaactgcagtaataaagacacccctatccccatggcagagctcagacctctgactgcagagaggccagccttacctctgcggcgggctgtgcaggggcgcggcgcccgtccatggagcccgaaggccggcctccgcggcccactctcgctccccgccccgccgcggcgacagcggcaggttcgagttcacaactgccaggcccgtcatcccgggaattcc

SEQ ID NO: 135646 - DNA, 941 bp, Homo Sapiens
ggctgtccaaggtctggagcctgctgaaggaagccgttcgaatgatgttcagccagaatgttcccagggccaccacttggagctcctttcctatactttttgatgagcttggtgatggccaggacgatctcataggacaccacctcggttcggacatgccatggcctggtaaaatgatggcaacacagatgtcggcgagttcctgagagaatagagtccggtgggctccccagagagccatgcccacaaaaaacacggctcctctcagcaggggcgcgtcctccatgtaggctctgtcctccatgaggtggcacatgttgtagatggcgctgtggcccaggtgggtgccaaggaggttccgcatcagcttccagcaaggctcgcagagctccttgacgttgatggtgcgacagagggtaacgatgaacagcgggaggctctcagccggcaggcagttgtagcagaccacggcgtccagcacctgcagggagacctctatgtccacagaggacgcggtccggacgcacagcagacagatcatctgaaccatccttgcgatgtactcgtcgaggtaacagctattgaatttgaccaagttcaccagcaccagaaggaattccgaggacaagccaacatccatccactgcaggacaaagtcagccagctcttcctccaagtaggtgatgtgtctcccattgtctgtgagggccttgaaaacctccagcctttcgtgaaggtcttcgttggaagggtaatccttgatgaccttaaagaagagggctctgaggacccccaaacgctcgccctgcccctgcacgatggccttcagcagagccagcaccgcgtgccgggcctccagcggccgctccggctgcaacagatccgcgaccgccttccagagtgcttcctaagggaattcgccaccccaggcctcgcttccg

SEQ ID NO: 135647 - DNA, 658 bp, Homo Sapiens
gcggccgcggggaggaggatgggggctaaccagttagtggtgctcaacgtgtacgacatgtattggatgaacgaatatacctcatccattggaattggagtttttcattcaggaattgaagtctatggcagagagaagctgttgttttagggagcacggacttcctagaagatgatatagaaaaaattgtagaagaactgggaaaagaatacaaaggcaatgcttatcatttaatgcataaaaactgcaatcatttttcttcagctttatcagagattctttgtgggaaagagattcctcgctggatcaatcgacttgcctacttcagctcctgtataccctttctacagagttgcctcccgaaggaggtgtcacgcccgcagccctgcagtctagtgtcagccaagaactccaggatgaactggaggaagcaggaggtgttgccgatccgcttccgtggcaagcactgcagcaggctccagacccgggcgccacactaaactataaatgtctccaaagtcacacattcagaactgtctctggcagtcgaatatcactagagaaaagtaaacagagaagcatcctttagatattttgtatgcaaagatggctctcccccaaatcccagtttttcagctcaggattatatttgtaatca

SEQ ID NO: 135648 - DNA, 875 bp, Homo Sapiens
  misc_feature (115)..(115): n is a, c, g, or t
aggaaagaccaccaaaatataataccccctttagccccggtctcttttcccgggtatttttgggattgagggaaaaatctcccaggacaagtaacaatttcatttttaccccctnataagatggcctgagccagaatcggccaggtgtatccaaataaaatctactgaaaactggatttgggagaccctcttgccacaaaagttattaggagctctctgtactttttcctagtatatcgactgcaaagccagtctgatgggtacttgaaaacatttatagttagtgtgcgcccgggtctgaagcctgctgcagtgcttgccacgaaaagcgatgcggcagcatcctctgcttcctccagttcatcctggagttcttggctgacactagactgcagggctgcgggcgtgagccacttcttcgggaggcaactctgtagaaagggtatacaggagctgaagtaggcaagtcgattgatccagcgaggaatctctttcccacaaagaatctctgataaagctgaagaaaaatgattgcagtttttatgcattaaatgataagcattgcctttgtattcttttcccagttcttctacaattttttctatatcatcttctaggaagtccgtgctccctaaaacaacagcttctttaaatttaaatgtttctcctagttcagaagcatttcctggggaaatttcaaatattccagaaaaggggtaaggatggccaccataagcaaattctctgccatagacttcaattcctgaatgaaaaactccaattccaatggatgaggtatattcgttcatccaatacatgtcgtacacgttgagcaccactaactggttagcccccatcctcctccccgcggccgc

SEQ ID NO: 135649 - DNA, 706 bp, Homo Sapiens
  misc_feature (161)..(161): n is a, c, g, or t
  misc_feature (175)..(176): n is a, c, g, or t
  misc_feature (184)..(184): n is a, c, g, or t
  misc_feature (192)..(193): n is a, c, g, or t
  misc_feature (196)..(203): n is a, c, g, or t
  misc_feature (205)..(206): n is a, c, g, or t
  misc_feature (209)..(210): n is a, c, g, or t
ggggggggaatcccaaggccctagttcatgggccccgggatttccttagggaaacccgcttatggcccatgttcccctttcccttctgggggcccgcggcgccaaacggaatggttttagaaaagctttttggagggccgagggcggccgaccatgttttntttttcatcttttnntttttccntattcgtnncgnnnnnnnntnncanntgtggaagaatacagaaatatgtttaatacttagtatcaaactaaaaagtaatataaaattacaaaacttcttttttttcatgcacaggctttttctggtaaggaccgctgggattgaacagaagcttccggtaaataagggccccgtcggcaagacagcatactgctgtcacaagtgcaaacacccctccaccaactgtcaatgttgtggtttctggtatcagtgccaacacagatacgatgagcatgaatactgttgttaccagtgagttgataatatccagccgcagcatcttcacgtggcctttcacactgaagcagaaggggcgatgttttattttcggctgcacgttatccatcgcgtctgcagacccagcagcagcactttccctcaactcttctcagctggctgcctgagtaggttctgcgaagcgatagcaaccgccaccgcggcggagcaccgccctcccctacttctcgcccagctcggcttccc

SEQ ID NO: 135650 - DNA, 524 bp, Homo Sapiens
catgcacaggctttttctggtaaggaccgctgggattgaacagaagcttccggtaaataagggccccgtcggcaagacagcatactgctgtcacaagtgcaaacacccctccaccaactgtcaatgttgtggtttctggtatcagtgccaacacagatacgatgaagcatgaatactgttgttaccagtgagttgataatatccaagcaaaggccaaaataaccacttcattaatcgatcaagtctgagtacatataaaagtatgaaaaataagataacggtggcttcaaatccagtgataacaatatatggttcgggggcttgtgcgatgataaaaaaggtcatagatgtcacagttagtgccagccgcagcatcttcgcgtggcctttcacactgaagcagaaggggcgatgttttattttcggctgcacgttatccatcgcgtctgcagacccagcagcagcactttccctcaactcttctcagctggctgcctgagtaggttctgcgaagcgatagcaac

SEQ ID NO: 135651 - DNA, 800 bp, Homo Sapiens
aggattttaactgtaccttttaatttgctccttgggctaagaggaagtaatggtactagatcagtgtctgagaatagaagcatttaagacagtgagattaagtcaagtggttgggtcagtggaggcagccacctgccctggaggatcagcctcgaagtatcgatccagcagggcctccacctctccctcctcatagtcccacacctggaaccgagagccatctgctgctccccggatcatggccgaaagcactggaaagggcagggaaaggtgaagctgcctcccatccacaccctcacagctcccttaccccttgggagaggcgcggtgctcagagcccaccagggaaggagctgagggctgggtccatagaaagccaggagggaggcttggggtgctcaccgcggccagactgcgggcggaacaggcacaggatccgcttgttaaaggccacggcccggcccagctcatagcctacacccaaggatggctgtgtcacttctgccacgaccacgtccgcctgctgcagccactccaggtcctgctcatggatgagcctgtcacccccagcagcctcttccccgcgcgcgcccagctcggcggccgccacgtgctcggtgagcactgtcccgaatcgccgcagccgagacacgatccgctcgtacagcgtcctgtcctcgcgtccgccgcgaatgctcccgcagaagtacagggccgggcggccaggctccccgcgctcccagctctcgctgcgccccggcaccatggcagcagccattccccagccgcccgcgctcccc

SEQ ID NO: 135652 - DNA, 777 bp, Homo Sapiens
  misc_feature (79)..(103): n is a, c, g, or t
  misc_feature (114)..(116): n is a, c, g, or t
ctaacttctatctagcactcctgcagcaccaccgtgggctgggtggcttggttgaaagggggtgtgggcagcggggaannnnnnnnnnnnnnnnnnnnnnnnntaggctcgccnnngggtaggattttaactgtaccttttaatttgctcctggggctaagaggaaggaatggtactagagcagtgtctgagaatagaagaatttaagaaagtgagattaagtcaagtggttgggtcaggggaggcagccacctgccctggaggatcagcctcgaagtatcgatccagcagggcctccacctctccctcctcatagtcccacacctggaaccgagagccatctgctgctccccggatcatggccgaaagcacgcggccagactgcgggcggaacaggcacaggatccgcttgttaaaggccacggcccggcccagctcatagcctacacccaaggatggctgtgtcacttctgccacgaccacgtccgcctgctgcagccactccaggtcctgctcatggatgagcctgtcacccccagcagcctcttccccgcgcgcgcccagctcggcggccgccacgtgctcggtgagcactgtcccgaatcgccgcagccgagacacgatccgctcgtacagcgtcctgtcctcgcgtccgccgcgaatgctcccgcagaagtacagggccgggcggccaggctccccgcgctcccagctctcgctgcgccccggcaccatggcagcagccattccccagccgcccgcgctctccggcccccg

SEQ ID NO: 135653 - DNA, 800 bp, Homo Sapiens
  misc_feature (58)..(59): n is a, c, g, or t
  misc_feature (107)..(107): n is a, c, g, or t
taacttgtcttccttatcatccacttgacctaaggttaaagatcttagcaactcacanntcaagtcaacatcagtgctgagcttcttgatgtggtcgaggttagccnacggttgtgattggcacatactggtcactatccatctgtgatataagatacatgtcactagcaaggttctccctagataagcagaattccaatgtttttttaagtacttctcgggggtcttcctggctgtctggttgagactcatttcctcctgtctcgctattttcaggcagagagtcatattctgagggacccagagcgagagcgttcatgtctgctgggtccgactcctgcgggtctggcaatgcggcattctcatggccctggtcaccatcaccattggcatccgatccctgcgggccacggtctgcgtggtggccagccacctcctcccatgcagcactcacaccgtcagcagcactgcttgcttccagatgtaacacaggagccccccacacttctgcattagggttcagctctgaaaccttagttgctggtacctgactcaaaggtgggatggaacttgtctgagaagtggtttgagatataggaccattcatcagatgagcgctgtccttgccctcctggactctctgcgtctgcggttcagccacaaccttagcgtcctgatcagaagtcatgggctccactgggagaagtgtaatgctaacctcaggatgctgtcagcgccgccgccccgcccgaccggccgcccgcgggctcctcgcctcaaccccggggcccggcggccgc

SEQ ID NO: 135654 - DNA, 629 bp, Homo Sapiens
ggccgccgggcccggggattgaggcgaggagccgcggcgacgcggtcgggcggggcggcggcgctgacagcatcctgaggttagcattacacttctcccagtggagcccatgacttctgatcaggacgctaaggttgtggctgaaccgcagacgcagagagtccaggagggcaaggacagcgctcatctgatgaatggtcctatatctcaaaccacttctcagacaagttccatcccacctttgagtcagaaaacactcctcagctaccggtgtcagaggacggtgttgtttggggatggcatgatagagacggacagttcgtaccagcaactaaggtttcagagctgaaccctaatgcagaagtgtggggggctcctgtgttacatctggaagcaagcagtgctgctgacggtgtgagtgctgcatgggaggaggtggctggccaccacgcagaccgtggcccgcagggatcggatgccaatggtgatggtgaccagggccatgagaatgccgcattgccagacccggaggagtcggacccagcagacatgaacgctctcgctctgggtccctcagaatatgactctctgcctgaaatagcgagacagggaggaattgagtctcaccc

SEQ ID NO: 135655 - DNA, 441 bp, Homo Sapiens
  misc_feature (385)..(385): n is a, c, g, or t
aaaccaaagttaatcttctaagtccttttaattgttcttataaactagcataagatataaacttaagtagtacacatgagttttataatttactaatctctgacagatagctaagcatagcacatcagagcataacacagtgtgagggaaataaagtgtacaatgacatcttctattctggacctaataattcaatagagaaagaactacttgtagtcactgtggttacagaaggtttcatggacagcgaacataaagctctactagctaacaaataggtcttaatgataaaaacgtgggccttcagagaactaaaggtaccaatgtgtggcagtccaaaattacgaggaaaatgagttcccttcatgggtcacatcagcaattntttttttccccttttgagacagagtcttgctctgctgcccaggttggagtgcagta

SEQ ID NO: 135656 - DNA, 489 bp, Homo Sapiens
cctttctgggcccccggggcccaaagggaatggtttatgaaaggtttttcggaggggccgaaggccgcccgaccatgttttttcctgccaccggagagggcgggacttactcttctaaagtcctttttaaatggttcttattaaacttagccataagatataaaacttaaggtagtccacatgagttttataatttactaatctttgacagatagctaagcatagcacatcagagcgtaaacacagtgtgagggaaataaagtgtacaatgccatcttctattctggacctaataattcaatagagaaagaactacttgtagtcactgtggttacagaaggtttcatggacagcgaacataaagctctactagctaacaaataggtcttaatgataaaaacgtgggcccttcagagaactaaaggtaccaatgtgtggcagtccaaaattacgaggaaaatgagttcccttcatgggtcacatcagcaa

SEQ ID NO: 135657 - DNA, 449 bp, Homo Sapiens
taccaagactgtttttatttaaaatatacttggaataggtgaatattaatctaagcattttcctatcacttttaaaattttatactatgtactttgtattaaatagtacagtagtttcagtaagacatgtaaaatttgccattttaaccaccttaaagtgtacaattcagtgacatttattatatttacaatgttgtgcaaccatcaccactaattcatcaaattttaataatcttttaatttttgagccagatttagcagtgaggggctatataccaactttaatgacactaatgttaataagttctgataacccactaccatcagaccagctgtaattcatccaattttcatcatcctaaaaggaatccccatacgcattacgcagtcactcccttttcaccccctccctagttcctgataactactaattggctttgtcaccatgg

SEQ ID NO: 135658 - DNA, 1085 bp, Homo Sapiens
  misc_feature (138)..(138): n is a, c, g, or t
ctttggtgtacaaaatggaattcattctggtctctctattaccactgaagatagaagaaaaaagaatgtcagaaaaacaataagagcgtttgcccaaatctgcctattgcagctgggagaagggggtcaaagcaaggntctttcacccacagaaagagagcactgaccccgatggcgatggactactgaagccctaactcagccaaccttacttacagcataagggagcgtagaatctgtgtagacgaagggggcatctggccttacacctcgttagggaagagaaacagggtgttgtcagcatcttctcactcccttctccttgataacagctaccatgacaaccctgtggtttccaaggagctgagaatagaaggaaactagcttacatgagaacagactggcttgaggagcagcagttgctggtggctaatggtgtatcttgagatggccctctggtagacacaggatagataactctttggatagcatgtctttttttctgttaattagttgtgtactctggcctctgtcatatcttcacaatggtgctcatttcatggggtattatccattcagtcatcgtaggtgatttgaaggtcttgatttgttttagaatgatgcacatttcatgtattccagtttgtttattacttatttggggttgcatcagaaatgtctggagaataattctttgattatgactgttttttaaactaggaaaattggacattaagcatcacaaatgatattaaaaattggctagttgaatctattgggattttctacaagtattctgcctttgcagaaacagatttggtgaatttgaatctcaatttgagtaatctgatcgttctttctagctaatggaaaatgattttacttagcaatgttatcttggtgtgttaagagttaggtttaacataaaggttattttctcctgatatagatcacataacagaatgcaccagtcatcagctattcagttggtaagcttccaggaaaaaggacaggcagaaagagtttgagacctgaatagctcccagatttcagtcttttcctgtttttgttaactttgggttaaa

SEQ ID NO: 135659 - DNA, 523 bp, Homo Sapiens
tcttctagctgagttggtcctttaagatctttcctggaagcttcatccaagggcttctacatacctctctgtgaccattctgtctgcaagagatagagaatcataaagtcttttatctgaggaatttgctgcccagatagaatcagggttattttggaaagaaagaagggcagaatcgcttgttgggcaggcaacctgctgtctgtcctacaggtctcaacttgtcacactctcgggccatttggctctgcctctgggagggaggagactgggttggggaagagtcacagtggaatattcaagttgacctcacagcaaaggtgttggatgaagacagaatgtagatatctgaaaatagatcctgacatgccctcaggattcaggtgtctgacacagaaaaattatttttcgtttgttcctgtgtccaaggctggaagtgtggttacggctctgttcccaagtctaggtcctctaattgaacacgaggaaggttccactctcaaaggctctggccggcggccgc

SEQ ID NO: 135660 - DNA, 461 bp, Homo Sapiens
ttttactttcttttcatatttcaactttatttaaaatatgaggttttatgtccagaagggagggcagttgcccatggaaggtgaagtgaggcacaatactattgggttgcgggccaagtacacagggttgcactgtgaaggaactgaggaggttctgggagggcctggtgacaacaatggatttggggagatccacaaaggaaattttcatttcctccccaggttagctattcagtgggtggattattcagtctttttagcaaggtcactgctccttagcaacatcaacaaaagtgccaaagctgaggacacagagaataccatcattgtcttttgtttctctttatgcctctggacctgtgttctcatctgtaaaggagccaggaaccaatgacgtcggaagagaagccttttcatgtctgattctatgacctgcaaactgcaaagatcccagcaggctc

SEQ ID NO: 135661 - DNA, 707 bp, Homo Sapiens
tttcagttttcaattttcatttgtgtgtgaatttttaatgtaaatgtaggtggggaagtaaagcattaatgcaagtcaaaatgaatttgtgaacatttcagtggttcaactttataataatttaagcaaacttattaaatttttctggacacacacacacaaaaaacaaggtgaccaagaaattgagtcaaggagggaatcttgcctctgagtctcttgctgcccttagcccaaaacacacaatacttctgaatatcttatgacatactttcttttcatatttcaactttatttaaaatatgaggttttatgtccagaagggagggcagttgcccatggaaggtgaagtgaggcacaatactattgggttgcgggccaagtacacagggttgcactgtgaaggaactgaggaggttctgggagggcctggtgacaacaatggatttggggagatccacaaaggaaattttcatttcctccccaggttagctattcagtgggtggattattcagtctttttagcaaggtcactgctccttagcaacatcaacaaaagtgccaaagctgaggacacagagaataccatcattgtcttttgtttctctttatgcctggatggggaaaggaatggaaactaatagcagaaaatgaaacatttctgatgttatcccttgccatgaagaatcacgggcttgtgtagagacctc

SEQ ID NO: 135662 - DNA, 342 bp, Homo Sapiens
tttgctttaaatgtatagtttttgagtgggcggaagtgggcgaaacatgaaaggtgccattggtgacacttattacagtgacagtgtcgtggaaccatcaggactgtctagcgccagaactttttcatcgccccaaagggaagccccgtatccgttaaggactcactccccattcgccctctccagcccttggcagccaccagaatgctttctgtctccataaattcatttttaataagtgcaattgtgtgtgactttaaaataaataaacatgagcacgatgagttgcttattggaaggatatccatgcggggaggccggcgtgtggagtgcgtaggcctc

SEQ ID NO: 135663 - DNA, 622 bp, Homo Sapiens
tttgagtgaaagaggatatatttattggctgagcaagaagggaaggtacagttggtaatggctgcttctagaagccaccagtctcaggttcacttgttccgagcccagtttcctccaaggtggctgtactgagcatcatctcgatctcggaggggctgatagacctggtcattcctcaacagagcttgtgtgtcggcagccccagacagccttccagtctcatgtccagcaaagcagaagactcccaaagcaaggagcagagtggcaatgacatcagtgacaatgatgccagccacggtggctggatccagctccacacagctctggcacattcgataatgaacttgcacggtagattctttgtccttgtatatatctgtcccattacacctatatattcctcgtgggtccaggatgcgttttcccaggtccagtcttgtaatgtctgagagcagtgttcccaccgttccctctacccatgtgatgctggtattgcaattcacaaacactctgtcctcaagttcctctataggtatcttgaaggggctcacttgcgagagaagggtagccagtaccaggccagagagaaacgtgctatgttccatctcccagcggaactcat

SEQ ID NO: 135664 - DNA, 340 bp, Homo Sapiens
acccagcaaatcttttatttttgcttgcactctgttgctctgctcgtcagcatcactgggggaagcatgctgacaagacccatcttgacatctgctcacacaatctcgaaggcagcagtaaaggagaatgtagcatattgtggctcttaaagctttcactcaggtaggacttaggtcacttctgcacacatttcatcagtcaaagtgagtcacatggtcaaacctaacttcaaagggggcagtgacgtgcagtcttactacattccaccagggttgcagtcaggacaagagagcaggtttgaacgtcttcggctcctagaactgcacaagctgtgtcttc

SEQ ID NO: 135665 - DNA, 631 bp, Homo Sapiens
tccatcaggtttttaattgtacatcagtgactgtgaaaaagcaattattcccataattaaaatacaaactataaaaaaacagactcaaagaaaagaaagatgacagagtgaaagaaggtacatttctttcgtgttcaaaccacggagttcacaacacagcagcacacacagctgggcgctttgtggtctcggcaccctcggcttccccttcacggggccgctttcgactagtagaaggctgggctagaacctggggtagagctgtggattcattttcctcagacagaagatcttgaaactttctcttcatgtcttcatcctgaagccacgggtgtcttaaggcttcttctgtcgtaaaacgtgcctttggatccactaccaacaacttcttgacaaggtccagagctttctctgagacttctgcccagacttcaggaatgaagttgtattttccactggtgatctgatccttcagtgacacttgagtcctatgctcagagaaaggtggatacccactaaggcagataaaaagaataactcctaaactccagcagtccacagcactgttatacccagcagtcctaacagaaacatgaacttcaagcgccaagtagggtggggttccacataa

SEQ ID NO: 135666 - DNA, 1204 bp, Homo Sapiens
  misc_feature (708)..(708): n is a, c, g, or t
gcggccgccggtgctggaaggcggcgctggcggctgccctgggacccgcggaagccggcatgctggagaagctggagttcgaggacgaagcagtagaagactcagaaagtggtgtttacatgcgattcatgaggtcacacaagtgttatgacatcgttccaaccagttcaaagcttgttgtctttgatactacattacaagttaaaaaggccttctttgctttggtagccaacggtgtccgagcagcgccactgtgggagagtaaaaaacaaagttttgtaggaatgctaacaattacagatttcataaatatactacatagatactataaatcacctatggtacagatttatgaattagaggaacataaaattgaaacatggagggagctttcatttacaagaaacatttaagcctttagtgaatatatctccagatgcaagcctcttcgatgctgtatactccttgatcaaaaataaaatccacagattgcccgttattgaccctatcagtgggaatgcactttatatacttacccacaaaagaatcctcaagttcctccagctttttatgtctgatatgccatagcctgccttcatgaagcagaacctggatgagcttggaatatgaacgtaccacagcattgccttcatacatccagacactcccatcatcaaagccttgaacatatttgtggaaagacgaaantatcagctctgcctgttgtggatggagtcaggaaaaagttgtagatatttattccaaattttgatgtaattaatcttgctgctgagaaaacatacccaataacctagatatcacggtgacccaggcccttcagcaccgttcacagtattttgaaggtgttgtgaagtgcaataagctggaaatactggagaccatcgtggacagaatagtaagagctgaggtccatcggctggtggtggtaaatgaagcagatagtattgtgggtattatttccctgtcggacattctgcaagccctgatcctcacaccagcaggtgcccaaccaaagggagacggaaacggattgaccgccggtgaatgtagacgccctaggaggagaacttgaacaaagtctctgggtcacgttttgcctcatgaacactggctgcaagtggttaagaatgtatatcagggtttaacaataggtatttcttccagtgatgttgaaattaagctt

SEQ ID NO: 135667 - DNA, 1390 bp, Homo Sapiens
  misc_feature (698)..(715): n is a, c, g, or t
tagctgacaaaaacatttaatatgttaccttagaccttggagagatgcccagcagaggtacagagccaaaggcactagcagatcactgccttcttgggagatcacttataagccctcccttttgtaatgatcagatgccctcttccctcagagttgattagagaagcagtaagaatttgtagtcataagtactagcctggtgcacaggtcagcagtcctcttggccagtggtcattttctcccaccaccatggtacaagcctgggttctgtgccctgaacctgaattctggaaagggagagactacagcatttcacagagaacagccagacccaagagctttcagtgtaggatgggcctgaagtgacagttcaatagccaaacctggggaagccccatcactgactgaactaggtcatttgaccatggagggggggcagtgtaaaggcaacgtgtaggtacagctcttttattattaaatgtgtaaggtgatcagctgattaacaggctccgagactgtccatttcagtctcccatccagtgcttcttcctcagtaaccttcaggccgttatttctgcccactctctgacacacaggataaaccaagactcccagagttatgttaccaaaggcaaaaaggcaactgggtggccttggctctgctttattgacctcagagcaccctatgagtgcagttnnnnnnnnnnnnnnnnnnccacatacaccatgggaactggaactggatcccggtcagtggcacctgaccccagaagaattcgtggatttgtacaaaatgcagaggaagaaatgaggcaatgtggtgctgagtcgaggggtagccgattggcagagtagtagtcagcaacagtgcagtcaggtcatgcctctttctcataagtgcgagtgcaaactgcagtgccgtgggtgagtgtcaggatgagttttccatcaattagctcccgcacaagtgtggtctcttgcccgtcccatttctgcaggtgaacaagtttccctccatccagtgtcacaatggacttgaccttcctgtcatctgctgttgtctcatcgaactccacccccaacttaaagctgatctctgtgttcttgaaggtgctgtgtgtttttagggtgagaatgtccccattcttttcgatgattgtggtaggcttggtcatgctggccacctgcctggtagcaaaacccacaccgagtgacttcatgtagtcatcgaaattcttgctgtccactagcttccaggtgcccaggaaagcgtccaccatagtgatgctgggctaggctgagagaagctacaagagagcaggcgtgcaagggctccgacccccggccgtaatggccgaattcccgggcatatgtccggtaccgtcgactg

SEQ ID NO: 135668 - DNA, 776 bp, Homo Sapiens
gggaggcggccccacgcctcaggcgactggttgttaccgaggaagatggcggcgccagacccgaggcgctagggaagatcgcaccgcggacgcccgctgagcttggcgcacgggccgaccaggagctggtgactgccctcatgtgtgatttgcggcggccagcggcaggtgggatgatggacttggcctacgtctgtgagtgggagaaatggtccaagagcacccactgcccatcggtgcccctggcctgcgcctggtcctgccgaaatctcatcgccttcaccatggacctgcgcagcgatgaccaggacctgacccgcatgatccacatcctggacacggagcacccctgggacctgcactcgatcccctcagagcaccacgaggccatcacctgcctggagtgggaccagtcaggctcccggctcctgtcagcagatgccgacgggcagatcaagtgctggagcatggcggaccacctggctaatagctgggagagctcagtgggcagcctagtggagggggaccccattgtggccctgtcctggctgcacaatggtgtgaaactggccctgcacgtggagaagtcgggcgcctccagcttcggggagaagttctcccgagtcaagttctcaccgtcgctcacgctgttcggcggcaagcccatggagggctggatcgcggtgacggtcagcggcctggtcaccgtgtccctgctgaagcccagcgggcaggtgctgacgtccaccgagagcctgtgccggctgcgcggccgc

SEQ ID NO: 135669 - DNA, 857 bp, Homo Sapiens
  misc_feature (163)..(163): n is a, c, g, or t
tgagagcgagaaagatcgtgtagcatagtaaaatacactgaaatgaggagaaggacctcccgtgcccagattcccccgtaaaggattgcaggacaggccggcagcagccagcttagtgagtcgcactcccgtgggttcacaggacacgtgacaggcgctgacntcaccgcatccagcctccatggcttgccgccgaacagcgtgagcgacgggagaacttgactcgggagaacttctccccgaagctggaggcgcctgacttctccacgtgcagggccagtttcacaccattgtgcagccaggacagggccacaatggggtccccctccactaggctgtccactgagctctcccagctattagccaggtggtccgccatgctccagcacttgatctgcccgtcggcatctgctgacaggagccgggagcctgactggtcccactccaggcaggtgatggcctcgtggtgctctgaggggatcgagtgcaggtcccaggggtgctccgtgtccaggatgtggatcatgcgggtcaggtcctggtcatcgctgcgcaggtccatggtgaaggcgatgagatttcggcaggaccaggcgcaggccaggggcaccgatgggcagtgggtgctcttggaccatttctcccactcacagacgtaggccaagtccatcatcccacctgccgctggccgccgcaaatcacacatgagggcagtcaccagctcctggtcggcccgtgcgccaagctcagcgggcgtccgcggtgcgatcttccctagcgcctcgggtctggcgccgccatcttcctcggcctcgtgccgaattcggcgcgccgtcgacttcataccctctccccct

SEQ ID NO: 135670 - DNA, 1247 bp, Homo Sapiens
cccagttgagggtttaaccccctctaatatccctttaaaaaatattttattatttcccctttgggagcctttaaaattcttctttagggtagtttttttcccaatttatgtccccaccccccagaaagtaagggttcccttcaccaaaggatccccaaggctagccagtttttccccagttcacggacgtttgtaaaaggaccggcccagtgcctaggcttataatttcgactcactataggggccccctttgtacaagaaaagctggggtccgcgtaagcttggggcccctcgagggatactttagagccggcccgccttttttcatttctgtgttgtttttggaggaacatgattttattggttctttcagttcaccacatccgactcgcgtctcggccctggcccgccttgcggaccttaaagcagtcagtccagggtttgggggaaacgtgctcacccgacggcagctcacaggaccccggagagtcctggcatggtatctcggtccggactctccgctgggcccacgaaggagaaaggctgcctcggattcctgcgcccaagccaaggtccggcgcccacggaggcaagtccggtctcacggtgacctcccgctggcgccgccttcgccgccaaccatccagttcttcctccaggccacgttctcctgcgtggtcgctgcctcctgcagagtggccagcaatagctgctgggtcctggccgcctcctccctgctccttgggtcctgcagtggcatctcctttagcatttcctgcttccgccgctctcccggggtcacgataacgaggagcgcgtagcccacgccagcccctgcgcccagcattgcgactgagatcagcattttccgcaaggaatccatggccgcctgcacagccagcggagcgcccacgggagctccccgcagccgcaagctgttgccgcgcggtctcactaccccttggcgcaggctagagcgccctatagcagaaaccatagataagcggccggctagagaggacctgctcgaggaaacgtttggaatccggagcgcttggatctcaggtttagctgagggggttgaggtgtccaagaagtgctggcaccaagggctgagcgcggggaccctgtgtcctcaattccggggtgggattgctagggggagagtgcgtgtcttcatggttgccgtgggttttatgattgcccatttttctgtcttccgacgtttcccgatcagtagaggcccg

SEQ ID NO: 135671 - DNA, 1188 bp, Homo Sapiens
ttgtagttgctgaaaagaagtttattgctattttcttattttattatacaaaactagatttgcttaaaacatttcccagtctctttaaaggaatgctagttagtgggaggccacagctagtaaattaccctcagtagtggtttcaagtagtccataactataaaaatcgttacggccaggatatgccggaacagaacactccccactggggtcctcagccttggatgtcagctcggcccctcaaaggggtccctacacctggaagctgattccactcatcagtctcgagctgggcgcatgtggagttgatgtggagttgtagctgactggctggtggggtcagcctggcctcccagtgtggagcatgggcaccagcctcactgcgtggtcaccctagggcatatgctgcgggctgttgtggcattcctgtggccagcccagaggcaggcaggggctgtctggggtttgccatgtgcaccatcacctgggcttggggtgagctggaggagccactgaggcttagagctctggggatcccagggtccttgtccacgctgcgggtcacactggccagcttgctggtgctctcaccatggtctgtggtgaagctgtggttgtcgtgcgcctggctgggccccgctcccgggtttgttgaagtgcttgagggccaaggtatgcggcctgcaccgtctccaagtcctcatctttcagctgggaccacagctgggctgacctgttggagcgccgccgcttgctcttcttcacgcacttgaggaggcagcaggtgaggaaggccatggacatgagcaggatgatggcacagctcacaatggaggcgatcacggccaccttgaagccaaaggtctcgtgtggtggcaccagtttgcacactggggaccctgaagaccactcagcgatgctccccttccaggtgcaggtgaggagcccagaccccaccatctggtggttggaggggcagcggaacatgagcacggtccccacggaagcaccattgccacgaaggacttggaaggttgcttgcgggggtagccgcagcttagcgcacgtgcctgtgcggttccctggggcaggcgtggtgaccccggcccgcccccggggcctcgccttgccacggagggtggcggccgcccagcgcatcctgcgcgctccgaggcgcttggcgggccc

SEQ ID NO: 135672 - DNA, 491 bp, Homo Sapiens
aaaaaccagtgacccggaccacgggccactgtcacatctgagccaggttcactgcggctcctctgccgactgactgcctgacagtggctgcgcttctccaggtgtctcctgcctgctgtgtggacggtcccgtcagggttgggatgcgcctgctgtcccctctcctgtctcgcagtcttgggttccccggagttgcaggaatcagggcatttgcccagtggggccttgctgctggatcccctggtcgggactgtgtgcctgccacgtgtcccgtggccacctggccatgtggccggccaaggccctgtgagatgtggcaggcaggcacctcgggggcctgggtctcctggaaatgtttctgtcactctgggcgcaggtggcgccagctgggttgtcctcataaaggccccatccgggatactaggaaggccatcctcaacctgtccgcacacgtcacctccatgtggcctggccacagctccttcaggcat

SEQ ID NO: 135673 - DNA, 1443 bp, Homo Sapiens
  misc_feature (1336)..(1370): n is a, c, g, or t
tttttttaatatttcaacagctttgtgtttaatgttgggccttaaattccagattaattttagtgaatagtgtcaagtggggctctattatttttaatgagtaagcaattgtcccaactctattggctagcccaccagtctgaaatactgcctttatcacactaaactcccatgtgtacacaggacggtttccgaactccggttaagtccatcagtaccacagttttacttgtgttatcctcacccagtcttcacagggactccagtcccatttaacacacctgctctctccaactgtgcaatctcgttttttctagtacccactctcagggcttgggcatgaacctacagcccttgaactcagttggggagtagggaaatgccagtatcgcagcgattcaattcatatcttgatgattctccacatatcctttttcccttttagcctttatacccaagagaaactcagctggacaccagtaacataagtgctattcattgaaaagagcaaagcaagagcgctgaccccttacggacaggatgaaacaaaacaagctctgcaagtctgcctcctgctcagcatacaggcttgttgccccactgggccatcttgttgttgatgggcatcttgcagaactgatcagactgtaagtaggcagcgattttctccaaagcctcaaaacggcacatgaaagccttcaggtttgggaactcatccaggcacttggggtcaaatatacggttctgatccaagatatcataggtgagaaaatccacaaaggtgagcttttccccggcaaaccatgagaatttccccagaaacatggagaattgtttcagttgtccaggtagctcttccaagtactgaggcttcagtttttcgtggtcagagctgtaacagagccttatcagttgtgtgcggaaatccattacttggttctctatgatgtccactcgaatcttttcttcttcagtctcaccacacatgttgtgcttgcgagcgatgtagcgcaagatggcattgctctgggtgatcttgttcttcccatccaggaggtagggcagattaggaaagtccaggtctagcttgaatttcacatccagccattggcttcgatcatagtcaggagcttccccgcacgtgtaccgtttctcctcataagaggtatccgtgaactccaggagcaggcggatggcgtgcgccagcccacgaatatcccagtacccgagaaccatagacgactcgcacgacatggtgacgggcttcggacgcgttggaggactccccggccgtaatggccgaattcccgggcatatgtccggtaccgtcgactgnnnnnnnnnnnnnnnnnnnnnnnnnnnnnnnnnnncggccgcttcctcgctcactacttcgctgcgctcgtcgttcgctgcggagagtagcccctatagtgagtctat

SEQ ID NO: 135674 - DNA, 886 bp, Homo Sapiens
atggttgcaatcgcgaaagaggtgggagacgatttgggggcgaggtggggggcaagcggacgtacggcggtgaaaatagtgtgaaggggagataaaatacaatgggggcgggtggtataaaacgaaagggggtaaaagtggaaaaggtggaggtagcaaccgggcgcatagacgaggccttatctttggttgggcatctctgttagtacccgagagggtgtgtggggggaaggagatgctaagcgcgaataggggcagtgttggaatagggatcccgatggaagatagtagtgggtgcaggcgtgcccgtggggatgttccctagtgaacattgaggattgttttcagctggccaggtaccatgtgcagagtatgggggcttcgaggtgttcggggttggaatgtagacagaggcgaaccagctgcatgcggaagtccatgatttggttctccaggaggtgtggtagtatcttttgttcttcagggtcaccacacatgttgtgcttgcgtgcgatgtatctcaggatggcgttactctgggtgatcttgttcttcccgtccatgaggtagggcaggttaggaaagtccagatctagcttgaatttcacgtccagccattggcttctatcatagtcaggagcttccccacagatgtaccgtttctcctcatagctggtatcagtaaactccagaagcatgcggatagcatgagccagcccgcggatatcccagtaacccagaaccatagacttggatgacattttgggcgatcttagccccttcggggatacagcgatggactgtgggcggctaactttatactggacgctgtgggccgggctgacgcgaccgaactgtctcctcctctctcgctctatgctccccc

SEQ ID NO: 135675 - DNA, 838 bp, Homo Sapiens
aagtggataaattatttcttagtgatatagtgagatgtaatccctttccaaaaagactctctgcaaattcatcataaagacatctaagttagtagtccagagtccagtattttctaaaatgtttaataattcaaacgaatccgaactatctgaagagtacctttaccatgacgtttagttaaagaccacagagattagaaaacacattacccatctcaagggcagttctttccacgttaccgagtcccttaacgacctttaccatttctccctccctcccacgcactctctctcttttaataaggttgagcaaatgggacttcattttatctgattgccatagactagtgagattaattattcatgctcacactctccctcttgttaagaccatgcattagactaatttttctctttattgccctagttgggtgagtctcaacccatgaccacttgactcattctcagaggtgtacagatatgctggaaaaacctaccccagcacaaatcccggagaaaatattctgcactaatgcagctgccaaagatgatgttgaggatggttccttttaagtaccaggtatatattagagaagcacttgaacagtaattacagagcaaatttttgcaggcaatagatgtttctgtaagaattagctaaaacagctaaaccatgttgaggctggttgtgtgttttacaatggtaactataggaaatgcatgacacagagaagaatttttcctcctctttggcttgcaggtagacctagaaggcaatgggggaaaagcaagcactatctttaaaaagaactctagcagaaagttctctattcatctg

SEQ ID NO: 135676 - DNA, 488 bp, Homo Sapiens
ttttttttgattactgaagaaaatgtactttattaaacagaaggctttctctcaaggccaagcccagtccccatgtgcagaaggagggtgtcagggtcacaggaacacctgcaaactggaagagaactcagtggtacttatgggccagggcaatcggcgacagcatgacaccagcttctgccaggcagcctgcacttcaggggtgaactccttgccaaagtgagtagccagaataatcaccttcacgttacccaggagtttgaagttttcaggatccacatgcagcttgtcacagtgcagctcattaacttacaaagcggcttggagggtgcccatttgttttataagcatctcaagagaaagtaacaccttctttgcttgggcctttctttttggggttgcccccaagggcaaagggaacaaacgggttctaaaactttcaaaaatttttggttcccgggggaacaaaaaaggagagtggcccaagg

SEQ ID NO: 135677 - DNA, 451 bp, Homo Sapiens
tttgcataagtataaatgcttttatttgcatccacctaccccaaatcccacaaactacttcccaatataggacaaagtaatagttatttagtggtagcatgttgcaaatatcttaacagtttcaatccatgtcaaatcagttaaatctgaaattaacttgcactatgatgcacccactgagaagctagtgtgatctcacacgagtttatacaaatatggtacttaagggcaggtttgattcgagcacaactggggaatttccactctttaggaactgtaggatgcacagggcggtgtgctgagagtgtggaggaagtgccagtccctggcctgtgaagatggctgaaggaacaaagtttttcctccgaaaaccaggtgggtagatgatagaaaatgaggtggctctgcagcactgggggtggttctccattccagatgcatttgagtccag

SEQ ID NO: 135678 - DNA, 563 bp, Homo Sapiens
  misc_feature (262)..(262): n is a, c, g, or t
taagaagctgctacagtataatgtaaggttaagagtttattctttcaaagcaggtctcctcatctcttaaacgctatacatatgaagtagataaaaactggtttcttttttggtagcatttaggatctacaaaagtgatccttcaattacttggaatttcaaaaaattgaggttacctagtaacaatgcaccagtagaacacaaaatactctgactttgtttagtctgtgggaaaagaaaaatctttaaactggaaagattnttgtagtcttacaaagattacattggaattggaattactgtagttcgtttttccctctaggagggcagccatttctctaaaagttgtgtaaaagttaagactaggatttcaaaatgcaagcagatgttgatgaagcatacgaaatgggcaactccgtttctatttcggagccgcagcgactccgactttgtgccccaaccctgtaaagggcaaaacctcatcccttcggtgtaaactttcaagagaagtggggcagcacactttaggcgtttcaccaagaggctggcgacatgctaggtca

SEQ ID NO: 135679 - DNA, 908 bp, Homo Sapiens
ccatattggctaccaccagtcctggttccttgcctgaggtcccagttagaagatgacagtgggtaagaaaggatgtttattcaggcctgatgcctcgatacagctagatgtacaaaaatatatcattcaaagtcatgaaaaccatcatcatattggtgtgacctccttcctccccttgggcacagcttttgcaactacctcctttgaaatctgggagttggtggggcaagggtcacttcttggcagcttcttcttgggcagccaaatctgcctccttctgagcagccaggaagatggctcgttccttctggaaagctgcaagctcttctgaactgaggtccttcaccacgcgaatgcccagagaacgggcagacccgatgatggagcggacaacagacgacaggggtacatcctgcagggcaaatgcctcatcctgagctttgatgcgggcaatctcatacacatgcttcaaggtcaccaggcctgccacctctttccctgtttgccgggcccccttttcaatcccagctgctgccttcaggaagtaggaaacagtgggctgtccaatcttaatttcaaatgtcctgtcaggcttcactaaaatcttggtaggcagaggaatgccttccttgatgtcctttgtcctctcattgaactccttgcaaaactggttgatggaaacgcctctctgacccagcactgggcctagtgggggcccgggcatggccaggcctgcccgcacgatcgcccggatcacaccgccgacctcgggcttcctgaggccccgggcggcccggccgagctttgacatgatgcggggctgctggcttcagttcacctcaggggagcagcaagagcgaagctctgggcgccaccatcttgggccagaggtcaagggtcctcacccc

SEQ ID NO: 135680 - DNA, 1727 bp, Homo Sapiens
  misc_feature (72)..(72): n is a, c, g, or t
  misc_feature (423)..(423): n is a, c, g, or t
catacaccatcttagagcaacagatgccaccatcttcaccaactgaccatgccgatagtgactatgagtctntatttgcagtctcctagaacatattcacaaaatccaaatcggagggctacagctgtgtccttagtccgccctccttgatcgatctgtacatacatgttattagatgtcacagcgcagcagcacatcttagagattcttctgaagtattcacattattttctgttatttcccttctctgtaaaaggtagttggcatgtcctttcttcagctatgaaagctacattaagaagatcaattgttcatctaaaggaatatgacgtccagcaagggtgcaataaccatggaatcaatgcccccagaaaacaggattgcaacatttgctttcctatcacacgttttcaaaacttcatntgctgtcaggttttcatccctaggtaaacacaagacacgtttcttgactgctacactcaggacatcaatgaactgctgaattacttccttcatgtgtacatcagtaagaaagacttgaagtatctctcttgtaggtggcacattggaaatattactgcaatgagtctccaatgcagcttgtggcaacatcatatttaagggaccaacaggtttttcaagatacagtttggcttcatttgctaccactgatacaaatgctggtaagtctgctgaaatttgactcaggctattaacattttcttcaataatattctccctagaaatatatttccaaggatacagttgtaaaataatgcatctggaaatgacagtagacttaagatcaattctgaaaagtccagatgctggaacttcttgccactgatttgccaatccagatgtttgggtgccaactgaagagaggcagaaactcttgcccaaattactaaaatgccaaagcaagctacggcgaccaaaaaaatccctaccgaaccataaataatgactagatgcttgataatatataaatgaccagggaccttgtacttctgagaagagtgacaaaatctcagattcattcttccaggaggaaagataattaaacaaaatttgagtgtcattctcttcagcttcaacctttattccactaaaaatttctccattccatagaaacacattgcctctttcatcttccacaggctgggtagtcaaaacacccctcaagtgtaggacgtgagcagaaaataaacactggtagttaacatcagactttaacaattgtttactactattgggtccccgctgtttaagattatatagtaagtcctcttttaaatcttgactgaaatgctcagcagaaaagtttacagaacaacaaatgccacacattgttatgtgaaatcaggttgactatttcttgattttggtcttgtctaagttttctatttcttggtattcttttttcagttcatccaatatattcttgctctcagacagcatttctgttcggtctgcaagaaagaatatattgctgttctgttgttgcctatatactttcctattcttcttaaggttagaaagttcatccaccacaattttttgttctttaatcttgctgcttagatcctccttgtgtggggtcgaattgtcggtggggatcagcacagagctgtcctctggtcgcgtccctcggctgggcatttccaccgagcgcaagacacgcgggatggctcagccctgaaggagcctacggcattagccacccc

SEQ ID NO: 135681 - DNA, 523 bp, Homo Sapiens
gcggccgccgctgtcacagaactgtaggaagacgggcgcgcggctcgagttgtgccgcacttccacacgcaggatgccctcacgcggccacttgtcacgcacgtgctccaggcagttgatgggcgagcgggagaagacgatgtggatgtaggccaggacgaagagcacaaacagggccttgagcagcacgaagaactcgaagagacggcggaaggcgggcgggaagagccgcgaataggtgacagccatcttgaagaacagcgcgtggaagagccggtcgcgcacgttgatgagggggttggggttgagattgggggtgcgaggcccgcgcgcgggggcctggccgccgccgtcgccgttgggcccggtcctcggagctgcgggctccacgtgctccgacatgcctcccagcgtcgcgccctaacgacccgcaagtgtccgagggcgcctcccggccgccatcggccgccctcgcagccgccgctcctcgtgccgaattcggcgcgccgtcgacttcatactc

SEQ ID NO: 135682 - DNA, 798 bp, Homo Sapiens
  misc_feature (65)..(65): n is a, c, g, or t
  misc_feature (68)..(68): n is a, c, g, or t
  misc_feature (177)..(177): n is a, c, g, or t
  misc_feature (218)..(218): n is a, c, g, or t
ggggagcccacgggccgggggcaccatggtccgggggcggagggtaaaggtcactgggtgggcgncgnaggtccaggacggggcagctggccccaggaagaaagtagaggggggcgggcagggggtgcgctgagctgctgtgggtggtgccgggtgtagtcctgtgtgatgacctcntgcaggcaagtgggggggcccagagtcaggcagcactctcntgacagaaccttctgggggtggggaggggctagacggagctcggggcagaatcctgggtggggccagcttcctgggtgactgtggacctgcccgccaaccctctgggcctccgtgtcccagtgtgcatgggagtggggctgtggtcagcggtcccaagctggtagttggcagatggctgatgagaccagcccatgacactgagaaacctgggccaccaggaaggcctcattgcccgtgaagatgccatcggctcgcatcacaggctcctcccatggattagggggcggtgatggtgccggtgctcggggctttgggatctccaccctcacccacgccctggatccccccagcgccatgccctggatcccccagccaccccgccaggacagaagggctgtggggttccccatcccctctccaggcctggtgcccccaggtgcaaaggtgacaagcagcagcagagaacgcgtagttacactgatgtgctgggccagggtgaccacccgctggtgacctttgacccctggggcggtctggagcagcgggctggacgagggctggctctcaggcagcggccgc

SEQ ID NO: 135683 - DNA, 1220 bp, Homo Sapiens
cagcccgctgctccagaccgccccaggggtcaaaggtcaccagcgggtggtcaccctggcccagcacatcagtgaggtcatcacacaggactacacccggcaccacccacagcagctcagcgcacccctgcccgcccccctctactccttccctggggccagctgccccgtcctggacctccgccgcccacccagtgacctctacctcccgcccccggaccatggtgccccggcccgtggctccccccacagcgaagggggcaagaggtctccagagccaaacaagacgtcggtcttgggtggtggtgaggacggtattgaacctgtgtccccaccggagggcatgacggagccagggcactcccggagtgctgtgtacccgctgctgtaccgggatggggaacagacggagcccagcaggatgggctccaagtctccaggcaacaccagccagccgccagccttcttcagcaagctgaccgagagcaactccgccatggtcaagtccaagaagcaagagatcaacaagaagctgaacacccacaaccggaatgagcctgaatacaatatcagccagcctgggacggagatcttcaatatgcccgccatcaccggaacaggccttatgacctatagaagccaggcggtgcaggaacatgccagcaccaacatggggctggaggccataattagaaaggcactcatgggtaaatatgaccagtgggaagagtccccgccgctcagcgccaatgcttttaaccctctgaatgccagtgccagcctgcccgctgctatgcccataaccgctgctgacggacggagtgaccacacactcacctcgccaggtggcggcgggaaggccaaggtctctggcagacccagcagccgaaaagccaagtccccggccccgggcctggcatctggggaccggccaccctctgtctcctcagtgcactcggagggagactgcaaccgccggacgccgctcaccaaccgcgtgtgggaggacaggccctcgtccgcaggttccacgccattcccctacaaccccctgatcatgcggctgcaggcgggtgtcatggcttccccacccccaccgggcctccccgcgggcagcgggcccctcgctggcccccaccacgcctgggacgaggagcccaagccactgctctgctcgcagtacgagacactctccgacagcgagtgactcagaacagggc

SEQ ID NO: 135684 - DNA, 520 bp, Homo Sapiens
ttttttaacttttctcaagccgtttttattacacttagtgtattaagacaagtacaaaataaccttgtaattaagatactgtatcagtcaaaaaagaagtcactattgtatgaagagatttacaaatgactaaaatatacaggctgtgacagaattaacagtttgaaagagggttgcttttttcttttagaaatgctaaattttcttaacaagacaaaaatacagtgctctaaatatgcattaccatgaaaacgttaaagaaaagcagtcttaacacttaactactattaacagcctttgccaacacatgcctgcctactccctttcctaactttaaagaactgtttcctctaaggaatactagtgcagcataacccttaaataatttcatttatttttaaagttacaacctacagagaaattaacatcttgtcaatctaataacagtggcaaccattcttcacatgcacttctcttagaataaatccccttggctggcaggataaggcttatgctgtag

SEQ ID NO: 135685 - DNA, 728 bp, Homo Sapiens
ccgccgccccgggctcgccgcgccgcgcccgcgcgtccttagcggggccaccgagcgatgcccgccgggcgcccgcgaaagtttgtcggctcctgctgaagggcagcggcgcccccgcacccccgtgccccgctccggccaggagccttcacgtaaatgggtccagtcatgcctcccagtaagaagccagaaagctcaggaattagtgtctccagtggactgagtcagtgttacgggggcagcggtttctccaaggcccttcaggaagacgatgacctcgacttttctctgcctgacatccgattagaagagggggccatggaagatgaagagctgaccaacctgaactggctgcacgagagcaagaacttgctgaagagctttggggagtcggtcctcaggagtgtcagccccgtccaggacctggacgatgacacccccccatcccctgcccactctgacatgccctacgatgccaggcagaaccccaactgcaaacccccctactccttcagctgcctcatatttatggccatcgaggactctccaaccaagcgcctgccagtgaaggatatctacaactggatcttggaacattttccgtattttgcacatgcacctactgggtggaaaaactcagtgagacacaatttattattggaataagtgttttaagaacgtgggccaagcgaggagtcaggtaagcctctgtgtctggaaccccaagg

SEQ ID NO: 135686 - DNA, 520 bp, Homo Sapiens
tttgcacagagtgaatatttatttatcacagaggtcaagccgaagctctaattttataaatcctggaaaagctggccagaaaagtacagagacttgcccaaagtcaaagctaaagatgcttccagaggccaggagagaagaaaatgttttagtagcactccataactggaccctcaaatctactcactccaagcatcccttcaagttcctgaccccaaagtaagaatctcagtaagaaaaaaatagagatggtttccaaataggaggtaggacaccatgagtggcatcgagcaataactgcaacagtctggctaaagatagctgccacttatgacatctgagcatgaaactagctaattttaaaatggccatttaatacatgcatgtaagaaatctttgatccccttaatctattcaataaaaacctcttataccaataaataaaatgggcctttaaaaacaacaaaccacaaaacaaactgtggcttccaatcctatcttttcattattcttaaaagag

SEQ ID NO: 135687 - DNA, 1569 bp, Homo Sapiens
aagaatttttaggaaacagtataacatgatttattgtagataataaaaataatacttaaatgttataatattgaagttaatgtttatttttaacaaaggaaaatatagtatgatatgaattaaaatacaataaaattagataatacttaaatatcaaggtgtaagttcattaataaagatccaagtatagagtaaatacaaaaaataattatcaaggtaatggtatccaataaagttatgccccactcaccaccaccccgagctgggcaccctgctcctcagctggcaggatggcaccaggctcctcggctgagacggacagtcccaggtcacggcggtcgtagagctcagctggggccacagtgtgatcagagaaggacagccatagggagagggccacctcctgctttggggcgggaagggctgactgtgcccagcacgtagctgtgacctccccggggtgggcagtgccccggctcaaggtcagcgagatgcccatcactggctgcaccctcagctccagcactgagaccttgtcgtccgtcacagccagcgcctgctcccccaggatggagtcagacagtggggaacgcacctcaatggaggtgacaccgggctcccggcccaccacgacacggccaccctccagagaggctacacgcgagtccagcacgcgggcgtgtggcgccacgaggtgggacacgtctagcagccagtcggggccaagcaggtgcgtgaggcggcggccgccgtccagcgggtgggccgcgaagggggcgaggaagcgcacaccggcccgctggtactgcaggtggcagccacgggcgcgccgctcggcctcatccgacgcctctgcagcgggttccgcaggcccttcagcagggccaggtaccctccagccgcggacctgctcgagggtggtgtcggtgagctcgatacgcagcggtagcaggggggcccacacggtcagccgcagcgaggcgcggagccggcgccaccagaagtccactcgcaccccccgggcgccccggctctccttgccagccacgaacacggcatcacaggcctcagacacctgcaggacctgtgtgttggcagactcgcagccgacatgctctgtcacctccaccaaggcccccccgccgtccacagtgacaaggcgcacggggacatgctggggcactccagtcagtggtgctgtattcaccagctcctcagccttggccagtgggataagggctctgaatgtcccgctcagacaccaggatttcccacaccattttgtccttctctgcttcagggggcctggcctgggtactccagctgccacgtgacggggcgagtgaccgctacgcccccaaccagtgctattctccaccacaaagtccacccataggaactcagacagttcaaggggactgctggaatctggctctgtgagcccagcacggtggcaggtgatgagggtggtgtggtgcctggagcccttgaagcggtccgcttggcagtccagaatgttgggctggctgggcgggcggcttgtcacatgcagcccttcttcactggatc

SEQ ID NO: 135688 - DNA, 886 bp, Homo Sapiens
cacgcagtaaggttattgttaaaaagttcaacatttttttgttaggctgctggtttcaggccaagagggaagtacgttagccccccatttttttccccaaaatccaccatagaatagcagttcagggatggatttggtttgtagcccaccacgtggcagttatgaggtgtgtggtgctggagccctgaagcgttccagttggcagtccaaagtttgggttgggctgggcgggcggttgtcacatgcagccccttcttcaccttgatcggcagggtcaggaggctggctgtgaagttgtgccgaagcaggagggtagcactaaagagctggccgggccgcactggcatgtcaggcacccgcagagtcacagcttcgtccagaggtacttcctggtactgcgggggttttgctgggcgcagttccacaccccccactgggagggcctgctccccagggtcgttctcctcgccggagccacagcccccagggccttcagctgcaggctcaagcgtgtaggccagctcggcccgtgtggtggaggcctgtgagaaccagtgcgagggaagctccagctccaccacgcaggcgcccagggatggctggaagcggcaggcttggtgagcagtgcctgcagggtgtgtggcatggagccgggcacagggcaggctgccagaccctggtggccaatcctgccctttgaggtggaagagaacccgggcgtagggctctgctggagtcacagccgcttccactgaaacggcccgcacgtcccatgggactggccgttggtggggctcagtgactcgaggggggaccacctgctgagtggcaaaaggtggcctcgtgccgaattcggcgcgccgtcacttcatactctctccccgta

SEQ ID NO: 135689 - DNA, 862 bp, Homo Sapiens
tgatggccatgctttcccaggtcggttttccttctccggattccacagcccccatggacctcagcttcaggtttatgcgtgtagtcagtcctcggcccgtgtgttggaggcctgtgagaaccagtgtgagggaagctccagcgtcctaccacgcagggcgcccagggatgcctggaaagcggcaggcttggtgagcagtgcctgcagggtttgttgcatggagccgggcacaggtcaggctgccagaccctggtgtccaatcctgccctttgaggtggaagagaacccgggcgtagggctctgctggagtcacagccgcttccactgaaacggcccgcacgtcccatgggactggccgttgctggggctcagtgactcgagggtgggaccacctgctgagtggcaaaaggtgggtaggaggcccggagaagtgtctgggccactgggccagggctgtaggagcagaaaggtctcagatcgggagctcagagaggagttggcagtgtggttagtggcccacctgctgcacacggaagtgttcaggggcgtctaggagctccagggctgccggcaggtagacagggtccaggggagcctggccacagtccactctcacgacgtccagggcgagggccaccaggaggcagagccaggggccgtagggcccccgaggggccgctgttgtgcgaccggccatccgcgcgcacatccttcccacagaaggcggggacgaggcgggcggctcaggtggccccagtcccgcacggcatctcccgcacccgctccgcgccgtccccacctggcccgctgggtcaccggccagccgccgccagccgccaccgcccgccccgcaggctgcaat

SEQ ID NO: 135690 - DNA, 445 bp, Homo Sapiens
caacctgaaggatgaagaggggaaacttaaggacctgtccccggtgacgtcactgcaggtgccagtgctgaagcccatggatctgatggtggaggtgagccctcggaggatctttgccaatggccacacctaccacatcaactccatctccgtcaacagtgactgcgagacctacatgtcggcggatgacctgcgcatcaacctctggcacctggccatcaccgacaggagcttcaacatcgtggacatcaagccggccaacatggaggaccttacggaggtgatcacagcatctgagttccatccgcaccactgcaacctcttcgtctacagcagcagcaagggctccctgcggctctgcgacatgcgggcagctgccctgtgtgacaagcattccaagctctttgaagagcctgaggaccccagtaaccgctcattcttctcg

SEQ ID NO: 135691 - DNA, 595 bp, Homo Sapiens
  misc_feature (566)..(566): n is a, c, g, or t
ttttcactgttaacaccacgcatctttatttgagtgcttcccacccagtgtgcaactccgcagggcactccaatctctgcgccttccagcaccccttgagcccagttagtctggcctggggcctaccaggcccattcctgagttctggacaccagcctctggggaagggaggccagcaggtaccaggggcggttccatcagccgtcgctatggaagcgggggtcttgggcatgtctggagtttgactgtaggcctggtggacctggcccctcaggcctgcatcacctggctcctcatcacagcctgcttccgtgactcttcagtgtgcggctgaggctttgacctccagccggcagtccacagatgcctcccccagcacatttatggccttgcaggtgtagaccccagaatcaaaggtgctgggtttccggatctctatggtgcatacgccttgctcagatagggcgcggtatttggggttgccctgaatctccatcttgatattcatccagatgatcttgtgcttgggtgaagctcagacactgcagaacaactgggtgctgtancccagggtggatgtgtagtcacccaaaga

SEQ ID NO: 135692 - DNA, 459 bp, Homo Sapiens
tccttttcaggctagattggcacaatgatggaatggttttcaagaggccaagtaggaccagctgtgggtttatcccattttacctaaggattttacacaatacattgagtgcaggaatggcacgcaatgattgcactcagtaatataccaaaccactcctggctttgtttagaccctagacttgggccctcaaccttctcgtagacctcttgcgaggattttccccttttacagattcacactcagtcccgaacagaaacacttgagcacctacaatctcacagccaactccctgccaacgtccagtgactcacagttaagagagcttcagcagcagctctgaccaaagtgatgaccaactacttaacatgaattagaaacagagcagaaaaaacacacctttagcctgctctgcgtaaagaaccaagtctccaccatgaacaccaagccaccaactcc

SEQ ID NO: 135693 - DNA, 239 bp, Homo Sapiens
  misc_feature (205)..(205): n is a, c, g, or t
atcctcatccttttcaactcttggaaaatattccagagtataaataagccaccttttctttcattgtaccctaactttggaaactcagtctgttttaaattgtttaaaattataatgttacagcaatttctgtacatatacctgagtacacatttattagtattctttgaagttttgagaaatagactgaatatatttaaaattntgatgatgtcaattttcctttcaaaaaggcccta

SEQ ID NO: 135694 - DNA, 558 bp, Homo Sapiens
gttaagcgggttatttttacccttgtactgctaaaccaaaccgatccagaggacaacaaaagcccattttttgcctttggagagtctggttagagatagttttctccagggtaacactttacatttgttttctgtgtgccatcttcaagttcagcagccattttggtggttgtcttgatggattgtaacatctggtcatggtggtcatgaattggcaatccaaaccttgaggaaaatctgcagaaacttttgaaatgctttggttttttcccttttgtgtagattagaatcatatgagtctgtttaactgtttagatacaaaatctgagccctaaatttgaatttatttgtgtcctttaaatggggaggtttagaaagcggcaagaatgaagcctggcctaattcactgaagagaatccagatgctgctctggttttgtgatcttattatattcaaacattctgcctctacagatgtggagcctagtgctgtgtgcaggaccagctatagaatttgtggggcccaacacaaaacgaaaacaaggggcctcttgttaaa

SEQ ID NO: 135695 - DNA, 454 bp, Homo Sapiens
gaagcacttcgtatttctttatttctttgtggaataaaaaaaatttgtttgtaattccatgagaattagaaaggcttgtctcaacttctgagttggtacttgacattcagatactaattttactagaggaagcacttttgctagattaaccaacgatggatttttcttcacaattgcgtgttaatttgctccctctttgagatgtcaatttttggttttagcaacacagcccaccccatagatcagcagatctgtgagtgtggattcagttgttagcatcacggggcaggggtccctggactgcatgtgcctttgtattaattgactagacttgcagttatattaattctacttgtggttgtttaaattgtgcctacttgcaccttacttgttgagtcaagataacaggggttatataaacgagtttataatatatttggcttatcctgctcaa

SEQ ID NO: 135696 - DNA, 1073 bp, Homo Sapiens
tcattttgtttcacatgagtgaaaaaattaacagctgccctcatttctgaaaacaaaaaactataaacaatcactgttgctcccaatgggaccgttggacataagccctgaggctttggggtcaacgggctagactctagaagcccaggaccccgccaaggtcaagtctgcatacttggggcagggcgagctgttgaaccatcgcatttctctgctgcttctttacatgggaaccaacacaagaacaacacaatccctaaattggctgctgcgggatcctacaagtaagtgaaaaagcgagaggacacagccaaggagtgcttgcctacccagcccccttcttctaagccataatcccaaggggtgagtatgatccagcagtacttgaaaagaagcccggcctctgagcagtcactcattcctggtaaagcccctcgaagtctgcagacttcatggctggcagaaagtcacaactggtgttttgctgtgtcagtggcctgggagaaaaccagcagctgatgaggctggagaccactacataagatgctatcatcattcccgacatggcgagtgatacgaagcttacaccacagaggatgcagagcagtgagaagccacccacagagatgaccaatcctgtccaatattatgacccccagcagagcagccagggtggtaagcaccacgatgagcaggaagaatccaacaggaacggccgacatgacaatgaacaccagcaaggtgaaggccagaaacggatggctgtccaagtactgacccactggagacttcataaaggccaccacctttgagttattctggaaggagtctatcagcagagacagcttcttctgcagttcctgcaagtcccttgagatactctggggctcctcttttgccattctgaagctcacttcaatctctttagggatgaattatcctaccagtaaattctccagtgcagcccgcggtccaatctctcatgtcgctctgtctcttgcttgatggtgggcatgcagacggagggtaacctgctcctgaccgccgagcagcccccaccgcgtttgcaggcg

SEQ ID NO: 135697 - DNA, 904 bp, Homo Sapiens
  misc_feature (55)..(55): n is a, c, g, or t
  misc_feature (104)..(104): n is a, c, g, or t
  misc_feature (114)..(114): n is a, c, g, or t
  misc_feature (665)..(740): n is a, c, g, or t
gttagaggcagatgatttcaagatactgacatttgatatttgtagaatattggtntaaatcataaagtattcttaatatatgtgacagttcaaatatttcatcnaattttcccncagtgagagatagtaaaacctcttcatcaaaaagttggagatcgttcatttatatccaatttaccttttcttaatggtgaaatccaaatttacaaccctaggcaaatggagtaaggaatatcttttaaaaattaaatctccaattatttaaccaaaaagtctaatgttctcttgtttatttactactcctcattacaaggtttttactgactaaagatgatgacatacctaatgtgactgtttgcattgatgactccttaaatagtgtaacatcaaccctcagaataaaatgtcaacacaaaaatccaagtgagtgatccagctcattgaactcacaggtaaactgagtttttctcaaatcaataaggagctttttattgagaacaacttcattaagacatttgcagggcaaatatgccatcataaattttattctgaattacaataaagtgctgaatgataattacctgaatcttttttagtacttttcacttatcttaagttaaaagagccctttctgtggcattagcaaatctgtgagtgagtgagtnnnnnnnnnnnnnnnnnnnnnnnnnnnnnnnnnnnnnnnnnnnnnnnnnnnnnnnnnnnnnnnnnnnnnnnnnnnnctaacttccagtaagggaacaggaagcactgcaacctttcatgtttaactggggtgacaaataattgagaccaaagtaatcaaagtaattcatgcaagttatctttaaaggtatacataagcttgaagaaagaaagaacactgttactgacctttgatattatg

SEQ ID NO: 135698 - DNA, 743 bp, Homo Sapiens
  misc_feature (198)..(273): n is a, c, g, or t
ctcaaatcaataaggagggttgtattgaaaacaacttcattaaaacatttgcagggcaaatatgccatcataaattttattctgaattacaataaagggctgaatgataattacctgaatcttttttagtacttttcacttatcttaagttaaaaaagccctttctgtggcattagcaaatctgtgagtgagtgagtnnnnnnnnnnnnnnnnnnnnnnnnnnnnnnnnnnnnnnnnnnnnnnnnnnnnnnnnnnnnnnnnnnnnnnnnnnnnctaacttccagtaagggaacaggaagcactgcaacctttcatgtttaactggggtgacaaataattgaggcccaaagtaatcaaagtaattcatgcaagttatctttaaaggtatacataagcttgaagaaagaaagaacactgttactgacctttgatattatggcagtaaattgcatacgtaaaataccttaattatcctagatgcctagatctggcttggcaagcatcatgccactgacatgctttagctctttttgtaactaaaagtgatttgcagttcaattactgagtatttcaatgtgactcattaagctgtgtgatgaactttgaagttaaatttaagcaaattctctacacctaatcacaccatcagcacaagcaggacaatctggagcagcatgaaaggtgggtcactttaaaaagattcttccttttactgcatgatatattaagatgacagacctaaa

SEQ ID NO: 135699 - DNA, 809 bp, Homo Sapiens
taagaacagaataagctaatttaggaattcacacctttcgtagagatgcttatggtacaggtacctctgacggctaggctctaccaacactaacgtgtaacgtgtcacaaaagccaacgggcgttgcgggggccgggggtagccaacagctcaagtgggctgcttcactccgtggcagattcacctggggattcctcaccaagaatgttgttaagggacgaaccaaaccaaccacaaatgatacccctttaccgaggctgaaaaagcagagattcgcaagctataaacgaatctctggccctttagggaaggtgcaactcgctgcacctctttcccctatcctacaggggttaacagggggcatcctgaggccgagaccaagcccagccagctcctcctcacatcccacctcccaccacatattctccccagtacgccgggctccctcctcccctcgaaagacagttcaaaatcaaaacaataggtgcaaaactggtttcaggtggaaatggctgagtcctggtggctaacttctgggacgccatggcgatcgagggctcctaaaaccccagattccgacgggaaccggctcctaaacagtccctcgggcctcggcccgacttctcacacgcccctccctcacctcggccctgggatgctgggaagggaacgaggcgaggggctggaggggaaccccaggtcaaaatgacagcggaatgagccgggaaaggaaagaggccccgtgggatgctgggggtcgagtcctaggcccggggcttcaacctcgaacgggggcgacggcaggtccc

SEQ ID NO: 135700 - DNA, 955 bp, Homo Sapiens
ttctgtgcagggacagaagatgtgggtgtaggcagttttgataaagtagatgctccattagcatcaaatgatttctttggctggtgatcagactgtagcgtaaatggactagaaggaacagtgcttggggtagcagttggatgaaccactggtttgatggggtgctgtactggcgtagaactactgtgagtctctgctcttggcagtctgtagtctctgtcattgtgtctgcttgtttgagacaaaatattctgtgggagcaaactactggcatcactggaatgcttgtcttccattccactggcaaacccactagtggctgttgcttgcatcacctctcttctgtaatccctatcttttgggaagctgttgactgccatcttgtttgcttcttatttgtctctgttctctttcaagccactcttttggtttttcccattgtgaaacttctgttcgacaattgtagtagtactttttcccagaagagctaatatgctcagaccagtcatctgcagaatcataaggtgcatctgaagttttgcttgggttattgcttggattagaagaatgtgaatttgaactatgaagagcactgtggttgtgtgaattttcttgtggagagtaactggtcccaccatccctctctctaactctgtgagtatgcacatttttggccttactgtgacctgtgctgtcactgtatttgttttcaggactatcagatctccgcaacattttatttggtggtgaaggatctccggcgtctcgcatcttttcatgtctgtgatcaccgctactggggtgactcttcgatgaatacttaagtgcctggtaaggctgcgagtcccccctccggtcgtgacagccatcactgagtctctgctgtttcctcgcatacattaccatcaatgcccggcctgtgagtgtgtgtcggggaggggggagagcggccgca

SEQ ID NO: 135701 - DNA, 846 bp, Homo Sapiens
cccctgatttggattctgaagatgggaggtattggcgactgtggaacaggagaaacagggaccgctgaagcagatgttgggggtgcagatgtggggttcagtccagaggcagaagacgtggaaggagttgtgcaagaatgtgatacgggtttgtctcctgatgtagattttccactggcaaacccactagtggctgttgcttgcatcacctctcttctgtaatccctatcttttgggaagctgttgactgccatcttgtttgcttctttttgtctctgttctctttcaagccactcttttggtttttcccattgtgaaacttctgttcgacaattgtagtagtactttttcccagaagagctaatatgctcagaccagtcatctgcagaatcataaggtgcatctgaagttttgcttgggttattgcttggattagaagaatgtgaatttgaactatgaagagcactgtggttgtgtgaattttcttgtggagagtaactggtcccaccatccctctctctaactctgtgagtatgcacatttttggccttactgtgacgtgtgctgtcactgtatttgttttcaggactatcagatctccgcaacattttatttggtggtgaaggatctccggcgtctcgcatcttttcatgtctgtgatcaccgctactggggtgactcttcgatgaatacttaagtgcctgtaaaacatcacccccctggtaaggctgcgagtcccccctccggtcgtgacagccatcactgagtctctgctgtttcctcgcatacattaccatcaatgcccggcctgtgagtgtgtgtcggggaggggggagagcgggcgca

SEQ ID NO: 135702 - DNA, 627 bp, Homo Sapiens
ttttttcatggttctaactgacattttaattaaatgtgatgataggttgagtaacctagcagtactctaaaatgacttttggttatggctttttccatattatgcttaggctgaggcatccctaaatgattcaattgtaattccccttcttaaacatgagatttatctttacaaaataatttattttcttaaaattacaagttaattctatagttcatgcatacataatctcagcagatatcagctgtatgtgtacacacatacatataggtatttgtatatacacacattacataattttttaaaaaacttattagtagggtagaaccacgaagacaaagaggctttgtgtaatgtgatggaaacacatttgcaggacgaacaacaggctgctgtgagggctgcatttaccctttctactgtaagacttggaaaaacatggatagtggatatttaatccgcataacagaaatttcagggtgcagaaaacttcccacaatttttacagataatgtcaacagacaggcattcaatgcagggaatacacagtgtgacagtatacaaaaataagcaggttgatggtttagatttatgagacaagagaaagaaatagatgatgccataatt

SEQ ID NO: 135703 - DNA, 555 bp, Homo Sapiens
gagagcgcgggcctctaggaaggtatggcctcacaagtcttggtctacccaccatatgtttatcaaactcagtcaagtgccttttgtagtgtgaagaaactcaaagtagagccaagcagttgtgtattccaggaaagaaactatccacggacctatgtgaatggtagaaactttggaaattctcatcctcccactaagggtagtgcttttcagacaaagataccatttaatagacctcgaggacacaacttttcattgcagacaagtgctgttgttttgaaaaacactgcaggtgctacaaaggtcatagcagctcaggcacagcaagctcacgtgcaggcacctcagattggggcgtggcgaaacagattgcatttcctagaaggcccccagcgatgtggattgaagcgcaagagtgaggagttggataatcatagcagcgcaatgcagattgtcgatgaattgtccatacttcctgcaatgttgcaaaccaacatgggaaatccagtgacagttgtgacagctaccacaggatcaaaacagaattgtaccact

SEQ ID NO: 135704 - DNA, 864 bp, Homo Sapiens
  misc_feature (11)..(11): n is a, c, g, or t
aatttaatccntgggacatgccatgacgttcacggtctgaaactttgccaataactgttcttccagcctacctgtcttgctccctgccccacctgtccttgtcaaaggactgataactcttcagctttgtcaagtccttgtttactcctgttctccccaccaggactcgagctccctaaggagagagcagagagcccgattcatgttgtgtctacagcgcctggggaactcgaagccaaatgaagtcgtatttgctgtgccctgttgtgtttagaggaaatgtatccataaatgtctataacagattttgggggtgtctagtggtagatgtgaagacttcaagcgatgtttgtacctgtgatgatagcttcttcccatgtggggattaagggtagggagtggggggaatggtccaaacccggaaggagctaatggagaggatagggccaaagtgggacagggcttggatggtagaggatggggtccaggaggaagaggagtctagcaatccaagcgcaggggtcagtgctccgagtcccagggctcagaaccagcagggcgaccacatgagcgagcccagcgccgccccagtggcggctcccgcaagcatgcccatggccagaggggcgccggcgctgtagcagggatcctcccgcactatcacgtgcgtcacgccagggcctgcgtagggcggtccgtagtagctgcggacatacgtggcctcgtgtgcattggggggcaccacctcgtagtagtcttggtacgggctgtagacgcgcaccggggtggagtttgcctccagcagtgctgtcttccatgctagggcatcatccttggtctccgcacagaggtgcaggcggccgc

SEQ ID NO: 135705 - DNA, 332 bp, Homo Sapiens
  misc_feature (46)..(62): n is a, c, g, or t
  misc_feature (225)..(279): n is a, c, g, or t
gtctaggtagcgaggcctgggtggcgatttcggcacgaggtcgagnnnnnnnnnnnnnnnnnggggtcgctcagtttattggtaaaacgggcactgagcgtggcgagcgctgggcgcggaagcctggggcgggggcgcctttcctcttgaagaacttccactggaccttgatggcgagcatccagtcgctgaccgagggcctctggcaagcggaggtgcagacannnnnnnnnnnnnnnnnnnnnnnnnnnnnnnnnnnnnnnnnnnnnnnnnnnnnnnttggccggcccggtgttcggagcgcggcgccgtcggggatggtcgcgccgcgg

SEQ ID NO: 135706 - DNA, 464 bp, Homo Sapiens
ggatcttagggggcggcaggtccgcgccggccggcacaggccgtgtcagtttcaacttggggatggaggccgagggcgcgcaggacggccggtcccgggactctctgtccagcacctcggggtcctggctgccgtcgtcctgcggggcctgctggggacggaagggctccagagagccgtgcacgcgggaggggatcttgaccacctctcccttgccctggggcgtgctgtaggagatcttgatgaccgggctccgcgggacctgctctgccggggccctgtcctcctcgcgcctctccctcttgctcctcctggcggtggccgcagccgtgggctcgccgttctccggctcctccggcttgcggagctccctgtccgggccgctgcccagcctcctgcgggccctgggcgcggctgggggtccggggctggcctccggggggctcagcgtgctcttgcacttc

SEQ ID NO: 135707 - DNA, 690 bp, Homo Sapiens
tatggatttcctcgatacaagtttattagtttattctccatatacaagtttattctcccagaatagcagcaaataaaacttgaattggatgtacagctcctaataaccttgatgtcagagttgtcacttggttggaattattatgatcccccaatttaaattttcttgataaactcagcgttgtttgttttcagtgacaagaaaacatacatggaaaggggacccaagacagttcaccaagatagttcacagccctttgcaggatatgcctttggtgggtgggagcacctagattttagaggactataaaacgccatgtttactttgtttgaaattttctgatgaaaagtcttttgtaacttaacattccacattttcatttaaaaagtcccagaaatataaactatccaatttacaactaaggtgggtatctgtaaaaaccttaagaatagttactcttcccaagagacttacagcgtctaaggggggggaaagacagcatctgagcagtacaagtcaagctggtaaaatccaatacagaatatctaatacaccatcagttattttactgagaatagattctgctgccctacagcattggtgccaaaactctaagcatagagtgattctactttgaaattatccatagtagaaattaggagtgtcactaattaagcaagtcactacctc

SEQ ID NO: 135708 - DNA, 1053 bp, Homo Sapiens
gccgccatgctttgttcttttagggatgtgttggggggggtataaaattaaaatttattttcatttgttgttgtgtaaaactcacatgtggaagtgttccttgcacaggccgcagcatgcaatacagtttcacacttctgccagatattctatctcagaaagcaaattacctgcaaactaacactggatgacaagtgtcaccagaagtgctttggaaacatgattatgttatacaaagacttggcaaatccaacagcatacagtgcaactgaaaccttccccaaggatctgagaagtcttgccgatggaatccttggacatcaagagccaggcgaggagcagtttccgatctgctgagattctgctccgccttcacgcgaatcagcatagccaagtgccccatccaccagccaagtccttcagtgctgaggacgcacgcatagccaggacagtcacgggcaaacgtgacatcaaatccgaagggcggctgtcggctcccttcctgccagccccagcgggcaccccgtcaagttctcgctctgtaggcagctggagtctcaggctcctcagaacgatcactgggctctggcacctctccccacacctgtctcaaccactggtccgcctcgctctcctccctcaggtagcaccagatgatcagcgccacgaggaagcagctgaggggcagcaccttccaccagggccgctgatgtccctttcccatggtatggcccaccgaccagcggtgagggttggctttgctggaggaaaactcaatggggcggtcagggtcgtcctcttcctcggcggcagggtgggcccgatcccgggaaccgggcaacggatgaaggcttcgggaagcccagcctatgagcctcagcgcccggacggccctggaagagagagagcagtaagcgctccgcccgcccgccggtgtctgccctcggccctccgagaccttgaggagctcacccggccgccggggcacacaagacacgattcattgctgcctcgtgcggaattcaacacccagcctcgtacctagccgtaggt

SEQ ID NO: 135709 - DNA, 477 bp, Homo Sapiens
cactttagtttttattttattgtaaaacattgagatggaatgatagggtttcccagaatcaggtccatattttaactaaatgaaaattatgatttatagccttctcaaatacctgccatacttgatatctcaaccagagctaattttacctctttacaaattaaataagcaagtaactggatccacaatttataatacctgtcaattttttctgtattaaacctctatcatagtttaagcctattagggtacttaatccttacaaataaacaggtttaaaatcacctcaataggcaactgcccttctggttttcttctttgactaaacaatctgaatgcttaagattttccactttgggtgctagcagtacacagtgttacactctgtattccagacttcttaaattatagaaaaaggaatgtacactttttgtattctttctgagcagggccgggaggcaacatcatctaccatgt

SEQ ID NO: 135710 - DNA, 444 bp, Homo Sapiens
ccttccctctctcttctacctccgtttcgcttttcttcagtgcatgttagcggtttgctggatttcccttctccctcgctgttcaactgctagcatgatttgttacattttccacagctgtttattcttgtttgactttttgtacaaagtcactttaaatctgctgcagaaagaataaagcacctagccctttggatggactcctgcaggcgtgtggctgtccctggcccacttttaattctttggagatggctcttctgtgtaaatcagctgctgggtgcgttcggtcacctcgtaggccagcctagtttgtatcagcagaacagtagtggactcgactcaggtcgtaagccttatatttcacagacaattaaatcttggctgctgttgaacaaaactgtaatatttactttgttctataccgagaagcacttttaaagtaaa

SEQ ID NO: 135711 - DNA, 1202 bp, Homo Sapiens
gttttagcactacaaacactttttttaatgacatcagatggtacatttatacaaattacaagctacaatatagtgaatacaaaatccatccagaaaacggttagaaaagcatcacttaacagaagtaaatcggattcaagtagctaaagaactcaagccccccattttgatgattatacacggcttgaaatgcagcacatccaaatcctccccctagtcagggcactattcaatactacagcatattcaatgactctagtgatgtaaagattctaacacttttagcatcgacgtcaagagacatctcgtaacaggttcactatgcaaaactcaaatgagaatgtgtgaacgttctttgcaaactgtaaggtgctgtgcagatgttgttagctattgctattattactgttcagtgagattacactgaacgtggggaaaaggaagactactctgtataactgacaaatatgacttacagaacatcttaaaaggaatgcagatattactttcaaatacacatagcaacaacacaggcaaggaaagtgtggccaggagtgatgtcgaggaattcctattttaaggaatatataaaggattaagctattcatagattatgtgtaatatttatcattagattcccaaagtccctgaaaataatttatttttaaggtgaccctttccccctgaaaagggaaaaagaaatcttgtcaggttactaatgtgctgcttcaagccagcttcttgtaaaaattatcttaaaccataggagtacagtctgaattaatagttatactaatctggtgggtgacacagagtgcttgacagcagagaaacctgccactgacctcagacaagtgacaaattctgtgtcagagttgaaccataagtttacaacttcacttgggcataaattaaacaataaacatgaacttgtctagagataagaaatacacactaggtacatctaaaatcggatttaaatcctttttatgtactttcgggtttcatctttctttgtatataccctacttgtttaactgattttagtggtctccttgggtattctaactgtatacataaaattgacatgaaaatggaaaacaaacgccaaacaagtcaattggttgtttcttttggcaaagctgatgacattttcatgatgaaaatgttccaattattaggccaggcacggtggctgatac

SEQ ID NO: 135712 - DNA, 458 bp, Homo Sapiens
catgtctagtgcatcatccgtgcctctcttgttaggagatcatctgaagaactagggttacggtgctgccagctgactaatgactgtttttcagttttgtcaggaaacagaattaccactcaccttaattttgtagcttgtacccaagtttgtgatgtcaattgccaagactaaggaatgaaacatcttcatacgaggtcatcccggagccaactcattgcctgctttttttctgtgtatgttggtggtgtggcggggacaggattgataagcactgtcatcacagctgtatgaacatgatattttagaaacatgttttagttgatgagattggcatatcatgacttactaactctttttcaaagacatgcaaggtagttctcatgatttatatacactttcaactcaaatcattatgaaaagaaagttacaattatatctaaactgaacctgatgag

SEQ ID NO: 135713 - DNA, 579 bp, Homo Sapiens
  misc_feature (563)..(563): n is a, c, g, or t
gcggccgctgccaatcactcccattggggtgacagcggccatgaggaatggcatcaccagctgccggatgcggactgagagtgagccatcttgtggctccccagtggtcagcggagaccccaaggaggatcacaactacagcagtgccaagtcctccaacgcccggagcacctcgcccaccagcgactccatctcctcctcctcctcctcagccgacgaccactatgagtttgccaccaaggggagccaggagggcagcgagggcagcgaggggagcttccggagccacgagagccccagcgacacggaagaggacgacaggaagcacagccagaaggagcccaaggattctctgggggacagcgggtacgcatcccagcacaagaagcgccagcacttcgccaaggccaggaaggtccccagcgacacactgcccctcaaaaagagacgcaccgaaaagccccccgagagcgatgatgaggagatgaaagaagcggcagggtccctcctgcacttagcagggatccggtcctgtttgaataacatcaccaatcggacggcanaggggcagaaagagca

SEQ ID NO: 135714 - DNA, 338 bp, Homo Sapiens
  misc_feature (328)..(328): n is a, c, g, or t
cccgctccccgggcgcggagccgcgggtttcatggggcgattgcagcgattcccccacccagagcgacctgcgggcagcggcggcagtggcaggagccgcctttccgattccctacgatgcgggtgctgagctatggcaaagggcagcgaagtgacgagcgagacccgcgtacgactgtgaaagccacctggagccaccttgccgggattgtacctgcaggcagaaagtcttcctacgaccgtcttttcccttagaggcaccagagtgttgagaagatatgtagcagccgagcacccatcttttgacaccgtcctctgaaatcagctntggagatgct

SEQ ID NO: 135715 - DNA, 440 bp, Homo Sapiens
ttattttgtttttcagagattttattaagaataaggcatatgacagtcacccctaaagcacagggctctatttctgtgggtgagtgaatacactctgaaaagcattggatacaaaagcgcagccaacagagaatttggagcagggtccctctgccctgccacagggctcctgccaggtgggtttgaagccctgcacatcccccattcaaggctggcatgtccaggagaaggtgcttggagacccccggctccccgcgcttcgaagctgccccacaccctctaggcctccttcctctctccaccaggggggacgccatcctactgcttatatggggaagggttatcccattttggccctggactagtcccccaagctagagggtgctgtggctgagctgtgggtgccaggggtacagagcctcaaaccgcactgcccagtg

SEQ ID NO: 135716 - DNA, 669 bp, Homo Sapiens
  misc_feature (611)..(611): n is a, c, g, or t
aagattatatcaaaacatttattttttgtgttacaaaaacacaaataaatccaagcagataatgaaataaacacatttttttagtgtcccatcctgggttctctgccctagaatgtattaagcaggtcaagtttaggttacttcaacacttcttctggatgctatgaagtctccatcttataaccatgtttctctagttcagctcgtaactgattagagaagtcatcctctacattgtcatcatcccaattatcctcccagacatgtgcatcttcatcttcatctaagccagcccagtctaaaaatagaaacagatgctgtctaaatatttctcatacattatttccacaattacaaaaactttgaaaagcttgctactgaacactcacaattcaaaaacagctaaaaccatatctatgaaaaatggtatcttccttaaatctgagcttatgctgtctagttctctcaattcttgagtttgcagataacctaaaacagaagttaatacaaaaaattctacttgccaagaaacttacaatttcaggaggatatttactttactgatttttctttgaactcatttttagaaggtcgacttcacaatctttcanaacacaacaccaacaaccctaaagcaagttgaatggcaggaagataccagtgtgaaat

SEQ ID NO: 135717 - DNA, 972 bp, Homo Sapiens
  misc_feature (114)..(133): n is a, c, g, or t
  misc_feature (135)..(135): n is a, c, g, or t
  misc_feature (141)..(155): n is a, c, g, or t
  misc_feature (158)..(158): n is a, c, g, or t
  misc_feature (160)..(162): n is a, c, g, or t
  misc_feature (164)..(164): n is a, c, g, or t
  misc_feature (166)..(166): n is a, c, g, or t
  misc_feature (170)..(174): n is a, c, g, or t
  misc_feature (178)..(178): n is a, c, g, or t
  misc_feature (180)..(236): n is a, c, g, or t
  misc_feature (238)..(243): n is a, c, g, or t
  misc_feature (247)..(247): n is a, c, g, or t
  misc_feature (255)..(286): n is a, c, g, or t
  misc_feature (290)..(291): n is a, c, g, or t
  misc_feature (293)..(293): n is a, c, g, or t
  misc_feature (296)..(296): n is a, c, g, or t
  misc_feature (305)..(306): n is a, c, g, or t
  misc_feature (309)..(310): n is a, c, g, or t
  misc_feature (312)..(314): n is a, c, g, or t
  misc_feature (859)..(893): n is a, c, g, or t
gtcccggggtttcttctgtgggagaaaaacaaattgtgcccctgtttttctttgtgtttcgggggtgggcgcggcgcgccacaaaagaaagggtggtttaaaaaaaattttttnnnnnnnnnnnnnnnnnnnnancaacannnnnnnnnnnnnnnttntnnntntntttnnnnncccntnnnnnnnnnnnnnnnnnnnnnnnnnnnnnnnnnnnnnnnnnnnnnnnnnnnnnnnnntnnnnnntttnttgggagnnnnnnnnnnnnnnnnnnnnnnnnnnnnnnnngggnngnggnggtgggggnnggnntnnngcgttggtggttatatcaaaacatttattttttgtgttacaaaaacacaaataaatccaagcagataatgaaataaacacatttttttagtgtcccatcctgggttctctgccctagaatgtattaagcaggtcaagtttaggttacttcaacacttcttctggatgctatgaagtctccatcttataaccatgtttctctagttcagctcgtaactgattagagaagtcatcctctacattgtcatcatcccaattatcctcccagacatgtgcatcttcatcttcatctaagccagcccagtcttcggcagggaactcttcaaactcgtcgtcttcctctaacagacctaagtctaccggctgctttttctctgacatctcgactgtccgcgcccaacacctcccagataagcagaaaagttggaaccctcactcttcctcaaggaaacgccaccgtcactaccgcctccgacgctgacgctaccatagagccccggccgtaatggccgaattcccgggcatatgtccggtaccgtcgactgnnnnnnnnnnnnnnnnnnnnnnnnnnnnnnnnnnncggccgcttcctcgctaaaatagctcgctgcgctcgtcgttcgacttaacagcgaggcgccatatgaggtattagttct

SEQ ID NO: 135718 - DNA, 446 bp, Homo Sapiens
  misc_feature (196)..(222): n is a, c, g, or t
aagaactgaagaaactcattgatgctctgatagagaattttcttcagcctagtaagaatggactgatctggcgttctgtttaggggtacaccaatacgtcatgacactgtgtgggcatatggaacagagcaaccgagaactgcatacattgaaccttgtgttagcattctctctctatctcatctggccgagtatnnnnnnnnnnnnnnnnnnnnnnnnnnnggtcaactggctagactaaacaaagtataagtttgaaatgaaatggtctagagggaaatgattcaaattttttcataattcaaacaaaagttattacactaaaagtattatagtaacgtattgtccttccgttaacagaaacatcacaattcaaaagtgagttttcttattatagtgtgattaagcctagttctgtatctcgtaattgtgtatagcatggtaaa

SEQ ID NO: 135719 - DNA, 1160 bp, Homo Sapiens
ttgttatagttacttcaagtaacacagcttgcttcatataaataagttaaaacatctattttttttcaagacaaagccattcaggacaaagagatgaacagaaagcagatctacttatacaggcgctataatggcaataaacaggctcatgattaaaagatgaattagggcaacgagaacagggcttcttcacagaaggaacacaagggagtttcagaaagtcaccttagtactgacactacgcgggatccgctaatactgctcagtactttaaacgctcagatactcagggacggaaggcccctcctgccgcggccatgctcatgcttttcagcttattatcttttttccacttcattctccggttttggaaccagattttaatttgtctctcggagaggcaaagagcatgtgctatttcaatcctccttctgcgggtcaggtaacggttgaagtggaactccttctccagctccagggtctggtagcgcgtgtaggccgtccgggcccttttgccttccgggccgcctatgttgtcatgacttatgtgcagcttgcgcatccaggggtagatctggggttgggcgggcggcgccgggctcggctcgctctgcgcactcgcctgctcgctgctggcaggggcgtcctcctcggctccggacgccgtgccaaccccctctctgctgctgatgtgggtgctgccggcgtcggccgaggcgccgctggagttgcttagggagtttttcccgccgtggtggctgtcgctgccgggcgagggggccacggcggagcagggcagcggatcgggctgaggagagtgcgtggacgtggccggctggctgtacctgggctcggcgggcgccgcgctggcgctggcagcgtagctgcgggcgcgctctccggagccaaagtggccggagcccgagcggccgacgctgagatccatgccattgtagccgtagccgtacctgccggagtgcatgctcgccgagtccctgaattgctcgctcacggaactatgatctccataattatgcaactggtagtccgggccatttggatagcgaccgcaaaatgagtttacaaaataagagctcatttgttttttgatatgtgtgcttgatttgtggctcgcggtcgtttgtgcgtctatagcaccc

SEQ ID NO: 135720 - DNA, 712 bp, Homo Sapiens
ccgtcatcacatcctttaatgaggaagacttcctgaggaggggggtaagagcaggcggctgtgagtcaggtcaagggagaattggtctgcaaatcaaagtcaacagggccagactgccaaacgaaactaaatacaagctgctccaggaaccgtcaacttaaagagccataatagacacagaggaaaggcagcaagggcacttgcaaagtgaacctcagaaccccatgcatttgccttacattatggaaatttattcctcctgaatgtataaggcaggagactaattcaatatacattcactatgcagaattctacaagttctgggctatgtgtaaatgtgccccccttccctccattatcaggatgtttaaatgtgtttcctttttttcatttaaaactttgcttagatgttttacattgccatcacctcttcctgagaaaaaggtgtgtcccccaccccaacccctaggagccagcagactatctttctgaggggccacaagcacactcccacgtggagaacaagggcagtggatgaagggaacggggatttttcaaactaatgttttccctcaaacaggcctcccggcgccgttagacttgaagcaatgacatctattaaaatggggaccccagctgggggttaagaatgttgtttaagaatgatgacgatatcttgaaaagaaattcttggctggggatggggtagggg

SEQ ID NO: 135721 - DNA, 1643 bp, Homo Sapiens
  misc_feature (125)..(125): n is a, c, g, or t
  misc_feature (200)..(208): n is a, c, g, or t
  misc_feature (211)..(231): n is a, c, g, or t
  misc_feature (402)..(460): n is a, c, g, or t
  misc_feature (504)..(515): n is a, c, g, or t
  misc_feature (596)..(614): n is a, c, g, or t
  misc_feature (625)..(637): n is a, c, g, or t
  misc_feature (677)..(687): n is a, c, g, or t
gtgcctttgcgcaccacttgggttgcacggttggggtcaccctgtggttgtggggttccctgcccgtgtggtgggttcccctccgtgtgtggtgcccacatgttttttgggtggcccccccggcntaacccgcgcgggtggtgttgccgtccttgtcgctacatttacaatggcgcgggcacccacggcggagggtggtnnnnnnnnntgnnnnnnnnnnnnnnnnnnnnnagttaacacccctcctcatcagggtttgtgcccccccttgtctcctttttgttcccacctcctgtgatggtgccccggccccgcccgtgcccatttattttccggtgggtgtccccggggtgtgtgtcccccttgggtgtgtgggtgaaagcggcccccgcattattgggnnnnnnnnnnnnnnnnnnnnnnnnnnnnnnnnnnnnnnnnnnnnnnnnnnnnnnnnnnngttattgtttgggtcccccgtgtggtttcccctccctttccacnnnnnnnnnnnnaagcagccccaaacccgtgtgttctctctcctttgtggccgctccctctgtcgttgacatcattcctgttcccctgccccnnnnnnnnnnnnnnnnnnngggtgcccctnnnnnnnnnnnnngtcccacgtcttgccatgccatccgtcccccaggggccannnnnnnnnnnaatgtctctgtgtcctgccttgtcccccttcctcgttccggcatggccccgcctcctgtggttgtttggtttgctggccccagccccgtgccgttgccccccttcctcgtgtctttcttcgcgttcccttccttttttcattttgaaaaagctatttactttttttccaaatattatcccaaataggtgttttacagataagggtcaatacgaagtcaaacattctacagaagaaaatcgtttttacagacattaagaataattttaacagaagaaaaagctcacatctatctagatgtggctatgttccatgggaaaaatttcagcatccaaagtgcaaagaaaaaatgactgtagcttttcttaccacaaaatattgacaatcttcccttatagcctactctttattgttagttgggatgccaaaggatgatatattgacctttagaagttgggctccactggacaaggttgggggtatgggggccaagcatcagaatgaattcaattttaaaagaaaaactggctttgaccccaaatgaacccaaagttcagccagcggcacatcagagataaatacgagttgtactttcacatttacaaggttgtgccactcaacactattaaagacctaatcatccaaatcagaagtacgcatactcccatcactagttctgtcctcaatgcatcccatttttatgaaagctccatattatagctcagttcataatggggaatgagaacttctggttcttagaaggaggcatcctaaatcctctggtctaatcctttctttgccctgccctcccacttcccaccctgagacaagctaatcttatcagataggtagggtttctgtcattgtctcacggaaatcagttctaaatgaaactagagaaagatcattctatgagcagcatttggctttaagccaaaggaacaataacccccttccc

SEQ ID NO: 135722 - DNA, 891 bp, Homo Sapiens
agctttatgttgatatatcaatatacgttggaaaaggaaatagacattttaatcattatcttaccatccaattgtgaaatggctgcaaggcctaaacactaactaacccaccttcccctcttgagattccatgccccatctcatatcctgaaggaagtcaaattacttcctaggcagaatcaattcatctgagaaaaatgaaaacattagggactttcccatttagaactgcattattcatacaaattcttagcttctgaaaaggggctcttgataatttggtggcttagagaagttagatcacagctgtgaagctctggctttggtatttgagccccatggcctgattgaggaagtggcagggacccatatctgaggccttcccaccttcctttttccctcttccccctccaaggagaaacaagacctttaatttccacagtagagcaatgggtttgtgcttgcagtccttctgctcattctttattccctctttatttcctttttttgtcactcatgcctagttccctgaaccccttacttacctggccttacctacatctctgagccccagcctgcagggctccttctttgactattcacctggtggcttttactcctccttcaagacccaactcacagatgacttctttggagtcttccctgaatgctctaggcaggtataaatgagaaaattgttcctctcttcccctctttattcctctcactgtgcctccaaagtactttgtccatacctcggtgatagtacttattctactgtgattttattgtagctttgtgattgtttgcccctctgccctgagcatttaagaacagggggccaagccttattcatttttgtgttaataaatatttgttaaatgtgaaaaa

SEQ ID NO: 135723 - DNA, 448 bp, Homo Sapiens
aggatgaagtaagtaaagagaaaatacgttgaatataatattttactgtggtaaaaaaacagccagaaataatctttggattcactggtatgattacttagatcctgaaatcctttacactttagattgctgttcaaaaagaaaaataatcacatgaaatcagtgaaaacctacaaagtacattctaatttttaaccataaatacagagtgtaaaaattgatgccagttatatttggaaatgtcaaaatacttatctaacaactaggaatgtgaatgtattttttgatgttaatttttcatatctttggggatttgggagccacattttattgataaaaactcatcaccggaacactttaaaataatgtttattttccaggccacaaatattgtatttcatttctatcagtaatcagatttattaaagacagcattatattaccataa

SEQ ID NO: 135724 - DNA, 815 bp, Homo Sapiens
  misc_feature (180)..(181): n is a, c, g, or t
  misc_feature (201)..(202): n is a, c, g, or t
atatttgggggaggggattccccaaggccccttggtcaagggacccagggtttttcctgggggaaacacgcgttatgacccaagttcccctttaccctacgggggccccgccgcgccaaaacgaaatggttttagaaaaactttcttcgggggccggagggcggccgaccatgttttganntgtggggtgggggaatgggnnggaacattcacacagggtctctttccaagaagtttgtgagtcacctacatgtcttcaattctcaaggcaacagtgggggcaacaaggaggttgacagccaggtcctgtgagagctgtttgtcaaagcccactctcagtgagtcagtccctggaagttgggttcagtgcacggaggcagggccactgactggcttagcaacgtgtccatcatgctgattttagcatcttgcttctcaatgtcctcatacggagtccaggacaagtcatgctgtagtttgtaggcaccaaggaagtcatgtggacaacttgtcccccattcctttggagaaatgatggaaaaatactgctgaccactctcccgtttatagagatagtaaatgttgccaggttttttcactatattacaagctacatggtgcaggttggcatctctgtgagcatcttccagtaccttcctggcttgttcttgcaaatgttggatttgctcagctatgactgtcagcttgttggtggcatttgctcggatgaattcatcagccttctgcacctgctctgcgagcgccacgaggtctaaggggtcccccggcccggtgggtgtggtagggctcaccaa

SEQ ID NO: 135725 - DNA, 461 bp, Homo Sapiens
ctctggaaaactatccaccaacctttttatgggaagaaggtcttctctaacactttaacttaagggaagaagtgatggagaggaagaaggaaagtacactggccaatactctgaaactgactgacttgggtatctgtggtccaaagaggatcccgaaagacagtgactctgtctcaatgattattcccatcccaattaaaagtcataatgacagcatttacattcacacagggtctctttccaagaagtttgtgagtcacctacatgtcttcaattctcaaggcaacagtgggggcaacaaggaggttgacagccaggtcctgtgagagctgtttgtcaaagcccactctcagtgagtcagtccctggaagttgggttcagtgcacggaggcagggccactgactggcttagcaacgtgtccatcatgctgattttagcatcttgcttctcaatgtcctca

SEQ ID NO: 135726 - DNA, 508 bp, Homo Sapiens
tcgtgataaaatttttattactgtttcttttaataacatatcaatgagatctatttagagtactacctacaaatacacattctctcatgattcagtgagaatattaagttattgaatacatttttttactctcatggcacttacatttggtaacactaataaggtaaatttagataacacttaaatcatgattatgaatgtttaattgaatattttcctttctgtagctgtgaaatgtaaagcttagatttgcttccatcaggcctcttaaaccaaacttcatcatggttaattgttgtaattacagcacttgtaggacattcatcttttttatcaatacatattgtttgtccacgtatataccattcaccatcataatatagtcttccctcttcagatctagcactgtgcagatgtttttccagtttcacaggtggttccgttttcactctgtgtggccccaatgtagccattgccttcctaattgttgtccagtcttcaagaatat

SEQ ID NO: 135727 - DNA, 710 bp, Homo Sapiens
tgctgttacgattatttattgttactattcactgctttattcccatggacccatgggttagagctccatacataaagtaggtgctcattaaatgttggctggactgagtcagcccctccatcttggcccttgagtcctcagaaaagcagtgccatccatgagaagcaacttgaattgtattttttattgaaaagaattcaggctagagttgggaggaggatgcaagagctactgggaagggggagctcagtctgaacctgggggatcaggggagtaggggactctccccttgtccactgatggggggtctggctgttactcctctcccttcagcacagaaagaacttggtcagtaaaaatgcctgtgtaagtgctcatggctgctgtgcttttgctgtacaagtccctgagtttctcatctacagcgggcaggtatgtcttctcgtacaggttctgggcggctgtctttgctgactcccagtaactggagagagattccttcacctgggtgaggaaggtcgggctaggcatctcatcttgctggggctgttgggtcccctggacctcaaatcccaataccaggaggacaagaaacagagctgggaggagtcgtgtgcccatagtgtccagagaccagactctggcaggctgtcctcaccccccggccgtaatggccgaattcccgggcatatgtccggtaccgtcgactg

SEQ ID NO: 135728 - DNA, 822 bp, Homo Sapiens
  misc_feature (44)..(59): n is a, c, g, or t
ccctcaactaaagggaataagctttgcggccgcatacgcggtcnnnnnnnnnnnnnnnncgaggaaaccaaagtaaccttttgcacctgctctcttgtaatgatatagccagaaaaacgtgttgccttgaaccacttccctcatctctcctccaagacactgtggacttggtcaccagctcctcctttgttctctaagttccactgagctccatgtgccccctctaccatttgcagagtcctgcacagttttctggctggagcctagaacaggcctcccaagttttaggacaaacagctcagttctagtctctctggggccacacagaaactctttttgggctcctttttctccctctggatcaaagtaggcaggaccatgggaccaggtcttggagctgagcctctcacctgtactcttccgaaaaatcctcttcctctgaggctggatcctagccttatcctctgatctccatggcttcctcctccctcctgccgactcctgggttgagctgttgcctcagtcccccaacagatgcttttctgtctctgcctccctcaccctgagccccttccttgctctgcacccccatatggtcatagcccagatcagctcctaacccttatcaccagctgcctcttctgtgggtgacccaggtccttgtttgctgttgatttctttccagaggggttgagcagggatcctggtttcaatgacggttggaaatagaaatttccagagaagagagtattgggtagatattttttctgaatacaaagtgatgtgtttaaatactgcaattaaagtgatactgaaacacaa

SEQ ID NO: 135729 - DNA, 1182 bp, Homo Sapiens
ccactatggagtgtgacacgttcctagtcgatatcacgtcgcccacccggtatcccgagttaagaggttgctgtgcgccagcagttcttctggtgggctctcagatggctggacgatatactcaggagaaatagcccacgtgaagtccccaagtacatccagcagggcttcccgaggggtctccaggtgccaatcaggggctcttcttggggaaataagtttcttgctatgccttgtcgaacaatcttgctcagcgaaattctatggattcccccagcttgtttcaggctcagattgggtgctttttcataaagcttgggacgtttgctgggcaaatttcccgttcctagtgggcgcaagacccagcagtagacactggaggcctcacgctcagactgggcaaggaccaccgggagcatacgctggggccccagcatcagcatcagcctgctccctcgcccagcacagcactcggggccaggccctctcccctgtccttcttaaactccgcacagctggaggtcttattttgctccaggcagatgccctgagtcaattgtcacttctcgtgatgcctgaacatttgatttctgccttgatgtcacttaggataggagaagatgatgtatagggctttagtgggagatgttgtcatggctatgtgctagtgtttgcaaaggtctgacacatttccaggtgacaggctaggcttcaaggttgtctctggagttgaaacgttggtctggggtggtgaacactgtgctgattacagaggtctgtgactggacagaagagtttgtgtttccataaactgaggttatcacagaggtagatgtgaatttgactgtcgtttctgtgatgtttgtttgtggcctcattgccatgttgagacacagggtgcaggctggtacttccaagggtactaggtgttgtagtttcttggtaggatacatttgtagaaacatttgaaaatgttccctgggtaggtaactctggggtagcagtatccgttgttgtcaagatctcatgaacccagaaggcagcaaatctcagcatagcaaagcgcggtccagccccgcggcatcctgggccctgcgcgctgcgcccctgcggaccagcatccttcccgcgcggctcctagagagacgcacacgagtggaagacactactcggcatgccgta

SEQ ID NO: 135730 - DNA, 352 bp, Homo Sapiens
  misc_feature (59)..(75): n is a, c, g, or t
gaagatgcagattttggttttatttcaattcagtacagcatacactagtataacatacnnnnnnnnnnnnnnnnncaaaatcaccaaccaaaacccatcactgatactttgattgtctaggaaagaaggagccccagccttgtcacatacaatctctgtccctggtgcaatgtcatcctcactgtgctgtgaaaggcaaggctctctcctcaccctaatagctcctgtttccagtgcttgcctgtctttcttcccaagcgttggccgggctgtgctttctcagttaacccaaaggctcttgcaggccttttcctctcggaagtcccctccctctcccgagagagagagctgc

SEQ ID NO: 135731 - DNA, 1618 bp, Homo Sapiens
  misc_feature (212)..(268): n is a, c, g, or t
  misc_feature (664)..(718): n is a, c, g, or t
  misc_feature (761)..(907): n is a, c, g, or t
  misc_feature (1107)..(1119): n is a, c, g, or t
cagttcttatggctttatccgttgcgtaagcacagagaggtctgcgaggtcaaaactattgtcatgatagcaagatgcctgtctttttcatttattctcacggtgtgcagaggctacatgatgtgtgatgacatcctcattgatgttaatgaatggtgctatacttgaattttctaaggtgtcattaggtaggtttaggtatgcatacttgnnnnnnnnnnnnnnnnnnnnnnnnnnnnnnnnnnnnnnnnnnnnnnnnnnnnnnnnngttatgccttcagtaatctttgcaacctcaatattgtgtaatggttactttaaaatactgtagttttctttgtgcctaagtataaacataagtacattttgttgttttgtttgcaatagtggtttaaatattttcccaaaatacccaaatttaaaaattctacaactttagaatttaataaatttattctaaaatatttatatattttttcatttaagaatggatcggcttaaaaacactgcttctcatttacttactggctataccatctgtatactaataaaaaacaagatttgatttggaaggactgactcaaactaacgaaaatatgaaacctgtctttctgctttggagatatttacctaatcatgttctgcagtagaataatttagttcnnnnnnnnnnnnnnnnnnnnnnnnnnnnnnnnnnnnnnnnnnnnnnnnnnnnnnngccatcatagtgaactacagcctgaaactcctgggttcaagannnnnnnnnnnnnnnnnnnnnnnnnnnnnnnnnnnnnnnnnnnnnnnnnnnnnnnnnnnnnnnnnnnnnnnnnnnnnnnnnnnnnnnnnnnnnnnnnnnnnnnnnnnnnnnnnnnnnnnnnnnnnnnnnnnnnnnnnnnnnnnnnnnttgctttgggcctctcaaaatgttgagttaataggcgtgagccaccatacccagccaaaaatttttttagagatgggaatggaatgatcttgaatagtgttggtgccacctatgttgtggcatcattttgaaaccaatcattcagagtgctttttttggtaaggcattattttttaatgcaggtatgccactactggggnnnnnnnnnnnnncaggttttaaagctagaaatgaaaagctacttaactatcttaaaggataagttactttattatacactagaaacatacacaatagctgaaaaacttaaaaaatctcacactgctgaatgtctctgctggctgaagtgtaagtaaaagatcatagtagtgccgctgttgagtgatacagcaacttgtcattaaagatgtgtgtgcagacatggattctgagttaatatctcatctgtagaagtatatatttgtcccttgctttgggattggtttctggacaccactcccccacccttgctggccatttgccaaggacaccaaaacccaaggatgttgaattcccttttataaaatggcgctgtatctgcatacaacttacacacatcctcccatatactttaaatcatttccagatttcttatacttcatacaatgtgaatgctatgtaaatagttgttacattgtgtacttatatttgtactattgtattaaatattct

SEQ ID NO: 135732 - DNA, 383 bp, Homo Sapiens
  misc_feature (116)..(168): n is a, c, g, or t
tttggaaaacttttaatttgggagttatgtgagttgttactttctcctggatcacgattcacatttaattgcttttccagttgcaacaagtccttcttgagagttttgtggagaannnnnnnnnnnnnnnnnnnnnnnnnnnnnnnnnnnnnnnnnnnnnnnnnnnnnaatgacaccttagaaaattcaagtatagcaccattcattaacatcaatgaggatgtcatcacacatcatgtagcctctgcacaccgtgagaataaatgaaaaagacaggcatcttgctatcatgacaatagttttgacctcgcagacctctctgtgcttacgcaacggataaagccataagaactgtcctgccctcaaggagcaacctggctaat

SEQ ID NO: 135733 - DNA, 546 bp, Homo Sapiens
  misc_feature (55)..(55): n is a, c, g, or t
  misc_feature (61)..(207): n is a, c, g, or t
ttttggctgggtatggtggctcacgcctattaactcaacattttgagaggcccanagcaannnnnnnnnnnnnnnnnnnnnnnnnnnnnnnnnnnnnnnnnnnnnnnnnnnnnnnnnnnnnnnnnnnnnnnnnnnnnnnnnnnnnnnnnnnnnnnnnnnnnnnnnnnnnnnnnnnnnnnnnnnnnnnnnnnnnnnnnnnnnnnnnnntcttgaacccaggagtttcaggctgtagttcactatgatggcagctgtgaatagcctgggcaacacagcaagacctctaacctatctaatgacaccttagaaaattcaagtatagcaccattcattaacatcaatgaggatgtcatcacacatcatgtagcctctgcacaccgtgagaataaatgaaaaagacaggcatcttgctatcatgacaatagttttgacctcgcagacctctctgtgcttacgcaacggataaagccataagaactgtcctgccctcaaggagcaacctgtagcaggtcgggcttgtctcgcccttcagacggtgggaacccg

SEQ ID NO: 135734 - DNA, 480 bp, Homo Sapiens
agttttgtgttcggcccataaacaaagcagctgtgaattctgatagtggtaaaaaggccagtctaggatataaaaccttcataaacatcttatttcccattcattatgaagtgtggggtaggagatcagagaaaccagatgaggattgctggctgtgctgctaatgtgaactcttctttcaaaagtattgtgtccttttattctcaatggagacatcagaaagtattaagaggagtactattataatactaataggatactgaaaatctatactgattgcagccagaggctccaaaataaacaatactatgatgagttccacaaaaaaacctcaactactctttgttccaggggaagcaccattttccacaaaactctcaagaaggacttgttgcaactggaaaagcaattaaatgtgaatcgtgatccaggagaaagtaacaactcacataactcccaaattaaaagttttccaaagat

SEQ ID NO: 135735 - DNA, 1308 bp, Homo Sapiens
gagttctctgtgactgcacttatcttttattgcccaataaacattgggaagacatagcaggccagaaaggcctgtccccagacattgtttcttgaggccaccctccttttaccccaaagatccaggggcttccttcaggagccctgtggaccagtctgtgcaacacccactcaggactgcccgacaactgccctgctgatcccccatcgcagcacaggagacacacttgtcacacatacatccaacagtagggaggggtttccccaacttccctccaggctcctggcacggggctggcatccggttgtacctggccatccccaggagccagcctggtcactgaggcactcgcacctccaggcggcactcacaccgtgcctcgccctgtaagttggtggccctgcagacatagatgcccccgtcaaaggggcagggctttctaatctccagagtcaacactccctgcttgctgaacatgcggaagcgggcgtcttctcccaggtccaggccattcttgaaccaggaaatcttgggcttggggctaccccggacagcacagcagagcatagcagtgtagcccgcgatgaccgagcggttcaccaggggctgggtgaagcttggggccttcggagaagtccagggccttatagttgggtggctcataggtgatgcctggtctggggataaagacgggctccttggtggtgccgctctgtcactaaagccaaccatattctggctgaagacgcggaagtagtagccattgccaatgatgagctctggcaccacgcagtgggtgcggcggtaatgctccaagacggtgaaccactccatggtcttcttgtcggctttctgcactgtgtacccccagagttccgtgttgccgacatcctggggtggcttccactccagagccacattaagaccccaggcgtcagtcacccggagatcctggggaggacttggcttgtcaacaacctgcagcaccagcgtggccttgtcctccatgttctcaatgcgcaccgtcacctggtaagtgcctgaatgcacgcggcgagcggcccggatgaacaggatggtgtctgtggggctgttgcggatgctcacctcctcgcctgccaggggctgcccctctttggtccaggtcacctgaggccggggcttgccctggaaagggatgagaaggttcacaggctccccgaccttcttctgaatggtctggcgcaggtgcctgggcagctgaagccgtggccgttgcaggatctcctgcactgtcaccggctccgtggtggtaacaggggctccagg

SEQ ID NO: 135736 - DNA, 575 bp, Homo Sapiens
  misc_feature (336)..(348): n is a, c, g, or t
ctgaatataaatgttcacaaattaatgctgtcaaaggaatgagtaaagcagaaaaacttttaaccagcaacatttcaagtacgtagtgtgatcaaacatgatcatccagaatttttatatttttttctttgtacagaggttacatattctgggtgttcttttataaaggaaacattttaaatcccacaaattgacactttctatcttcaatggactaagatttttttggtcagtaatctctgaaatttccttaaattatatacttaacatagcagagaaactggattgtttttgtatataagactgcttccacctgaaatgctgtcataagtactnnnnnnnnnnnnnagtgcccatcttgtacatgatattcttagaggtaataaggtaatgatgcatgaatttattttataaactcttggactatgtatttgacatgtaaaatatgtacagtattaacgtcaaccatctctttaaagttagcctataaatattgttgtataattttctttggtcagaaacacttgggactgaatagtgacactcggtaaggattttcagtgccatttagcaaa

SEQ ID NO: 135737 - DNA, 471 bp, Homo Sapiens
ttctgtaccattgccaatcacctttttggagttggaagtgctattttcctatggacttttgcattatttcattgtgcatgcatccagtgattatacataagcaacatatgtaatctgcttatatatttttaaaaatccatccacacacatggtaaattaagtataaattcttttgcaaaattatagttcatgtcattgaaagtttaaattggtttcatttaaagatcaatatactaggtctgccttcactttatagaaaactagcttctataaagattttttcactgtttactagtgaaatgagaaaagcaaagctatttataaaaggccttatgtcgtgtacatacattgtctttgaaatatttgtgatctagtttattgcttgtaaaagagaaattatataatttatttagtaaatactactgtaaactatagttttgtgagagaaataaaatattttgttctcaaaaa

SEQ ID NO: 135738 - DNA, 294 bp, Homo Sapiens
attagacactatacctcacccttagttctgatttttagaaacatgttaattttgcacatggtgaaatcaatcaatcaacaaggacatgggagacccaaaatggaatacaaacagaaacaaataaacttaactgtatttcaaaaataataacataatcacactgaaggtgggagagaaggagtttggggaggaactaacctaagtaactttggaacacagtattttgactacatactccaagtctcaggctaaagaataaaagagctgcaaatacatgttgtactctggttacta

SEQ ID NO: 135739 - DNA, 1178 bp, Homo Sapiens
  misc_feature (181)..(346): n is a, c, g, or t
tgagcatgtttatctttaaatttactgagggacaaatttttccacagtgattgttttcaatgtaagagctgacatcatcccccaaaacttagtatcattagatcatttcatttttgcaaataaggtaaagatgtaatacctccttgtagttttattttttacttctcaaatattaatatgnnnnnnnnnnnnnnnnnnnnnnnnnnnnnnnnnnnnnnnnnnnnnnnnnnnnnnnnnnnnnnnnnnnnnnnnnnnnnnnnnnnnnnnnnnnnnnnnnnnnnnnnnnnnnnnnnnnnnnnnnnnnnnnnnnnnnnnnnnnnnnnnnnnnnnnnnnnnnnnnnnnnnntacggtggttctttatattaggtttatattaggttcactaagtaggtgagattatgcatgcttattaccagttcttgtagttttgctgtattttcttcaaatgccccaaatcaaaattataataaaaagaaaatgggttggatataatagacaaaacaggtagtaaagaatgtgaagaaaattctgggcacagaaaacaaaagtgaaggcataagagggaggaagagtggaaaagtagaaaaccatctctattagatcaattaaagctttaaattttatttcaaatgattaaatattactaaatgataatattcaactacataaatccttaaatgaaaataatttagcatttattctaatattgaagataataaaaataaacctaaggcaagacagaaaataattcactatggtactatttacctttcagtacattaaatcagtgtttcattgaacttaaatttgtacataatttacataagtaaatcacaccatcaagaaccataatactacaactttgtatttgccatagtgtataataacatcagtcatgggattggattggcatgctagcaggcattaagcctaatttgaagaatctagtaattaaaagtctagttaccactttgtcaaagtctgtgagttcttaattaagctattcctaaaatattataatatacaaaatatatatttagatcataagctaaaatatgaaacgcaaggggagagaaaacaaaaatataaaagatttagctccttaaagaagtaacagaaaatggcttacaacttcatgttgcaattaaataataactattattatattattgagaca

SEQ ID NO: 135740 - DNA, 691 bp, Homo Sapiens
ttctttcttttcatctgcctttacttctcatttcaaggtttcacagagtgctggtctcaacccacatcagtgatacttaactaacttgccttccccagacagaaacatgaaatgacttaaaaaaatagaaaatattcttctcgccaggcacacaagactgtacacccaaaaccagaaacgctgtggctttgcaaagtgtgctcccacacccgcgcacacaggcgcacttaaataaataacgcgcacgcacggctttccccatttcgaaacaggcagacggtctagtgagtttcagcacttgctgggaacaggcgtgtggccagggaggtgccccgcgggtggcaatgactactgacggacccctggtgaatcagaacagagctggcacctgagccgctgagcgggcggctacttctggctctgttgagttttggaagacctttgagaaatcaacagcatcaccgggcaggtcctgagtccatggcctgatatgttaggatcacctgtgggctgctaaaagcccacagtcctagccccatctgcagagttagttggcttctgaaggctgggagaagccctagaacctgcatttctaaagctgctcaaatccaggcctttggaggcttaagactaagcctgcaccatttcaaactaagtatagtcagagagaaagatcccagcacgccccccc

SEQ ID NO: 135741 - DNA, 850 bp, Homo Sapiens
  misc_feature (646)..(646): n is a, c, g, or t
  misc_feature (789)..(790): n is a, c, g, or t
  misc_feature (840)..(840): n is a, c, g, or t
ttttttaggtgggcgggggtctttatttgagtttaggcatgattcgaatgaagaggatcatgctaatgaagatgaagcagacgataatgagcatggcccagagcagccagttgactgacttctgcgtgtgctgctccagacgctctgactccgtcttcagtttctccaggttctggtccgccattttcagtgagtgtgacagggtctggttgtccttcttgatgacactctgggcggccagggtattggtcttgaggctccgggccagtcctagcatctcttccgccagcttttcctggaggttctgatgtcgctgcaggacgaggtctagctcagctgccgactgcttctcactcactggctgggaccctgccactccagttctcttccttacgtccatctcaggctctgcagagtccgtgcctagtagctcactccgcatctcgctggtgtaccgcgcccgtgactgcagatgcaccgtctttgtggcgggcactcgctctctggctgtggttggcacacggccaggggccaggaactggttggccagtgctttctctgaggaggaggtcagcttctcggctttcagcatccccttcagaaaatcccaccttccaggaatattcattgatcacctcagaggccnggtttgctcgcgtggaccttcagggcctgcaacatgtcctctagggctcccacgtacttctccaggcgccactcgtccgggtcccgtttctccgctgccatcgcctcgcagcgggatagcagccgcaccaggtttagctccanntcctcgacgccgccattattcgcccggccctacaccaccccttccgcccncgtgccgaat

SEQ ID NO: 135742 - DNA, 539 bp, Homo Sapiens
tggttggttgttgtttgttgttttgagtcagctgattttcacttcccactgaggttgtcataacatgcaaattgcttcaattttctctgtggcccaaacttgtgggtcacaaaccctgttgagataaagctggctgttatctcaacatcttcatcagctccagactgagactcagtgtctaagtcttacaacaattcatcattttataccttcaatgggaacttaaactgttacatgtatcacattccagctacaatacttccatttattagaagcacattaaccatttctatagcatgatttcttcaagtaaaaggcaaaagatataaattttataattgacttgagtactttaagccttgtttaaaacatttcttacttaacttttgcaaattaaacccattgtagcttacctgtaatatacatagtagtttacctttaaaagttgtaaaaatattgctttaaccaacactgtaaatatttcagataaacattatattcttgtatataaactttacatcctgttttacctaaaaaaa

SEQ ID NO: 135743 - DNA, 610 bp, Homo Sapiens
  misc_feature (456)..(513): n is a, c, g, or t
  misc_feature (596)..(596): n is a, c, g, or t
tttgaagtttatgcattttattagaagaacaaaaaataaacatagaagtagcatactaaaatgagctgcataatgtgcacttttaaacataaacaagcactacagcactataacttgaaaaaaaatcaaagcgtctgcagttgagggaatgagctattgcattttggaggaaaattactatgggaagagttggtactcatgaaatattctggtcattatttaaatatgttacacactggctaataattttcttatatatatttttaatcgccattttccacccaaattatgtgcctccatttttcacattattccaaattgttgttatatgaatgcacaaagttagtcctttaaaaaagaatatatttaggaaaatccttcaaaagttttttaatttaaatcattgtaatttgggagcatggggacaaatggctcattttctgttaaagcagcaannnnnnnnnnnnnnnnnnnnnnnnnnnnnnnnnnnnnnnnnnnnnnnnnnnnnnnnnnaataagtttattttgaaaagggcattcattcccataatccagtgatatgatggtcatatcattctctcaactgctagacacanaagacatagcaaca

SEQ ID NO: 135744 - DNA, 437 bp, Homo Sapiens
catggagtttcatgtagagtccacaagcattgcacacgggttcaccctcggcgtttctgcgccataaggtggtagttgtggtgtgacagttggcacaggacaatccaagccgccgtgatgaaggcacgcgcttctgcggcttgatgaggggccggctgaggccgttcatcttgctgtagagcccgcaggcgttgcacaggtagtggccggtgccgtcccgccgccacagcggcgtctggatggagccgcagttcacgcactcgcggctctcggacaggtcctccagcaggtctgcactgggaccccggggcaccgggagcggggctccggcgcggctctgcaggctgtgcagcaccggggtctcgaagggtccggcgggccaggcaggcgtcagtggcgcccccacgtagggcgagtaggggctcggatggtggtgg

SEQ ID NO: 135745 - DNA, 476 bp, Homo Sapiens
cattcatcacagcaataagacactcggggcggtgcattttctgtgaaatgactactgtccggggcccgaggtgctgcctcgcacaatgcatcaaaggaggttgtgtccgtggtcgtaacctcttcgcgtgaaaggcaccgcctggtccagtctttgtgaaggaacaaaataagttcacttccttgggcaccgccacccaccctcagcaaatgacaaggctggagcgcagctcccaccgcacagttatttgcaaagtcccaggtgaactcgtggcgagagaaggaaaatgcgcgtcccgggcgcgggtaggtgcgtgtgggcagcggggaggcggccagaccctgacactcgccagctgtttgtcctccgcgtagcccggccccggccgcacacgcccgccccctccctgagacccccagcccgccgcccggccttttgtccccaacccctcggccgacttccttccccgcggccgc

SEQ ID NO: 135746 - DNA, 486 bp, Homo Sapiens
tttttttattggtactaaagcctttactgtaataaaccaaatatatttacaatttatacaaatgtttaaccttcaacaaaaatacaaaaaaacatttcacaagatgcaaaaccaggaaacaagttcattggagacaccactgctctacaaaggacggaaagtgaggtgaactgcaaggaacagaaaggtaatctcacacttgggcaaggcgtgatccccagatcacccagaaagaaagaatgggctgtcatgtgagtcggcagattccgttcctcaatcctacaacccatggcccctctgtccgcttggccttggtgctccatttggtctatgtagacaggtgactttctgctgatggacttgtcgcctcctctttgtagactcaaagtagttttctgtcaaggtttggaaacaggtgtttgtaattttttttctcttttaaagttacaacttttctatttctataaattcgaaacattttggccc

SEQ ID NO: 135747 - DNA, 595 bp, Homo Sapiens
tttggtatcaaaaattttaatgaaaacattaatcatataaattaaatagcaaaactatttgaaaggaattataattcaaacagatttgacttactgatatttctctatttgttttcataagaactgattattttcagctgaaatctatttaagattgtggtaaggagaaacgagattaaggtacatagacctcataagccctgttgtcagcacatattcttcataaatactcatcttccttttattatttttaaaagacacgcaagttttacgaaacatgccaacttcagttaaaagcttcttacataagaaatagccacatgtgaggaatctagcctggcatttgttgaaaataactatatattctgaagaacacgccccatgacatttattgataaaaattcctcactaataaaccaatttctgaaatctaattacataccttcatgtcacaatttaagaggtctgttagagaatcactttttttaaaaagcacaaagttaacagtatcaagaaaagtactctatcataagtaaccaaaacattaagaaatatttctcttactgcagatatggctcagtctcatctgaattat

SEQ ID NO: 135748 - DNA, 1027 bp, Homo Sapiens
  misc_feature (172)..(172): n is a, c, g, or t
  misc_feature (913)..(947): n is a, c, g, or t
atccttattagggggccccgcgggcccccaaaaagaaattgtgtttatagaaaacttttttcgggggggcccaagggcgggccccaacacattttaaatataccttatctatactgttgcttcgcaaaagggcgcctgggggggagtatttgtctggctgcaggttgtttgntttttgaggagtggcatggagttctttaatttggaaggcaaaaggttacatttaatgaaaggcagaggctggattaataaatgtttgttagaaagttgttctgacacacagtgaactctgggcttttctcctgcataaaaagcagagctagcagtaagtgcaaatctgaagaaaatccatgtgtccaataagctgccatctccagaactcttatccaggaaattcaaagagtgaacattcttttagtctcctactcctcaattaagtaaatgagaatgattcagccaacaaagttcatgacaacaaggtgcaggatggtgctggcaaagagaaaatcagcaaaggctcgctctggggagatgccttggaaatccgctttgttctgtgggttgatctgtattctcaggcaaaccgctaggatgaaactccccacacaagagatgaagcccgagagaaaagagttgaaggggaaggtccccacgaggagacagtaaccgaactgcagcgccccggtcagcagtatatacagcaggtacgcgtccagcaacttcagacgctgcggagtggagctcaagtactcttctaagaaccgcgaaatgacagacactaccgacgccgacataactgcacgcaaggtactccggtccgcgccccaaactcttggaggacccgtcgaccacaccggatgtgcccggccgtaatggccgaattcccgggcatatgtccggtaccgtcgactgnnnnnnnnnnnnnnnnnnnnnnnnnnnnnnnnnnncgccgcttcctcgctcactgactcgttgcgctcgtcgttcggtgtggagagtagcgcctatagtgatcttacattctttt

SEQ ID NO: 135749 - DNA, 451 bp, Homo Sapiens
  misc_feature (362)..(410): n is a, c, g, or t
  misc_feature (421)..(421): n is a, c, g, or t
  misc_feature (429)..(429): n is a, c, g, or t
ccccgctggctgccaagccccatccctaggacagtcccggaccagctctcttccttgactgacaggtgacgaggccacccagagccaggcggtgcaggagccaggcccagccccagacgcagcccttgagggctgcacctatgaccgcccctgccgctggctgcagatggctgacctgcgggcggagacaccggacatgctggccgacggcacccggctgcagctggcaggggtcccggtgggtgtgctgaggacacctgggctgcggtgcttctactgctgcacgggctgtggaaaggtcttctgggacggctcccacctgggtcgtgttgccacccacttccgagacatgctggagagcnnnnnnnnnnnnnnnnnnnnnnnnnnnnnnnnnnnnnnnnnnnnnnnnnccttttgaggncagccagncaattatctaggaaagtgcccg

SEQ ID NO: 135750 - DNA, 928 bp, Homo Sapiens
ctctggacgtatcccagctttgtctgccccccctccaagttgtgtgtctgtctctatgtgcctgtcccaggtgcgtagttgctcacaccagcgttagttatgaatgtatcaatgtgcagcccacttttcaatgcaattaaagtcccactgaagagcagttccttctgctgttctaaccagtgatgagtcgttctgcaattgacctggtcccccaacagggtactccctgcggcagaccacccacggttgttcaggaagattccgtagatgaagtactggcctcacatatgaagtcccacgctccatggttggttcggtatcaggtatgctttcacggaccatgggcccagcagtcgggcactttccactgatttattgtactgcctgtcctcagaagggactgctggccgggtctgggggctgggctcaggctcgcagggcgctgggggcgctctccagcatgtctcggaatgtgggtggcaacacgacccaggtgggagccgtcccagaagacctttccacagccacgtgcagcagtagaagcaccgcagcccaggtgtcctcagcacacccaccagggacaccctgccagctgcagccagggtgccgtcggccagcaatgtccggtgtctccgcccgcaggtcagccatctgcagccagcggcaggggcggtcataggtgcagccctcaggggctgcgtctggggctgggcctggctcctgcaccgcctggctctgggtggcctcgtcacactgagctcctgggcccctcctggtgacatgctgagccacatgagctgcttcatcatgtccctggagacctttaggtaactggtcacagttacaggcctggcagcggctgaagatgtctgcgtgggtgacacgcacgttgaaatgcttgagcacagccttggcctgctgcatgggc

SEQ ID NO: 135751 - DNA, 514 bp, Homo Sapiens
ttttttaacatttcacaagactttttattggtttctaaaaagcagttaatattttaaggtacggtatataaacaaaatagccatatctgatttttggcaacatgaaaatgccaatttcctttcaaaccaattcccggactacagctacaaatgtggtcaacaacgtcatcctggagtaaaattcagctcctgacacacacttctatggcaattataacatagttaacacttggcctgtacctatatgaacactgatccattgggggccactgaataaaaatttcttcaatctcatttgctattttagttgaggattctaatttacagaagagctgggcctttccttctcccattccttttataacttcctatccagtttcctgcagtttgtttttcctcctatttgaattgttcttataatctttaaacgtttctgtttccattcactttatgcgtgcatgcttctctatgacttatcaaacgtagcactgggtgtaaagtggtatttttccaa

SEQ ID NO: 135752 - DNA, 420 bp, Homo Sapiens
  misc_feature (52)..(52): n is a, c, g, or t
aacaacttagtaaaagttgaaatgaccattctgtgtagtcataaaagaaacncaatgaagtgtatggcctctggagttagtcttagtaaaacttattgctctgtgtcaatgttaacctgtctcagatcaagtaattctttcactaggttgggtttggggaggggggaaaagaggggcttttcctaggagaacgataagaaatggaaagactccttgaagtgttgcaagggaacctcctagcactgtgaaagtcagaatcgcctcagcatttccatgacgcacattatgcaaatctctttagcactattttaagtttgaaaactttaacaatgaaggggaaggggaagatttcccccaactgaatcatttgtgcacgtgtatagctcaaagagcttagacttcaaatatatctggtgaatg

SEQ ID NO: 135753 - DNA, 624 bp, Homo Sapiens
tgtaacgttttagaattcaagaaggtttcccatgaggaaagacggaattattcagaaacagcgttcacctgatacggagaacagctccccagcgggaagtcatcacgtctcatctgacagtctagcgagctgcgtggcccctggtcactcactcactcaccctcatgggtggtctctgtgcactcatttataaaaccaacacactggaccttgcccgtgattcccagatgtgacttatacccagaattcccagaactagtttaaatacagcttctgggctccacctcctccccgttcctggtggttttggattccataattctgagcggggctcacgcatctgtattcttaaaagttcagccaggtttggggaggcttggactaggtggcctaagagaaccctttgaggcccaagcttcactacagaaatttctgtgttacccacgtgccagctactctcagggggacagtcagcaaggacccatgaggaatcataacacggggcaaagacctgtgaagatacaaggggttgctcactgcctgggcccagggttagttattcaagcaagatatgtaaagttacagatagtatttaattggttactgtgatatcatagaaatacc

SEQ ID NO: 135754 - DNA, 907 bp, Homo Sapiens
tttccagggtttcacttacgatcccctgtttttgggaaagaggttttccccgggtgcggccaaaaaatggcctagaaagaagtttccccccccgttctcttccggatggatttggcccaggggcggggggcgtttatttgtgaatatcggagcttcggctgggggattccccggtggtaaggttccccgggaagggcccttcaaaaattcccattcgggattggtttcagaaacggttcggtttgccccccggggggtttttttattgggtgggggattccaaagcccttagttcatgacccggggttcttcctgggaaaacaagttatgacccaggtttcccttacctattgggggcccgcggcgccaaaagaaatggttttgaaaagttttttggagggccgaggccggcccgacaaggagtcaccttcaagtcctcctgaatttttgtaacatgttctttcaactttattcaaatcagatggccccctccagcatttatcattttaaaaaatgaatttaatgctataaaaaggtgatgttcactttaatcctgtttgccttcacgccactgtcgtgagccttcattccaggccacatacacaaagagggccagcaccacatggacggcgaccactgcaacaatagcagcgtaaaaatagctgtccctattggacatcccaagggcgccttcaaatatgtaagatttagttgtgaaatataacccaataggaacagtgatcattaaagctgtgaagaacaggagcgtcttcagtgtagatgctaatgagctttcatttctgaactcaggaggctgcagtgcgttcagcgccgccttatccgggcgctccatggtgtagccgtgccggcacaggcgctcggcggcggagctgggctcggcggccgc

SEQ ID NO: 135755 - DNA, 1481 bp, Homo Sapiens
  misc_feature (238)..(258): n is a, c, g, or t
  misc_feature (639)..(654): n is a, c, g, or t
  misc_feature (656)..(656): n is a, c, g, or t
  misc_feature (659)..(659): n is a, c, g, or t
  misc_feature (661)..(663): n is a, c, g, or t
  misc_feature (665)..(665): n is a, c, g, or t
cggccccacaagggctgcgaaccccaaggtgtgtggcgttgtatatatcccccccttggtgggcggaatttttcaaagggtttttcacatctccaatagaccccggttttttgcggaagaaagggggcttttcccacaattgtttccgggcaagaggaaaatcgcccttataaaattggaaaatttttgccccaacccccagttttactttcgccgaaatagaaaggtggcgccaacnnnnnnnnnnnnnnnnnnnnntaaaatattttgagatctattctccggagagctttccccgcctttggggaaactattcccctggttggggaaataaagatcttccccggggttaatattggagccctttcaaaggaaaacttccccctactttggagattttttgtttcacagaaaaacgcctttcggtgtttggccccgccccgggggcgtgttttttttaattggggtgagggaattcccaaggccacctatgtccaagggccccaggattcttccttaaggaaaaaccagcctatggacccatggttcaactttaccctaactggggccccgccgcgccaaaaacgaatgtgtcctagaaaagctttctcggagggccggaggcgggcccgacaaggnnnnnnnnnnnnnnnncnttntnnntnttccagtgtacagatacgtttattgacaaataaagtacatgtacccctacacaagtatcactgcgacatttcaggaaccttggagctgggaacgccccttcctccctgcccgcctcttctctagcctcctcctgattgggcttgggctctctagaaaagtgcttctggcattgtctcgctggaaactctgtaggtgtgctggttgggctctcagtgtttatcatgtccacacccttctgtccctgggagctgtggacaaggggcgatgagcctgctcagtcattcatgtccagcccaaactctggatacaactctttggtggtgacacctcggatcacagctagtttgcccatcagcatctgccccacatccttgatgtcattgtactcgtgaagctgggtaatgtggtcctccagttcatccacactgtagccttcagatacgaactgggagatctccttgtccagcatgtccctcttctccttcagtttctgaatgtcaaggtgcagagactcctcgctggtcccatcagcctggccagacttgggcaatggcctaggggatcggaaggccccgcggcaacttcgggtaagtcttggttcagtcctcctgagccctggggtccgaggcccccggatcagggggttcaatggcgcaagagggtccagcgcgggagtcggagagcgacctctcaggtgcaccgggccaggaactctgacccggagtgtgaactggcgcacagaaagctgcgcgcgcacccaaggaccccggccgtaatggccgaattcccgggcatatgtccggtaccgtcgactg

SEQ ID NO: 135756 - DNA, 729 bp, Homo Sapiens
tttttattgttacagaaccattaaatacaacttatacacaagcaagctgggcggcgtccggggggcagggagagtgcaagagggtcaggggtgagcagtccgggcccggtcctggagggggctgaggctgccgtcgtgggaggggcttggctggcggaggccgggctgcctgtggaggccttgaagctttgccagcagctcctggatgaagtcctcgacaggtttcccacatgacttcaggagtccctggattttccggcttctctcctcttcactctctaactccaacaattcatcaatgttgatctcatcgggcatgtctgcctccatgccgcggtacagctcctccaggcgcccgtcgatccacttctccacgtccagccgccgctgcagctcccgccggtcatacttgacggtgacgcgcgcgtgccgcttctgcagccccccgggactgccccctggcccgcgggcccgcgatggagactgcagcttgctcagcacgcgcttgcccagccgctgagctgccatcgcgctgctggacccagcctggccccgcgctgtgcgccttcgcctcgcgccccgggtgcttcttacgggccagggcggggctagccgggggcgggggctcgggctcgccgggaggtctgccccaccccggccgcctcgggcctcagtttccccgtctgcagtgcgagagtaggccgctgcgtcggcttgaggcacgcagtc

SEQ ID NO: 135757 - DNA, 663 bp, Homo Sapiens
tttttccctagaaattggggcagagtacacccttttattggaaaatgagaagtcctgtgtgtgcagagaaattttaaagaaaagatcaggggataatccatccattaagaattctccattaagaatactcattataggtttaattaatcacaatgatggatatctttaacattaggcaataattgacagttttatagtggtgagactatcatcacccaaaatacaatttttaaaggtcatattcacttttcctttcaacatcataaaatcttgaatgaccacaagtagagctcaacagagaataatcaggcaaaaaatcaggaatgttcatcatcgaaggtttgactatgtcctcggttgatactcataaatttaaatatggtaggtagaaaagaaataacacacagatttgtcaaccatatgtaacagaatagttcagttcagcaaggggaattcagaattctttctctgctggctgagcctgtatgtcagccaacaacatccacttagtctcaggtgacaacagtgccagttaattagcttttgtttatgttttgactattgatagacttaaattatattcatattattatgcaaaacaaacacatagaaagtcttgcctttgatctaaatacaggcacttctttgttgcaatgatgtttg

SEQ ID NO: 135758 - DNA, 541 bp, Homo Sapiens
ctttcataataaagtttattacctaaactgactttaaaaaatataaaataggattctgcacagcagaaaaataaagccagagaccctcccccaacccctggtttgtgcaaagatactgggtatatgtaaacatgaagaggtaggaggtgcgagttcaggtcctggctccagatacagttaagctgctacaacaaccagggggacccagagggagcaccaggagggggaggaccccctcaagaggtgagaaggggtctgcggcctcgtctccagccgagggcgggaggcgcctcgcccctacacccatccgctccctccaacccaggccggggagggtacccacatggttccaggcaagtaataacaaaataacacggcatcccagttaatgctgcgtgcacggcgggcgctgccggtcaaatctggaaggggaaggagctcaggtagtcgcggaggacggggttgagggggatgcgagccaggttctcgcggcccacggtggccacgatgcgctggcggcacagctcctgcagcggccgca

SEQ ID NO: 135759 - DNA, 1951 bp, Homo Sapiens
  misc_feature (890)..(890): n is a, c, g, or t
  misc_feature (1128)..(1128): n is a, c, g, or t
ccgtatattattgacatacaattgtctgtagtatctgtatcccctgcttgctcagtggtacgactgcctgtgacaaatttgtttgcggttttgctcctttcgggtacgcgccctagttgcagacggtcgtcgtccacaaagctggaccagacgctgcacagtcaaaggaagattgggagacccggtaagtccaggtacgccagcatctgtggggccacacggtttttgtagcccagaccgctaatgactatttccgggaccaagaatgtacatggcccaattcaccccagccaaggataattattggatatgaccgtcttggctttgttgccaacttcaaagtaaggagacactgtcaatcaattccactaaaattgcatttattttcctgtcatagtaaaaaaaggaaaaacagtagcaaatactgggcttcgttttccccctcaacggcacgccttccacaacagcacaggtggttctctgcttcactggcagaaccacacaagcttatcctagagaaaatctgctgtcgtaagtccacaaggaagagttgactgggcccaccgctatagccaatacttccagaatcaccagcccaccttcgtcaaagggctgactgtggcagcaaggggtgtctgtcacattcgtcctggctcactgagcccaggcctcatcgtaccctcagctgtgacatctgtactaccattgcctctgcgtggtcctctgggcctcacgccagccatggcagagtgtcccaaaggttctcaggagctgtttaacacactatgtcaaataccagcttcccccgaaaactggagatgcgtcttgagtgcactgagttgggcatcagtcccagaagttttccattaaatgaaagcgaatccccattngcagggtagggcctgggggaggccactgttggctgctctttggaataacaatgcaatgactgatcatttcccttgaacacaggccaggaacgtgccttgtgtgtttaggtgggtgtcagaacatttctcttaaaagttaagttatattttaggagggaaggaaggaaccatattgcctttctttggaatggaaaacccatctcggatgattgactttagacaggccttccccctctgncgaagaccacgaggcatttttcagtaaggtataaagaactaaactctggcagacactgtggaagcccacgccttatctttagaaagtccattgtatgctcctcacacacggcagacggcttctgtggcgtgcaaagcactacatgctcacaaagaaattctaaatggctttcagaacacagtactatggctctaggggacgggtgcgggtggggactgaaaggtgaaatgatttagaggaagccatgttgtcactttttccatgagccacgtagtacagagaacgcggcactccataaggaccatttgtcctgcagtgtgggatgcattttaataaaatgattacactattttgtttcaattatatcttttcccagtgctgaatctcttgcgtgacatggtcccaaggttcactaataaagcgttttctgtgaggaaggtagttttgctttagatgagaggcagccctgctgccctgactactggcacggaggcttagtaggtgtctttagcctgacagcagggaccctcatctgtaacttgggctgctggcttgggctgtcggagctggcgggcacctgggctgggttgggagcgcctggagtctggagcggggccgacgccgtggtcaccacctgctgctgaatgagtttctgctgaaccacctgggcagtcgcggtcactgcagggatcatctgcacctgctgcccggccgccgtcgcctgcgtgagcgccacagtctgtggagaagcctgctgggaagcagaggcaacttgctggatgctggccacgggtgtttgctgttgaacaacttgaggagtttt

SEQ ID NO: 135760 - DNA, 981 bp, Homo Sapiens
  misc_feature (885)..(919): n is a, c, g, or t
atattcaagtaatggtacatacttgttatttcctacctagggaatccatagatatccctttttaccttgaattattatgaaatatgttattattcatatcagaacaaagaaataatgcaaatttcccatttccttcactcagttatgactaagaatacatcataagcacaatgaatacatcattacatcaccttctaaatctaaaaaaagtttatttaaccaacgtaaccatattgaataaaatcagcttgggagaaaattagttgcttgctaaatcatggaaaacaacaatatctttttgaacaatatatcccacagaatgttgtagagttcaatgcgaacttcagtccaggtcaacgtcccttggcttatgctctctcataaactctcgtggaagtgacgcctttcatgacgcattccaccaccagtttatcatcctctcgttttctctttatggtggttgattttccatcccatttctgcacatgtaccaggacacccccatctaaggttatggtgctcttgactttcctgtcatctgcagtgacttcgtcaaattcctggcccagtatgaaggaaatctcagtatttttaaaggtactttcagatttaatggtgatcacatccccattcacactgatgatcatgttaggtttggccatgccagccactttcctggtggcaaagcccactcctacttctttcatataatcatcaaagttttcactggagacaagtttccaggtacctacaaaagcatcacacattttgtgagttttctaggattattcttcaaggtgagaaggaagctgcagttttcaggagggtgctgtccccggccgtaatggccgaattcccgggcatatgtccggtaccgtcgactgnnnnnnnnnnnnnnnnnnnnnnnnnnnnnnnnnnncgccgcttcctcgctcactactcgctgcgctcgtcgttcgctacgcaggcagcgccatttgt

SEQ ID NO: 135761 - DNA, 626 bp, Homo Sapiens
tgccactcactccagcctgggtgacagagtgagaccatgtctcaaaagggggaaaaaggcaaacacacccattaggaatatcgttctacgttcagcttgatcatcaagttttgcaaaaacatttttccaagtttactcacctaaatcatgggttaagaagcatctagaaagtccaaattctgagggtaatgattcacaacaatcttagcgcccagtagggctatcggagggaaaagaaaaatcctcccctcctggcgcccaaggaatccagccctttgtggctgcagagaagggaagcagtttcagcctcccccagcctggctgggccaatacctctgctggccaggaggggtcactgcagcccttcaggtgaccaggggagctaaagccaccaggggccaccgggcaactcacttcagtccctggtaataaccacaaaatgtgacgtttttccattttgcctttagatcctgaaataagaaagtaatctagtccacacatacatattgtgggtagttgacaaaattatctctaaactttccaagaaatgattcgcacttaagctgcactccagcgacggggaacacggactggaacacgacagccccgcgcacctagaaagccgg

SEQ ID NO: 135762 - DNA, 1145 bp, Homo Sapiens
  misc_feature (526)..(556): n is a, c, g, or t
ccgggttgttccacgcgagggcttcccgggggtgaatgaaaagagtggtttcagcaggagagttcactcaacgcccggggtaggcgctcacgaatctttctttctcaaggccgctggcctacgggcacatatatgccacgggctgaaggtgttttcaacaccgcggatagatacacaccgctgtgagaaaagtgtttgtatataaagtgtgccccccttagggacgctcttttaaaaattcttctgttgaagggggtaacttttgtgtcccccacatatgtggtggcccaccccccccacgacagtatagtggttccttttccccggggttcccccgggctgtcggccgcgttttgcccacgttcgcgggcgcttgttagtatcgcttgcgcggcccgctgtccttggcttatttaatttcggctcctcctcatatgggggcccctttgggaaccagaggaagctcggggtatccggcggaaacttgggcccccccgggggagaatttttgggccgcgcccccccnnnnnnnnnnnnnnnnnnnnnnnnnnnnnnnatatgcacagatgtataattatattgtgtatgtacacatagggcagacattacacattaagaatcagggaactttactctgtaatttttagctggagttatgacttcctgccactgacattaaggctgacagatgaggctctgaaaatgccacagatttaaacggatggaacccgagggctttagctgagctgttccttgagcccagcgggacggggtagttacaacatgcaggccatcacctacgaaggcctctgcttccagctgtggcagctggcctgaagccttttggggtagagcccagctctgcagagggcggggagtgtgaggaccccacccttcctgccagcccctccctcacttactggcagcacacctgaccctcagccatactgtccctgcaggggctcgctgggacacccagactggagtcatcgctgaagcgcggctgaaagagctgaccccggccatgcctgtcatcttcatcaaggccattcctgtggaccgcatggagaccaagaaatgattcgcacttaagctgcactccagcgacggggaacacggactggaacacgacagccccgcgcacc

SEQ ID NO: 135763 - DNA, 795 bp, Homo Sapiens
tttttagcttcaacacagcagaaatttatttcccacccaggtaaggggaccctgaggtaggcagtgacttctgtcggcagcgagctaggcccctctcaccaggctgccctaccgtgctcagtgctgcctcatggtgcaaagtggttgctgagctccagtcatcacttcagccagcagaaggaggaaggagaaggagaaagacgtgaccccaccatctagggcatttgccttccgaccccccagctaggcattgtgtgttttattaataaggaaaagaagagaacagttagcggaggcctcccgctgtccaccaggatgaacttggcaggccggacaggactctgggcttcccagttaatggagtgttgaactggtggggatctaggggttctttaagtctcactctgtacttctcagaaggggaaactgatacccaagtcagtggctgagctgtggcccaggctcggcctctgcctgctgtcccagagctctgtcctggcaccagctactggtgaaggcagagcttgcagcagtcacagccctgccagaggacaccctggggaacccccgctgtaatgggccacccaccttcccggctctgcttacccagtcctgcttcctctgcagggaagctgcaggcccattctgcccgctccctggcacagggtaagccgtgtctgactaccgcccaggatccatccatgacacccactaggctgagggcttggaggactggagtctagagggcagccaggatgaggctggaaaatattccatctcaatctactactatcc

SEQ ID NO: 135764 - DNA, 611 bp, Homo Sapiens
actcccattgatgcctagtgtccctttccatgacatagaggcactagtgggcttatgagtgggaggtgttgtacgcggcagcccacccatcttcatgttctgggtactcacctttactccatgtccaatatcatctagaattgtatagtcaataggttttctaatataacgaactggtcgttcaaggttggctggagcaataatcttatgtgtccttgaagtgtttttattggtagtcaaaataccaatttctcttcttgcaactttctctttatgaatatcaactgtttgtgaaatatgattgattgaagattccatccttcgtagctgggatgcctggatatccagcatctgcaggacattgttggccaaggtgtttatcagataggcaacacttgctaaggattgggtggtgtaggctttggtttcttctagggctctctgcttatctgctgactgtatgtagttgttctcgcagtaatcggccacccgttccagatttgtgtagctgtcgaagagggcccggcggccccccgggatttcctcttccagcagcatctgcagctccgccatcttcacatcctcctcctcctcctcctcatacaggtcgc

SEQ ID NO: 135765 - DNA, 541 bp, Homo Sapiens
  misc_feature (527)..(527): n is a, c, g, or t
gcaaataatatgaactttaaaaaatgctgtggcctcattaaactttggtaatagcttttctttttacttcagaaatccaaacattagagaattcaccaaagtaatcctctttagaagggcatcttgaattatattatccatccgtatttatggagattggtaaagtagttgaaccgttgacttggtgatctgctcttctccgtgactcttgtatgtatgtgtgcataaactgaaggccaaataattcccgttcctcttcttcatctgtgccttcactgggaggaagtgatactttcaatttcagtgggttgtctctgaagttgacaaacctcagatttgccatttcttccatgcatactggaatatcttgcagtttattgttgctgagaacaagagtacccagatttttcatattgctgattgtttgaggcaagcatgttatttcatttcgttgcagccataacggatgtagattttgcattctttccatagtatcaggaagttgttcaagtttgttgcttcccatngtcaagcactcaag

SEQ ID NO: 135766 - DNA, 555 bp, Homo Sapiens
ttaattggtaccatgactttattaggcatttcactgaatacaaataaacttttattttttacattaagaacacaatcttatttaaaaaattcacattttctatacagactgtagccatggattttctttacaccacatttattaaagtatcaataaccagatcctaaaaagagaaggcacagatctgtctctctctggtgaatttctggtgtctaatgaaggaaatgtcaccagctctgcaaattcccatcctccagaaatgaagcaaatcaacacaaatgtgtgtaagcaggagtcatgagatggacatgttatattaaaggatttggattttcctctgccacttataggaatttcaggagaggaggtagctactgaaaatgtttcaaaattccatctgcattcagtctctgtcaaggattcactgttggaaacagtagtatttgaaagctagaatttaggaattccaacatggttctattttctgcattgttttagaaaccagcctttgatctcactgttcttattttagggcttcttgggttttcaattcca

SEQ ID NO: 135767 - DNA, 512 bp, Homo Sapiens
  misc_feature (388)..(444): n is a, c, g, or t
ttttttaaactgaatgtgtgatttattatgtttaagattggtttataaggcttaaatatatctgtcatagttaacagttaacagcaaataaaggcaactttacaaaatcagtgtttccatacagtacaggactaaatgtggcaactgtgcattggaaaattaatatttcctcaatgcaaatatcaaatctgcagcaccatttagaagcttccactaaaaactcaagctgcagtatttattacaagctctactcagaacacaaggctacctaaatcaagcattagagaaaaacagtggagtcattcaggcataatatgtcagatttggtacaggattaaaatactaacatttttaatgtcctggtttcaaattaataaatacaaaaacnnnnnnnnnnnnnnnnnnnnnnnnnnnnnnnnnnnnnnnnnnnnnnnnnnnnnnnnnatctcgctctcatatgtatgcaggtatgtcttgagtgtcaggatttctgggtagctgcggctggtctt

SEQ ID NO: 135768 - DNA, 1308 bp, Homo Sapiens
ttaccccattttgattcgtcctctgagctattgcagctctcctcggttgtcaggccggtgaggcaggatgaaggaggacacagagagaggggccgtcacacttgtcggcaggctgagtgaaatccagacagctggtgatgatgctgtagtagtgagttggaacaggaatggaactgccttccacgtactgttttattttgtcttctgtgtcatgtaagccatcatagtcatagtcgaagattggtccaattatcacgttaactccatttctttccgaagcatatttcttcaccaataccctttggaaataattccagacccgtttgaaagcaggatacattggaaccatattggttacaaggaatgcatcatatttagcctctggtgaagagctcagataaggaggaaagaggaatccgtaggacatctgcttatcatttttgtaggccaaacagttctgactgaaactcggagaaacacggacatcaggccggacgcaactggtcagatggtcaggaacgctggaaacctcagcctgtttggaaacagtatatgatgtccagagtggcattaggaatatttcactataaccactttcaaagtcagtgtgatataagatatcatatctagtccgataaagcactgcaggtcgcccatagaggaggtgtctctcttctgtagacccttttgtatgaagccgtttgttgagttcatccaacttgttctttggctctaccttatcatcacaagtgcagcccaggtcaaaatcagactgaaggtacataatccctggataattgggtctggtaacttcctctggcatggttggcctgaaggtattagtgcgcaggagatgattcaaacttccatgggtcccattattaggagctggcttcaatcccaggagatcacacataacattgtaaagttcaatgttttcaaatggaggcactttagtcttgtacttaaatgttgggccataacctacaaaaacagtctgcatgctgttgaccttgttatcaaatccgtggtctccctggaaaaagcattttcctgatggtttcttataaacatccaaaggtttccttgcaacatgccatctgcgttccaccaataaatggatatcctcaattcttctgttgttggcatagtgcaaacgtttgggaaggtgctgtttcaagtaaggcttaaagtgctgatctggttttttacacgtgagattggcaataatggctttggggtcatatttagcattgttgctaaatttggatcgaattcttcctagagttccaggcactaaagtaatat

SEQ ID NO: 135769 - DNA, 982 bp, Homo Sapiens
  misc_feature (668)..(668): n is a, c, g, or t
cagtatttatacaactctactcagaacacaagctacctaaatcaacattagagaaaaacagtggatcattcagcataatatgtcagatttggtacaggattaaaatactaacatttttaatgtcctggtttcaaattaataaatacaagaccaatataaaaatatacaaccaccttgataagactgtactgcagatgctcagaaagttaaatctcgctctcatatgtatgcaggtatgtcttgagtgtcaggatttctgggtagctgcggctggtctttcggaagaagtccaggctggtgagatgttcaatgtcacgcaccctagctgtgtgcatcttcatgagttcttctacccattttgattcgtcctctgagctattgcagctctcctcgttgtcaggccggtgaggcaggatgaaggaggacacagagagagggccgtcacacttgtcggcaggctgagtgaaatccagacagctggtgatgatgctgtagtagtgagttggaacaggaatggaactgccttccacgtactgttttattttgtcttctgtgtcatgtaagccatcatagtcatagtcgaagattggtccacttatcacgttaactccatttctttccgaagcatatttcttcaccaataccctttggaaataattccagacccngtttgaaagcaggatacattggaaccatattggttacaaggaatgcatcatatttagcctctggtgaagagctcagataaggaggaaagaggaatccgtaggacatctgcttatcatttttgtaggccaaacagttctgactgaaactcggagaaacacggacatcaggccggacgcaactggtcagatggtcaggaacgctggaaacctcagcctgtttggaaacagtatatgatgtccagagtggcattaggaatatttcaccccggccgtaatggccgaattcccgggcatatgtccggtaccgtcgactg

SEQ ID NO: 135770 - DNA, 1627 bp, Homo Sapiens
  misc_feature (1301)..(1362): n is a, c, g, or t
ataatcgctatgtagtagcaatttgttatcttatatacgtctgccctcttgtgtgtctggacttgggcgtcttgattttgttttatttggggaaagtcaccaaaaaaacccctataaaattaaaactataattagagcgttttatcgttagtatcaattgtaagtgtattatagagcagccccactgagttttcaagaacattcattttaatatagtgattctgatttgcattaaacaaatatatattcttaaccaattaaaatataaaaggcaacattaagcattttaaaattgtttttagtgccctgtaaattaagataagaacttattctatagtagaacatatttgagcatttagtatattaaattttaaaaataaattgttttcttatatcttattctttacactttatgatgaagaataattatttaaagagtttattctactttataatttgagttatagtattctgtaatcctcacagaataagattttaatttctatcaaagaatgaagaacaaaaaaattagttatttctgtttactgagaaaaatattgtaacaaacagtgtaatcaaaggaatatgactaatcagttcaaattttccacttgtttttaagactagggatactttctgtattggtaatttactaaaaccagtgaggtgagtgtatcacctgttgtttataagctttctacttgtttttaggaatttccagcttgtagatgaggcgtcacttaagaaatctctgcccttctgttcttcagatatccctgaaccaaacactttccactccccatctctagtatctctcatgggttcagaaaatttaataatgtctccttcactattgagttagcaacacttgtgtaagaaaccaaggtcaatattgatgttacatattcttttagtaaccatgttttagaagatatggttaattacacatcctctactcttttaataatagttatattagtagcatgtcttcaactgaaattaaaattgttggattatgcagtataggtgtaaactattttagacttaattttaaactttagtcaacttaaattaccaaagtttggtgaatatattttccagcactcaattttacttcagttgttttatgagttattggaagatgttctgaaatggtcagaggagaaattgaaaatttattcatcaagaaaataattataaatagcatagctggatctataatttagctcagtagagtggactgcaaaatagatgcttaccatttggttgatagaggaagaaaaatagctatatcctattannnnnnnnnnnnnnnnnnnnnnnnnnnnnnnnnnnnnnnnnnnnnnnnnnnnnnnnnnnnnntcccccactccccacacccctaagacaagactgcaagaccaacgccttctcttcctccccatctttctcctcctctgcctactcaatgtgaagacaatgagaatgaagacttttatgttgacccacttccatttaatgaatagtaaatatattttctctttcttatgattttctaaataacattttctctagcttactttattgtaggaatatagtgtataatacatataacacgcaaaatatgtgttaatttactgtttatgtt

SEQ ID NO: 135771 - DNA, 924 bp, Homo Sapiens
ggggcctccctcgctccacgcgcgcccggacgcggcggccaggcttgcgcgcggttcccctcccggtgggcggattcctgggcaagatgaagtgggtgtgggcgctcttgctgttggcggcgctgggcagcggccgcgcggagcgcgactgccgagtgagcagcttccgagtcaaggagaacttcgacaaggctcgcttctctgggacctggtacgccatggccaagaaggaccccgagggcctctttctgcaggacaacatcgtcgcggagttctccgtggacgagaccggccagatgagcgccacagccaagggccgagtccgtcttttgaataactgggacgtgtgcgcagacatggtgggcaccttcacagacaccgaggaccctgccaagttcaagatgaagtactggggcgtagcctcctttctccagaaaggaaatgatgaccactggatcgtcgacacagactacgacacgtatgccgtgcagtactcctgccgcctcctgaacctcgatggcacctgtgctgacagctactccttcgtgttttcccgggaccccaacggcctgcccccagaagcgcagaagattgtaaggcagcggcaggaggagctgtgcctggccaggcagtacaggctgatcgtccacaacggttactgcgatggcagatcagaaagaaaccttttgtagcaatatcaagaatctagtttcatctgagaacttctgattagctctcagtcttcagctctatttatcttaggagtttaatttgcccttctctccccatcttccctcagttcccataaaaccttcattacacataaagatacacgtgggggtcagtgaatctgcttgcctttcctgaaagtttctggggcttaagattccagactctgattcattaaactatagtcacccgtga

SEQ ID NO: 135772 - DNA, 1013 bp, Homo Sapiens
tttttttcaggactttggtggttttattttacaaaagctttgaaggttcaagccaagggggtgcctggggcccagagacttgggttgtccagaattctggctacaagaggagaaggacaccacccctcctctggaggccatgctctgtgccctcatgagctgagcggagccaccacagtagtgctggtggtggggggcatggggcctgtggggaaggagcccgtgggtgagcccagtaggggtccagggaaaggcatgaggtggctaacaggcccttgacaagcaccacagggcccaggccttgcgtagagatgggcagtacctggggggcccagtgtcaggcctgaagcccacctcccccacaattcccgctaccgctgcccccagccaccaccataaagccaccagctggtccttcggctgctcctgtgcctcccagactggagccccgtttctgttgttgccctgtttccagatgccttgcggtttcgagtctgaataccatccttccgcatggtcagtggccggttcacctggtgtagcttgtagtagaggccgcaggcattgcacacgggatccccactggcatttctccgccacagtgtcgtggtggtcgtctggcagttggtgcactgagtacctgcccgtttactgacaatcaggcgcttcttgggccggatgaggggcctgttctgcccattcatcttgtgatagaggccgcaggcgttgcataggtagtggcctgtcctgtccctccgccacagtggagtggcttgttgctccgcagttcacacactccctggcctcacagggaggcagggggagagttccacgaagcttgggagaggaataggctgctgaattgagggggctcccggtgggagaaaagaaggtactggaaaagtcagggcccccataagcactattggggacagggagtgatgaaggcagtgcaggtcccagggtcaggaggtctgggctcagccgctctgtcttcaaagtctccaggaagc

SEQ ID NO: 135773 - DNA, 810 bp, Homo Sapiens
  misc_feature (703)..(703): n is a, c, g, or t
tttttaaagaaaaatttaaaagtttattgttcaaacaagaagtacagaccacaatctagaagactcaaatcaagtggtaagaaattaatcttacagcagttacaacacagtttataatgcataaagggggggaatattttgaccttttttataattggctgttatacattctttttagggcaagttgagctgtttaagcttgttggtctatagctgattggtttaattttagtgaatcatgctggcaaggatgtaaagcttacattttgcatttcatttatgatcagagacagcatttcaggaaaatcagaatgattagttttggttacacggttgcgggtagtcagccttagggtatttctaaactggggcttccatttttatttttcgttaataatacctgcatgagatgggcagctcaggtcttaaggtcacatacagtgcttcagtggtcaagtgttctgtttaaattagagtccaatagcaggctagtagctgccattcaaagggaatgtatatggcaaccatcttgggtaatttatatgtccaaaacccaagggcctggtgcattctgatagcagtctcttgttgccgcagtatccaatctgtatgggtaagagtcaatgagacctgttagtccatgggcctacattaatgtcaggcccatgttaatgcatagtaggcctctcgagtctgctggtgntgagggccccattcagaagtggcttgggttgtgggtaattttactaaaagaggcaaaataatactcaaatgtgatacatggtatcttcaatagacaaacagccctac

SEQ ID NO: 135774 - DNA, 738 bp, Homo Sapiens
tctttgttggatctctgggtttctttaagagagaaagttcttcggggtgtctgatattaaaagtcttacagatgtcagaaacagctttgaagactctatcagagaaattcactttcaccttcacatacttcatgttgggaagctgcaggcggagcagtttgtgctgaggggtgaactgaagcttagcatctgcctgaataccatacttatctaaggtccaatgtgtcttcagaagccaagttctcttcttttcccaccagagagcatggtcagaccaatctttttttacatcgagtttctccaccagcttaagcatcacgcctccaatgtgcacctcgccggtcactctcagggtgacatcgcggttcaggtccgtcacatggacactcagttcccacgtcccgtccgcgtagcagccatctggcatccttatcccgtccagagccatggctccttccgcgcgctcctagcgctccgggcccgggactcgcgcggcaacaggcgaggggctggaggctcgcggggcgtcggtgtccgcgtccggttcctcggctggcgaagcgctgcctgtggccggagcggctaatggagtcccgtcgtcgcggccacctcgcactggctcacccgcgctcacaccccctcgtgccagaattcgccacccaggcctcgctaccttaggaccgtatagttactgtccgtcattaaacagcctgctatttgtacaactgacgttgggtt

SEQ ID NO: 135775 - DNA, 1460 bp, Homo Sapiens
  misc_feature (81)..(115): n is a, c, g, or t
gatgtatagatcactatagggcgctagctccctgagccgaacgacgagcgcagcgagtcagtgagcgaaggaagcggccgnnnnnnnnnnnnnnnnnnnnnnnnnnnnnnnnnnncagtcgacggtaccggacatatgcccgggaattcggccattacggccgggggagatgtcagagctggctcccggttgggatatgagtgactttgtggaggatggcgcctaaatgaggcatgccaatttctgcaccaggtgacgaacataagggctccttaaaggctagcccaatgtatctgtatttccttggggattaaaacccatgatcttcagttcctcagagaactgaaagttgcaaggagaaatccagtaattcctgttatctgcaggctttataagtcagtggagcctgcggaagtggccagaatccagcactccaagcactgctgtcttctcacagagtcttgaagccagagcagcgccaggatgtcacgggagctggccccactgctgcttctcctcctctccatccacagcgccctggccatgaggatctgctccttcaacgtcaggtcctttggggaaagcaagcaggaagacaagaatgccatggatgtcattgtgaaggtcatcaaacgctgtgacatcatactcgtgatggcaaatccaggacagcaacaacaggatctgccccatactgatggagaagctgaacagaaattcaaggagaggcataacgtacaactatgtgattagctctcggcttggaagaaaacacatataaagaacaatatgcctttctctacaaggaaaagctggtgtctgtgaagaggagttatcactaccatgactatcaggatggagacgcagatgtgttttccagggagccctttgtggtctggttccaatctccccacagctgctgtcaaagacttcgtgattatccccctggacaccaacccagagacatccgttaaggagatcgactgagttggttgaggtctacacggacgtgaaacaccgctggaaggcggagaattcattttcatgggtgacttcaatgccggctgcagctaggtccccaagaaggcctggaagaacatccgcttgaggactgagcccaggtttgtttggctgatcggggaccaagaggaccccccggtgaagaagagcccccactgtgcatatgacaggattgtgcttaaagggcaagaaatcgtcagttttgttgttcccaagtcaaacagtgtttttgacttccagaaagcttacaagctgactgaaaaggaggccctggatgtcagcggcccctttccagttgaatttaaactacagttttcaagggccttcccccacagcaaaaaatttgtccctttaaggaagaaaacaaaaagccaacgctcctagacccaagggtttcattttattaacccttttttgcctttaaataaaatgtttttaac

SEQ ID NO: 135776 - DNA, 497 bp, Homo Sapiens
gagacgctaacaggtggtccttaggggcctggcaggtactgtggagtcaacaggccctgccagggagcccgcccgggctgtggtagacagtttgtctgcccgtcctgttcgctggagccagcactattttgtgttcatttgacctgacagttgtaagtcatcttcaaccacgataatgttgaagtcgtgattccatcacttctgtgtgctcacatcttgtgttctgttgcagggaagtgggaatgtccttggcatcattgtgacgtgtgtggcaaaccttcgacttcattttgccacctctgccccaattcgttctgtaaggagcaccaggacgggacagccttcagctgcaccccggacgggcggtcctactgctgtgagcatgacttaggggcggcatcggtcagaagcaccaagactgagaagccccccccagagccagggaagccgaaggggaagaggcggcggcggaggggctggcggagagtcacagaggg

SEQ ID NO: 135777 - DNA, 948 bp, Homo Sapiens
gcggccgcctggcgctatttgccctctgtgactctccgccagcccctccgccgccgcctcttccccttcggcttccctggctctggggggggcttctcagtcttggtgcttctgaccgatgccgcccctaagtcatgctcacagcagtaggaccgcccgtccggggtgcagctgaaggctgtcccgtcctggtgctccttacagaacgaattggggcagaggtggcaaaatgaagtcgaaggtttgccacacacgtcacaatgatgccaaggacattcccacttcccgaagggccgcttgccaaggcccaggcaggacaggtggtaggccttggtgcagaacttgcggtcacacagcaccagctgcccgccatcaccgcagcggaagcactcgtcctctgactgcctcttcccttccccttttgctctgcgccgcctcgttttcttcttggtctttttgcccttttcctctgatgaaagggtcgtcgaggtctttggtctatccccgaggaatccactgcaattggaggctccacaccggcagaccgttttttcattgcccagacaatcgaggttgtagttaaaagtcagctccgtccctgcaggaatgtcacagacggcaaacaggcccacacgagtgtccccattcactgtccacttgagggtctcacagttgggctggcagctgtgattcataaatcgagagtagtttcctttggggccagcgtctattatacggtccttgtctatagtgagcatgtagaagtgggtgatgtcgttctcgtgtgcgtgcttgattctcgccatgcactcctcctcgtcgatcagctccccaacgtactcgttaacaaattctccctttctgatgtccctcttggtgaccaggccccaccctttgccatctgtcttgatgatcttggtctctgggtactggcgcttggtgaagccc

SEQ ID NO: 135778 - DNA, 720 bp, Homo Sapiens
tttttataatgagttctttttaaaccatgtcatacattccccatcctgatatcgcatgatccattataatataggcagggggatttactattggtggggcgtgccagaccctcccttgcttcagccagacagttcaacctggagttccttgttcctgcgcacctccgcagcatgcctctccttttcctgcagacgttcaataatagcagctagattagcctcacggttttccttaatttgttccattttcaggatcagcttttcctccgccatcttgctgaagttgttgttctcctccaaagccttctgaaggacttctcgctcgtgttccctcttctctgccaattgtttcagcacctgggcctcctgagactttcttctttcctctgcagcctccagtttcttctggatctcctccagggacaggtctttcttctttggagaagctaaagttcgtggggcttctgagataggagatggtggcttcaagatcagctcaaaagcctggccagaggcacgtttgttgatttgcttcacttccatatcatcgtaagtatagatgttgatgttgcgaggttccgggtaaaagcaagagcagatcagtgacagcatggacagctccttcattttttccttgtaggccattgctgttttagccattgtagggatgtgcagacgctgagcagtggcgaaggcaaagggtccggctacagcagcccc

SEQ ID NO: 135779 - DNA, 807 bp, Homo Sapiens
  misc_feature (64)..(75): n is a, c, g, or t
  misc_feature (97)..(149): n is a, c, g, or t
tcttttccattgttttatttgtatattggtccacaacggagggaagcctcacagttccaagaannnnnnnnnnnncatatttgtggcaaactgaggnnnnnnnnnnnnnnnnnnnnnnnnnnnnnnnnnnnnnnnnnnnnnnnnnnnnncagccgaagcgactgacttctaaatggagcagattgctcatttcacttctgttcctccacctcaacaaacctttacatcctcactggtttgtgaggccagagaacaggtgtggccttggtgtgataagaaatgctaattttatacaaactgaagcaatctggtctcaactttgacccccaaatgccctcaaaatggatcaatgagccagggaggcttgaggaaggagggagcatctgcccttcctcctggccagaagagaatttgaatttgctttgagtagcttatgggcagggctggaaggtgcagttcatgactgtcagcagctttgaggctgatggaggcatggggaaggattaggggcctgggagaaagcattttatttccctgtaccccaccaccccaacatgggggagaaaaacacaacagcaaactgaacagagcagaggccgaggcagcatagaacccaaagacggaagctgcttctagcatcaggctccaggatgcaactgcggctctcagctctgccggttgagcttccagatcctgcgaaggatgtcaggttccttccttccctgccaagctggagtaaggaggctgttctaggcaggcagtctgagctgctcacaaggtttgaacaaagtgctcctttttgcgaga

SEQ ID NO: 135780 - DNA, 639 bp, Homo Sapiens
tgtagaaatacttaaacttttaaagaacattaatacacaaaattcaggaagttcccttaaaaggactttatttttttctgaactttcccatgacgaatgtctgactgcaaagttcttttctataacatggatttcttcaacaggaaagattcagtacatgacagtagttttcaaatacagtcttccatcttgtattgtcctttcagcatctgttctgccgccactgcggtcagcctctatctctggggtcagagagtcatttaagaccctgagactatctgttgaagctgcctgttttagcgtctgttctgcttgttcacgccgtttcgtctcaaactcaagtgcttcctgcaattttctctttgccttcttctccttctttagcctcttttgaactatggctctattcttttgttccatagccaactgcttctcaagtgtttcccttagttctctttcccttaaaaaatccatcttcagctcagttttttccagttggacctgtttctcttgagctctggcattatctatggcaactttcaacagcccctgtatgttagtcagaagagtctcgatggaagacagtccatcaggaaacagatagggatatggaaaatcttgtagcagtggatgtgcatg

SEQ ID NO: 135781 - DNA, 794 bp, Homo Sapiens
ggacatggctgcagtactgtaccttatcattctgatgaaactgatttggagcacccttttctttgtcgctacatttatttaggggacaaactccatccaggttgactctctctggaatgcggtaataagagctggcaagtaaggctcagagagaagcaaccaactggagttaattgcccatttgggctctttgtataattatggcaaagtagacatttatgttctaattaatatgattacagagaaggctttttctcaggtcaggcttttcatgaaagtattttgagaacaatgaattgcaataaccagcttcacacaagcataactgataaacgcgagtgctattgtagtcttggcaagtgagccaagaacctaggagcagggccattcctactgaaggacgggccccctacggagatgaaatttgtttcctggtgagcacagaatcagaacaaagaacaatatcccaaagaggccctgtgtctaccaggagcttctttttccaaatgtaatggattatgtggaattgtagtgccatcggtttttacttagagcccttgacgtgcttggaccaatatttccttccttcttatgaaccaggtttttccttctgattttcccttttcaacattccttaccagtcaccaaagtttcctgttataatttcttttagcagacaagttataagtcagatttaattagcatcagagttgattttatattagtcagattttggatcatcacagagatctccacaactccttggcttaaacagctccaccggtgggaaaaaa

SEQ ID NO: 135782 - DNA, 655 bp, Homo Sapiens
ttttttccagggatccatttgtttatttacaacagcattctaggagaaaggtgaatgggcccctctcctcagtgcccaaggggacaggactgaggcagccccacctggcccatggctctgcagagctctgcaccctccccaaggctgttacccacgatggacagaaggacgttctctcaacaccagggttgattttggggaggctggagggaaccacgtctaggacctaccaacactagcccctccctgggggctcccaagttccgctgggaccgcagcctgctggtggacaggctccctgtcgaggagacaaacagcacagcacatgtggccaaaggcacctccagaggcagcagctgagtgaggatgaagactgcagggtgggcacacttgaatgtggatctgagtgacggttctgtccccatggactgggcagctttgggaactgagggaagtgagggagcgcaggaggccagggggctcagccagctggtaggggcggccgagacaccacccctggagtgatggaggaggaggatgtcattgtaaataccaccaggacagcgttgggtggcacctgacatcccccagcacacatagacctgtggtgcctccttgggctatgtctgtccacatggtgggacctcctgcccgc

SEQ ID NO: 135783 - DNA, 1002 bp, Homo Sapiens
aggggggaggggtttgaggtgtagtatgtttccagggatccatttgtttatttacaacagcattctaggagaaaggtgaatgggcccctctcctcagtgcccaaggggacaggactgaggcagccccacctggcccatggctctgcagagctctgcaccctccccaaggctgttacccacgatggacagaaggacgttctctcaacaccagggttgattttggggaggctggagggaaccacgtctaggacctaccaacactagcccctccctgggggctcccaagttctgaaaagaaaaccaaacgcagtgagcccacgtcagggtctccacgttcctgcacgtaacacccacgacaccactgcagcctcagcatgggctgcacggggtgggcaggactgaggaggggagggcaggactgaagaggggcggggacccgcactccctgccagccgcccaccacctgccttttctactttggcaaaaaacaaaaacaaacctggaagcctcaagacaatgaagtaaactttaggaaatggaaaagacagcaggctgtgcccaaagcctctctcagcctcccagcaagtccttcccaagagctgctggtgactctccagggccacaatggcaggttttcctcacagcagccccaaccccagcccagctgaagacggctctcctgagctcccttcatcagctgccttggcttccaagctgggaaggcattggggtgtggtcggggaaggcacccagttgtttacagatggtagagggtgacacaggcagcatcgtcatgaagcagggccccaaggaaaggtcctccgggagaaccaggctgcccaaggggaggagctgcagacgcacccgctgggaccgcagcctgctggtggacaggctccctgtcgaggagacaacacagcacggcacatgtggccaaaggcacctccagaggcagcagctgagtgaggatgaagactgcagggtgggcacacttgaatgtgg

SEQ ID NO: 135784 - DNA, 752 bp, Homo Sapiens
ttttttcaggtttggcacataaattttatttaactttcacattgacacaatcaggaaaccattctgagaaaaggtagaggccgccttgaagcgaagcctggctccctcctccaccccgggctcggcggcaccatgcaggctcaggctggcactcatcccaggaaactgtcccagttctcagcggtcctggctgtggacggtatctgaaatggtcgctgcggcttgccctgcaccagggcctaccttgttgccaggaagccgcactgctggaggctacctgggcgctgggttttattgctggtgaacttggttacccaccttccagtcacatggtccaggatggtggtgtgatcagaaatggctctggcagtgcccattttgctgagatgaaaggaatcgaaatgtataaactacactgaattctgtgatgctggcaggttgcccctgctcgtcttcagccccaacatgggagctccctggagaagacaggtggagattcactgctgtccacccaggtaaggcaagtcagaactgatgcgccgggatccacagcagcctgagctccaagcccaaccagcgcccccattcctgggccatggtccttttaaggccctcaaagacactccccttctcaggtagaaaaagcctcccctcccctcaccttctaaaatcgtatgtcttgtgctgaatgaaataggcgcttggcagacacaggttcagaagcatggaccagcattacacaggcatggacc

SEQ ID NO: 135785 - DNA, 458 bp, Homo Sapiens
gagttgatgagccaaaacccacacataaatgagctttaatgatttattttaagcctgagaataacataattacactggcttccttatttacatcatgagaggaatgcaggaatcccacctctatatttagctcgctgttcaatttcagcaggtcattggggaccgtgcataaaacggcttcagaatgtaagtgtatattctcacagctcttatttccaacttttaacacttcacctttaactgcttcagggtcaatatcatttcccttaatttccagtacattttcattgcccattgagatcatcactggcttttcaaaaggcttaaacacaggattatgtacataaatgagatcaaagtatttggaaaggatcccatctaacatgaaaaaggctttggttttcagggggagttgcagattcagctgttgcagggaaggagtggtacaacagattatc

SEQ ID NO: 135786 - DNA, 499 bp, Homo Sapiens
  misc_feature (474)..(474): n is a, c, g, or t
ttttttttagtttgcatcagtaagaaagtttattgaaattcattagtaaatgagaacagaaagttgtttttctttccattaaagaacactttctggtaaagtgaaaagaagaaatacagaaaccacaaaacaccttgtagacaccttattttcaaggtctatttccatagaccatcaagacagaagtgttttcttggagactttgttttccatgcatctgtaaataatggtctgtgtgaagggagactctttcctcttgatgcagtttaatagtagtgtttcttggtttctgattcaaccatagatgaaagaactctaccgtcgggcgccacctcttcaataattgtcttgattactctggttttgttagtatcttggtcccttagatgaagactcgcccacggacccggaagaggaggacttgtggcctccgctggagctgccgccgccgtatccgccgccggagctgctgcngcagcagagctgctgcctcgtgccg

SEQ ID NO: 135787 - DNA, 490 bp, Homo Sapiens
tttagtttgcatcagtaagaaagtttattgaaattcattagtaaatgagaacagaaagttgtttttctttccattaaagaacactttctggtaaagtgaaaagaagaaatacagaaaccacaaaacaccttgtagacaccttattttcaaggtctatttccatagaccatcaagacagaagtgtttttttggggactttgtgtttccatgcatctgtaaataatggtctgtgtgaagggagactctttcctcttgatggcagtttaatagtagtgtttcttggtttctgattcaaccttagatgagagaactcttaccgtcgggcgccagctcttcaataattgtcttgattactctggttttgttagtatcccagctagtttctgctgaccttggtcccttagatgaagactcgcccacggacccggaagaggaggacttgtggcctccgctggagctgccgccgccgtatccgccgcggagctgctgc

SEQ ID NO: 135788 - DNA, 1333 bp, Homo Sapiens
  misc_feature (1228)..(1228): n is a, c, g, or t
  misc_feature (1236)..(1236): n is a, c, g, or t
caaaatgtctttgtccctaaaatttctaggggcagagaaaagcaaaatcaaaaggagttctaagtaaaagaacactcttgggccagcccattacacacacaaaatctggctggttagcataggggagaggtcttgttcacctttaccaaaggaggtcctttagactggaaacagcaacgattacagcaactaaaaactgcaaataagaaccaatgaaattgaagtcctggggaatcttcaggaatttctgtaactatgcattgaaagggccattcatcatggtgacagttccagattctagaaatattatagtatttctttatattatagaaagtgacacacacacagtgaggcaagggtaaaaacacattaaaaagcattgataaatttttctcactgacaccagccctgagcaacatttgttccctagttctccttttccataacagactgaacagtgttattagaatgcagacatagccatttaaagtttgacaactggaaataaaggataatagaataaaaacaaaccattctaaaaaaaatagaattttcattacatgaaaacatatgaaattaaacacaaattagtataacttacatgttttaaaagtatatacttcatttataaatatctctagttgataataatctattaagaatcataaatattcaagtgagcatttaaattttctatttaatagttcagaattcttgaagtcagattagtgtctttctgatgaatgtccataattaaaaggctttccacagtcactttatgtctctagttagacacataaaagcctttattacctactgtgttgtaataagactttaaaattctgtaagtctcttatacttgtagaaagccttccaaaagcatttaaaagagcaactatttcctgtcgggtgagttggaagcctttagatggactattctctggaagcttttggatttctttttcagagaataatatcttcagggcagttcctaaaccctgagtctgtaattttccccataatctgcatttgtcacatccaacacagtccattatacgggagatattcttgaaatgtaatcggaattccttctttagtgacttggccccttttttgtcacctgcaaacatggatttctcatcaaagtgcatgggaaaggactttgtatcttgaaagatattcagtagaagagtttttgtgtcagcatcttcttctgcatttccagtgntaagatcngacattgagcgctcaaatatggagccacctttgacaaagctcgaagctcaatcaagtattaaaagtaaagattcttgagcctttcttgaccttctcc

SEQ ID NO: 135789 - DNA, 808 bp, Homo Sapiens
gaaagtggtttcttagaaaaagccttttttcgaggggcccgcagggcgcgcgcaaaccaaggtgatttatttggagtggggcgtgggcgcttcttttcccgagggtgtaaaagagggaggcagatagtgcggttacgggggttgtttctttgaaaaagtgctttatttcagtaagatctaagtcagatgcattaaaacatatcaaaatgttacaaaaatgtatggctcccttgctgaggccctgtcagattatgttagatgagtaaacgcatcagtgtgtaagttcagaaccaaacgttgaatcaagtcatgtaccatcgctgaaaggcaagttataattaagaatacttcacaaggctaaaacaattgggaaaacccttcagaaacgctagcaattacacaccagaaacatcagcctggaaacaggtctgcgatctgcagggaagactccaaaggtaaactgagggtttcccaccacagcttgtgcatcttgtgctcagttaaatacagttaaaacacaaggggcgcttcaacaccccccttgtgatagggcagagctttctattacatctggaagaagggggcgccacattcattcttatttttacatctctaggaaatcatatctcatctcatctgagcgaagcaagactttgtgcaaaacgatttaagtggaaacgtgaaaatgtgtgctgctatatcagggacgcttatggtgatctcctgtctcctatctcattcttcacgtcatgggtttggccgctgtaagacactgaaattgccttgttcatgtagaaatttctctttt

SEQ ID NO: 135790 - DNA, 458 bp, Homo Sapiens
ctccttataagacttttattaatgccagaaatgaaacagcaaaaacaaaatgaatttgaaaaatcagtgtgattgtgggtgcagagatggtatgaacagggactgaggaaaaagccaggtctgaggagagccttcagtttcaactcggaacttttaaaggtcatgattcagctgatcctgtgaagtggactgtacagtgggtaggtcgcttcgtgtctttatagccaggctgtgtgctggacatcaaggctcttccctccccaaggaaagcttaactcccagtgctcctgggtttgtcaccttctggacttgcaggcttgagacccttgggtcccccgtcctgcactggacgacccctgactgggaggaattttctaacgaggtgagacagaagaaaatgaaacaaaaaggaactacagaaaacgatgtggggttaattgctgcattgccctgttatg

SEQ ID NO: 135791 - DNA, 681 bp, Homo Sapiens
  misc_feature (47)..(47): n is a, c, g, or t
  misc_feature (148)..(148): n is a, c, g, or t
  misc_feature (154)..(154): n is a, c, g, or t
  misc_feature (180)..(180): n is a, c, g, or t
  misc_feature (197)..(197): n is a, c, g, or t
  misc_feature (200)..(200): n is a, c, g, or t
tggaacgtgacagagagttaccagctaccgatatcatgttgttcatntgacatatacaatgcacgatgtcgtcacccgtgagtactgcacgttgatgtacagcagatgttcattatgacacgacagcttgatcatctacattcaatcntagatntaagacactatagagcattgtcctcntagtcatgctcatattntcntgggatctttagccctgacatcttgtcccccaaacctgtaagtaggtgaattcctaagataagtgtgtattttcattccagggtgaaaagcaggatgtaccgagcactttattcagtgcatagctttaagccagtgttggattcactaagtggacagccagtctcccagctctctgccttccccaaaaagggtcgtagtaggtcacccttctacagcagctaactagagtcctaactaatgggatccagcagggccatttctccagagggccagtatcctattaggagactcttggaattcttaggttctactcaagagtggaaggaccaatcacctctgatattctgtggaaggttttggggtcaaattctgccctctgcattctgtgcaacttgtataaaagtcaagttagtattacatgaatttggggtagggttagtgctttgaaaaaatgttgaaccggctgggcgcggtggctca

SEQ ID NO: 135792 - DNA, 935 bp, Homo Sapiens
gcggccgccgctcctcccggcaaagcacatactcgctgaactgggaggagtccacaccgcccccacaggacgcagccacgctgaaacggggaagctttggcatggttctgtccagttgcttataatcaagaataatgagttttgaggtttacaaagagcagaagtaacatttatacggctggcatttgacaaaagattgctgataatatactcattccaggaagtgtaaaaatgctttaaaggaatgataatttgtacttactgtttatggggactagatatattagaattatagcatcattatggggacatagtgtttccctataaattcagaaattctctggttgatgtaaaatcatacttcctggttttacttaattagtaaagaaataaataaattagagtaacatttagtcaggtagagttactcctttttccccttctttattaataaattttatttttagcacaatcatttacccaaaaagagagtttgagaatgttcgagaatctctaccactcggtaaccatgctggctgttatatcagaaaaatccataaacatacacagcagcgagctgttttcacaagacttcctgctaataaacacaacactttctcctccactcagatgggagcctcagatgccaaaacgcagatgtgccaactaactataggctcgttgctaagcagagaaacctatcaagtttgtccagcaaattcgattgtacagtgggatggcgtctgctctgcggccttggacagggagccactggtctgtgctgctgtcccctgaggcaggtcgaagctggtggcccttagagggcaggtaaaatggttctcatgggttagaacataagggctttgagaaaaaatgcaaaaggtctcattgaaattggaggcctatgtgaatctgtttacatggaggcataactg

SEQ ID NO: 135793 - DNA, 484 bp, Homo Sapiens
cagggaggacacttggggccatgtgtctggagagagggcataggttacaccctacagaataaagaagggacccaaagcctctttttgcctcccggaatcaaggccctgagggcagcaggatggtggcctgggtggggtcgtccaactaggtttgctaacctgaggggtcactgggcctggccacttctgtccctctggtggtggaacccagcacgtggttctgtagggacctttgtcagtgagcaagactgagatcgtcacaggagaaggtgcccttgctggctgccccagcaggcacccacctccctgccaggccaagccaggtgtcctcttgcagcttggccttgatgacctctgtttcttcctgggcaggtcctggagcggctgttccagaggggtttcagcgtggctgcgtcctgtgggggcggtgtggactcctcccagttcagcgagtatgtgctttgccgggaggagcggcggcccc

SEQ ID NO: 135794 - DNA, 645 bp, Homo Sapiens
ccaatgcacctgtgcacatcgatgtgggcggccacatgtacacagcaagctggcccacgctcaccaagtaccctgactccaggataagccgcctcttcaatggcactgacccattcgtcctggacagtttgaagcaacattatttcattgaccgggatggggagattttccgctacgtcctgagcttcctgcggacgtccaagctgctgcttccggatgactttaaggacttcagtctgctgtacgaggaggcgcgctactatcagctccagcccatggtgcgcgagctggagcgctggcagcaggagcaggagcagcggcgccgcagccgggcctgtgactgcctggtggtgcgcgtcacgcccgacttgggcgagcggatcgcactcagcggcgagaaggccctcatcgaggaggtcttccccgagaccggagacgtcatgtgcaactccgtcaacgccggctggaaccaggaccccacgcacgtcatccgcttcccgctcaatggctactgccggctcaactcggtacaggtcctggagcggctgttccagaggggtttcagcgtggctgcgtcctgtgggggcggtgtggactcctcccagttcagcgagtatgtgctttgccgggaggagcggcggccgc

SEQ ID NO: 135795 - DNA, 544 bp, Homo Sapiens
  misc_feature (421)..(435): n is a, c, g, or t
tagtttagaagcctagtctgtttgttcccctccaccgctctccctctcattcctgatgagccctctcattcctcctttccttgcccagctatggccccctctcattcacaaagtgccccctccatgtccctggacccttaagatatccccttggcaccctggtcagagactctgtgtctgactcaggtggtccctgcagagtgccctgggaagggaaggagcactgatttgggggttttgagggtcaagtaggggttggtaacacctggaaagaaggactctttcacttcgatccctggacaattatggaggattcggaggtagaagaggggaaggaagatggtttctatctcatgacccccactccctgtgagagggaatgggggaagcctgatgaccctcagctgttccaatctagtannnnnnnnnnnnnnnaaaattactgtatttattatgacgatggtgactccccagtgcaaaggggggccagattctgtgtgtttctctaacctctttgtaaataaatgcccagtgtaacataaaa

SEQ ID NO: 135796 - DNA, 500 bp, Homo Sapiens
caccttgaatccaggactgaccgcccgtgtgtgcacagtttgttcttggacgaggactcgtgaggatcgagggctggggaccccggtgtgagcaggatggggccctgccctcccgtgggagttgtggactcgagcccaggggctgcccgtcacagcggtgtcccaggtccctgccatccgattttacctgggatgtcttctctggagtttggaattgcttgaggaaccctgcgtgtgcttggagaggccagagggcttgctgagaaccccatggacagtggagagcgggattcgaaccaagggctggactcccacacctctggcctgcgtcgcccagttctttgtggctctgaagaattggccgctgtggaaaagagcaaatgtccgagacccccaacaggaagagtctaaaaatccagtttgcaaccacttctgacctacaaaaaaatggaaatttagtgtttttcagcctaagacattaaatttcatatcagaaaaaa

SEQ ID NO: 135797 - DNA, 712 bp, Homo Sapiens
  misc_feature (590)..(624): n is a, c, g, or t
  misc_feature (627)..(671): n is a, c, g, or t
gttgtgtgtgttgttggttttttgtattcattgctttatttgtccttttcacgggtcactacattttagggcatttgatctataattggtagaacaggtttcaggcagggaggataggagcatcatcttccatccccatccacctccgctctttatcttgatgtcacaccaagtgtgatagcgcctccagcagtttcttcacagcttcagaagcctctggtcccagctcatttacacacttccttagcccctccacaaggtgctcaacagaaatgcccagagttttcagaagaagctttaatggatccataaagggaagaatgttgtccagaggtaaaggtgccaacttgtcaacaggaaggggcactttgttgatgaggaaggcagtagcagagtaactacaaaggctgatggtcaccagcaggaagatagttaccagcttcatgacagttatctgggatatttttcaggagtttaaaaatcagaaaaatctagcaaaatccaccaagccagtggttccacttgccatacaaagtgtccccggccgtaatggccgaattcccgggcatatgtccggtaccgtcgactgnnnnnnnnnnnnnnnnnnnnnnnnnnnnnnnnnnncgnnnnnnnnnnnnnnnnnnnnnnnnnnnnnnnnnnnnnnnnnnnnnaacagagctagcgccctatagtgagtctatacacttttcgg

SEQ ID NO: 135798 - DNA, 655 bp, Homo Sapiens
  misc_feature (380)..(408): n is a, c, g, or t
ggaagtactgaagggggagatgacagcaggcccagaaactgcaatgatccaagtgcatgtcgatcctgggagggaacagttaagagtccgggcaggatgaaacagtagaaactggtgagtgaatgaatgtgaaggctgaggagcgactgcaatttgttaatgggattatgaggcagtataaagtggttaattacggtggcggaggtaagcaggagtaaaatgatggcttttaactcctctcaaggacaccgaaaattattttaataaacactggaaggctgggaataaatataattcacaccattcttactttcttggtttagagatagcttatctacatccttaaattaatggctgtagctaccctctgcatggctccnnnnnnnnnnnnnnnnnnnnnnnnnnnnnccaaagccggctgcgagtctgcacgagaaaatcgggttgcaccaggccccagccgcccgccgattcgcttagctgtcggaggctaaataaacagctcccgaagcagcgtttggcacagcgcagggtcggaacgtggacactaatttccgcccacgctccccgcgtcctggcgggatcaccacagacacgacgtccattgctggggtcctcggcgatgcccgtgtgcgcagccccgcgagtctcaggt

SEQ ID NO: 135799 - DNA, 441 bp, Homo Sapiens
ttttttttggcagtgatgtcatcttttattttctgccctccttgactgagagtgggctgaggttgtgagaacagccctctggcctggagtccctctgcctcctccacccctcccagacatgcctcagccaggtgtgtggcagggctggctggggaaggtaggcccagctctagctgcggaactggagcaggctgtggaggcacagaagtggcagggaaacactcaagtttgtcgttgtgcaggtgcctctgcaatgcattccctggcttgagcaatggaagatcaaaccggcatggttccctactgtgcccacagccggggggttgtttttgtcagtccttggagaagagtatttgatgcattcagggagggcaatgtcaggctcgctgacatcctctccagctcccaggacaggcatgcaccacgggtgctatgccgctt

SEQ ID NO: 135800 - DNA, 914 bp, Homo Sapiens
  misc_feature (49)..(49): n is a, c, g, or t
  misc_feature (76)..(76): n is a, c, g, or t
agtttccatttcgggactttgaggacgccagatgaaaatgtatatggcnaacaccaattgggatattaaccccaangcacaaaacaccattgctggaacatgcacccatacaaagtgtactttaaagggagtcatttatagaagcagtgggagcttgttaacggcttaccatcgtaaaggcacgtccaattttcagtttggaagcactttcatcagctgcagtctcctttgggattcagattataacctctataacctccaatttatttgcaaattatctggatctttggatggttttataaatatttcctttttctcagaaatacccaaaagaaacatgaaatttgttgctgtaaaatttccgctgggttcttcaacaggaaaatattttcatttgttagtctttagaaaatccatgaattccaaggctcagttaactgacgagcaaccttttaaaaaatacagtcaacgagtccaacccataggattataaatttaaagaaaagctgtgatctgtgaccagaatgaaaccacttgtcttctaaacttgtatttcagtagtcaagatgaatactccaaagttaatgtttctttatgcctcagaatgttaagcttaagttatcaatcttattttcttttcagtgcagagtttcagagacttaaacattcccaatttgtcccattttacttcttgcttcttttaaatgaagttttccttttttgttttcctgcagtggatcccagattgtgggtaagcagaagagtcttttaaagattccgaaataaactcccaagcttgttagctcttgttgaattgaggccttttcctcagttgccagttgtatcttgaggtcgctttctctccccggccgtaatggccgaattcccgggcatatgtccggtaccgtcgactg

SEQ ID NO: 135801 - DNA, 1255 bp, Homo Sapiens
tgttccccccgtccgggacagccgctgacccgggaattcaataattttcagttaggcaaattagtctcccatatcctgggtcaaggctcctgccaccccccaacgggccttcacacgtctggcgcgcacttgtccggggtgggtttcttttgagtaatcccggttctcccaaaaaatcggtgcttcctattcggacatttgtagatcctacttcaaccgcatgctggaaatccgcggacatgcccatgctcagctcaacctggtcagcagggatgttcagctttttacacagctcctcccggagggacaataacagctggaagtctggatttggtccttgactaagatcatgcccaaagcttcctatggtcatcagccccacaaactccaggttaggacacttggcgtttatgtgctccacgatggctatggtctctgaaggtggaaggccatgtttactctcttctccgctggtgttaatctggaccataacctttaacctttcaggagaaccttttctctgccaggaactgttcactttgtctgccaacttcacagaatccactgtttccagcatgaagagattggggacagccatcaatttgttgacattttgtttctgtaggtggccaatgaagtgccatttgatctcaggacacaaagacagaattttgggatttgatgctttttctagcagttcctgaacgtagttctcgccaaaagtgcgctgcccatgtccataggcctcgatcaccatgtctgcaggtttggttttgctgaccgccactagccggggctggatggctgggagatcccgcggccgccgcgccacagcctgctgcaccgcgctcgttcaccgcccgcaatgcgcacccgactcccagctcggccgacatgctgccagctctccacatcccccggggaccgacgccgagccccaggcccccggcagcccgtggctcacaccatcttccggttccgcccagcttgcgccgtgtgaaccaatcattgctcaccattgagtcgtctcacccaatcaacacccgtgcagcgtggaggcccgcccccaggcggcggccatcttggggaggtcacccgcgaacctggaaatggagcctaggggctgaggttttgcgcgcctggttccaagggccactccccgtgtgctctcctctttcctgcgcctcagccgctgacgtccccccacccccaagggacttttgtgaggcagaaacgcatcctatactcgggggat

SEQ ID NO: 135802 - DNA, 1724 bp, Homo Sapiens
  misc_feature (447)..(459): n is a, c, g, or t
  misc_feature (508)..(508): n is a, c, g, or t
agatgtgttaaatataggagagcggtggttcggggtgtcaacagtgacgataatgtggtgggaaaggggtgtatgcggggatgcagagtatttgcacggggcaaagggggtgaaaacggtggggtggggttgttgcgtacgaatgggggtccggaaaggacgggaggataacggtggaaggaaaaaaaggggggatggagatatgcaagtgacgttaagggccacgggaaattaccacgggggaaaaaaaagaagggggaataaattgcgggggccggtgggtttggcgacacgaaagggtgttaagtggcgggggaaaagatcccaaagccactaaggtctgggggcgcgggagctccgggggaaagcagagtaaggggcgaggtggcccagacgtggatgggggtcggggggccaaaggaaatggtttaaaggaaccttgcgaannnnnnnnnnnnncaagacaagggaattaggggggttgggttgtaggtatttagggggattnttgtgtgttgcaatgagataacgttttattttaattctcaccatttatatacaaacacaagtgaataaaacacatcgcaaaatggtaaaatttcatatttagtatttataggtgcatagtttcatgctcacatatttttaagtattatatatattaacaaatttcacaatacgtcattattcttagacagtatcattaaaagacacctaaaaatcttataatatatgatagcaaatcactaacaacttctgaacaacagcaacaaaaaaatagtgaggatttagaaataagtggtagtcacttaggtgtttttaatttgttttaacatcgtagattgaagccacaaaatccacagcacacaaagaccctgctaccatgtattcacttcagtgaaagggaagcaccgaaatgctgagtgggggcaggtacagatacttcaatcactgctgatggaagacttcgagatacactgtaaaaactttgagaaatgtcatgactgggcacattggaactgagcacttgtacaggatggaacatctgtcagcagatctcaagaaactgggagcaaagatatttcttaggcttcaggttcgtagtcttgatacccttcctcagaaggcatttcataagcctcattgtcaggatccacaggcatatcttccagaattccttcctgtggggctccttgttcattcttgcccaactggtcctttttgacaaagccagtggctgctgcaatgctccctgctccctccactgtcttctgggctactgctgtcacacccgtcaccactgctcctccaacatttgtcacttgctctttggtcttctcagccactgttgccacaccatgcaccactccctccttggttttggagcctacatagagaacaccctcttttgtctttcctgctgcttctgccacaccctgtttggttttctcagcagcagccacaactccctccttggcctttgaaagtcctttcatgaatacatccatggctaatgaattcctttacaccacactgtcgtcgaatggccactcccagttctccgctcacgagggtggaaaggcagaaggcttgaaggcaaggcgtgagggagcgcccaggacgctctcggaggggccgggccggggtctgcgctgcagcccgcacgcacctcacttccgcgtcgcggcgctcggtcgctcgccccctctcttcggacgcgtggg

SEQ ID NO: 135803 - DNA, 1124 bp, Homo Sapiens
caggaggtgaaaaacggaatcaaccggcttagtgggcaaaacgacccagaaacctggtatttggagaggaaaatatcgcaaggtttcaattgggctagcggggcatggaggaaggaagtaggtgttcgtccctctgagctgcaagcccaaggtgttaacagccagcagtcttcaactgtatcagcccaagcattctttacggactttccacgcctgcttccaaaatgatttaagtaacttacattaaaagacaggggcattaaggcgttaataccagaggatggagggtcttcttttccactggtggctcctctagccagagggctctaaggggcggatgctattgctgcttttccagggcacagggcagtcaggacggagccttagcacacaccagctggaggccggcgtccctgcgcttggaagtgggttccctggccaccggggttgacctctctcgcttagcagggcccacccagctcactccccgcgtcttccatcccctctaggattcccattgtcccctactccagcactaggcaggcacccccagcccactgcgactcccaccacgaaggaccccagccctctctcagccaacacggccccgcccaccgtctcagacatcgtgcttcttctggtgggccaggagtctctcctcgtcgtcgaaggtctggccacagatggcacagcagaaggcgccgtcccggatgtggctcttgcggtgggtgatgaggttggacttctggctgaagctgcggtcgcagtcgggacaggcgtagggccgctcgcccgtgtggatgcgccggtgcgacaccaggttggacttctggctgaaggctttgccgcagtcggggcagacgtagggcttctcgccggtgtggatgcgccggtgcgccgccaggtagggtttgtggcggaaggccttgccgcagtcgggacacacgaagggccgatcgggggcgtggtcgcgccgatgcgccgccagatggctgccctgggagaagcggcggccgcactcctcgcaggcgaagggccgctcgccggagtgcacgcgcgagtgcgccaccaggtgcgtcttcttaccgaagttcttcccgcactcggcgcaggtgcctcgtgcc

SEQ ID NO: 135804 - DNA, 787 bp, Homo Sapiens
ctaaagcttgatatataatatatataatcaatgctattattcataacaaccttgtttagtaatagaaacaattgctttgtttacatatgaatattatagtctgcttctcatggttaggaaataatagtctttctgaaaagcaggtgctttttctactacaactccatatcctgggcctcatcttcggaacagtcagacatagagctctccgatgagctgtccccggtaccctcttcctgttctttcagcgcctcctccgtggcgtatttctggatgtactctttaattttctgcttgtattcttctggtcggtggaggtacatggctgcagcgtcaccattgagaggatctatggggttaggataggccaataactgaggcaggaaggactcaaatatattggtaagatcatagagagctgtccaagtttgattaattacatctagacacacagttcctgacgcttcatcaatgttgggatggaaaattttattcatgaatcctatagatggagatttgaaagggtatttatcaggtaggtccactctaactttccatactccgccttcatatggtgttccttgtggtccataaaacttcactacaaattcattaagtcctcccaggatcgtaacctcatgtttactctcgatgagcttgaccacgtccgtgtccatccgcctcttgcccggactgggagatgacatggtgtcgccgccgcctctctcccttcctcggcccgtctgtcacgggcccggggccccggctctgaggagcccgcggccgc

SEQ ID NO: 135805 - DNA, 874 bp, Homo Sapiens
tttttttcacattttacatttagtcaaatatttatttgaactcatacaaagtttagtgacataatttaaaaggtgaagaactaaaacgcattccaaatattgaccaaaatactgtaggaagtagcttgggaaacttttcatcaaaatcgttaggcacattgccatatcattctccataaaatcatatccctcctcaaaaccacaccctccaggtgttgaatttatgggctaatttgttctgtgaggtgccaaaaatgaagataaagtaagaaatacagccaactagaaggaagagatataaatgtacaaacaggccatttctgctagagtctcaggcattcaggaggttcacaatcatcatacaaatatataaaattttagtgagctattgaatccatcttctgcctctttatttcttcacatcaatccttttttcttcctactactgttcagctttggggacatattttagttcacttttaatattctggatttccgatagattgactgcaggtcctggaagtttcttcgctcctggaattggcttcttctcctcatccgaggtgggaggaacaccctcctccacttcaggagtacattcttttcttctggggggttgacctgctcctggccgaaaggctcccattggaatattgatatttgcctggatggctctaacattggaaactggctgtttcggacatattcatgcagtcttatccctgctttatgtatttgtttactgcctaagggaagtcccaggcagccagatgcaagaatacaaagctccttggaaggtggaaggggcgcccggtgtcctctgagctgcgatctcaattccgatgcttttcatgtggctgaaatagctctgtgc

SEQ ID NO: 135806 - DNA, 509 bp, Homo Sapiens
tttaaatatttaaaatctttattaacccaaattagaattataaaaatgtttgtctcaaaaacaatgactgtgatactcaagtacagaattgtggtgcagccagaagtggttcaagagccctcccgcaaatcatgacttgcactctggcttttaagtgaagacaagggaatctcaaggcagatgggaggagggcatttgaagaaaacaaagatgacaaaaaagatgggaaggacacaatggttaagtaagtttcttgtcagatacaataaactatttttaggaaggataaaattaaaagtgcttaatacaaacaaaatttaacgctgctaattattcttaagtgccataaaacattagttaccaaaataactttattaagagttggccaaacttcaactattattactattactacagggtcttgttctagcaaagttccaatatttatcagttatcttacacatgacatttatcttaatatgtacataaatatcccatcgtgccgaatc

SEQ ID NO: 135807 - DNA, 1031 bp, Homo Sapiens
  misc_feature (923)..(957): n is a, c, g, or t
ttttttttaggagtaaaaaaagagtcctatatctttttatatccttctatccctttataaaacagcatacaaagcagttaggacataaaccccccttccccaggacttttgtcttcccatcaagctggaggatgagctgggtttgttgtctttgaagaaaaattggtttggctagcagccattttaacaaggctatgacaggtcaacttgaatcacaaagaagtcagaagccaaggagatgcatttttgtaagcctttggtttcttcaggagtgtagcttcctcatgccagtcagccttacaagaaaaataacttggcagtcaagagaaaattgacggcaacagtctttgcaaacagcattcgtagcccaagcactgtgagggacatcatgttcaccttctcggtatgaactatggctttggttttatggcagctctttgaaggttgctttgttttttcagtttcctttggttttacgtgatctgtagaatctgtcttcacttcaaagtcagtggagtgcacagttttattgtcgtgttgaactgaacatgtcactgaatttgaatcttcatatttaccaagcttgacagcattgtacttcccactgggagagatgacaatagcaggatcaaactctgttatcttcttggatgacacgagatttattcttatatccttggggtagaattccttcaccagacaagcgacatttgttccatttttcatgacaaaacggatggtttggtatgaggctgacttcctggttccacgatgagttgtgttccctttccaaagaagagttgtgctgttaaagcactaccacaggcatcattacgaaaaaccttgctacctatttgctccctgtcagtctccccggccgtaatggccgaattcccgggcatatgtccggtaccgtcgactgnnnnnnnnnnnnnnnnnnnnnnnnnnnnnnnnnnncgccgcttcctcgctcaatactcgctgcgctcgtcgttcgcatacaaagcgctagcgccctatatgatcttcca

SEQ ID NO: 135808 - DNA, 507 bp, Homo Sapiens
tggagccgcctgtgcgcacgggccccgtcgagtgggctcagtacgttaggactcagcgtggccgccaaagcattggttgggggcgtctttcactaatttttcctaggttttctctcctatcgggctctgtggtcctttcaccacccatcttcactttggtggcctgacgctaacgctgcgagttggggaaaccgtagtaaccccgggcctgaggggcgtcccgggcggcggtgctccgtttcttccagcggttgcccctttaagaaaaagccccccggagaggggcccgtgtggctgagtaaaggtggcgtgcgcccgcacaaaggcgccgcgttgttggcgggctccggaccctgttgcccctgggcggggcggcgtgggaagaccggggcgcctgggcggggagaacgacgttggcgctagcggggcagggcagggggagggagtcacggcatttagcaggtgcttctccgcgaccgagcgactgccattttgtggtgcggccgc

SEQ ID NO: 135809 - DNA, 658 bp, Homo Sapiens
tttataacagctttattgaggtattattcacataccatgctttaaaaatatacaattcagtggttcttagtacattcacagagttgtgcaaacatcacatctaattccagaacattttgatcactcctcccaaactccataggcattgactttaatgtaatggcatatacatatatagaaatacatatagaaaccaattattctagcaccatttccattctttccccagggactgcaacatcatctgtcataaatcaacttttcatgtctgtgtgaatttggttttgatctccctattgagagactggtgtacagtatttgtctatccctgcacaaattattaaagcaagttttgccattctgttatccttcctcatgaatatcttgattacttttggccctaactcatcaagttccacagaaatcccaattggaatcttagttaaaattgtgttgtctatggaccagttgaagaaaactgacacatttataatactgactctgttccataaagatggtattactttctacttattttgtttaaaaatgttttaaatgaagctttataatttttttgttatacgcatccctagatatcttacatttttgttatattcgttgtattcctgaatccttattatttaatgtcactgaaaat

SEQ ID NO: 135810 - DNA, 456 bp, Homo Sapiens
tttttatagcaaaaagacaattttaatgctgccgtagaaaaaagggttatatgaagagtcacataatggtgcttcattgtcaacaaccaaacagggcacagagtgtgttacggtgtctgtgctgtttacatgccaatattttatacaaaggttctcatatggtgtcagctgtcagttacttctgcaaattaactgccaaaaatgtagaagaacagaatcacttggagagccggtaaccacgggttacctttcataagcctaaagataaagctgcagtgtgggatcttgggagaataattaggaagaacaaaacagaaagttaccaattgaaatagaaaggcatcctacaatatggaatagcaaccaagagggcttataaataagtgaaagaggttggatcacagaatgcctcatgacttttaagcaaagtattacagtacaaacattttaaaggct

SEQ ID NO: 135811 - DNA, 1107 bp, Homo Sapiens
gctaggtacaggctgggttttaatcggcacgaggaggaagtgcggtcctgcgccaagcccgtccccgccgacgccggctccccgcggctcgggtgacagcgtcgcggccgccggacgcagcgcggggcaggcgcgggcatgagccgagcgcagcggaggctccggcggaggcgcggggaaaatggctgatgactttggcttcttctcgtcgtcggagagcggtgccccggaggcggcggaggaggacccggcggccgccttcctggcccagcaggagagcgagattgcaggcatagagaacgacgagggcttcggggcacctgccggcagccatgcggcccccgcgcagccgggccccacgagtggggctggttctgaggacatggggaccacagtcaatggagatgtgtttcaggaggccaacggtcctgctgatggctacgcagccattgcccaggctgacaggctgacccaggagcctgagagcatccgcaagtggcgagaggagcagaggaaacggctgcaagagctggatgctgcatctaaggtcacggaacaggaatggcgggagaaggccaagaaggacctggaggagtggaaccagcgccagagtgaacaagtagagaagaacaagatcaacaaccgggcatccgaggaggctttcgtgaaggaatccaaaggaggagaccccaggcacagagtgggagaaggtggcccagctatgtgacttcaaccccaagagcagcaagcagtgcaaagatgtgtcccgcctgcgctcggtgctcatgtccctgaagcagacgccactgtcccgctaggtgcctgctaggtgcatggccacagagcatgggctgggcctgggcacaggaggagcagctgctttggtcggggtggagactcgcagcagctgctacccacagcctattccactcctccccatctccaggcgctgggaggggggccctcaccccgtcacgcctcgctccctcctggccctctggtccagcccctcacgcctcctctcagtctactcaattgtgactgttcctcctgatgtattttttttcttggcttaaagggtgtgttgttgactctttttacacttaa

SEQ ID NO: 135812 - DNA, 531 bp, Homo Sapiens
agattcataccgtggctactgtgtaagtgagactgaattagaaagtgtcctaacatttcacaagcagcaaacacagagtgtttgggggacccgtcagtctccaagcccagccaagcctgctacacgcttgatgtggaaatcccagtatgttccatatgatggaatcccatttgttaatgcagggagtagagctgtggtaatggagtgtcagtatgggccaagaagaaaaggtttccagttaaaaaaagtcagtgagcaggaaagcaggtcttgtcagctctacaaagccacttgtccagctcggatttacattaaaaaggtacagaagtttcctgaatatagagttcctacagaccccaaaattgacaagaaaattatcagaatggtacgcagcgcggggcaggcgcgggcagagccgagcgcagcggaggctccggcggaggcgcggggaaaatggctgatgactttggcttcttctcgtcgtcggagagcggtgccccggaggcggcggaggaggacccggcggccgca

SEQ ID NO: 135813 - DNA, 534 bp, Homo Sapiens
aacaaaaatggaagcaaacaacatcagaacccctgtaagtttggtgtgaccttacagacaagttgctgcttttacaatgagttccttaggtggtattttaacccatcgatctataatgatgactcttggcagccctttgggagtttgtaaaatgaggtgatacagttctgaattgagcattcctttatgatattcactctgttcctcttctgcagccaccagtgggagagacaagccagtcctaagagaaaaggtggtggcagccacaaattctaggtacactggctgctgcctatcctgtccctggatttgaggcctttcccttgccatagaaatggttgctggtagcagtagagagcactgtgcacctgggaatgaggaatcaggccccaagacagaagtacttggaggagccagctgcagtagtatccgcctgtagtcccagctactcaggaggctgagacaggaggattgcttaagcccaggagctcaagtcccacctgggcaacatagtaagatcttgtctcttaaaga

SEQ ID NO: 135814 - DNA, 512 bp, Homo Sapiens
  misc_feature (342)..(387): n is a, c, g, or t
  misc_feature (409)..(429): n is a, c, g, or t
tatattttctaaaatttttatttcttgttcattttgtttctaagatattcactcacatattaaaaataacaacgtctcaaaacatttgaagcaactctcttcatcccttttaaaaataccttgctgtttcgggggttaaaaaaagccacaagggagattaaaacaatacaaatatttattttcccaactcccctgccatgggttctgggacgtcaccgcctctttctggggcccgtttcatccttttcttttaatccaagaagcgatggtgttgtgcgcctgtagtcccagctacctgggaggcaggctgaggtgggaggatcttttgggtccaggattttnnnnnnnnnnnnnnnnnnnnnnnnnnnnnnnnnnnnnnnnnnnnnnggaagagcgagacactgtatcnnnnnnnnnnnnnnnnnnnnngagaaggcatcgcggctctgtaacactccgtccagctctcgcactctcagatgcaaacttccacacaaactcctcggctcccc

SEQ ID NO: 135815 - DNA, 923 bp, Homo Sapiens
  misc_feature (387)..(816): n is a, c, g, or t
  misc_feature (858)..(858): n is a, c, g, or t
  misc_feature (905)..(905): n is a, c, g, or t
ctgttacaaacaggtctttattaaagatgagaagccaggtctttattaaagatgaggagggggcaggaaaggggggcagtgcctcctctacccactgcctttgcctgcccggggtgagggagcccctctgctccacccatgccccccatgatggcacatctgtatgaggctgaggcatggggggcagtgtgaagaacaggggcaggttccaagaaaaagaagaaaaacccttcccacagccctaataaataacagaagggtttgggatgacctgggcacaggcaaggggagacacagcaccctgaaccccaaaacctctgaagtggggcaagccctacttaagtaggggattaggagagagtgggtgagcctcgtgccgaattcttnnnnnnnnnnnnnnnnnnnnnnnnnnnnnnnnnnnnnnnnnnnnnnnnnnnnnnnnnnnnnnnnnnnnnnnnnnnnnnnnnnnnnnnnnnnnnnnnnnnnnnnnnnnnnnnnnnnnnnnnnnnnnnnnnnnnnnnnnnnnnnnnnnnnnnnnnnnnnnnnnnnnnnnnnnnnnnnnnnnnnnnnnnnnnnnnnnnnnnnnnnnnnnnnnnnnnnnnnnnnnnnnnnnnnnnnnnnnnnnnnnnnnnnnnnnnnnnnnnnnnnnnnnnnnnnnnnnnnnnnnnnnnnnnnnnnnnnnnnnnnnnnnnnnnnnnnnnnnnnnnnnnnnnnnnnnnnnnnnnnnnnnnnnnnnnnnnnnnnnnnnnnnnnnnnnnnnnnnnnnnnnnnnnnnnnnnnnnnnnnnnnnnnnnnnnnnnnnnnnnnnnnnnnnnnggcgcgtgctgcgttttcatagctcgcccctgacgacacaanatcgagtcagtcaagtgggaaccgcagactaaaaacagcgtccctgnactctctcgtcctgtcga

SEQ ID NO: 135816 - DNA, 1072 bp, Homo Sapiens
tgggtggcgaattcggcacgaggtaaaaatgagactgaggaccagtacgcactcatggaggacgaggacgatctcccgcaccacgaggaacgcacttggtacgtgggcaagatcaaccgcacgcaggcagaggagatgctgagcggcaagcgggatggcaccttcctcatccgcgagagcagccagcggggctgctacgcctgctccgtggtagtggacggcgacaccaagcactgcgtcatctaccgcacggccaccggcttcggcttcgcggagccctacaacctgtacgggtcgctgaaggagctggtgctgcactaccagcacgcctcgctggtgcagcacaacgacgcgctcaccgtcaccctggcgcacccagtgcgcgccccgggccccggcccgccgcctgccgcccgctgagcaccgaggacccgccccaagcagagccgcccctgggcccgtctgcgccggaggctgcggcggcgggagccacggaccagaccagccacatccaggggtcctcatttctccggctctggctcttgtttggggttctctcaccctctttctctttccttccctcccccattctccagatctccctctgtctccttttctctgtctttcttggcccctgtctctctccatgttgggggtcctaactcccccaccccatatctacgtgtcctccgggcattgccctctccatggctctggtcaccctgaccctctgccctgcccaccgcaggtcccccggggtcccggaagccccttctggctgcacctgccatgtttacagagggcccctgggctgcgcggccccagcctgggcaccctgatttttaagccatagacctggggtcagggcaggaaggaacttcactctgctgcttccgagaacctcggccgtgacattcggggccgggcgggacccgccccacagactccaacttcccctccaaaccccgaagtgaaacccgccaccgggttacccccacaagggggccgctgcgagaagttcacccacccccgaaaaaataattaaactcgcaggccaggcacggtggctcat

SEQ ID NO: 135817 - DNA, 441 bp, Homo Sapiens
tttggaaatgtgcttttattttcaaactcaggtatgtgacactctacagttcaatgctagcacacctgtgtgaggcttaacaacatgaggaactgatagccagtgatacacaaatccagcacttcctctccatttactctgtcaggctgtatatggggagcaacacatatggctttgtggcagccagaaagtgaaggtctttttaggaggtgacatcaacaatgacacaaacacatcactctgcaactgaaggcagggaaccagactcctagggctaagcagagatgtcagacttcagaggcatttgggggactcttcagatccacatcctcactgaaaatccagggcctgtttctctccagttcactaccgcttgggcagcagctcccactgcttcaggctggtctttgctttccagaaaagatggactcatgagcactt

SEQ ID NO: 135818 - DNA, 489 bp, Homo Sapiens
gcgagttataatttgaagagaattccttgccttcctgattgtctaatgctaaaaaaaaccaatttaaagctagtaacttggacaatttgctttaggagttcaaaccatatgaacatattgaaaatatatatgcaagtattacgagtaagtcaaacattactgtgttctcttttatcagcagctggatccaattctacattgtatattttctctcctctctatacataaaatctatcataaaaaaatgtgaaacagaacagacttagcgaattttgcctcaactctgagaatgttgtctacattttaaacaacaacaacaaaacaccaataagtgacttgccatactgggtttatatctgtggttcaaacagtctctcacatggaattaaaagatgttttgtgggacagattagtaatcctgcattaaaatctcagaaggctagggacagctttcagatcacccaagagcttcttataacatatttatca

SEQ ID NO: 135819 - DNA, 528 bp, Homo Sapiens
aaaagtgcacttattttattgaaagatatccagtttcagctttgaagatataggctcaaagtctgttcttggctcttccagaaattctgcttctagagtgttcataatttcaaccaaaacttagaaagtttttctaaatcagacttttcaacctgctgaacagaactcatgtctatacttcgatgtttattttggcagcatttgtctctgtgaagcatatcaaaatcactcaaacatcaaaactgctgatctgatagaatgatttattttcccattacaggtaagtcatgaatggcttgttctgaggtatgtttctgagctatgaaggacacctactagaaagctccacacttgaagggttctcttaaggtggtaacattttatggctggacagtctctgcaggtaccatattccccgttgtatccaactgcatacatttacacgtgcatgcagacacagggcactctgcatggtccctaaaaaaataggtcaaataacagttaaaaatccaaattagacagacatac

SEQ ID NO: 135820 - DNA, 1255 bp, Homo Sapiens
tttttttcacagaattagtcattttattttaaaagtgcacatattttattgaaagatatccagtttcagctttgaagatataggctcaaagtctgttcttggctcttccagaaattctgcttctagagtgttcataatttcaaccaaaacttagaaagtttttctaaatcagacttttcaacctgctgaacagaactcatgtctatacttcgatgtttattttggcagcatttgtctctgtgaagcatatcaaaatcactcaaacatcaaaactgctgatctgatagaatgatttattttcccattacaggtaagtcatgaatggcttgttctgaggtatgtttctgagctatgaaggacacctactagaaagctccacacttgaagggttctcttaaggtggtaacattttatggctggacagtctctgcaggtaccagattccccgttgtatccaactgcatacatttacacgtgcatgcagacacagggcactctgcatggtccctgaaccaactaagcatatgtccagcatgtccaccgtgcctgcaattatgacaccatgtaaaccagttgttaaattgggctaattttttgtccttgctcaagtccactttttcatctgatttggttcctccaggacagctagaaactggtgttcccatattaatgagacaaagcgcacatcgaggaagtggttttcgacagccaggacaacttgtgactttagatttcgttggtgagccactcacaccatactgactaaaacctctgccctgatgaggcacagctgaacagctgtaggagattgacttgccacagaaattgcaactcacaaaaacttgtgctaaaggcttggaactgggatccaacttactcctgtgaatatcaaattcagctcgtttatgccaaaacctccaggcatctaataaatttctataattctcaatccagtactgaaccctttcatctttaagaacatctaaaggtgaaccctgtaacatacagtaacttgctgtttgaacatctccagttctatcaacataactctccattaagtccactccatctttagtaaggcctgtaagcaaaattccttccaaatttccagcctctttcatttcattggtcaacttttcgatgtatctatttaactgagtatcactaaggaatttacaagcaaatgccactctgtcacgtactgcaactttggttttccacctcgtgccgattcgccccacggcctcgatcctgc

SEQ ID NO: 135821 - DNA, 822 bp, Homo Sapiens
cgaatatccaagttgaacaatgccacagcagcagctctttcccagttccccttcttgtacaagggagttcaaaaatggccccacgtctacatccgttcctttctttatccacccacaaagctgtaaagctaagattctctcttcatttaaattttgaatatcactttgcttatccaacccactccaattatgtctgctgctttccaccattcccaacgatgactttacaattgatttaattcctgcataaaccaatgatcctttgttgcctggagatttctgatccatatcttctgtgtattgcttcataaagtgcagagtataccagagtgacttgagctgtggatcttcatttccagctaaaatgtggttcctccacacctgctctgtatcaagtccataccttgataaagcccgaagacgcatcttcgttgctatatctttttctaaagaattatcattttcttcttccgtacattcatataaatgacgaccacaagcccacattaaagatgtaattgggctccaggcaagagatatcctttcaaaaacagtgaagtctgacattgttcggttgggagttacaactatcattcgattttgacttgttggatgccacgcaaaggaagcaatgtaattgtcacaaggttgcacacttctttcaattattgtgggttcgagtttcatcccaatgggagtgggtgtatgctgcatatcatacaatctaataatattactatcccttgttaaagtggcaagtagaccagtcctagtgggacaccatgctacttttgttaagggttttggttgctcagtcaatgt

SEQ ID NO: 135822 - DNA, 1153 bp, Homo Sapiens
  misc_feature (931)..(1027): n is a, c, g, or t
  misc_feature (1039)..(1039): n is a, c, g, or t
tttgtaggataacagtgtttttaatatttaagtaacaaaacattcaggttaatactcaatgcatatacaataagatagagcaacaacaacaaaattacaaagcacaatctaactatatggaggctttcaaacaattaaatgttggatagagaatgcgctaattaaaaacccagctgagccacaccgcactacctgagacctgaccagggactttctggtggtagaagggagagctcattgtgccctgtggccttcaactcaaatggatgctcttcaactcaaatccagagagcacttaacaaactccatgctctagattgctcaaccctcctccttgcttttcttttttctttagttgacttgtctgctcatcctttacccaaactgaggcagtgagttccacaaatacttcctctggtttggtttaaatgttgctgtctcagtgagaagggcctctgagctcactgctctgactcttgaacacaacttgttatttaatggggcataatccgttctttccccagacatagtctgttcagcctgaagatccttatgagtattcaccaatccccttggaggtcactttcatatgtactattgatgtgaggactttcctctcaaataataacctaatggccaagttcccctgcaccaatgctgctgtgggtagtttttagagactgctcttacctcagtttcctagggggcctatctggctttggtactgggatggaattctactgtcttggaaggaatttagactttctgctcaaaagggcagtgatgtaagctcagggaaggtgtgtggttgcaaagagctttcagttttgcccaaacatctgatggtccaaccactctaggtgaattcagagaagtgaacagctctcagagtaacaaaactgaccaccagctagttgtgatggcgcacacnnnnnnnnnnnnnnnnnnnnnnnnnnnnnnnnnnnnnnnnnnnnnnnnnnnnnnnnnnnnnnnnnnnnnnnnnnnnnnnnnnnnnnnnnnnnnnnnngcaaaacaaaanaaaaccgaccacagtgccaggaaagtgctactgccaactggcagtggcttgtaaccatgcaaatgtggatacctgtcacttggaaacattacatttaattcaggctcaactttt

SEQ ID NO: 135823 - DNA, 759 bp, Homo Sapiens
  misc_feature (231)..(257): n is a, c, g, or t
  misc_feature (626)..(626): n is a, c, g, or t
  misc_feature (661)..(661): n is a, c, g, or t
  misc_feature (707)..(707): n is a, c, g, or t
ctgttattcattttggtatgttattttggaaatgtgattaatcacgtatgtaaaggacgttgagaagaatttccagatactctgatatgcatgacatcttaatcacacaatataaagcaaggctatcttaggaaattaggtatcactgccaaggacctttacatgagaagataaataaaaactactattaaatttgtaacagtcagatgggctggcaggcaagttgcgtcnnnnnnnnnnnnnnnnnnnnnnnnnnnccttgattcaataaaacaaacttaaacgccagttatctgcagaaccctcactggactatgtttaatgatatgtgaaacacagcctgcacactcacagatccttgccacgtcccgttcccatcctctcaaaacctgtgttaccctgtggctagatttctcaaggagatgaaagagagagatgaatgagaaccaccttctttcaggtcgctctgcactgctcctgcaggtagacaatgacctctccggtgaggctattatccttggcttgggggtggaggcctttatcctggaaaagaggcctctcagggtggggaggtgatttaaattcttatgagagagacgcagctcctcacctcatctggaccttcncaaacctaaactggaaccgccagaaaaatgactgncaacgggccacacaagccaggcagagacgcggggagaggctgaccncaagaaaggcggacatagaagataccgtccttctggcgcacagggcacatat

SEQ ID NO: 135824 - DNA, 415 bp, Homo Sapiens
gagggttgaaaccaggcttatttattttcattttctttctgccatcttttaaccaaccttctcagattataatgtgatttttgtgacagaatgaaacacatatccaaattttaatacagtaagaataggtatcctgaataaatgagaactctagaaaatcaaggtttcaaaattctacccttcctgggagttaaagaagtttggcagaaacagaacatattaatcagcagattcatcacctgccaatattttctgacactcttcttgattctgggagcatcttgcgtcaagcagattttcctacctccttgcagtgtgggctatactttactttgtatgcaatgggctcttccccgacacttacaacttctgcttgttatgggatgagttcacaaggggtgctttattccatcag

SEQ ID NO: 135825 - DNA, 495 bp, Homo Sapiens
ttttttacataaaataaacccttagcacacccgtccactgggaagcagagcctaagctgaccccggccactgggctggtgggaccacatccaaggcatgaagtactggcagcacggggagcttgcaagagacagggacatgaagttgtggcgtctctggcacgcaagtgtcctgggacagagcaatggaaacctacaggcatgagaatgagggttgcttgatggcaagatttcagctgctctgctcacactacctctccagcaactggcacaacgcaggcacctggcacatcccagcatgccatacatatctgttgaagccacaactcaacagtttaacctggactcacctgagagaggcctcctgcatgtgaagccctgccaatgacacagcctggagagcacctaggatgggtgttctctaatgggggaggaaggtgggcttaggaggctgctggctgaacatgcgatttgcagttattaggcaaggtggggg

SEQ ID NO: 135826 - DNA, 426 bp, Homo Sapiens
ttttttgataaaaatccttttaataaagtatatcagtgacaacttcctgtttaaatatattgttaaaaaatcatgcaagagcattttgttatcattatgaggaaagatttgagactactgttccttctgcagaaacgctatgcacagatgcaaaatgatcaaaggctgatacaataatgaatctcaagtaagtagcggagccatcatgtgcctgtatgggaaaaaaatcaatataaatgcttttagcagtgctagttaactgttaacaagcagttagcaaaagaaacagcttgatgcaagagtaatattctaaatatataacaacacataaggccagctacatataatagttgtggtacatatcagctaaataccagccttgattttgatgaaaatagcaactggagctaaaaactgcaactctca

SEQ ID NO: 135827 - DNA, 919 bp, Homo Sapiens
  misc_feature (71)..(79): n is a, c, g, or t
  misc_feature (311)..(311): n is a, c, g, or t
  misc_feature (317)..(317): n is a, c, g, or t
  misc_feature (320)..(320): n is a, c, g, or t
tatgcccggcaaaaattaaactttttttctagagggggcgcggcgcgcacacacgaaagaagtggtgtttnnnnnnnnnttttttgtgggggaaaaagaaaagctcccaaacagaaacaaaacagggtcccactaaggggagtttttttgtgtaaaaattcccttggggagagaggggggatgatacggagggtggttatcgtggggagtgttgatgggttaagtttgtttttgttatggggagagaaaagggggatggtgagaggaaattttcttatataggcgatgtgatgttttgaaggttggggggnggattnaantacccgtcaatgaggtatatcagtgacactttgctgtttaaatatatgtgttgaaaagtcatgcaagagcattttgttatcattatgaggaaagatttgagactactgttccttctgcagaaacgctatgcacagatgcaaaatgatcaaaggctgatacaataatgaatctcaagtaagtagcggagccatcatgtgccacaatttcttcattttgaagctgcccctctgtgtgtaccaaatctttttcaatccattgctcaaaatcaactggctctttagacgtgcttttttcaatcttcaaggtctgtacaaagtaactttggattacaagcctttcaatccttacatgtttgtggaaacaaataatgaattcctggggaaacattcctgtggtggtccaaaacgtttctggattcccatcaatgatattttcaggtgggtgtttttcatcacttgatgtagctaaaatcacttcggacccttcagagctcagacagagatcaatttttctcatcttaaagtgtttaacctctgcgagttccaaaccctcggccctcgggtcgcctgccctgggcctggccccgcctccaggtccc

SEQ ID NO: 135828 - DNA, 812 bp, Homo Sapiens
  misc_feature (160)..(183): n is a, c, g, or t
cttagtttcattggaccccaggatatttcccttagggaaccacggtttagggccccagggttcccccttaccctacctggggccccggcgcggcccaaacggaaatggtttaggaaaagctttcttggaagggcccgaggccgcccgaacatgttttttnnnnnnnnnnnnnnnnnnnnnnnnggataaaaatccttttaataaagtatatcagtgacaacttcctgtttaaatatattgttaaaaaatcatgcaagagcattttgttatcattatgaggaaagatttgagactactgttccttctgcagaaacgctatgcacagatgcaaaatgatcaaaggctgatacaataatgaatctcaagtaagtagcggagccatcatgtgccacaatttcttcattttgaagctgcccctctgtgtgtaccaaatctttttcaatccattgctcaaaatcaactggctctttagacgtgcttttttcaatcttcaaggtctgtacaaagtaactttggattacaagcctttcaatccttacatgtttgtggaaacaaataatgaattcctggggaaacattcctgtggtggtccaaaacgtttctggattcccatcaatgatattttcaggtgggtgtttttcatcacttgatgtagctaaaatcacttcggacccttcagagctcagacagagatcaatttttctcatcttaaagtgtttaacctgggactcccgttagctctgggcgccggaccttccgggctcgaaacctcccttgcgccccgccccacgcagagcgtcccgacccgcccc

SEQ ID NO: 135829 - DNA, 331 bp, Homo Sapiens
acattttaggacactgtgaggggaaaggacaattttgaaattccttttcaaggaaaaaaaaggtctttatgctttgccatgaggccacattcagctgctatttaaacttaatatcttgaacctaaagaatgctgacttttcctacatttccagagttaggcagtattctacacttaaagactactactatttttataaaaggtaatctattcaaatttcttcacagatttcaagtctctcaaacatcaagacaacttcagcagtcggtacaagtcacatttcattttgattgaatacatgatcttgaacagctcctgtacttgctctttgt

SEQ ID NO: 135830 - DNA, 910 bp, Homo Sapiens
  misc_feature (797)..(838): n is a, c, g, or t
tgtttggtgatgctttgttttgctttaatgtttttagtaattcagatgctgcaagtcgattttggtgagtgtgtctgttaaaaaagtctaagctgtcagctgaaatatctacgggacttgtcgagggaacctggcaaactgggtgaaactgcatctgaaagctgcaggcaggaatctgtggagaaaacgctaaagtcctgcaaagaggggacctcaagggcctcaggactgtcattgtttaggccagctccacagttctggcccattgttgacaagcagttgggaacagtgggtgactggtgctgaaaatgtttcagatttttctcattgctggttaaaggcgagactgggaaactttgggagtcgccattgtgtccattgggagcctgctgctgagagagggcattttgctgaaaagtgtagccttccctctccagaagggccccagagacgctaagggcttgctcaaagagcgtcttctcttcctcgtcctcctctactttctcggagtcctcaaggcttttacatttcccttcgctgttttggttttccttgcactgggtctgcctcttgtgcttcatcctccggttctgaaaccacactttcacttgtctctcagtcaaatccagcagcgctgcaatctccacccttcggggtctgcaaaggtacttgttgaaatgaaattctttttccagctctagaagctgtgtgttggtgtaagcagttctcaggcgccgcgatcccccgccgctgccatcggcgatttccagggattctttgtggctgaggcaagcagnnnnnnnnnnnnnnnnnnnnnnnnnnnnnnnnnnnnnnnnnngaagtgcggttttcttggccgccttgttctccttcatccaggggtacacggccgcaaacagggcgccggcgg

SEQ ID NO: 135831 - DNA, 811 bp, Homo Sapiens
taaattcaacacagagttttattgagaacatgtttcatgcaggcaagatccttcaccagggatgcatatattaaaaatacatgtactttgcattgaaggagctgaaaaattagaaggaaaggggggatctaaataactgcaatgaagaagaggaagtgaggagcacagttagcaaagtacggctaaaatgtggcgggagttcagaccaggaagagactgcttcccacttgtaagtcagggaaggccctctggagtaagggatatctaaaacaggcctgatgatccattaatagttgaacatgtggaggttgctaggaccccattccatctggagataaaatttgaatttaaaagtcccagaacccaggtcagaacaacaaatcctgcaaaattaaattgagcttatattgacaaacaatcattaatcagaaacaagcaaaaataacaaaatttttacaaagagagttgagaggacgtcatcatcacgatgtgttcaggtgtgtctggagcccttgataagctaactgcaagaagcttcctgagacctttccagagtgcagctcacagcctcctgtcacctgtatctcaaaaggatattcaaactgcaattcatgggcgtatctacgaattccctcaaatgaccgaatggtgcgtatacggaataatgtttccagttccttccactcctcattgctgaagtttcccctggaccaggggcacaggaaaacgatggtgctggaattgctgtcccaggtatgagtctgcaaatcactcagccaacctgagaccagattttgtttccaggaatggt

SEQ ID NO: 135832 - DNA, 505 bp, Homo Sapiens
  misc_feature (94)..(94): n is a, c, g, or t
tttttgcttcaagtaacattcttttatttcacattagtcaaaatttacttttaaatgttcaatgcttaacaagaaacttcatggcaaaaaaaanaatcacatgagttcaaccgtattgtagtttttaaaaagtctcccttaaatatatagaatgattgggaagtcctattgctgtcttttggcagacatgttggccctgtcatgagaaagaatttctctgcagagaacagggtccctccccaatcaggaagagagaagtgttttgaggagaaacagcattttatttcaccaaaccctggctatctcacgtgggctgatatgaaagattgacaggtgcctaaccaatattcaatcccctttttgtgctttgtaagagaacccagcttttattcaggccagggggatgtatccagctgaaagactgtatttcccagacttccttgtagcaaggtgtagccatttaactaagtcctggcccacaagtatgatggaacatccaataacg

SEQ ID NO: 135833 - DNA, 615 bp, Homo Sapiens
  misc_feature (554)..(554): n is a, c, g, or t
  misc_feature (596)..(596): n is a, c, g, or t
gcgaagttcaggctgtagggaacctgataggaagtaaaaaattaaaagtttccctaaagcaaatgtgaagttaggatttcattaagccgtcattgataatagtgagattttaaactagaaaatatttgtttcctttaaatattgctttgattcacgtttaaattaattattagaaatattaacatagggaatgttttacttataagtgactggtatttataagcatgtgccccacccaaaccccttgctacaattaaatagatgatacttcaaaaaagacatcaaacctttagagaatgtgtagattcagaagtttcaaaccagcaactacataggaagttgacaaagagggttaggtgtcaagtggtgctgtaccaaaccctccaggggaacggtaactagcattgtctccaaagaggttttcatttctctttgtcacactgcctgaaattctggcaggtatctcaacccaaatgcctttaatgaccagcaagaggattacatttatatttataaaagcaaacaaaaactattggcccttgccaactaaaacntgcatacactcccctgtagattagagaatcatttaggcctgnagagtaagtgtgaacactt

SEQ ID NO: 135834 - DNA, 620 bp, Homo Sapiens
tgcttttattatttttttcagagggttccatgcacaaaaaggccaaccactgatttagagttttttatctaagtagtaaattctaggaggaatttgttccatagatgaagagcaaggcagtgctcatatgagtgattagatatgaaaccactcaagtatatcttattttaatgttgatttgagcatgttgactactggtaaagtttttggttggtggttatttagcaaaacaaacttaatttttaagaccatttttgaattcagagcttcttccggtaattaccatagtcctgttgattctttcctaaattctcgaatttctttcttctcactgttctctcactcccatcactctactgcaggttgctgtctttttaaactggattaccacatcagccttttaactgttcttcctgtctttatccttgtcccactccagctggtccacatagcagttaagagtggatcctgtcactcccttcctttaaactttttaattatgtgccaaccaaatttgcatgactctccctaatctggccatgaccacctttccagcttcctttcctgccaaattacatctccagccatacttgaattttcagttcctcaatacattgttt

SEQ ID NO: 135835 - DNA, 545 bp, Homo Sapiens
tgccaatttgttgtttatttaatccacatcgccagatagattcttaattctcctttttctccaactccaactccttcctgctgagacagcctctggtttgtgggtggagaacaaagcctgctcagtgtttggcatctggtggctaagctggtcttcagagttcaagacagcttcattctcatgcctggcaccttggtagggacagctggaaggctggattcagtcaagtccttcttcctctccatgttgactcagggcctctccatgtggttcttccagcagatggtctgactttttatgtggtggcttaggccagggacagactgccttggggtcacaatggctgattcttcagcacttctaactcagcttctctttctttctgcctttcagatgggcttctttcgccgaaggtacaaagaaattatcgaagctggcatggagcaggtgtgtcttttggtttcttatgcagttgactctgctgcagggagattacagatgtaacctcatgcttctcttcagaagcaattttaaatgggatgcca

SEQ ID NO: 135836 - DNA, 520 bp, Homo Sapiens
gtttaaagctacatttttagttgcacacaaggactatagtcaaataggcttcaaaagcacaaaggctgtggtcagtcatcagccctaggacaccaggaccaagaccaggccacagtctcagcacagcaggttggcagctcgctctgtaattgatgagacagaaatctgagcacacggattgccctgtgtggctggaaagggaaaggaaggctgtcctggccaccgcggcccagggaggccagcacacccgtgcgcaggtcacgtgacccactgctctgatcccacccttctagccacagtctgccaggtcctgggcatgacaggaagggggttcacagatcagtggcatttacacgggtaagctttgaacactgtcttcaactgaaaggccagtgtgtgaacaggccgggcagctggaccactccgaggctggcgccttcccctcctttcgggcagttcccagaaggctcaataccacagtttgaaatccacttaatctctcgagtcggcctgggtctat

SEQ ID NO: 135837 - DNA, 499 bp, Homo Sapiens
  misc_feature (429)..(443): n is a, c, g, or t
actgtaagcaggtatatttattgtctgtaaattatgcccccataaagttaatgtttagaagctaaaaatgcctttagatggcctacattcatttcaaaatgtgtattctggcacctaagttataatctttatggaagtctaattcatgtacactggcagtaggggttcctggtcaatttgcaagtgttctcttcaagacaaagtaagttctctaattttggtgccaccaatttaggatctggaggtctgtagcctgctttatcaaagacaacaattgtaatttggctgaataaatggtttgctaagcaaagagtagacatatgtatatgcttgtatgtgcacatatttctgggaagaaacggtagactgaacagtggtcacctatgaggagtaagaagactcgggagcatgggggggacttaattttcnnnnnnnnnnnnnnngagatggagtctccctctcttgcccaggtgatctgtctcgtgattcgcctgcctcg

SEQ ID NO: 135838 - DNA, 191 bp, Homo Sapiens
acatcgttttagtaagttaatttcatttatttactttggagctatatttccacttagaaaaactaaggtaattttacaatatatgctgagattaaaaaccaaggtaaaaatgatcaaacatatatgaaattgagtcttagatttaatgaatttcactcgaaaataaatgatcagaagaattaaaaaataaa

SEQ ID NO: 135839 - DNA, 476 bp, Homo Sapiens
taagagataaatccataatttttattcatttaaaaaccctgctattaccatatgaactcaatattcaatgccagtaatttaaaaaaggggcagagcaggacagaggagacatgtaaacttaataacatgcattgcaaacagtaggtaccaaatgggcttccagccagtcctccacacaaggaagttaggatgtttcaaagagcccttataataaaacaattttggcacatcatgtttgtagaaaggagcacttaattctctttcaaataccaatatccctttaggaagatggtagtctacagtatcttcattttatgatgaggaaaccgaggtccagagaaatgtaaagtaacctggaccatgatatagtcagtcaaattgttgggggtataaagattaaaacttggtgttgcctacatttttccaagctgcctaccctcagacaataacagcagtgactggaatattaagaaatg

SEQ ID NO: 135840 - DNA, 531 bp, Homo Sapiens
ggttttaattggcatgccaggaattttatggggatgattcatgaaccagcttgggtagggatgaggtcatgtctaagcatttttccaatactgaaattccatcattttgtttctaagaactgagagtcacttgagaacacagtgttggctggcattttcttagccaagggtctggcaaagcaaggatggacgggtggggaggtcttagagggagcaaagagaggtaacacacactccctcccccttccgtcccttcagttatccattcattcacccaaaaaacatgtgcccattacatgccaggcaccagcaggaacagaaatgaataacaggtccccatgcccaccctcacagcccaatgaagaaaacagtgcagtggtaaataaaagcagtgtcatagctgagtagaagctgaaacaggctgaaacatggtgacattttaatctttgagtcttcagtgtgtccccagagccactatctagaaaaccatctttatcttcaccaactttaacacagacgggaaagagggtt

SEQ ID NO: 135841 - DNA, 625 bp, Homo Sapiens
  misc_feature (127)..(173): n is a, c, g, or t
gaacacagtgttggctggcattttcttagccaagggtctggcaaagcaaggatggacgggtggggaggtcttagagggagcaaagagaggtaacacacactccctcccccttccgtcccttcagttnnnnnnnnnnnnnnnnnnnnnnnnnnnnnnnnnnnnnnnnnnnnnnncagcaggaacagaaatgaataacaggtccccatgcccaccctcacagcccaatgaagaaaacagtgcagtggtaaataaaagcagtgtcatagctgagtagaagctgaaacaggctgaaacatggtgacattttaatctttgagtcttcagtgtgtccccagagccactatctagaaaaccatctttatcttcaccaactttaacacagacgggaaagagggtttgctttggggaagttcatttgtcagagccctttctcagagtcctccaggcaccctcagtccaaatccacttcctttatctgtagagtaattgatatttattagcagtgaatcagttctggagggctcagggttccagctagggaaccagaagagctgattgtgaccaagaccacactagctgtcagacattcattaatttattcaatcactcaacttgaacaagttac

SEQ ID NO: 135842 - DNA, 776 bp, Homo Sapiens
gtattggtttcacacaatttactctaaggcgcccacctaatagagctcaggcaacccgtgggaacctgacagtcccaaacaggtctgtaccctgtgtggctgcaccacaagcccaatgccctcggctttcctagggaaagcatggtgccaggtgcagatgctggccctctgtgctgtgggacagtggtgtgggagccagccagctaaccataccctgctgccatccccaacatccccaacacatatttatatttagtttctgttctcctccccttactctgtcgcctcctcctcctcctctttgtgtctttcccacgcggattctttctctttcctctgagtggacaatactgtaggcctgacccgcttagacaaactctgacctcctgtggtcacccaggaagctgactgctaggccttggatgagggggcagtgggagggggaccaggtgataccagaatggctccccccacagattcgttacccaaggacatgggtacactggtcgaatgctggctgcagaagcagaatgtgctgcgtggaggtggcagagattggttgctgaggatttgaaatgaaccatgaaccaaagctagaatgaaagcattatattgtctaacctagaatcgacaccctaaattatttttactgattcatgaatgcatatgtgaattattttctttgactacaaatgccttatatacccaaatcacagctccaagcagtacttttgaacagaactacaataaagtatgaatgttagattattaccaga

SEQ ID NO: 135843 - DNA, 533 bp, Homo Sapiens
caataaaaatggatcaactacagctatctgcaatatcaatgagtctcacaagcaatgtggagtgaaacaagatagtcacaattccaagtctaaaaagcatttaatgtttgaacatctgtaaaacaaaactgttgtttagagatgcttataaggaagaaaacttataaacaaaagcaaagaaattattattacaaaagtcagcatgggggctacacctaagatggagggagcggtgtcatcagtggtggggggagaagagtaggttattaaagggctctatttcttgctctggctggttattacatgggtgatggctttgtaaatgttctttaaactggcagttctcttctgaatgtatctgttttcttaatgaaatagaaagtagggtcactagttggaaatgatgagggagggagtattaaaagatttgaggaaaggaagatgatatgaaagaaccagagacactggagagtgaacagactagagaaatacaatatttttatcttttctgaaagctttttatattgtttctg

SEQ ID NO: 135844 - DNA, 609 bp, Homo Sapiens
  misc_feature (111)..(173): n is a, c, g, or t
cagtattagtattaattagtattaatcagtattctttgccaataagggttctgacagaaaatcagttgttcattaaatattattgagatacttcttgatcttatagtagannnnnnnnnnnnnnnnnnnnnnnnnnnnnnnnnnnnnnnnnnnnnnnnnnnnnnnnnnnnnnnaagggttgccagagaaaacacaggactcaattgaattggaatttcagataaaaaacacataatttttagtataaatatgtttatgtgatacttatactgaatataccatgtgatatttggaatatacttatactaaaatgtacacttaaatgtgttgataacctgaaatccaaatttaactgggcttcctatgtttttatttgctgagtctggcaattctatgccctcactacgcttataagctaacatgctggaagcagagatttgtaaatacaaatagcatacagtgaacaatgctgtataacctggggagccataaattagaaggcactgggaccctaaatgtatggagaaaaactgtcagccaaccaggaacatccacccttaaagcaagaaataaacttctgtcgtatttgagccgattatgttttggaaa

SEQ ID NO: 135845 - DNA, 690 bp, Homo Sapiens
cagtttttctccatacatttagggtcccagtgccttctaatttatggctccccaggttatacagcattgttcactgtatgctatttgtatttacaaatctctgcttccagcatgttagcttataagcgtagtgagggcatagaattgccagactcagcaaataaaaacataggaagcccagttaaatttggatttcaggttatcaacacatttagtgtacattttagtataagtatattccaaatatcacatggtatattcagtataagtatcacataaacatatttatactaaaaattatgtgttttttatctgaaattccaattcaattgagtcctgtgttttctctggcaaccctttgagggtagggattacatctatctcagttacgactgaatccccagaatctaaaacagtacctgtctactataagatcaagaagtatctcaataatatttaatgaacaactgattttctgtcagaacccttattggcaaagaatactgattaatactaattaatactaatactgctattagtaaggatttgtattaagcattagtgaggaatacatattattaatacttgttattaataagaatacttattaagtatcagcaaagaatatttaccaacagataatacttcaatatcagcatagcaaactgcaaatgtttacctaaacttcac

SEQ ID NO: 135846 - DNA, 568 bp, Homo Sapiens
  misc_feature (388)..(401): n is a, c, g, or t
caacttctcaatatttatttattcattcagtttgatgtgcatatctttgaaaagggttgacttataaagaaatacatgaagtttacaatctgtagctcaatctatcaaagaaaatggtggcttttagtaattaaataagcattagttcctaccattttaatgtgttcagggtaggaaacagaatagacaattgtgactgtaatgaggtccatgaacgtttagaatatgattaatccattttccacactgacccatggaaacaataacagctaatgtggccccactctcacctgtgaatcgtcttattcccacaggaaacatcaaacctccccaaatatcatcctctaggcagaggtcacttaactattaaatttacaaggcaggtgcnnnnnnnnnnnnnnggtggggggaccgatgaaataaaggaaaaattctatttactaaaattcaagtagctaaactatcttttaggtgaagtcagtgaaaaccttcacacattgctcatttacccttatttcaatcataatgctaatatacttcccatctggtttctattttcagcaagtca

SEQ ID NO: 135847 - DNA, 1028 bp, Homo Sapiens
ggtcggaattccgggatgtgacccagggagacaaacacttggagatacttggggctgagtttgagcaagactccctaacctgtgtctggacaagtctgatgtcctgtgtggcccaagaagaactgaccccgtgtctggagctcccaccgttattgcatccctgctgtggctcacctgctgctgtctccaggagcccctgagaagatttgcctcctctcccctgctaagctccaggtcctgagattgaattaggggctggagctcactgcactccagcagtcatgggacccaggatagggccagcgggtgaggtaccccaggtaccagacaaggaaaccaaagccacaatgggcacagaaaacacacctggaggcaaagccagcccagaccctcaggacgtgcggccaagtgtgttccataacatcaagctgttcgttctgtgccacagcctgctgcagctggcgcagctcatgatctccggctacctaaagagctccatctccacagtggagaagcgcttcggcctctccagccagacgtcggggctgctggcctccttcaacgaggtggggaacacagccttgattgtgtttgtgagctattttggcagccgggtgcaccgaccccgaatgattggctatggggctatccttgtggccctggcgggcctgctcatgactctcccgcacttcatctcggagccataccgctacgacaacaacagccctgaggatatgccacaggacttcaaggcttccctgtgcctgcccacaacctcggccccagcctcggccccctccaatggcaactgctcaagctacacagaaacccagcatctgagtgtggtggggatcatgttcgtggcacagaccctgctgggcgtgggcggggtgcccattcagcaccttggacagcgcccaacccattacaggacgcggagccagcggaagccaagctctccacctcccttagcctctgggtgatggatttcctctcttctcaatttgattaaagcccagtagataacc

SEQ ID NO: 135848 - DNA, 926 bp, Homo Sapiens
  misc_feature (680)..(690): n is a, c, g, or t
tgtctaaacatgaactttatttttacagtcatttaaagatgtctttaatctacctattaaattaacttttaaaaagtataaaatggggaaagaaaaatagaggagagagagagcttattcatctatccatctgtttttccataacactaaatacttccatttctaggtgctaaagtatataaatatgatatatatacaattttcaacacataattattgcatctaagcaacagatacagagaaaattttagttactatcagcatatttgtaagatttttctgaaccaaatctttgcaagacagatcaaatgccatcttagttttatgttccaaccaattgaagcagtgagaaaaaatgtccctagttccatagacaggatctgtcaggtgctagccaggcttagcccagtcctattccatgagttcacaggatatccctgggcatcgagccaatcccacttgtccccagaatgcaaaggaaatgagatactacattaatatgtcattttgtgccagtcgggctttgaagatagtccaggcttcagtgatattatcagccatttgcagccctgaccagcacaggaagaagtcaaaactcacatgcaggaaggggagccagggcctgctttcccaccaagccctgggctctgggctttgttctcactatttccaagccttcnnnnnnnnnnnctataaagatatgtatggatatgacctttcaccagagaccctatgctcattgctgtaaaattccctttctccatggggataaaaatcagcactcatacccaccgtgtgttttgggtaagtttgttcctatttctctctatggagcttcaaagagggtatagctccttctgagattagagtaaagggaaagctaaattcctgggaattcttctggaactgtgacaaagagagatatg

SEQ ID NO: 135849 - DNA, 385 bp, Homo Sapiens
tttttactcacaaaaaaattttttaattgaaaataatctcctttgtgtaggacaaaagttcactgttcacccaggcctagctaacacccaaccgtgcccagcattggcaggtgccctcctgccatggagacccacactcccacaagtctcggactgtgacccccatgtcatgaaggcccctcatcctacagaccaaaacttcctgactgggcaggcagcacagaccggccactgagatgcgtggaggcacctggggtacaccccggtcacaaccctggtcacaacccccaggtcacaaccccaggtggggaaagatgcaggacggaggctgtctacctggagcaggtcgctgaggtccaggagcatgtgcggcgtgccctcgtgc

SEQ ID NO: 135850 - DNA, 253 bp, Homo Sapiens
caattgatcagaataggcattttattccctaataaaaaccagcagaaaactgggaatagaagggaacttcctcaacttgataaagggtataatgaaaaacccacagctaacatcaagcaacaacaacaaaatagataaattggatttcatcaaaattaaaaacttttgggcatcaaagaacattgtaaagaaagtaaaaagacaatttacagaatggaagaaaatatttgtaaatcatatatctgataaagat

SEQ ID NO: 135851 - DNA, 624 bp, Homo Sapiens
accatatatgggacaggtgctcataaaacattgaattggttgacactgatattgtacttccaagcccctagaactgtgaggaataaatttctgttttttataaattacccagtctcaggtattttgatatagcagcaggaatggactaagacacgttttttattccccaataaaccatttagttatacttctgaattttaagaagaatgttttatatgttccacattaacattttattttaaaatatgtacaatgttttctgatttattcattactgaatctcaactgttaaatcaagtttaacttaaagctgcctccttaaatattttaagttcagcctaaaggtttctctgtacatagtgaactataacctaaatggagttgtcaacagactgagtctactcttgtgccgatcaccaagttttggccaattaaaggggtcagttcaaactgttcaaataaggtaaattctgtgctgtaaccaatctggctgtttctgttactcatttccgttttctgtatgtcactttcctttttctgtctgtaactcttcatccatcacgtggctgcactggagtctctctgagtctatcattctttgctcaattaaagtctgttaaatat

SEQ ID NO: 135852 - DNA, 518 bp, Homo Sapiens
  misc_feature (209)..(430): n is a, c, g, or t
aaaattaagatatattttattattaagtattgaaaaactaaaaaagcaaagtcatttatattactatagtcagacttactcttgcaaatacattttaagcaataaaactgactattctatgcagttcagatgcccattggccttctttctgtttctcaaccacctcgcaggctttgtgaaaacacctttgcaaaaactataacagtgannnnnnnnnnnnnnnnnnnnnnnnnnnnnnnnnnnnnnnnnnnnnnnnnnnnnnnnnnnnnnnnnnnnnnnnnnnnnnnnnnnnnnnnnnnnnnnnnnnnnnnnnnnnnnnnnnnnnnnnnnnnnnnnnnnnnnnnnnnnnnnnnnnnnnnnnnnnnnnnnnnnnnnnnnnnnnnnnnnnnnnnnnnnnnnnnnnnnnnnnnnnnnnnnnnnnnnnnnnnnntcaatggctagttttctctcttttctttctctatcccaactctaaatctaccatccctaaaaaagtggagggggggtggggagagagg

SEQ ID NO: 135853 - DNA, 817 bp, Homo Sapiens
tttctcctttcaacacatttattatatacagctgtcactgcattgtcaatctgccaaatggctctatgttccaacagggctggagtagtcccctgctcacaccagccttcacaatacttcccatgtcttccctgttaacctctctccacccagcacccaggctcccaactctcctggctgcctccagccctcagctggcaccactgacatgctgtttccagtacccttttcttctttctgcatcctccctgggggacatacatccctcatctcgtgacttcagctgtcacataaattcatatgtttcagaactctattttttacctcctacatctgtcagtttaaatgtcaggatattttactttcagtaaagccctaaaaagacaaatctatgtacttttaaagaataaaagaaatgactggctgcagctcaaacctacaactgcttgcgaaactctacaatgtctggcagatgctagaaagaaggggatcaagacagagcacacttggcgtggtatgctatctatagaaaatgttaaaataaaaattaagtaatctaggtttcctctctttattttctacatctactctctgaagagggcaataaataaggaaatgtcccaaagagggacaaattaagtcccaaaataacacaaaattgggcaaatccagtcatgaagaaagaacagaggttcttaaattgggacacacagaggcaggtctgcaggtctaggaatctctgaacatatgtgcaaaattctgggtatgtgtgcatatgttatataacaaagcgaagggtccatatagctttcatcgc

SEQ ID NO: 135854 - DNA, 1086 bp, Homo Sapiens
  misc_feature (11)..(11): n is a, c, g, or t
aattcggcacnaggtttcctttggaagactttggaacagctgcagctaggaataggtccctcgtgcaacagacagtggggaagccccaccctctgccataatcactgacccagctgcagccctgtgaaattccttatcatgcaggaagcctcaaactccaaggatcgcatgaaacaatgactgtccccactgacatacattcttcactgtgctcagtggcccccacactgtacctgagccattcctcacaccagtgctgtgaggtgagggcaatcagctcccctttatggcacgaggtcacaaagctttgagcctggacctgtaggatttgaccctgggtctgggggactccagagcctacctgcctagcaaccttgctctactgaaaggttgaaaggtggtgccttgggctggcttctgtttgcaggaaagcgttccacaacttcaactactttctgttcttctacaacgtgctgctgggcctgggtgcctgcctttccaggctgctcatcagttgcctcctcggcatgtggctgattgcccgcatcgacaggaccatcatgcagagtggctatgagggagcagacatggggttcagtgcatggattgggatgctctacatggaccattatcacatcaaccctgtgcttgtcagcttttgccacatcctgatcacaaatcacagggagaagaagctgcagcagagcaccaaatactggtgcctaaatcaatcggcaggtccccatgtctcagctaggtcgagaacaaggtggttcctgttgcagaccctaatcgacaacccaagactcaccatgcacagaaaattaaaattagggcacagttcccaggagtcccaaattctgatggcatgctcggaagagctgacgctggcccccatcatctgctccaaagccaggctaggacatctgccaccaagagagggctcaatctaaccagcagctgtcccctgcaatgaaatgggatggcacaggcaccatccatgcagatggcagacaacaatggtcactcatgggatggccacctgggctgagggatgaagtttcaggactatttcactcccttggc

SEQ ID NO: 135855 - DNA, 600 bp, Homo Sapiens
  misc_feature (128)..(227): n is a, c, g, or t
gttgttttcccattcaagggattattgtaataagctttgttttaaggttttattgtttagcaacattgtgaaaacatctctatgtcttctgttcctcattcttttttaaatacaagattttatttctnnnnnnnnnnnnnnnnnnnnnnnnnnnnnnnnnnnnnnnnnnnnnnnnnnnnnnnnnnnnnnnnnnnnnnnnnnnnnnnnnnnnnnnnnnnnnnnnnnnncatgatatattcttaaagttttttcttcctaaaaacaactctattccttgaaaaagttggaaaatatagacaaatgtagagaagaaaatcaagcacatgtaatttcatcacacggttaccactaggttactctgttttaattatttagttggttgctgcttgttagtataaatattctctgaaaaatatggcaaagagaaagctcaacaactcccacaatcttaccttgtaccttattaaagtcagagatagtcctgtatcttgctgttaatacgtttttggaggtatgtgggtaacttataaacatgtcagtagaatccaagttaagtactgtattgcctggcaaaatctggctagttcttgagaatcactt

SEQ ID NO: 135856 - DNA, 509 bp, Homo Sapiens
  misc_feature (160)..(160): n is a, c, g, or t
  misc_feature (385)..(461): n is a, c, g, or t
tgagccaggctttacatacagcatcatatttaatccccgacacgagctccattttatagatggggaaactgaggtttggtgatgtcaagcgttttgctgcattaaatcaagatcacacagtaggtagccgaactgggatgtaaacccacctatttacatnggctgccttaatcaatgactacaaataccagcatcccttgccgtgcccgctggcgcaaacgcacactcccaagggcccagtcttagcggctggatcctaaacccaatcagacaccgcttctccctttcccccgaccaatgggaaggctgttgctaacacaccggctatatttttagctttcagtgctctgggagcgtgtgggtcggctgagcctctctgcctggnnnnnnnnnnnnnnnnnnnnnnnnnnnnnnnnnnnnnnnnnnnnnnnnnnnnnnnnnnnnnnnnnnnnnnnnnnnnncgtgtgtgtgacgctgtcactcgctgacgcacaaggcaagtagtccct

SEQ ID NO: 135857 - DNA, 715 bp, Homo Sapiens
  misc_feature (208)..(259): n is a, c, g, or t
  misc_feature (520)..(529): n is a, c, g, or t
ctacaaataccagcatcccttgccgtgcccgctggcgcaaacgcacactcccaagggcccagtcttagcggctggatcctaaacccaatcagacaccgcttctccctttcccccgaccaatgggaaggctgttgctaacacaccggctatatttttagctttcagtgctctgggagcgtgtgggtcggctgagcctctctgcctggtnnnnnnnnnnnnnnnnnnnnnnnnnnnnnnnnnnnnnnnnnnnnnnnnnnnngcagcgggcatgtgcgggagggggcgtgtgtgtgacgctgtcactcgctgacgcacaaggcaagtagtccctggaggtgcccccggggttgcgacgctcagagtgtgggggatgggggggcgctcaggctatctcccgcctccctgtcccggtggagtttgccctccagcccggcatttctctgttgcattcagggaaagtgcatttaaaccccccacgctactggtgctctccgcccttgccaaaaaaagcgatcaaggnnnnnnnnnngcaaactgttcgtagctggaaactttcggatctcgccacccaacgtggggatggcggctgctgctgggccggaaccgtctggaatgacaaaaaaggtgtgggcgggaggggagaactgggaaatgggagatctaaggagggaccggggagaagacctcactcacagtcccccgggggctccagact

SEQ ID NO: 135858 - DNA, 716 bp, Homo Sapiens
ggtccttgatcgcttttatttggcaagggcggagagcaccagtagcgtgcgcggggtttaaatgcactttcccgtgaatgcaacagagaaatgccgggctggagggcaaagctccaccgggacagggaggcgggagatagcctgaggcgcccctcccatcccccacactctgagcgtcgcaaccccgggggcacctccagggactactggccttgtagcgtcagcgagctgacagcgtcacagcacaacgccccctgcgcgcacaatgccgcgcgtgcaccactccctttccccctccccttccctgtctctcttttcccctagctcttggccatccaggcagagaggctcagccgacccacacgctcccagagcagctgaaagctaaaaatatagccggtgtgcttagcaacagccttcccattggctcgggggaaagggagaagcggtgtctgattgggtttaggatccagccagctaagacgtgggctcctctgggagtgtgcgtttgcgccagcgggcacaggcaagggatgctggtatttgtagtcattgattaaggcagccatgtaaataggtgggtttacatcccagttcggctacctactgtgtgatcttgatttaatgcagcaaaacgcttgatatcaccaagcctcagtttccccatctataaaatgccgctcgtgtcggggattaaatatgatgctgtatgtaaa

SEQ ID NO: 135859 - DNA, 501 bp, Homo Sapiens
tatttgctcatgtttattaagggctcacacagtgccaggcacttttctaggagtttgaaatgaattctcgccttttaaaaagtacaaaaatcctgcttcatccccactatacagatgaaggaactgaggctcgttcactcaaggtcaccagtgactgatgaagatcgctgcagccccaggcagttccccgcccccactccccgggatcatgcaaatgtgaagacctacaccctccaggtttctctcctattcctccagaaatgtggttagggcggctccttcctaagcctcttctataaatagattttacaaagacacgaaccatctcaggcacactggtttataaacaacatttctataaagtttactccaccgtgaacttcctccgatgtccataaatacactgtcacgttgtcacttttatgtctgcacagcggcgcattctaaacaagcaccacagtcttttttttaaacagcaatcccctgttgctggatcttaag

SEQ ID NO: 135860 - DNA, 572 bp, Homo Sapiens
catggaatatttactgatttattcatcatttgctctcttgggggtagggtgtacttcaccacaaggacataactccaatagattttaaccaaaatttacagcaaagaaaggacatatttaaacaggcagttttttaatacactgaaattataatttcgatcgtatattttcaattaagtcttgctttttcaaaacacattattaacacaaagattgacatcctatattcaaaacaacatcactatcttctggttatttttgaattggtggaagtagactactaatatctagttagttttaatgttttccatgttaagatactgctatcaatgccctctgcctttgaaaatgactgccgaatccaaacattttccagaaaactcctatacatagatctttgttcctttattcttttacacagcaccctgtttgttcataagtgttcacagctcatatcacatgttgtaattatgtgttgatagatcacctctcctactagaataacttcctttcaggtacggaccatatacacatgtcctactcattactacatttccaacatttggtatggt

SEQ ID NO: 135861 - DNA, 1121 bp, Homo Sapiens
  misc_feature (152)..(249): n is a, c, g, or t
  misc_feature (859)..(870): n is a, c, g, or t
tttttgagaaagggtctcactcttgcccagctagagtgcagtggcacaatcatagctcactgcggtcttgaactcctgggctcaagcaatcctcccatctcagccaccacgtagccagatcctccaagtagcccagctaattttttaacacnnnnnnnnnnnnnnnnnnnnnnnnnnnnnnnnnnnnnnnnnnnnnnnnnnnnnnnnnnnnnnnnnnnnnnnnnnnnnnnnnnnnnnnnnnnnnnnnnngtatgagctactgcacctggcctaatcaactatttttgtacaaaggacaatttggggtttgttgctaatagttggtcactttaactggcatcaataggaacataggcataaaacacattaaacttctctagggcaatagcaaggtgtgttctttggggtatatctcaattctgacttttgaatgtcatcaccagtaatgattctggacttacattatacttctttttggggtattcaaaatatgaattttgggggtataaagtcaggccacaacagcttccaacttttctcatttctcttttggagaatttaaatcacaccaccagttccaccctaaaaaacatgttaaactccattccattagatattttatggatgccattacattgtcctaggcaccaagtttaaacagagattaaagggaagtctctgctttagaagaactgacactccaggtccagaagggagaaaccaataatcacaacatgttatacggctcattccacagtataattggagaggggcttagtctaccattttcaacagcacatttctatagcacatctgatcctctgtcattacctgtgacaattttccagccctctcctgnnnnnnnnnnnnccttccccgatcagcttgggattacaaggtcaatacagtaatttgagcacttttacttgcatcctcagtactcttggcccattattcctctgctcctcctggtcagtttatccctgattttggattaatccagtctctgctttctgctcccaaggagataagcaccacacaatactgaagaaatatgctgatttttgttaaaattggtggttttcagcctcagctgatactttatcaatgctaggcaaatt

SEQ ID NO: 135862 - DNA, 916 bp, Homo Sapiens
  misc_feature (771)..(771): n is a, c, g, or t
  misc_feature (779)..(779): n is a, c, g, or t
gcgtgtttagccaaggactcaaagactgatttctggaaccattttcctgtgtagcttatttttccctctaatctccgcatccttcactgagcaagatttccaggtactagattctgaggtctgagactaaagtcattgcatcatgagttccaaactggacttgagaggggaagaatcatttcctttgagattgaccaataccaggagtttcactaaagaaggcaatgaaagacccacagccttggacataattgatttcctgtgatatctgtgtgggcccaggcatgctgctcacctgggtctttcccctctttcactcctttggaactgccccaccactaaccactttcctactctctccttccccaccccagtatctccttgcctcaagagtttcctgttactagcaataatttagttcactcccagggaactactatttctggttctcagttactaacctttccattcagttctttccattccatttttaccagaattaacgtttcctcatctttcccagtgaatgtaaaaggtaccttctgggaagcattttaccggaactgatgactgctatgcttgacagcagcttcaacagcctcggatacaactcatcatgaattagctctggcatgactgagttagaatactgttctgtttcctatctctacatgtaggaaaaattttaagtggcatttctatgctttggtcttttcctccataaatgacttagggggaaacccttaatgaggatgagtaactaaaaattcnaatgaatncctaaaagctttataagaatcatttaattgaaactttacataatttccttattatgtattaacattgaacgggccctatgcattccatttctagaaaagaagtctttccttaataaattacaagtgcaaacatgaaa

SEQ ID NO: 135863 - DNA, 913 bp, Homo Sapiens
  misc_feature (122)..(193): n is a, c, g, or t
tctcactgccctggaggcccctctgtggcttagaacctggcatatggtgggagttctgagtttgccagtcctgccttccttccctccctctccttcggcccccttggtctctttcagcagtnnnnnnnnnnnnnnnnnnnnnnnnnnnnnnnnnnnnnnnnnnnnnnnnnnnnnnnnnnnnnnnnnnnnnnnncagggtttcctattcagtgcaggggaggagtagatgatttgcaattctaacaatttcccagatgataatgacccactctgagagccactgctttagagaagggtgtttcaatccaggcactatggacatgctgggctggataattccttgttgtgtgccctgtcctgtgcactgtaggatgttgggcagcatccctggcctctacccaccagatgccagtagtaaccctcctccacatgccacaaccagaaatgtctccaaacctggccagatatctcctatgggggcaaaatcaccccaacattgagaaccactgctctagaactctttgtcctgggggtggagtggactctgtggggacttggcaaggccaagttttaaattactgtcctcaagccaaatcaggccagccacctgtttttataaataagggctcactggaacacacagccccacccattcattgtcatcttctttctgctgctttcttgctacaagggtggaactgagtagttgcgacagaggccatctggtctgcaaagtttgagacattcactatctggctcttttcagaaaaagtctaccgacccctttcagaccctgaaggggtctggtagaatgtgatgtggtagaaggaccggggcaggtgggcccaccccctctcttccatccaaaggaagggtagtcctccaggctgaagctaaataaagggcgtcttct

SEQ ID NO: 135864 - DNA, 907 bp, Homo Sapiens
ttttgtgttccaataaaactttatttacaaaagtaggcagagtcgcctgaggttgtagtttagtgatctcagaatatagtatagttctagacaagaaatcagaataccaggtgctcccactctcagttctgcttcttcccagttgagtacacagcttagttctctcttgtactatttgaaagaatagtggtgtaaactttaaagcactatgcagacatctaagatggtattcatttaatctttcatttaatcaagaaatatatatcaaatgcctgctgtgtcaaaaactttcctagaacaacaaagtgattgtagataagaatgagtcacctaaacattggaaaaggtaccaataatgggctgttgcatgattgtcaggttggggtcatagggtaagatgacagcctgagaggtgggagtggggttttcccctgaagggaattgatgttcacacagtcatacattttgggaagtgattaattctgggaaggaaatgagttggcactttgagtagggggtggtcagacttttttctctctctggggccaggaagtattgggccacgattccaaatcatggacaggtctagatgattctgtttgtggggggtgaaccgtttcctggctatgtcggtttaggcccagagtgactggtaccatcaagttcatgactttccacttagcagtgacagtgacccagggtagaagcagttcttgtctgcagcaaccagcatcaaggttcagggttgtagagtttcaaggcagcagtgtcccttcccagagtccagggtagagtgtgaatggtggaggatcatgccacagtaatcagggaattggatcaccagattcccatcctgatatctgactccatggagaatgccatctttgttccaagacaacttggtttt

SEQ ID NO: 135865 - DNA, 575 bp, Homo Sapiens
ctgaaccacatataagtatacagtatcagtgaagcagctagctgtaaaatgtgggctgagtagcataacacttttatctgaaaaccttcaattcatagtatctgaaagcattaatattctcagtcattaatttttccaactacaaaatgaaggcactttgcaagcatcacagacttattgtaatagttaattcttgtttttgattattgtcatcttttgggggattaaagtgttttggcatgttgggctctctaatcttttcgctactttcagaatttgtgctttcaagtgtcattgtatatgcacaggacacagttgggacatgaagataaacctcacctaatagagtagatgtcatttctgggtaaggttaactgtgggaaacagaaatgtgttcactaaggaaaccttaggtcacaacctccagtttcctgaaggaaatgccaaaaatgctccaaagacaaaaggctggaaacaaactggaatgtctctctccatctgtctgctaaggcggaaggaatgatttcatgttacattcacttcctagactttcattacagagtcaagcataatgg

SEQ ID NO: 135866 - DNA, 925 bp, Homo Sapiens
  misc_feature (726)..(726): n is a, c, g, or t
tttaccaaatatagccaattattatttaccaacggtaagaggacaggtaaataagtaattcaaaagcacagatacttccagatctacattttagcctgtggtttcaacatcattctacacctagccacatttcagaggcaagaaagagggaaaattaactattttggtttatgtctcctttgattcccttaccctctagtacagacactaagcagcaagaagagatgggaagaaatgaagacggcacctcagtaatccagagagcaaaacagtcagccactgagtaatcaaaaatcatactggctgcggggtcacacaacgagtaacagtgcctttgagtttcaataggaagcaaaacatcacacgaattatagaaacattttagatcgaacccctaggacaaaaacacatgaaaagcaaaaaatacagattgttcggttttaggtctaaacttctctaaacacagccatcagacctgtcctaaaaccgctattcagaagtcatttccactctacagtagcaggacttggtgtggtttcggtgaattacatatttgacaagtgggctgtcatcataaactcttgctactcctactgagttatgcagtcaccaattttatctgggtcttctccatcgattttaatccactttttttctatttcaacctggatgttgtagcaagctcgctgctgaacatgtttctgtggctggacatcactctcccanttcccagagacctgacctctgtccttgaggcacaggtgtcaggcacggaaaactgaacagtagcaaatggataccaatcagagggaatttcttggtctgatccaagctctaatttgtatgacagacaatggggatgatctagacttgaatttttgtctggaagccgatctatcttccataccactgactggtaggcact

SEQ ID NO: 135867 - DNA, 362 bp, Homo Sapiens
aatttagaaagtttatttttgccaaggttgaggatgcacgcccgtgacacagcctcaggaggtcctgatgacacgtgcccaaggtggtcagagcacagtttggttttatatattttagggagatacatcaatcaacatatgtaagatcgtacattggttcagtccggaaaggcgggacaactcgaagcgggaggtggcttccaggtcataggtagataaaaggcaaatggttgcattcttttgagtttgtgatgagcctctccaaaggaggcaatcagatatgcatttatttcattgagcagaggggtgactttgaatagaaggggaggcaggttggcactaagcagttcccagcttgactt

SEQ ID NO: 135868 - DNA, 1086 bp, Homo Sapiens
ttaaggaaataggaatcctttattcctgggacttaaaagcttgactttctccagtaagtcaattaccagtgcccacggcaggaagagctctgatgccagggttgacagcatgctggaaaaccggaggagtgtttgcatttctggggcctcaagtaatgagaagttcttccaagaacactgacaggggtattattgccctattttagaattattactctgaagatcagggaatttcaggtggttgaactcatgccacagcacctgtgcttttctggtaggggagggatggagtccagctcaggagtcccccgtcatgggagaaagcactgtgatgggatgtctgtgggggaattagaaccctatagcagatgggatagggtggggagtctacatatttttatttggatgttttgatggagtaaagttccaaaccaagcaagtatcaggcagggggcagtccaggctgtggtgctgtgctgtgaggctgggagtccaggcaggtcctgtgttcactggtcacttccacagcctgaaggcccctcgaaaggacatctgcacagaggcccgctagtgacttcaggatgctgatgatgccctcaaggtgagagccagagaaaatcccgtcaactctgtcaaccaagggcatcaatggccacgtgtgtggttttctccgatttatccaacttctttgcactgagttcttattcaagtgaagtattccggtcttgtgacttgtacttcaggtcaggaggacgtcctgctgcacgctcaggcggtcgctcctcctttccacaagacccaggcccgcaccgttcgccccggggctcccatggcccccgacctccagtctccagcaacgatggatccccacagaccaggcagggggcgaagggcgcacacccacctcccgggagtcagtgggaataaccccgggcgctcccaggatacgtcccacacccggagccgcacgggcccatccccgccaggtctgggcaggcagccggagcccgggaccccgcctcccccgcacctagggtcccggccgagctcgaccgctgaggtcccgttcccactcccactcccagc

SEQ ID NO: 135869 - DNA, 643 bp, Homo Sapiens
tttttaaagggtagaagtttaattgactcacacttccacatggttagggaagccacaggaaacttacaattatggtggatggggaaacaaacatgtccttcttcacatggtggcaggagagagaagaatgagtacccagtgaagcaggaagccccttataaagccatcaggtctcatgagaactaactcactatcatgagaacaggatggggaaaactgctctgattatttaattattttcacctggtccctcccataacacgtggggataataggaaccataactcaagatgagatttgggtggggacacagccaaaccatatcactatactatgcaaattctcctcttctagttattgttgtatttcaaagacctcagaaagtctatgggttggaaggtgtgtcattttgttttcctttttaaggtaaatcaaacagctactgaggcactatttacctgaaatggagcagcctttgcatgcagtctcaacttcaaagttaacaaagaaatataaattttaaaagccctcaaagatggatatttaactattaaataaacatgtttaatagttatcatgggggaaaattcacattatgtattatatgtgtaatacataaacacacacactatatataatttcc

SEQ ID NO: 135870 - DNA, 411 bp, Homo Sapiens
ttttaaaaacaacccagctttattgaaatataattcacacaccatacaactcacccatgtaaagtgtacaaatcagtggtttttagtatattcacagatatgtgcaaccacagtcaaatttagatcatttttatcacctcaaaaagaaatcctgtaccttttacactcatcctcatatctccccaacttccttctagtcctaagcaaccactaatctactttctacctctatagatttgcctagtatggaaatttcatataaatggaatatgactaccatatgttgtcttttgtgactggcttctttcacttagcatggtattttcaatgttcatttacaatatagcatgcattagtatttcattcaccacccccaactctttgtttttttgagactgggtctcactccat

SEQ ID NO: 135871 - DNA, 837 bp, Homo Sapiens
  misc_feature (730)..(786): n is a, c, g, or t
ttaaatcttttacatgtattttatttctctgacatgaaagcagtagctggaaggaaagttttgtttcaaattcttgtaaatccattattactggatgagaaccgcatttgttttgcttctcccaccttaataaccttaggccataggatctgaagacgtagtctgcatctgactatcaagaattcttcacctgcaaatcatccttgatggtaggactaaacagagagcgttaaattcagtgtcaggacttaagattgacaggattcgttgtattatttctaagaacaacgtgtaacttctcctgattactattcaattgcaacacagcagtagaaaccagttgcacagtttatggtagcaaataacacgcattgtgttcattttggagcctttctcttttctttgattccactgaggcaggatgggaactctccattcaggaacagtttagttccagcttgctgaacacactgttgctttccatgactggtcaatgcaggagtacagaggccttgttccaatttgggaaatcttcgatgagtttttttagcgccagagctccccacgagtgaggctgaagcttctgttctgcatcccagttcagctttctccatagcccagtcgtgatttttcttactccaccatagatgtttttttcagataaacaatcctcaatccaccttcggtatgcaaatttccatctcagtgtctgtctactgggggaacgcannnnnnnnnnnnnnnnnnnnnnnnnnnnnnnnnnnnnnnnnnnnnnnnnnnnnnnnncttgttgcttcctcaaatggcagaaggacaaaagggacaaatgctcgttcc

SEQ ID NO: 135872 - DNA, 679 bp, Homo Sapiens
ggccgctctggtctcagccctgccgggccatggtcaccgtgcccagccaggtgctcttcaccctctttctgctcacccatgcctacccggaaagccagctacagctgggtataaaggaagagaatactggccctgggtgaggtgtggcattagtggcaccttctgggctcctgggcaggggtggggagtggctttcttgagcagctgggatcattcattgactgatttttggataaatgaggtgttagtggaccttgattcggaagattgtgaaagaggataatgggaaggcctggcaccccacggtcctcagatgtcagtgtttgccagccccgcagaaagggcaaggtgggcgagagggccttccattacccagcgagggctgcgcctgagccccgcgagttcccctggcttggattagggggagccaaaagtgttctcactctcaccaccaagtgctttgtatgcctgtggcaacacctttcctgttccagtgaattagggaagtctaggtgattggaggctcttctgacagacctgaagcgggtggttgtgttctcagggtgccctgtgtggtcggggtgacgttggtctgtggaccatccctggtccgtcttcccatttgtgctgggtccttcccaggtgcttcccagctggcattactttggggtgtccgcct

SEQ ID NO: 135873 - DNA, 751 bp, Homo Sapiens
tttcagaaactgatttaatgaaaaaatactatcaattcaacttgtgtacaactgtataagagcttacagaattatctcatctcagtgttcttttgtgaaagtaatagaaatccataattcagagatccattttaagaatcagtaactgataatatgttttatcacatttctgacatgttgtgaattttctagaacaatatacatgaattaatttgcatcaggctttcccatattatctacatttatacagtacctccctagtgggagtttcaacatgagattgaagtttcacacataagggagtatcacatgagcatttgttaaaatggaaaacattgctatatctcacttttataggatttctatccagtctgcattctcacatattagtatgtgggccaactgaaggctttttcacaatgtctatatttaagaagtcgctttccagtgtgagtttgttcatggtttccaagtaaactaagacaaataaaggtttttctacattttttacatttatagggttttccacattctttacatttttaaggttataaattctttacatttatagggcatatgaaaattctttacacttcatatgccttctcatggtccttaaaaggtcatacgaccattgaaggttttcccacactgcctacattcgcagggtttcctgtccagtatgaatgcttcctcatattcacatgtaaataactgaaggtattcccatgtcccatagggtttctatgaa

SEQ ID NO: 135874 - DNA, 1211 bp, Homo Sapiens
  misc_feature (663)..(663): n is a, c, g, or t
acatcaaaaaggaaatatttttgacttgcttttcttctgtaaatcctcccatctcactaatatttacaacaatccagagtagcgtttatgagacactgaaaaagacagggaggaaatcctttttcaagatatgaagtcagaacctgaatgtagacatcggacagagaagtcctcaaccacaaacctgtcctccagctctagagagagtaaggctgtatttccaaccttgagatttttcattacattttcccctttttgggtgttaaattctttccaagaatgctgtacttgtaaaaatgattttattctagctacaaaacatttcatttaagaaaaccgcattttatatccttgtgtgaaatgctcccaaaagccatcaagatatggagacaacagattttaaaaacataaatctaatcatatgggcttgaaacagtatgaacatttaacagagtgacacgatatcattattatatttgtttgtcatgagatgaaaggcctggaggcagatggtgattaatcataattcctgagcttctacagaaattttaaaatgaaattactaactgcttaaaattatgaattcttcaagaacgccccttctgtttcattgatgtctttcaacccgtctatctccttaaagaatctcaggcagaaaaaaanaaagtggggggcttcctttaagctactgaaaattgggatctgatggaatcttcccgtaattcccgatgttttccaaggttactttcttcttgctgggttcgcctctcaatggttattctgtatttcttcctgaaaaagtagaaggccattagcaagccagctcctagtaaagcccccacgacaattcctgtcactgccgattcttctaggccacctgatgatttgcagggagagctgtttgtatgctctacaattcggttttcatctattctcagttttaaagggccccaaggatatttgacattcggccgcatttcaaaacgaccttcttttccaaaataatcaccaataacctcctgggtgcccgcctccacatcagtcatggcaatcacagagaaatccccatatcggtctccgttggcatctatggacacctgcccggcgataccttcaaatgttctgttccaagtctgctgtataattttccctccatcctttttgctgtaaccagctctgagtacttcatgtagagccaagacgtagaggag

SEQ ID NO: 135875 - DNA, 1067 bp, Homo Sapiens
tgatgataatatttttattttaacaactataaaggatgtaatctgcctctaaaaattccatctgtcttcctggagaaataatgaaacctaagtagaccactacatatatgtaagatgttatttaattcctagcctaatcttgaccctgactaacaggagcatacatctattaaaaatatttatgaatatttggttttacactagtaacaatctatctcagttgcttatgagactctcatgcctaggaacagcacattcatgtatttaaactttcaaacagaattgtgtcacttagagtgatcaacatgcttattattcattatttacagcattcttcagtatacctgttccttcacaaaagggctatgaattgactttctatctttaaatattgaagaatagggctatttttaataaaactctaagtcagaggtagatggagaaactgccaagaaaaggaatttgtgactcctgatctcccatattcaattatgagaaaataaaaggtaagagatcatatactatcaaatactagtccctggagagactgggtgaggagttgtcttcaacatacttcagcattcttcagatcaagctcttcctccttccatttgaagtccggaagtactaaaaggttcctggccatcggaggaactctggtctgtttctcttacataaaatgtaagctgagttggtttcaaagactttgaagccttggtttctggaggttttctaggtagacacttaaccctttttaaggagaatttttcattgatttcccttttctacgggggtgctgtccaaagaaatctggatgtactgcaaaatagaaaggcctcaaggcattgactgcttcagctcccgataaagctcttgaaaagggaaaccagtgtggaaatatcttctctagacataacctcctcataggtctcaggtggcaaaacatttctgaatatatatgtacgtcaacttcgaggcatccattaattgagttctggcaagggtccgacgcgagggctttgtccgactagttccacctcccacccagtacaccagaagggaggacg

SEQ ID NO: 135876 - DNA, 797 bp, Homo Sapiens
attaacgggattaaactaggcctgataggtatttcttttcctggaaaatttgggttttaattttaaaaggggaactacactttttattaataaaaaaatttttttgccatccccaataaatcagggtcataaacacaagctgcaaatacagtttagttagataaaaacttttacatacgtgagagtgtttcccactctcgagacttgttcaaggtcttcatcagggtcctgaatcccagtaaaggagtaataagacttgtcccatttgatgggcctgtcaggcatccttttagcttctttgagaggctgggtatgcatattagtattcaagctttggatatgttcaacagataaacggaagtactaaaaggttcctggccatcggaggaactctggtctgtttctcttacataaaatgtaagctgagttggtttcaaagacttgaagcctggtttctggaggttttctaggtagacacttaaccttttaagagaattttcattgatttccctttctacggggtgctgtccaaagaaatctggatgtactgcaaaatagaaaggcctcaaggcattgactgcttcagctcccgataaagctcttgaaaagggaaaccagtgtggaaatatcttctctagacataacctcctcataggtctcaggtggcaaaacatttctgaatatatatgtacgtcaacttcgaggcatccattaattgagttctggcaagggtccgacgcgagggctttgtccgactagttccacctcccacccagtacaccaggagggaggacccc

SEQ ID NO: 135877 - DNA, 588 bp, Homo Sapiens
gtgatgtcgtcaggaataatgacaatgaaagagaagttgttcatgtgtagtacagatgtatttttttcccctaatattttcagtctgaggttggttgaatccatggatgtaaaacccatggatatgaaggactgactgtattttctaatgttaaaatatattgactgtcttaactacatctaccataagtcatttttcatatcagtttgtattcctggagcacacattaactgatgttgtaggggagtggtccagcagcatgcatcataaggaaaaatcactagggcattgaaaactcttccatgtatcatccctttctacggggtgctgtccaaagaaatctggatgtactgcaaaatagaaaggcctcaaggcattgactgcttcagctcccgataaagctcttgaaaagggaaaccagtgtggaaatatcttctctagacataacctcctcataggtctcaggtggcaaaacatttctgaatatatatgtacgtcaacttcgaggcatccattaattgagttctggcaagggtccgacgcgagggctttgtccgactagttccacctcccacccagtacaccacc

SEQ ID NO: 135878 - DNA, 772 bp, Homo Sapiens
tgcataaataaaatatatcaatttatttccttttttgtgtcaaatatagagatcaaaactggcaatagctacttgtgttttttaattttgttctttagtctttaggtcctttaggtattttcccctaaagtttagagaaaaaacaatgtacttcttctgtgaaaaagaaagtatagtgtctgtaagttccatacaataatccttcatcaatcgcacagtttacatccctgaaaatggactgaccaaagtcagcaaaatcaaagatcatacaagacagagaatttggggaaaagtatttttaaacataaacatttccagaaagtatccacttctaaaacacatctatttctcctggtaagctttctctagaatcaccttctctgagtttattcaggaaatagccatgtgaagttgtcatctactagggaacggtcaaccaaaattttatagtatgtagacaacacttcttagtaaaaatattaacctagaccttgttggatttaaatggaatgtgttttgaagttatagctccccttacttcatttgatcaagacttcaaaagtacttctgtaccttcctggatttttttacacatcataacaggggttatgagtacccttcctaagcctagcattccatcaacacatcaataggtggattgaattgtagacagttagcatctccaacacctctcccaaagggctgtcaactacatttacacaaagaggaaggattaacattgataaattaatcagtttagtcgttctaaagt

SEQ ID NO: 135879 - DNA, 379 bp, Homo Sapiens
aaacggattcattttatttccaaccacacatccaagtacagtagttgagatgactggcctgtcaggcaacctgtcttccaaccaacaatcatcataaagttcctgctacgtgccaggcacaatgtggcactcttacactcttgagagcaagagtaaccagaacaattatggttcctgccatcatgaagtttacagtctagtgaagaacccagacatcagatacttataaatagataattaaatgattacagttctttgaagtggtttggaggacaatcacagtttgctgtatggactaaatttaaaccagggaccattgaaaagggctccagaggaagtgacatttaaggtgagactgaagtttacattgggagggttt

SEQ ID NO: 135880 - DNA, 734 bp, Homo Sapiens
ttagtagcttaaaacaataataaacatttattatctcagtttctcttgatgaggaattggggagtggcttagctggtgttctggcttagggtttctcatgaggttacagtcaaaatgtcaagtagggatgcagtcatttgaaggcttgactggggccgtatgatctgcatctaagatggcacgctcacatggccagcaagatggtgctggctactggcaggaggcctcagttccttgccatgtggacctctccatggacctccctgagtagcttcatgacatggcagctgacttctcccagaatgagtggttcaagagagcagggaggaggtcacaatgtctcttatgactatattagatccacagggctgctgtaacaaagtaccacaagcaagataacttaacagaaatttactctttcacagttctgggggccagaagtctgaaaccacattgtcagcagggtcagaacggtggcacatggaaggtgctcattggtgaaacaatgagtgggaaagaataaatcattccttgcctcttccaacttctgacggccgcagatgtttcttggcttgtggctgtatcattccaatctctgtctccatcttcacacggccttctcccttgtgtctgtctactctttggctctctctccttatgagaacaccagtcattggatgtagggcccactctaagcatgaccagaagagcctcggggtcagctgagctttcag
